United States Patent Application Publication US 2011/0182862 A1 - sequence listing, part 13

SEQ ID NO: 18097 - protein, 516 aa, Muscodor strobelii
  misc_feature: SGI Peptide ID NO. 566058
  misc_feature (382)..(510): NCBI GI: 239607768 Blast Desc: conserved [Ajellomyces dermatitidis ER-3]
  misc_feature (382)..(510): NCBI GI: 261198034 Blast Desc: conserved [Ajellomyces dermatitidis SLH14081] gi|239595382|gb|EEQ77963.1| conserved [Ajellomyces dermatitidis SLH14081]
  misc_feature (394)..(507): NCBI GI: 154283611 Blast Desc: [Ajellomyces capsulatus NAm1] gi|150410781|gb|EDN06169.1| [Ajellomyces capsulatus NAm1]
  misc_feature (392)..(504): NCBI GI: 115491157 Blast Desc: conserved [Aspergillus terreus NIH2624] gi|114197066|gb|EAU38766.1| conserved [Aspergillus terreus NIH2624]
  misc_feature (394)..(507): NCBI GI: 240275541 Blast Desc: conserved [Ajellomyces capsulatus H143]
  misc_feature (402)..(507): NCBI GI: 238483143 Blast Desc: conserved [Aspergillus flavus NRRL3357] gi|220700860|gb|EED57198.1| conserved [Aspergillus flavus NRRL3357]
  misc_feature (402)..(507): NCBI GI: 121719817 Blast Desc: conserved [Aspergillus clavatus NRRL 1] gi|119404819|gb|EAW15181.1| conserved [Aspergillus clavatus NRRL 1]
  misc_feature (401)..(507): NCBI GI: 226278160 Blast Desc: conserved [Paracoccidioides brasiliensis Pb01]
  misc_feature (397)..(516): NCBI GI: 171685420 Blast Desc: protein product [Podospora anserina] gi|170942671|emb|CAP68323.1| protein product [Podospora anserina]
  misc_feature (399)..(507): NCBI GI: 145253134 Blast Desc: An16g07810 [Aspergillus niger] gi|134083639|emb|CAK47031.1| [Aspergillus niger]
MRAYQSVRPSFALPFYGYGGQSESHFPRYNQKDLWSLFHQRQLANTLEFDGVPLWMWKMAGIGQYQQCDNGSDEAYSELIPDLFAESHSTLTMGMTNIGSQTTGPAVSAVNSGREVIPNHTQYNNKEDPGNEQMFIHPATNAYTRDLVSNFDYPQFSYSSYAATDLSDNNSSFVTQHGLPSVDPYSSIYGVPDPMSYTHESVNTLNGSFSSSLGTGVTSERFASMTLGSNVPQRSTPPFDLHSGHVSSGPGVEGHSWSANYSATISPKMLRLNPSPTPPSSSESVQTSILHTGFDSDTGATVWNHENARNTLPTKRSTQSSRKELPSKPSKPRRRLPSLGRSSSSNSKIPLDAHRHRKSQSPANEVILPPLKPTAGEGIAVRAERAPESAFSGFGDSERQAKNQFLIDSKRKGLTYREIKRIGDFPEAESTLRGRYRTLTKNKEHRVRKPEWQEKDIRLLQRAVRKLAGNDSTSAKVPWKKVAAYISEHGGSYHFGNATCRKKWDDLVEESAEALG

SEQ ID NO: 18098 - DNA, 2754 bp, Muscodor strobelii
  misc_feature: SGI cDNA ID NO. 566059
  misc_feature: Encodes the peptide sequence at SEQ ID NO 18099
atgggtctatttcagatcctagttgccgcccttctggcgttccagctggtcgacccagcccttgccacctcctatggtagcagtctgtccggccgagaggattccaaagcgacctcctattggttcggaaacatcacccgccagggaaaggctgtctacgctcaggacggttacacggtattcagaaatgtgaaggactatggtgctgtaggcaacggccttgtagatgacagtgatgccatcaacacagcagccttggatggcggacgatgcttcatgagctgcgattctgagacagcacgacctgctattgtctactttcctccaggaacgtatcttgtcaataatcgcattgcccagccctactatactcagttcgttggagacgctctggatatgcctactctcaaagccgctgccatgttcaaggacacggcagtcatcgatgccaacctctattacaatgagaacataacttattggcagaaccagaacaacttcttccgtcaagtacgaaacttcatcatcgacttgacggccatgccgccgtcgttaggcgccggcatccattggcaggttgcgcaagggacgagcctacagaatatcgttttcaacatgaacccagacacaagctccaacaatgtgcagaagggtgtcttcattgaaaatggctctggaggatttatggctaacctgacgttcaacggcggaggcgttggcatggacgtcggtagccagcaattcaccacccgggacttgaccttcaacaattgcaacgccgctattcacatgatttgggactgggcctgggtcatgcaaggactaaagattaatggcggccaaattggtatcaacatgacgggctacagctcagactccgacaacgttggctctctgatcgttctagacagccagatgtccaatgtacaagtgggcatcaccaccctttacgagcccgattctctcgtcagcaacggtacactcattttgcataatgtagacatgagtgacaacgtccccacggccattcagcacttcaagaagggaacaactcttcttgaaggaaacacaaagatcgctggcttcgtccaaggacgggtgccggttagtggcaagagtcaaggcattcaaagctctcaagagcaaatcgagataccagctggtcttctagatggcgacgggaatgttttcacccgcaccaagccccaatacgaacacgttgggctaaagaacttcgtaagcgtcaaagcccaaggcgctatgggagatgggaagacagatgacaccgctgcgatccagaagattctcagcagcgccactaaggatcagattgtgtatttcgaccatggcgcctatttaatcagcgatacaattaaggttcccaagaacatcaagatcaccggtgagatgtggccgcttctcatggccactggccccaagttcgcggatgaaacgaaccctaaaccggtttttgaggtgggtaatgctggtgaggaaggcgcggtcgaaatgtcggacttgatcatcgaaacacagggccctgccgccggagcgattctcatgcagtggaacttgaagggttcaagcaacggagccgctggaatgtgggatgttcatttccgagtcggtggtactgctgggactaagctccagtccgatacctgtccttacgaccccaactctactacgacagtcaaaccggaatgccagggagctttcatgctactgcacctcacacagactgcttcggcttacctcgagaactgttggttctgggtcgcagatcacgaactggatattaaggggtacgagaaagtcaacatttggaacggtcgtggggtcctgatcgaggctaagaaccccgtttggctctggggaacggcttcggagcacagcgttctatacaactatcagatcgcaaatgcgcagaacacttttatcgcgatggctcagaccgaaacggcgtacatgcaaggaaacccggacgcgacccaaggtaccacgtatgatgcaggattttctgatcctgatttcgcggccatgtgcgatgtctcgcagcaaccaaaatgcgcccgcacgctgggcatgaggattacaaactcatcagacgtcgtcatgtttggggctggcatgtacagcttctttgacaactacaacgacacctgcagtggcggcgctcagaactgtcaagaccacatgatcagcattgagcagtctaagaatatccacttgtacggtatcagcaccaaggcttcgatcagcatgctcgatatcgatggagagtcgatcgctctagacaaagactaccgtggtacatactgcgccgccattgcaagagtggacgtgaaggggccaggcagcccagccagctcaagcactgtctcatcctctgctacgactgctgggaatgctacaacacagatctctagcacatcggttgtgtatgagacatcttcgatgccttcgtctatgccctcttcggtgccctcttcggtgccttcgtccatgggctcttccatgggctcttccatgccctcttcgattcccgctgcgacgccgtccacgatgagccctggatcgaaatctgcatcacctacaagtggccacgatggacccacttccagttcgtcccagatttcggccacgacgggatcaagccagccgtcgagcggcggaccagtggcctctgcagtcacggtcacggtcacggagacggttacggcgaccggggcatgttcctcggcaccagcctag

SEQ ID NO: 18099 - protein, 917 aa, Muscodor strobelii
  misc_feature: SGI Peptide ID NO. 566059
  misc_feature (37)..(779): NCBI GI: 46124477 Blast Desc: FG06616.1 [Gibberella zeae PH-1]
  misc_feature (1)..(778): NCBI GI: 256726362 Blast Desc: glycoside hydrolase family 55 [Nectria haematococca mpVI 77-13-4]
  misc_feature (38)..(781): NCBI GI: 261354013 Blast Desc: glucan 1,3-beta-glucosidase [Verticillium albo-atrum VaMs.102]
  misc_feature (1)..(778): NCBI GI: 164423919 Blast Desc: NCU07523 [Neurospora crassa OR74A] gi|157070287|gb|EAA29800.2| NCU07523 [Neurospora crassa OR74A]
  misc_feature (1)..(778): NCBI GI: 171685428 Blast Desc: protein product [Podospora anserina] gi|170942675|emb|CAP68327.1| protein product [Podospora anserina]
  misc_feature (1)..(774): NCBI GI: 8886891 Blast Desc: AF253421_1 glucan 1,3-beta-glucosidase GLUC78 precursor [Trichoderma atroviride]
  misc_feature (38)..(782): NCBI GI: 16588810 Blast Desc: AF317733_1 1,3-beta glucanase [Blumeria graminis]
  misc_feature (40)..(779): NCBI GI: 145611604 Blast Desc: MGG_00263 [Magnaporthe grisea 70-15] gi|145018868|gb|EDK03147.1| MGG_00263 [Magnaporthe grisea 70-15]
  misc_feature (3)..(786): NCBI GI: 156051972 Blast Desc: SS1G_07393 [Sclerotinia sclerotiorum 1980] gi|154705171|gb|EDO04910.1| SS1G_07393 [Sclerotinia sclerotiorum 1980]
  misc_feature (35)..(786): NCBI GI: 154309698 Blast Desc: BC1G_07319 [Botryotinia fuckeliana B05.10] gi|150851780|gb|EDN26973.1| BC1G_07319 [Botryotinia fuckeliana B05.10]
  misc_feature (40)..(777): SWISSPROT Homolog: EC 3.2.1.58 Glucan 1,3-beta-glucosidase
MGLFQILVAALLAFQLVDPALATSYGSSLSGREDSKATSYWFGNITRQGKAVYAQDGYTVFRNVKDYGAVGNGLVDDSDAINTAALDGGRCFMSCDSETARPAIVYFPPGTYLVNNRIAQPYYTQFVGDALDMPTLKAAAMFKDTAVIDANLYYNENITYWQNQNNFFRQVRNFIIDLTAMPPSLGAGIHWQVAQGTSLQNIVFNMNPDTSSNNVQKGVFIENGSGGFMANLTFNGGGVGMDVGSQQFTTRDLTFNNCNAAIHMIWDWAWVMQGLKINGGQIGINMTGYSSDSDNVGSLIVLDSQMSNVQVGITTLYEPDSLVSNGTLILHNVDMSDNVPTAIQHFKKGTTLLEGNTKIAGFVQGRVPVSGKSQGIQSSQEQIEIPAGLLDGDGNVFTRTKPQYEHVGLKNFVSVKAQGAMGDGKTDDTAAIQKILSSATKDQIVYFDHGAYLISDTIKVPKNIKITGEMWPLLMATGPKFADETNPKPVFEVGNAGEEGAVEMSDLIIETQGPAAGAILMQWNLKGSSNGAAGMWDVHFRVGGTAGTKLQSDTCPYDPNSTTTVKPECQGAFMLLHLTQTASAYLENCWFWVADHELDIKGYEKVNIWNGRGVLIEAKNPVWLWGTASEHSVLYNYQIANAQNTFIAMAQTETAYMQGNPDATQGTTYDAGFSDPDFAAMCDVSQQPKCARTLGMRITNSSDVVMFGAGMYSFFDNYNDTCSGGAQNCQDHMISIEQSKNIHLYGISTKASISMLDIDGESIALDKDYRGTYCAAIARVDVKGPGSPASSSTVSSSATTAGNATTQISSTSVVYETSSMPSSMPSSVPSSVPSSMGSSMGSSMPSSIPAATPSTMSPGSKSASPTSGHDGPTSSSSQISATTGSSQPSSGGPVASAVTVTVTETVTATGACSSAPA

SEQ ID NO: 18100 - DNA, 3603 bp, Muscodor strobelii
  misc_feature: SGI EST ID NO. CUFF.42694.0
  misc_feature: Variant of the nucleotide sequence at SEQ ID NO 18098
cgcttctcatggccactggccccaagttcgcggatgaaacgaaccctaaaccggtttttgaggtgggtaatgctggtgaggaaggcgcggtcgaaatgtcggacttgatcatcgaaacacagggccctgccgccggagcgattctcatgcagtggaacttgaagggttcaagcaacggagccgctggaatgtgggatgttcatttccgagtcggtggtactgctgggactaagctccagtccgatacctgtccttacgaccccaactctactacgacagtcaaaccggaatgccagggagctttcatgctactgcacctcacacagactgcttcggcttacctcgagaactgttggttctgggtcgcagatcacgaactggatattaaggggtacgagaaagtcaacatttggaacggtcgtggggtcctgatcgaggctaagaaccccgtttggctctggggaacggcttcggagcacagcgttctatacaactatcagatcgcaaatgcgcagaacacttttatcgcgatggctcagaccgaaacggcgtacatgcaaggaaacccggacgcgacccaaggtaccacgtatgatgcaggattttctgatcctgatttcgcggccatgtgcgatgtctcgcagcaaccaaaatgcgcccgcacgctgggcatgaggattacaaactcatcagacgtcgtcatgtttggggctggcatgtacagcttctttgacaactacaacgacacctgcagtggcggcgctcagaactgtcaagaccacatgatcagcattgagcagtctaagaatatccacttgtacggtatcagcaccaaggcttcgatcagcatgctcgatatcgatggagagtcgatcgctctagacaaagactaccgtggtacatactgcgccgccattgcaagagtggacgtgaaggggccaggcagcccagccagctcaagcactgtctcatcctctgctacgactgctgggaatgctacaacacagatctctagcacatcggttgtgtatgagacatcttcgatgccttcgtctatgccctcttcggtgccctcttcggtgccttcgtccatgggctcttccatgggctcttccatgccctcttcgattcccgctgcgacgccgtccacgatgagccctggatcgaaatctgcatcacctacaagtggccacgatggacccacttccagttcgtcccagatttcggccacgacgggatcaagccagccgtcgagcggcggaccagtggcctctgcagtcacggtcacggtcacggagacggttacggcgaccggggcatgttcctcggcaccagcctagatggatagagcatggggcaggcaaaagacagcaggttctcaacctgggtatttgcaatagctgtatctattttgtttccaagatgggccataggggccgtcattggaaactttcactttcagcatcacaggcaaaggggcttgtgtagcttacgacagagttatgattgcgatcgattctagcttcggttcttgagaacgcttggctgtacctaagactcaataggtaatacaaggaatcaagtaagattgccgaaatttctcccgaatcttccatgttctaaatcaatgccatgcgactgtaaaaatgaagtttcggtgtaataagtgacagtgtctctaaaatggttcttcctaaggtataagttgggtgcttttcgtaagttgttgcattgtgtgcacctgtgaggcgtcgctaaggccctggggttacgaggggtcgagatagctacagggtagctgccgaggtgcctgaccttgtccttaggtgaggtagctaggtgtagtggggtttgtggattgtatggcggacagtggtggcgggaccaacgtcatcggtcaggtttctttgagcaaggcgagcaggaacgggatgactgcgatgccacggaagctagaacgtgttggaatcgacgagttgcgaccatcaccattttgtactcgcccagccctctacccatctgcctgctcattcgggtctctaatgctccgccttgtgcagtctttttttacgactcctttacttcatccttgacttcatcgtgcccatgttttttgcgcctccttcgccatgacaggagagaatacgccctcgctaaaatcccgccgagcgaatccgccagacatggccatcccgaacggcaccgcctcttcttcgtctttttccaccaccacttcgaccaccccaaagccacagcgaggctcgccctttctaccctcgcccctcgaactgattctcctcgccctgtaccccatcatcctcctcttcggcaccctcttctcggtcttgtcccccgagacccgcgcagcgcccttcgacgccctgagacagtcccacgtgccctcctcggctccgtcctacttcgcgcgtaaagacaacttcttcaacgtgctgttcgtcaagcgcggatgggcctggatcaccgtcgcattctttgtcttcctcgccacgcaccctacctttcgcctaggcgcaaccaagaccagggctgtcaaggctgccacgagatgggccctggtcacgacctggtggatattcgtcactcagtggttcttcggcccgcctctcatcgaccgcggctttcgatataccggcgggagatgcgaagacgcggctgatgctgttttcgaaggtacggccaacgagaaggagcttttcactgctgccgcctgtcgtgctgctgggagaaaatggcgcggtggtcatgatatctcgggccatgtctttttgctcgtccttgggagtgccttccttgtgcaagaggtcgtttgggtcgttgtgagggctggtgcgcaatggatgggatctgcagatgatcgcgctgtggtcatgagcgatggcgctattaagagcgctggtgtcgaggctgaacatgcaaccaaagatcatgagaggaatttgggccttgggggaaagtttgcgttgggcattgttgggttgagcttgtggatgttgctcatgaccgctatctacttccatacgtggtttgagaagtttacgggccttcttgtcgcgacgatgggtctctatggcgtctacttcctcccgagatggataccagccttgagaaacgtcgtgggattgccagggatataaaatcaggatacgaaaggcagaacgacggttccaaacaggatatcataatctggtggacatattgcatataggcgtatggcattggtgtatagcatttgaaaataattggtgaactagactactcttctgactgtgttttggtgtcggaattgagtttttctgtctgctgcagcattgtatctaagaattacaagaaaggatattcgaattgcgactcttgctattgtcacgatgtcaacagccacgagctcgtcccggaaacaaatcgggtaaaccccgtgtggaggcaacggctgatctactcaacttcaatcttcacatcattgtcaaggcatcgctcttctcttcctcatcattaaaaccacgtcgcgtgaggtcaattgagttccggaacctacaatagttcaaactcgtatggagcacaataaatacgatatgtcgatccatg

SEQ ID NO: 18101 - DNA, 1026 bp, Muscodor strobelii
  misc_feature: SGI cDNA ID NO. 566060
  misc_feature: Reduced expression when VOC is produced
  misc_feature: Encodes the peptide sequence at SEQ ID NO 18102
atgacaggagagaatacgccctcgctaaaatcccgccgagcgaatccgccagacatggccatcccgaacggcaccgcctcttcttcgtctttttccaccaccacttcgaccaccccaaagccacagcgaggctcgccctttctaccctcgcccctcgaactgattctcctcgccctgtaccccatcatcctcctcttcggcaccctcttctcggtcttgtcccccgagacccgcgcagcgcccttcgacgccctgagacagtcccacgtgccctcctcggctccgtcctacttcgcgcgtaaagacaacttcttcaacgtgctgttcgtcaagcgcggatgggcctggatcaccgtcgcattctttgtcttcctcgccacgcaccctacctttcgcctaggcgcaaccaagaccagggctgtcaaggctgccacgagatgggccctggtcacgacctggtggatattcgtcactcagtggttcttcggcccgcctctcatcgaccgcggctttcgatataccggcgggagatgcgaagacgcggctgatgctgttttcgaaggtacggccaacgagaaggagcttttcactgctgccgcctgtcgtgctgctgggagaaaatggcgcggtggtcatgatatctcgggccatgtctttttgctcgtccttgggagtgccttccttgtgcaagaggtcgtttgggtcgttgtgagggctggtgcgcaatggatgggatctgcagatgatcgcgctgtggtcatgagcgatggcgctattaagagcgctggtgtcgaggctgaacatgcaaccaaagatcatgagaggaatttgggccttgggggaaagtttgcgttgggcattgttgggttgagcttgtggatgttgctcatgaccgctatctacttccatacgtggtttgagaagtttacgggccttcttgtcgcgacgatgggtctctatggcgtctacttcctcccgagatggataccagccttgagaaacgtcgtgggattgccagggatataa

SEQ ID NO: 18102 - protein, 341 aa, Muscodor strobelii
  misc_feature: SGI Peptide ID NO. 566060
  misc_feature (34)..(341): NCBI GI: 256726363 Blast Desc: NECHADRAFT_6410 [Nectria haematococca mpVI 77-13-4]
  misc_feature (47)..(341): NCBI GI: 39975179 Blast Desc: MGG_00264 [Magnaporthe grisea 70-15] gi|145018866|gb|EDK03145.1| MGG_00264 [Magnaporthe grisea 70-15]
  misc_feature (43)..(341): NCBI GI: 156051990 Blast Desc: SS1G_07403 [Sclerotinia sclerotiorum 1980] gi|154705180|gb|EDO04919.1| SS1G_07403 [Sclerotinia sclerotiorum 1980]
  misc_feature (42)..(341): NCBI GI: 261354014 Blast Desc: conserved [Verticillium albo-atrum VaMs.102]
  misc_feature (47)..(308): NCBI GI: 46124473 Blast Desc: FG06614.1 [Gibberella zeae PH-1]
  misc_feature (14)..(341): NCBI GI: 164423921 Blast Desc: NCU11367 [Neurospora crassa OR74A] gi|157070288|gb|EDO65004.1| conserved [Neurospora crassa OR74A]
  misc_feature (26)..(327): NCBI GI: 189188528 Blast Desc: alpha-galactosidase [Pyrenophora tritici-repentis Pt-1C-BFP] gi|187972209|gb|EDU39708.1| alpha-galactosidase [Pyrenophora tritici-repentis Pt-1C-BFP]
  misc_feature (11)..(341): NCBI GI: 169622978 Blast Desc: SNOG_14715 [Phaeosphaeria nodorum SN15] gi|111056787|gb|EAT77907.1| SNOG_14715 [Phaeosphaeria nodorum SN15]
  misc_feature (39)..(341): NCBI GI: 119496615 Blast Desc: inositol phospholipid biosynthesis protein Scs3, [Neosartorya fischeri NRRL 181] gi|119413243|gb|EAW23184.1| inositol phospholipid biosynthesis protein Scs3, [Neosartorya
  misc_feature (57)..(341): NCBI GI: 70990976 Blast Desc: inositol phospholipid biosynthesis protein Scs3 [Aspergillus fumigatus Af293] gi|66847969|gb|EAL88299.1| inositol phospholipid biosynthesis protein Scs3, [Aspergillus fumigatus
  misc_feature: Useful for introducing or modulating the production of volatile compounds
MTGENTPSLKSRRANPPDMAIPNGTASSSSFSTTTSTTPKPQRGSPFLPSPLELILLALYPIILLFGTLFSVLSPETRAAPFDALRQSHVPSSAPSYFARKDNFFNVLFVKRGWAWITVAFFVFLATHPTFRLGATKTRAVKAATRWALVTTWWIFVTQWFFGPPLIDRGFRYTGGRCEDAADAVFEGTANEKELFTAAACRAAGRKWRGGHDISGHVFLLVLGSAFLVQEVVWVVVRAGAQWMGSADDRAVVMSDGAIKSAGVEAEHATKDHERNLGLGGKFALGIVGLSLWMLLMTAIYFHTWFEKFTGLLVATMGLYGVYFLPRWIPALRNVVGLPGI

SEQ ID NO: 18103 - DNA, 3603 bp, Muscodor strobelii; identical to SEQ ID NO: 18100
  misc_feature: SGI EST ID NO. CUFF.42694.0
  misc_feature: Variant of the nucleotide sequence at SEQ ID NO 18101

SEQ ID NO: 18104 - DNA, 945 bp, Muscodor strobelii
  misc_feature: SGI cDNA ID NO. 566061
  misc_feature: Encodes the peptide sequence at SEQ ID NO 18105
atgcgcaagggtaatgggactgtgatagatgctactgggtatggcgagaagtgcgtccagttcggacaggggagtgaagattgtctgtttttgaacatatttacgccgcatctcccggtttcgagtgagaaaaaggggctgcgacctgttatgttctggatacacggtggcggttatactaatggctttgggagcgacccgacttttgacggtggaaatcttgctgctagaagcgatgttgttgtgcatgcgacacgcgtactgaccacgctcctctacagtgtcacaattaactaccgtgtcggaagtttcgggtttctagcattggacgatgggatcactaacggtaattacggtttggccgaccaggtcactgctctggactgggttcggaagaacatccgcgactttggtggcgatccggatcgtataacaatatttggtcaatctgcaggtgcggctagtgtccgagccctcatggcatcgccaatgtcagttggtaaatttgccggcgcgattccgatgagcaatctcggtgggattcaatacggcacggcgtattcccggtatatgactatcgaggaagagatggattcagtgggacataatattctcgcctcgacgggctgcgcaaacgcaacatcggctgtgagctgtctacgttctgtctctgcttctacgttaagtttattgagctactcggcgatctcgctcgttgtggatggtacctatcttgtttccgaggaactgcaactcaatgggccgactctcccgatccatcttctaatggggatctgtcgtgatgatggggctgcgttgattggctacccggacacgacgaatcagtcgcaattcttgaattcactaggatttgaggtatgtgagacggtgttcgctgttgagaacccacagtcgcatctcaaggtagacacatgtaccttttag

SEQ ID NO: 18105 - protein, 314 aa, Muscodor strobelii
  misc_feature: SGI Peptide ID NO. 566061
  misc_feature (2)..(312): Pfam Id: PF00135 Pfam Desc: Carboxylesterase
  misc_feature (8)..(228): Pfam Id: PF00135 Pfam Desc: Carboxylesterase
  misc_feature (3)..(292): NCBI GI: 145614194 Blast Desc: MGG_08915 [Magnaporthe grisea 70-15] gi|145021141|gb|EDK05270.1| MGG_08915 [Magnaporthe grisea 70-15]
  misc_feature (1)..(277): NCBI GI: 255942643 Blast Desc: Pc18g02460 [Penicillium chrysogenum Wisconsin 54-1255] gi|211586823|emb|CAP94470.1| Pc18g02460 [Penicillium chrysogenum Wisconsin 54-1255]
  misc_feature (3)..(291): NCBI GI: 171686336 Blast Desc: protein product [Podospora anserina] gi|170943129|emb|CAP68782.1| protein product [Podospora anserina]
  misc_feature (4)..(290): NCBI GI: 115388677 Blast Desc: cholinesterase [Aspergillus terreus NIH2624] gi|114195928|gb|EAU37628.1| cholinesterase [Aspergillus terreus NIH2624]
  misc_feature (3)..(293): NCBI GI: 116207912 Blast Desc: CHGG_03249 [Chaetomium globosum CBS 148.51] gi|88183846|gb|EAQ91314.1| CHGG_03249 [Chaetomium globosum CBS 148.51]
  misc_feature (4)..(280): NCBI GI: 145247468 Blast Desc: An12g09310 [Aspergillus niger] gi|134080721|emb|CAK41361.1| protein product [Aspergillus niger]
  misc_feature (3)..(291): NCBI GI: 85086826 Blast Desc: NCU00292 [Neurospora crassa OR74A] gi|28918858|gb|EAA28527.1| conserved [Neurospora crassa OR74A]
  misc_feature (9)..(284): NCBI GI: 242219009 Blast Desc: candidate carboxylesterase from carbohydrate esterase family GH10 [Postia placenta Mad-698-R] gi|220725516|gb|EED79499.1| candidate carboxylesterase from GH10
  misc_feature (9)..(284): NCBI GI: 242214526 Blast Desc: candidate carboxylesterase from carbohydrate esterase family CE10 [Postia placenta Mad-698-R] gi|220727823|gb|EED81731.1| candidate carboxylesterase from CE10
  misc_feature (11)..(291): NCBI GI: 270358689 Blast Desc: AN12g09310 [Cryptococcus heveanensis]
  misc_feature (25)..(217): SWISSPROT Homolog: EC 3.1.1.1 Carboxylesterase
MRKGNGTVIDATGYGEKCVQFGQGSEDCLFLNIFTPHLPVSSEKKGLRPVMFWIHGGGYTNGFGSDPTFDGGNLAARSDVVVHATRVLTTLLYSVTINYRVGSFGFLALDDGITNGNYGLADQVTALDWVRKNIRDFGGDPDRITIFGQSAGAASVRALMASPMSVGKFAGAIPMSNLGGIQYGTAYSRYMTIEEEMDSVGHNILASTGCANATSAVSCLRSVSASTLSLLSYSAISLVVDGTYLVSEELQLNGPTLPIHLLMGICRDDGAALIGYPDTTNQSQFLNSLGFEVCETVFAVENPQSHLKVDTCTF

SEQ ID NO: 18106 - DNA, 284 bp, Muscodor strobelii
  misc_feature: SGI EST ID NO. CUFF.42688.0
  misc_feature: Variant of the nucleotide sequence at SEQ ID NO 18104
tgggatcactaacggtaattacggtttggccgaccaggtcactgctctggactgggttcggaagaacatccgcgactttggtggcgatccggatcgtataacaatatttggtcaatctgcaggtgcggctagtgtccgagccctcatggcatcgccaatgtcagttggtaaatttgccggcgcgattccgatgagcaatctcggtgggattcaatacggcacggcgtattcccggtatatgactatcgaggaagagatggattcagtgggacataatattctcg

SEQ ID NO: 18107 - DNA, 1347 bp, Muscodor strobelii
  misc_feature: SGI cDNA ID NO. 566062
  misc_feature: Encodes the peptide sequence at SEQ ID NO 18108
atgatatcaaaagatacggcattgctcatcatagcagttctcttgccgttcatctgcttcagtatcatcgtgatgatcgcgagcaacacaagcttcacgatcccagggcgttggtatggccagcacgagagtccagacgaccgcacatctcagatcatcgagtttgagatctgggctggctcggctggctcgccgactaccatggacaactccagcactagatctggtagtggcagcaacatttcgtctcacgccatgactacagacgaagagggcagtccattcaattattttgccttcgctggtccgacattcaccaacccgagtttggtccctctgcccctcgctctaggccaagagtcatccaagacgcctgaagcatcatcagagccaacccccgagccaacccctaacgcagccactacaatgactagccacaaggaggagacagactcgccgtgtaatggaaagggcaagggcaaggaagttgcgcccgaagcagccggccttggtgttgttgcacctgctctccctgatggtcccaacacatctacccattcccttcgcccgtttctctctcgcagttcgactgagaccagaagccgtccctcatcgttcgtcatcagagaatggccacccaaggtcagcggtaatgacgagcaatcacgtgcccgtcgtgcacagcagtggtatgaggtgccacccaaggaagtcatcgagcgtgctcgcaccgcccaggagcgagctgaatgccgccaagagctgcgcgatatcgaacgtgaacacagcccaaacctcaagatcacccccgctgatttcgagtcgcctcgccgtccacctcctgtcgtactccccaagcatggtaggggatactcagagccatctcgaccccttggcccgcgtgctcctcgcaactttattgcgcgtagcttccgcgacgcaggaaatggagctctttctcagcgtacagatgctagtacccaaacttccaccgaggcaggtgaaagcactagttctgctgctagccgtggctttcgccgattcggcatccccggcaaatcctgccttgcaccatctgacaccagatcatctatggaagccgtcgcaggctctgactccgtcgctcaactcggtcccgttgcatacagaaactcggttcaacccgtccgccgccaaaactcggtagcttatgcaaacacggctacttctatggaagctgttgcagactctggtactgttgcctgcctcggccctgcgccttccgagacgaaagactctatcactgctgtcgcagattctggaactgttggcagagtcgatgcttgtcatcataatggctacctctag

SEQ ID NO: 18108 - protein, 448 aa, Muscodor strobelii
  misc_feature: SGI Peptide ID NO. 566062
MISKDTALLIIAVLLPFICFSIIVMIASNTSFTIPGRWYGQHESPDDRTSQIIEFEIWAGSAGSPTTMDNSSTRSGSGSNISSHAMTTDEEGSPFNYFAFAGPTFTNPSLVPLPLALGQESSKTPEASSEPTPEPTPNAATTMTSHKEETDSPCNGKGKGKEVAPEAAGLGVVAPALPDGPNTSTHSLRPFLSRSSTETRSRPSSFVIREWPPKVSGNDEQSRARRAQQWYEVPPKEVIERARTAQERAECRQELRDIEREHSPNLKITPADFESPRRPPPVVLPKHGRGYSEPSRPLGPRAPRNFIARSFRDAGNGALSQRTDASTQTSTEAGESTSSAASRGFRRFGIPGKSCLAPSDTRSSMEAVAGSDSVAQLGPVAYRNSVQPVRRQNSVAYANTATSMEAVADSGTVACLGPAPSETKDSITAVADSGTVGRVDACHHNGYL

SEQ ID NO: 18109 - DNA, 2103 bp, Muscodor strobelii
  misc_feature: SGI EST ID NO. CUFF.42700.0
  misc_feature: Variant of the nucleotide sequence at SEQ ID NO 18107
cagcacgagagtccagacgaccgcacatctcagatcatcgagtttgagatctgggctggctcggctggctcgccgactaccatggacaactccagcactagatctggtagtggcagcaacatttcgtctcacgccatgactacagacgaagagggcagtccattcaattattttgccttcgctggtccggttagtactaaacattacccccccttctggcgtgcatcgagacttgctattttgaccctctgttgagactcagccaaagactcgacgaattgtcacagaatcccgtgcaagaagacgcattaatttttactcgtgaaatagacattcaccaacccgagtttggtccctctgcccctcgctctaggccaagagtcatccaagacgcctgaagcatcatcagagccaacccccgagccaacccctaacgcagccactacaatgactagccacaaggaggagacagactcgccgtgtaatggaaagggcaagggcaaggaagttgcgcccgaagcagccggccttggtgttgttgcacctgctctccctgatggtcccaacacatctacccattcccttcgcccgtttctctctcgcagttcgactgagaccagaagccgtccctcatcgttcgtcatcagagaatggccacccaaggtcagcggtaatgacgagcaatcacgtgcccgtcgtgcacagcagtggtatgaggtgccacccaaggaagtcatcgagcgtgctcgcaccgcccaggagcgagctgaatgccgccaagagctgcgcgatatcgttatcaaagcagcaggaaagactctctctgacgaagagattgaggctcgtgtcaagctttaggaacgtgaacacagcccaaacctcaagatcacccccgctgatttcgagtcgcctcgccgtccacctcctgtcgtactccccaagcatggtaggggatactcagagccatctcgaccccttggcccgcgtgctcctcgcaactttattgcgcgtagcttccgcgacgcaggaaatggagctctttctcagcgtacagatgctagtacccaaacttccaccgaggcaggtgaaagcactagttctgctgctagccgtggctttcgccgattcggcatccccggcaaatcctgccttgcaccatctgacaccagatcatctatggaagccgtcgcaggctctgactccgtcgctcaactcggtcccgttgcatacagaaactcggttcaacccgtccgccgccaaaactcggtagcttatgcaaacacggctacttctatggaagctgttgcagactctggtactgttgcctgcctcggccctgcgccttccgagacgaaagactctatcactgctgtcgcagattctggaactgttggcagagtcgatgcttgtcatcataatggctacctctagtcattaaatctcttccagttgcgccatcgtcactatggcacacttgggcgccgtttggagctttgaaaccgcaactgagctacattgttccccccttctcgtcagtacttttctatgtcacaaagtcgccaagttaccaggaggtagacatgctcttagagcttcgacatcaagatacgacctgacttctttcttttgcgccatcttcacccttgcccgacaatagtgttttgcttgccttatcatcgctgtggcgcgcttgggtgtcgcttggaagcttcgatgatgcaacgaaacgcacatttcgttcggcttcgcttgatacctgcacgtttcttgcaataacgtcgacgtggtacacttgggtacctttcaagctctcgacgctgcaaggtcacctcggaatggtttttcatttcgcgaattggtcgcgtctgtccgtttgcaagttttcgaggatgtcgactgtacttgggttgtcactcgacacttcgaccttcgccttccagatacaattggacctatctcttgcgcaactgtttcgtttttctttccaaaaatgcctgtcttcaacggaattgtcgcctacgcagaacaatgcagacaattatgctcctcggagccctgcccttacgacaaccggactcggcatcatgtgaaagcaagattggt

SEQ ID NO: 18110 - DNA, 3522 bp, Muscodor strobelii
  misc_feature: SGI cDNA ID NO. 566063
  misc_feature: Encodes the peptide sequence at SEQ ID NO 18111
atgctacagcatgcccgcggccgcgtaacatgcgcgccggcccatcttgtacgcctcagcggtcggcgcgcaagatgtcctcgccgccgcccgtcgcaaacgccatggacccaactacgataccagacatccgcatccgcatccgcatccgccgcggccacggcaaccaacaccaccacaaccactaccataaccactactaggacatcaccgccgaacacagccgatgtcttgcaaactcctccgagtactctccatcatgcgccctcgaccctggccattccatccgaagcacgcttcaacgagatcggtgtccaacacctcaccaaacatgtatacaaccagatcttccccagaggctctcagccgccacccaaagccctcatagatctctctatagatcaccttcagcggcacaatctccacggcaaaaataccgacaacacgcctcccgtcgcctttgatatcccccccttacaaggtcagacactggacgagcacttcttcaagcttggcaccgactgcgcggagccttttctaagccatgctaaaaactttgctgccttggccaatcctcctccgcggcccaagaaatgggttcggcagagcggctggaccaaatactacgccgatggcactcctcccgagtccgtcgctgcacccgacgaggacatgctgtgcttcgatgtcgaggtcatgtggaaggagagttcctacgccgtcatggcctgcgccatgagccccacggcctggtacgcttggctctcgccctggctattgggcgaatccaagacggacaagcatctcattcccctcggcgaccccgcccgcgaacgggtcatcgtaggccacaatatcggatacgaccgcgctagaatactggaagagtacaacttggagcaaacgagaaattctttcctcgacaccatgtcattgcacgtcgctgtgaatggcatgtgttctcagcaacggcccaagtggatgaagcacaagaaaagtcgggaactacgcgacaagatcgccaacgaaaccaacgacgtagatcttgcaaatctgctcgcaagcaattctttgcacgacgacgaagaggagctctgggttgagcgcagctcgattaattctctgcgcgacgtggctaaatttcatctcaacgtgaccatcgacaaggagatacgcaatgacttcggagaattggaccggaaaggcgttgtgaacaagctggaccaattgctggactactgcgccgcggacgttgctatcacacaccgcgtctacaagattgttctaccgcatttcctcgaggtgtgcccccatcccgtcagcttcgcggccttgcggcacctctcttctgtcattctcccagttaataggtcttgggacgcttatatcgcgaatgcggaagcaacatacaacaaattgtcagatgctgtcttagagcgactggtaggattgaccgaaaaggcacttaagatcaaagacgacgagtcgaaatggagcacggatccctggcttaagcaactcgattggtctggccaagccattaggatggtgaaggggaagaagaaagacgaccctccaaggcctgctgctcgccagaagaagcccggcatgccgcagtggtacaaagatctgtttccaaagaacgactcgcccctaaaccttactgtcaggacgcgcattgcgccactcctcctacgactagcctgggatgggtacccactgcattggtctgataagtatggttggaccttccgggtgcccttggcagatgcgccgaagtacaactcgacacaactagtgatctgtgacttatctgacgaacctattgaagccctgcagaatgacgccgacgcgatctacatcaaactaccacataaggatggccctacagccagatgcgccaatcccttagctaagaactatctcacatatttcgagaagggcacgctttcgtccgagtacacctatgctaaagaggcacttgacatgaacgcatcatgttcctattggattagtgctcgcgacaggatcatgtcgcaaatggtcgtgtacgactcggataaagcccgtaaatctcctaagaaggaagagaacggctacattctgccccaaatcattccgatgggcacgatcactcgaagagctgttgaaaatacctggctaactgcaagtaatgcaaagaagaacagagttggttccgaattgaaggcgatggtcaaggcgccccctgggtactcatttgttggtgccgatgtggattccgaggagctttggattgctagtgttattggcgacgccacgttcaagctccatggcggcaatgctattggcttcatgacgcttgaaggcaccaaagctgcaggaactgacctgcattctcgcacagcctccatcctaggtatcacccgtaacgatgccaaagtgtttaactacggccgaatttacggtgccggactcaaatttgcggctacactactccgacaattcaatccaagtctttccgaacaggagaccatggagactgccggcaagttgtatgctacaaccaaaggcacgaagacgaatcgcaaatcgctacataaacgacctttctggagaggcggtaccgagtcctttgtatttaataagctcgaggagttcgcggatcaagagcgaccacgaacaccggtcctcggcgctggtattacggaagcactcatgggcagatatatcagcaagggcgcctacctcacctcccgtataaactgggcaatccaatcctctggtgtcgattatcttcacctcctcgtcgtgtcgatggattaccttataagacgcttcaatatccaagctcgcttagctattaccgttcatgacgaaatccggtatttggtgaaggacgaagacaagtacagagctgctatggcactccaaatatcaaacctatggactcgcgccatgtttgcgcaacaagtcggcatcgacgatctgccacaagcgtgtgcttacttttccgctgttgacatcgatcacgtactccgcaaggaagttgacatggattgtctaacgcccagccattcaacacccattcctgtcggcgaaagcttggacatcgcacaacttctcgagaaaggcaaagacgccttcctcaaccctggcatcgttcctaaaaagaacgccccaaacttcgaaaatatcgaatacaccccccgagttcccgtcatggaagctctcgaaatgaccagcacatcaagtgaccttagttttctaaaagcgcaaatcacaagcgacgaccaagagctaaaggatatcctcaaggatcagaagaaagcctcctcaaacagcgggtcgtctacaggaagcgcaccgagaaaaccaagggcaagaaaagtcctgccctattcttctcaagctcaacttattccgcacatgtacgagccgttcgaagcaaagtttccatcgaaacataatctcgatcgtggacaatggaccttcgagcccttgccgcggaggacgtggagagggcccggcccgagactttga

SEQ ID NO: 18111 - protein, 1173 aa, Muscodor strobelii
  misc_feature: SGI Peptide ID NO. 566063
  misc_feature (604)..(999): Pfam Id: PF00476 Pfam Desc: DNA polymerase family A
  misc_feature (43)..(1141): NCBI GI: 258567122 Blast Desc: DNA polymerase gamma [Uncinocarpus reesii 1704] gi|237905751|gb|EEP80152.1| DNA polymerase gamma [Uncinocarpus reesii 1704]
  misc_feature (91)..(1122): NCBI GI: 255953429 Blast Desc: Pc21g04210 [Penicillium chrysogenum Wisconsin 54-1255] gi|211589178|emb|CAP95318.1| Pc21g04210 [Penicillium chrysogenum Wisconsin 54-1255]
  misc_feature (92)..(1131): NCBI GI: 145249880 Blast Desc: An14g06560 [Aspergillus niger] gi|134081963|emb|CAK97229.1| protein product [Aspergillus niger]
  misc_feature (85)..(1047): NCBI GI: 169779283 Blast Desc: [Aspergillus oryzae RIB40] gi|83772845|dbj|BAE62973.1| protein product [Aspergillus oryzae]
  misc_feature (91)..(1132): NCBI GI: 239613015 Blast Desc: DNA polymerase gamma [Ajellomyces dermatitidis ER-3]
  misc_feature (74)..(1132): NCBI GI: 261189615 Blast Desc: DNA polymerase gamma [Ajellomyces dermatitidis SLH14081] gi|239591454|gb|EEQ74035.1| DNA polymerase gamma [Ajellomyces dermatitidis SLH14081]
  misc_feature (94)..(1132): NCBI GI: 225684515 Blast Desc: DNA polymerase gamma [Paracoccidioides brasiliensis Pb03]
  misc_feature (72)..(1117): NCBI GI: 67515517 Blast Desc: AN0040.2 [Aspergillus nidulans FGSC A4] gi|40746203|gb|EAA65359.1| AN0040.2 [Aspergillus nidulans FGSC A4] gi|259489774|tpe|CBF90322.1| TPA: DNA polymerase gamma FGSC
  misc_feature (91)..(1099): NCBI GI: 225561715 Blast Desc: DNA polymerase gamma [Ajellomyces capsulatus G186AR]
  misc_feature (94)..(1132): NCBI GI: 226294174 Blast Desc: DNA polymerase gamma [Paracoccidioides brasiliensis Pb18]
  misc_feature (92)..(1102): SWISSPROT Homolog: EC 2.7.7.7 DNA-directed DNA polymerase
MLQHARGRVTCAPAHLVRLSGRRARCPRRRPSQTPWTQLRYQTSASASASAAATATNTTTTTTITTTRTSPPNTADVLQTPPSTLHHAPSTLAIPSEARFNEIGVQHLTKHVYNQIFPRGSQPPPKALIDLSIDHLQRHNLHGKNTDNTPPVAFDIPPLQGQTLDEHFFKLGTDCAEPFLSHAKNFAALANPPPRPKKWVRQSGWTKYYADGTPPESVAAPDEDMLCFDVEVMWKESSYAVMACAMSPTAWYAWLSPWLLGESKTDKHLIPLGDPARERVIVGHNIGYDRARILEEYNLEQTRNSFLDTMSLHVAVNGMCSQQRPKWMKHKKSRELRDKIANETNDVDLANLLASNSLHDDEEELWVERSSINSLRDVAKFHLNVTIDKEIRNDFGELDRKGVVNKLDQLLDYCAADVAITHRVYKIVLPHFLEVCPHPVSFAALRHLSSVILPVNRSWDAYIANAEATYNKLSDAVLERLVGLTEKALKIKDDESKWSTDPWLKQLDWSGQAIRMVKGKKKDDPPRPAARQKKPGMPQWYKDLFPKNDSPLNLTVRTRIAPLLLRLAWDGYPLHWSDKYGWTFRVPLADAPKYNSTQLVICDLSDEPIEALQNDADAIYIKLPHKDGPTARCANPLAKNYLTYFEKGTLSSEYTYAKEALDMNASCSYWISARDRIMSQMVVYDSDKARKSPKKEENGYILPQIIPMGTITRRAVENTWLTASNAKKNRVGSELKAMVKAPPGYSFVGADVDSEELWIASVIGDATFKLHGGNAIGFMTLEGTKAAGTDLHSRTASILGITRNDAKVFNYGRIYGAGLKFAATLLRQFNPSLSEQETMETAGKLYATTKGTKTNRKSLHKRPFWRGGTESFVFNKLEEFADQERPRTPVLGAGITEALMGRYISKGAYLTSRINWAIQSSGVDYLHLLVVSMDYLIRRFNIQARLAITVHDEIRYLVKDEDKYRAAMALQISNLWTRAMFAQQVGIDDLPQACAYFSAVDIDHVLRKEVDMDCLTPSHSTPIPVGESLDIAQLLEKGKDAFLNPGIVPKKNAPNFENIEYTPRVPVMEALEMTSTSSDLSFLKAQITSDDQELKDILKDQKKASSNSGSSTGSAPRKPRARKVLPYSSQAQLIPHMYEPFEAKFPSKHNLDRGQWTFEPLPRRTWRGPGPRL

SEQ ID NO: 18112 - DNA, 3967 bp, Muscodor strobelii
  misc_feature: SGI EST ID NO. CUFF.42740.0
  misc_feature: Variant of the nucleotide sequence at SEQ ID NO 18110
gtgaaattcgccgtcatgcatcatgaatttcaggggactgctagtctcgtaacacgcttctcgtcattctgtcacgctgcagacagtttccatcgcccagcaaccagatgcatctgtctttgtaaatggcattgccgccagaccgtaggtagcgatgctacagcatgcccgcggccgcgtaacatgcgcgccggcccatcttgtacgcctcagcggtcggcgcgcaagatgtcctcgccgccgcccgtcgcaaacgccatggacccaactacgataccagacatccgcatccgcatccgcatccgccgcggccacggcaaccaacaccaccacaaccactaccataaccactactaggacatcaccgccgaacacagccgatgtcttgcaaactcctccgagtactctccatcatgcgccctcgaccctggccattccatccgaagcacgcttcaacgagatcggtgtccaacacctcaccaaacatgtatacaaccagatcttccccagaggctctcagccgccacccaaagccctcatagatctctctatagatcaccttcagcggcacaatctccacggcaaaaataccgacaacacgcctcccgtcgcctttgatatcccccccttacaaggtcagacactggacgagcacttcttcaagcttggcaccgactgcgcggagccttttctaagccatgctaaaaactttgctgccttggccaatcctcctccgcggcccaagaaatgggttcggcagagcggctggaccaaatactacgccgatggcactcctcccgagtccgtcgctgcacccgacgaggacatgctgtgcttcgatgtcgaggtcatgtggaaggagagttcctacgccgtcatggcctgcgccatgagccccacggcctggtacgcttggctctcgccctggctattgggcgaatccaagacggacaagcatctcattcccctcggcgaccccgcccgcgaacgggtcatcgtaggccacaatatcggatacgaccgcgctagaatactggaagagtacaacttggagcaaacgagaaattctttcctcgacaccatgtcattgcacgtcgctgtgaatggcatgtgttctcagcaacggcccaagtggatgaagcacaagaaaagtcgggaactacgcgacaagatcgccaacgaaaccaacgacgtagatcttgcaaatctgctcgcaagcaattctttgcacgacgacgaagaggagctctgggttgagcgcagctcgattaattctctgcgcgacgtggctaaatttcatctcaacgtgaccatcgacaaggagatacgcaatgacttcggagaattggaccggaaaggcgttgtgaacaagctggaccaattgctggactactgcgccgcggacgttgctatcacacaccgcgtctacaagattgttctaccgcatttcctcgaggtgtgcccccatcccgtcagcttcgcggccttgcggcacctctcttctgtcattctcccagttaataggtcttgggacgcttatatcgcgaatgcggaagcaacatacaacaaattgtcagatgctgtcttagagcgactggtaggattgaccgaaaaggcacttaagatcaaagacgacgagtcgaaatggagcacggatccctggcttaagcaactcgattggtctggccaagccattaggatggtgaaggggaagaagaaagacgaccctccaaggcctgctgctcgccagaagaagcccggcatgccgcagtggtacaaagatctgtttccaaagaacgactcgcccctaaaccttactgtcaggacgcgcattgcgccactcctcctacgactagcctgggatgggtacccactgcattggtctgataagtatggttggaccttccgggtgcccttggcagatgcgccgaagtacaactcgacacaactagtgatctgtgacttatctgacgaacctattgaagccctgcagaatgacgccgacgcgatctacatcaaactaccacataaggatggccctacagccagatgcgccaatcccttagctaagaactatctcacatatttcgagaagggcacgctttcgtccgagtacacctatgctaaagaggcacttgacatgaacgcatcatgttcctattggattagtgctcgcgacaggatcatgtcgcaaatggtcgtgtacgactcggataaagcccgtaaatctcctaagaaggaagagaacggctacattctgccccaaatcattccgatgggcacgatcactcgaagagctgttgaaaatacctggctaactgcaagtaatgcaaagaagaacagagttggttccgaattgaaggcgatggtcaaggcgccccctgggtactcatttgttggtgccgatgtggattccgaggagctttggattgctagtgttattggcgacgccacgttcaagctccatggcggcaatgctattggcttcatgacgcttgaaggcaccaaagctgcaggaactgacctgcattctcgcacagcctccatcctaggtatcacccgtaacgatgccaaagtgtttaactacggccgaatttacggtgccggactcaaatttgcggctacactactccgacaattcaatccaagtctttccgaacaggagaccatggagactgccggcaagttgtatgctacaaccaaaggcacgaagacgaatcgcaaatcgctacataaacgacctttctggagaggcggtaccgagtcctttgtatttaataagctcgaggagttcgcggatcaagagcgaccacgaacaccggtcctcggcgctggtattacggaagcactcatgggcagatatatcagcaagggcgcctacctcacctcccgtataaactgggcaatccaatcctctggtgtcgattatcttcacctcctcgtcgtgtcgatggattaccttataagacgcttcaatatccaagctcgcttagctattaccgttcatgacgaaatccggtatttggtgaaggacgaagacaagtacagagctgctatggcactccaaatatcaaacctatggactcgcgccatgtttgcgcaacaagtcggcatcgacgatctgccacaagcgtgtgcttacttttccgctgttgacatcgatcacgtactccgcaaggaagttgacatggattgtctaacgcccagccattcaacacccattcctgtcggcgaaagcttggacatcgcacaacttctcgagaaaggcaaagacgccttcctcaaccctggcatcgttcctaaaaagaacgccccaaacttcgaaaatatcgaatacaccccccgagttcccgtcatggaagctctcgaaatgaccagcacatcaagtgaccttagttttctaaaagcgcaaatcacaagcgacgaccaagagctaaaggatatcctcaaggatcagaagaaagcctcctcaaacagcgggtcgtctacaggaagcgcaccgagaaaaccaagggcaagaaaagtcctgccctattcttctcaagctcaacttattccgcacatgtacgagccgttcgaagcaaagtttccatcgaaacataatctcgatcgtggacaatggaccttcgagcccttgccgcggaggacgtggagagggcccggcccgagactttgaagaaatcaaaacttgtactataatagcgtcactcgacattttgttcttttgtatatgcttttaaatgtacagaagacggctaccgggcgatgaatcggaatcgggcttgggcatgtaaaaattatggggtcatcggtatcggttggggcgggcgcaagcgatcagatggatatttgttgtctacatatataccttacataatgcgaatttcgatgatgctgtgtatattgcaatatactggattgcaattccgtacttagttcaaatgcttactcgtgttttatctccgtg

SEQ ID NO: 18113 - DNA, 1728 bp, Muscodor strobelii
  misc_feature: SGI cDNA ID NO. 566064
  misc_feature: Encodes the peptide sequence at SEQ ID NO 18114
atggcctcatcaccactctctacgaagctgtctgaagtcaatgggacagactccgatcgcacaacttggaaagtgggcatagatggtcggtccagctttgttgatgcatccaaaactagtatacgaagcatcgagtacgacttgagcgacgatgtcaccgatggacgttacgatatggaacaaaaggcttaccaagatccacgaactcaaattttcttaggagcgccgatgagtattgcccatgagttggcgtttttcgccatagtttcgacggccaatttcactcctcactctggatttcaccaaacactatgtatcctacaactcatcgccacagatctgggtgctacggaacctggacagctggtctggttgatggcgggatatggtctcacgtccgggactttcatcctgctggcgggtcgactgggcgacatgtacggctataaaagactcttcctcattggcaacctttggttcgccttcgtttcactactcgcaggattcgctatcttcatcccgacaaatatatacccgcaactcagatatagcgtgttcttacttgcacgaattctccagggtatcggaccagcgcttatggtacccaatggcgtggcgcttctgggggttacatatgttccaggtcccagaaaagcgatgcttttcgctattttcggagccatggcaccagcttcagccattttgagtcctgcagtcaccggtcttttggcaaagatctggtggccttacgcattctgggcttttgcgatcgttttagtcggtgttactttcgccggtatgtacgttatacccgacggtccgtctactggtggaaaccatgaggaaccagacaccgaaatgagcagtatatcccaaagaatactcgacctatgtggtgaacttgaccttctgggcgctatcactggagttttgggcctggtactcattagtgttgcatggaaccaaggatcactcgctgggtggcagaatccttatgttcctgttcttctgacgactggaatcgggctttgtgccgtgtttgttgtagtcgaaaaacgtgctcgaaaaccactgattcccctcgaagctctcaataccggtgtcggcttggtcctgactgctgttggttgcggctggggctgctttggcatctacatctactacatctgggggttttatgaagttcttcgcggcgcaccaccactactcgccacagcttggcacagtccgattctcgtttcgggcatagccgcagcactcaccatgggcttcatcatccatcgtgttggcccagccattgtcatggccatagcgcttcttgcgttcactattggcacagttctaatagccactgcaccaatcgaccaatcatactggctgcagacattcttctgcaacgtgatcatcacctggggtatggatctaagctttccggctgcgaccctcatgttatctgaccttgttacgcctgagcatcaaggcattgcagctagcctggtcacaacagtcgtcaactacagtggcgctcttgcccttggtatcgcgggtactgtagagaatcatgtcaacaatggcggcaagacgcacgaagatatcttgctgggctatagaggtgcttggtacgtcggcctcggcctcggcactgccggccttttcacaagtctcgttttcgtatggcgcttctcgccgcgcttgtcaactgcatcgacgcaggtaaacccaatatag

SEQ ID NO: 18114 - protein, 575 aa, Muscodor strobelii
  misc_feature: SGI Peptide ID NO. 566064
  misc_feature (83)..(512): Pfam Id: PF07690 Pfam Desc: Major Facilitator Superfamily
  misc_feature (45)..(560): NCBI GI: 256722771 Blast Desc: NECHADRAFT_102094 [Nectria haematococca mpVI 77-13-4]
  misc_feature (45)..(560): NCBI GI: 46115860 Blast Desc: FG03772.1 [Gibberella zeae PH-1]
  misc_feature (45)..(560): NCBI GI: 255712791 Blast Desc: KLTH0C10560p [Lachancea thermotolerans] gi|238934057|emb|CAR22240.1| KLTH0C10560p [Lachancea thermotolerans]
  misc_feature (65)..(542): NCBI GI: 115433418 Blast Desc: ATEG_08225 [Aspergillus terreus NIH2624] gi|114189698|gb|EAU31398.1| ATEG_08225 [Aspergillus terreus NIH2624]
  misc_feature (42)..(559): NCBI GI: 19111851 Blast Desc: membrane transporter [Schizosaccharomyces pombe] gi|74638722|sp|Q9P6J7.1|YHD3_SCHPO RecName: Full=Uncharacterized MFS-type transporter C1683.03c gi|7801296|emb|CAB91165.1| pombe]
  misc_feature (43)..(573): NCBI GI: 145240673 Blast Desc: An08g08710 [Aspergillus niger] gi|134077507|emb|CAK96651.1| protein product [Aspergillus niger]
  misc_feature (49)..(559): NCBI GI: 190407668 Blast Desc: SCRG_01751 [Saccharomyces cerevisiae RM11-1a]
  misc_feature (47)..(559): NCBI GI: 151945453 Blast Desc: conserved protein [Saccharomyces cerevisiae YJM789]
  misc_feature (49)..(559): NCBI GI: 6324954 Blast Desc: of function; belongs to the DHA2 family of drug:H+ antiporters; YOR378W is not an essential gene [Saccharomyces cerevisiae] gi|74627247|sp|Q08902.1|YO378_YEAST RecName: protein
  misc_feature (49)..(559): NCBI GI: 207340804 Blast Desc: YOR378Wp-like protein [Saccharomyces cerevisiae AWRI1631]
MASSPLSTKLSEVNGTDSDRTTWKVGIDGRSSFVDASKTSIRSIEYDLSDDVTDGRYDMEQKAYQDPRTQIFLGAPMSIAHELAFFAIVSTANFTPHSGFHQTLCILQLIATDLGATEPGQLVWLMAGYGLTSGTFILLAGRLGDMYGYKRLFLIGNLWFAFVSLLAGFAIFIPTNIYPQLRYSVFLLARILQGIGPALMVPNGVALLGVTYVPGPRKAMLFAIFGAMAPASAILSPAVTGLLAKIWWPYAFWAFAIVLVGVTFAGMYVIPDGPSTGGNHEEPDTEMSSISQRILDLCGELDLLGAITGVLGLVLISVAWNQGSLAGWQNPYVPVLLTTGIGLCAVFVVVEKRARKPLIPLEALNTGVGLVLTAVGCGWGCFGIYIYYIWGFYEVLRGAPPLLATAWHSPILVSGIAAALTMGFIIHRVGPAIVMAIALLAFTIGTVLIATAPIDQSYWLQTFFCNVIITWGMDLSFPAATLMLSDLVTPEHQGIAASLVTTVVNYSGALALGIAGTVENHVNNGGKTHEDILLGYRGAWYVGLGLGTAGLFTSLVFVWRFSPRLSTASTQVNPI

SEQ ID NO: 18115 - DNA, 777 bp, Muscodor strobelii
  misc_feature: SGI EST ID NO. CUFF.42709.0
  misc_feature: Variant of the nucleotide sequence at SEQ ID NO 18113
gcaaaacaaaagcttcgtttctctctccctctcacttacgtacaatcgtgaggacatggcctcatcaccactctctacgaagctgtctgaagtcaatgggacagactccgatcgcacaacttggaaagtgggcatagatggtcggtccagctttgttgatgcatccaaaactagtatacgaagcatcgagtacgacttgagcgacgatgtcaccgatggacgttacgatatggaacaaaaggcttaccaagatccacgaactcaaattttcttaggagcgccgatgagtattgcccatgagttggcgtttttcgccatagtttcgacggccaatttcactcctcactctggatttcaccaaacactatgtatcctacaactcatcgccacagatctgggtgctacggaacctggacagctggtctggttgatggcgggatatggtctcacgtccgggactttcatcctgctggcgggtcgactgggcgacatgtacggctataaaagactcttcctcattggcaacctttggttcgccttcgtttcactactcgcaggattcgctatcttcatcccgacaaatatatacccgcaactcagatatagcgtgttcttacttgcacgaattctccagggtatcggaccagcgcttatggtacccaatggcgtggcgcttctgggggttacatatgttccaggtcccagaaaagcgatgcttttcgctattttcggagccatggcaccagcttcagccattttgagtcctgcagtcaccgg

SEQ ID NO: 18116 - DNA, 324 bp, Muscodor strobelii
  misc_feature: SGI cDNA ID NO. 566065
  misc_feature: Elevated expression when VOC is produced
  misc_feature: Encodes the peptide sequence at SEQ ID NO 18117
atgcccgtcaatcacctcgtattattccagctcaaggatgacattgcagccgaagttgtcgaccaggtctgcactagaatgctttccctgaaagacacatgtctccgccctgagaaccaaaagccctacatcaggtccttgactggtggaaaagataactcgcccgaggggctgcagaatggcattcagtatgcttttgtagtggagtttgagaatgaagcggatagggattattatgtcaaaacggatccatcgcaccagaactttattgccacaaatggcccgatgctggcaaaggttattgttgttgattatagcttctaa

SEQ ID NO: 18117 - protein, 107 aa, Muscodor strobelii
  misc_feature: SGI Peptide ID NO. 566065
  misc_feature (3)..(107): Pfam Id: PF07876 Pfam Desc: Stress responsive A/B Barrel Domain
  misc_feature (1)..(106): NCBI GI: 145602997 Blast Desc: MGG_13796 [Magnaporthe grisea 70-15] gi|145011333|gb|EDJ95989.1| MGG_13796 [Magnaporthe grisea 70-15]
  misc_feature (1)..(106): NCBI GI: 255953145 Blast Desc: Pc21g02610 [Penicillium chrysogenum Wisconsin 54-1255] gi|211589036|emb|CAP95158.1| Pc21g02610 [Penicillium chrysogenum Wisconsin 54-1255]
  misc_feature (1)..(106): NCBI GI: 115491055 Blast Desc: conserved [Aspergillus terreus NIH2624] gi|114197015|gb|EAU38715.1| conserved [Aspergillus terreus NIH2624]
  misc_feature (1)..(106): NCBI GI: 226290228 Blast Desc: stress responsive A/B barrel domain-containing protein [Paracoccidioides brasiliensis Pb18]
  misc_feature (1)..(106): NCBI GI: 225682781 Blast Desc: conserved [Paracoccidioides brasiliensis Pb03]
  misc_feature (1)..(106): NCBI GI: 169780000 Blast Desc: [Aspergillus oryzae RIB40] gi|238505970|ref|XP_002384187.1| conserved [Aspergillus flavus NRRL3357] gi|83773204|dbj|BAE63331.1| protein product oryzae]
  misc_feature (1)..(106): NCBI GI: 259488476 Blast Desc: TPA: conserved [Aspergillus nidulans FGSC A4]
  misc_feature (1)..(105): NCBI GI: 240280866 Blast Desc: stress responsive A/B barrel domain-containing protein [Ajellomyces capsulatus H143]
  misc_feature (1)..(105): NCBI GI: 170940334 Blast Desc: protein product [Podospora anserina]
  misc_feature (1)..(105): NCBI GI: 225559715 Blast Desc: stress responsive A/B barrel domain-containing protein [Ajellomyces capsulatus G186AR]
  misc_feature: Useful for introducing or modulating the production of volatile compounds
MPVNHLVLFQLKDDIAAEVVDQVCTRMLSLKDTCLRPENQKPYIRSLTGGKDNSPEGLQNGIQYAFVVEFENEADRDYYVKTDPSHQNFIATNGPMLAKVIVVDYSF

SEQ ID NO: 18118 - DNA, 831 bp, Muscodor strobelii
  misc_feature: SGI EST ID NO. CUFF.42715.0
  misc_feature: Variant of the nucleotide sequence at SEQ ID NO 18116
gccgtttctgtcatcaggatcaaattattcacaggtctctctaagtataaaaggtcacttcacacccaggcgagttctattgcagagcttctatcctgtaaactcacacactaagcgctgaattcataccacctcttcgcgaagaaaagaccaatcgcgccagtcacaatgcccgtcaatcacctcgtattattccagctcaaggatgacattgcagccgaagttgtcgaccaggtctgcactagaatgctttccctgaaagacacatgtctccgccctgagaaccaaaagccctacatcaggtccttgactggtggaaaagataactcgcccgaggggctgcagaatggcattcagtatgcttttgtagtggagtttgagaatgaagcggatagggattattatgtcaaaacggatccatcgcaccagaactttattgccacaaatggcccgatgctggcaaaggttattgttgttgattatagcttctaagatattattcaggattggcgggcacttcttgattcaggggttctgatgcaactagggttaatatagtcaaatattgactattgccgattagtcatttttgccatcccaattcgacacattcatttggtgatatgtaagtcacttgttgttttattatatctaactcacttagcttcgagtcttttgaagactaatatccgagaatttgctggaaacgatttcctcatagtgcttagggcttgagaagatagtatctccttttcgctaacttggcgctatcctggccgttcatgtcaaagtgcaaataatagatgctgatagtatcaacatacatatgag

SEQ ID NO: 18119 - DNA, 2181 bp, Muscodor strobelii
  misc_feature: SGI cDNA ID NO. 566066
  misc_feature: Encodes the peptide sequence at SEQ ID NO 18120
atggaggccgataaaatggaggtcgatatcaagcgcgagtccccagaaggcagcaaaagcccggaaggcggtcgtcgttcaccaagtcctaaccctcgttcgacaaatccaaacttcgtggcctctgtgaacaatttccagcaaaacggcagtggaggcggcccttcggcgcttcagcaatttgtgcgtgacaagccacccaacgttcctacctataggaaacacaccccgccgccaggcgtgcagtctggcgcccctcaacccaaacctggacccacccaagctttcaacggtcccgcagcatccaccgctgcacgcaacgtaggtaacagtacttttggctctacaggcggggcaggtccattcccgcacccgcaacagcaacagcaaccacagctgcaacagtccttctcttctcagttcccccaccataacgtcgcatatcctaacccgagcactggtgggtacgtattgcctacaaacccgcacctacagtccttccagacgcctgctcctggtcccggcttacagcagtcactcgccactgctcagactcatcaacctatcgccgctcagcaacctccacgacagcctggtttgcaacctcactcggacgtcgttctcaggcgcctggatgctgagattgatggcgtcgtcaacacaatcggctcgcctgcagtaacggagcagaatacattgcaatactatcaccgtctgttggagcaattgacgcaacagcgcgacttgcgattccagcagctacagaacgagctacagctgcagctccactctgtccagcagcaacaacagcggctctggcaacaacaacagcggctgggcagtcacaaccagggcaacactaccgcccctcagttctcatttgccactcccagcaatcctctccagcagcccttccagcaacccctccagcagcccctccagccgccgccaaatcctcgtcccgtcccggttcagaatccaaactttggtactcagtactacgggctgccgcagcagcagccgcagcagcagcagcagcgcatccagtttcctgcccatcagcaacaaaacttggctcctgctcccggtggcaatccaagctttttcaatacagctaactacaacggacaccgccttgcggtagagcagcttatacaaagcaggcagcagcaacgtggtattggtgttcctgcttccgcttctctgctcacgcctgcttctctgctcacacctcattctctgctcacacctcattctctgctcacacctcattctctgctcacgcctcacggcaatcaaccgactgccgtgcagcaaggaaaccaaccgccatctcgaaacatcaaccgaggcaagaaaggcaaggacaacaaggacgtccagagcagccaaggcaagaaggttgatcaaggcgggaagaacggttcgccctccaagagtcgcacgcgccttcccacactgcacagtcgaaacgccgcattagcgagtaaagcttcggagccctcgtcggcacctcctcttggatctgccacaggcgacgttggcaatcaagacatgccaccggctggcacccgaggaacaagagctggcagaagcgtcatcgatctcactaaggaggaagcgagctccccgaattctggtattgactcttgcataactgttcacacgatgcccgcaacaacgaggggacagagcagtggcggcgccaaccctgcagcgtcgacggctgcccagcccgaccgcaaacgacgggcttctgctgctgcttcgccttctggcagccgagctaaaaagacaagacgcaccgaagacgactctccttttgacgacaaggatgattccgcaatggaaaatattgatttgactaatgccactgaggtccctcaagaggttcgtgctcctatcattgataaaagatccaaacttgcccacttccagtgtgcgatttgcctggattacgcgactgacatggctaccacacactgcggccatctcttctgctccgagtgcttgcattcctccctcaatgccgaaaacaacccgcgcagaagatgccccgtctgccgacaagttgtagaggaacccggaaggcgcgccaaagaccccaagagcttctttcatgtcgagttgaagctttcggttgttaagaaggacaaaggcaagcagcctgccgctcgatga

SEQ ID NO: 18120 - protein, 726 aa, Muscodor strobelii
  misc_feature: SGI Peptide ID NO. 566066
  misc_feature (647)..(688): Pfam Id: PF00097 Pfam Desc: Zinc finger, C3HC4 type (RING finger)
  misc_feature (575)..(724): NCBI GI: 85086756 Blast Desc: NCU00275 [Neurospora crassa OR74A] gi|28918841|gb|EAA28510.1| [Neurospora crassa OR74A]
  misc_feature (593)..(722): NCBI GI: 116207924 Blast Desc: CHGG_03255 [Chaetomium globosum CBS 148.51] gi|88183852|gb|EAQ91320.1| CHGG_03255 [Chaetomium globosum CBS 148.51]
  misc_feature (557)..(721): NCBI GI: 261358297 Blast Desc: [Verticillium albo-atrum VaMs.102]
  misc_feature (562)..(689): NCBI GI: 156041230 Blast Desc: [Sclerotinia sclerotiorum 1980] gi|154695977|gb|EDN95715.1| [Sclerotinia sclerotiorum 1980]
  misc_feature (579)..(692): NCBI GI: 189208181 Blast Desc: PTRG_10092 [Pyrenophora tritici-repentis Pt-1C-BFP] gi|187976517|gb|EDU43143.1| PTRG_10092 [Pyrenophora tritici-repentis Pt-1C-BFP]
  misc_feature (521)..(692): NCBI GI: 169614688 Blast Desc: SNOG_10491 [Phaeosphaeria nodorum SN15] gi|160702801|gb|EAT81885.2| SNOG_10491 [Phaeosphaeria nodorum SN15]
MEADKMEVDIKRESPEGSKSPEGGRRSPSPNPRSTNPNFVASVNNFQQNGSGGGPSALQQFVRDKPPNVPTYRKHTPPPGVQSGAPQPKPGPTQAFNGPAASTAARNVGNSTFGSTGGAGPFPHPQQQQQPQLQQSFSSQFPHHNVAYPNPSTGGYVLPTNPHLQSFQTPAPGPGLQQSLATAQTHQPIAAQQPPRQPGLQPHSDVVLRRLDAEIDGVVNTIGSPAVTEQNTLQYYHRLLEQLTQQRDLRFQQLQNELQLQLHSVQQQQQRLWQQQQRLGSHNQGNTTAPQFSFATPSNPLQQPFQQPLQQPLQPPPNPRPVPVQNPNFGTQYYGLPQQQPQQQQQRIQFPAHQQQNLAPAPGGNPSFFNTANYNGHRLAVEQLIQSRQQQRGIGVPASASLLTPASLLTPHSLLTPHSLLTPHSLLTPHGNQPTAVQQGNQPPSRNINRGKKGKDNKDVQSSQGKKVDQGGKNGSPSKSRTRLPTLHSRNAALASKASEPSSAPPLGSATGDVGNQDMPPAGTRGTRAGRSVIDLTKEEASSPNSGIDSCITVHTMPATTRGQSSGGANPAASTAAQPDRKRRASAAASPSGSRAKKTRRTEDDSPFDDKDDSAMENIDLTNATEVPQEVRAPIIDKRSKLAHFQCAICLDYATDMATTHCGHLFCSECLHSSLNAENNPRRRCPVCRQVVEEPGRRAKDPKSFFHVELKLSVVKKDKGKQPAAR

SEQ ID NO: 18121 - DNA, 1846 bp, Muscodor strobelii
  misc_feature: SGI EST ID NO. CUFF.42850.2
  misc_feature: Variant of the nucleotide sequence at SEQ ID NO 18119
cagcaacccctccagcagcccctccagccgccgccaaatcctcgtcccgtcccggttcagaatccaaactttggtactcagtactacgggctgccgcagcagcagccgcagcagcagcagcagcgcatccagtttcctgcccatcagcaacaaaacttggctcctgctcccggtggcaatccaagctttttcaatacagctaactacaacggacaccgccttgcggtagagcagcttatacaaagcaggcagcagcaacgtggtattggtgttcctgcttccgcttctctgctcacgcctgcttctctgctcacacctcattctctgctcacacctcattctctgctcacacctcattctctgctcacgcctcacggcaatcaaccgactgccgtgcagcaaggaaaccaaccgccatctcgaaacatcaaccgaggcaagaaaggcaaggacaacaaggacgtccagagcagccaaggcaagaaggttgatcaaggcgggaagaacggttcgccctccaagagtcgcacgcgccttcccacactgcacagtcgaaacgccgcattagcgagtaaagcttcggagccctcgtcggcacctcctcttggatctgccacaggcgacgttggcaatcaagacatgccaccggctggcacccgaggaacaagagctggcagaagcgtcatcgatctcactaaggaggaagcgagctccccgaattctggtattgactcttgcataactgttcacacgatgcccgcaacaacgaggggacagagcagtggcggcgccaaccctgcagcgtcgacggctgcccagcccgaccgcaaacgacgggcttctgctgctgcttcgccttctggcagccgagctaaaaagacaagacgcaccgaagacgactctccttttgacgacaaggatgattccgcaatggaaaatattgatttgactaatgccactgaggtccctcaagaggccatctcttctgctccgagtgcttgcattcctccctcaatgccgaaaacaacccgcgcagaagatgccccgtctgccgacaagttgtagaggaacccggaaggcgcgccaaagaccccaagagcttctttcatgtcgagttgaagctttcggttgttaagaaggacaaaggcaagcagcctgccgctcgatgaatatctcaccaacatcttctctgctcgtcacctacccgtcggctagagtctggctccctttcacactaaacacaactacgaaacacaaatccacgcctcagacatcttacttggtcgcacgttttcgtttccgttttcgcacacacactgcataggtgcatggcaataggcgtacttgcattcggaaggggcgttaatggtaatgactgttctgagcaaacgatatactttccccactttccttctctctttcctcgtctgcgtaacgaggtaattctcggaaacagagcatggttactcgacttgcatcttttccccggtctgttctacgacttcctggaagctcgaggacagagatactgtatgattataaataagaaccttgagcagagagatatgcttcaatggttatgtatgttgatatcagagaaaaaaggagtacggaacggggacacggaccgtagacggcgctgcttcagcagtaggggtgcaaaatcggtgatggacacacaaaactggtggagttgacgtgataaaatggctagggtgactataactacggtaatagtatagatacatcctgtctctagccttaagccagaggaagaaaaagaacaaaagcaaataaaaatggttgtaaaattatcttgtcgttcgaacaatggtggcgtagccgc

SEQ ID NO: 18122 - DNA, 2625 bp, Muscodor strobelii
  misc_feature: SGI cDNA ID NO. 566067
  misc_feature: Encodes the peptide sequence at SEQ ID NO 18123
atggcaagcagcaggaatctcataaaccccttcgaggaggaggctgagtcctcctcgtcgcgatcgcccaacgagtcccggcctccgatccatcgcgacgatcccgaccgcttggacgacttctttgacgatgacgatatcagcaatgcgcagaatgtcctcggcgatgacccgttgcatccagatgccggagacgcgcctctaagcttcaagcgcaagcagaagcaatccattttctcccagccgagtcgcatgctgtcagcattgacaggtaaccgcttcgggtcacgttcacccgcctcctcacacccgggtacgggaacagcaacgccaattggtctccgctctattgacgatgcgcgaagtgatgctggaatggccaatggatccaaagacggcatcccagggggtgattggtatgtcgagggacctgggaggagagtaggctacgaagatctgacggccatcgactggattttcgaatacaccaaagagcgacaacgtttgcgcgtcttgtactcaagcgctactggagtcataggctacctgcaacagctggccgatgcgagccaggtctggataattcttgtactcactggcatggccgttggtgctctggctgctggaatagacataatttcggattggctcggtgatatcaagactggctactgcgcatcaggtccggatgggggcgcattctatttgaataagcagttctgctgctggggttatgatcaaggcgccaagtgcgtcggatggaagccatgggccgcagctctcggcgtaggctccactggcggcaagtggttccttgagtatttctttttcatcgtcttctctattacgttcgcactaggggctgcgttcttggttaaggagtacgcaatttacgcaaagcatagcggtatacctgagataaagacgctcttaggcggtttcattattcgacgttttctcggcagctggaccctggttacaaaatctctaggcctttgtcttgccgtcgcatctggcatgtgtgtagcaagaaaacgagaagtgctctctgccgctgcggcttcgggcatatctgttgcatttggatctcccattggaggcgtactgttcagtctagagcaactgtcttactatttccccgataaaactatgtggcagagttttgtgtgtgccatgacggcagcagtggtattacaagccctcgacccctttcgaacgggcaaacttgtcttgtatcaagtcaagttctccacgacctggcacggatttgagataataccatttgccctcctaggaatcttgggaggcatatacgggggtcttttcatcaaggccaatatgcgtgttgcgcgatggaagaaatcagtggactggctcccaggcccattagtccaggtcgctgctgtcgcgctcctgaccgctctcatcaactatcctaatttctacatgcgagctcagtcttccgagctcgtttcctccctattctccgattgtcgtcttatcctcgatgacccatttctcctctgcaaaacgggagccgcatccgccagcacgattgtcctattgattttcgcatccatattaggctttttcctggcttcaatcaccttcggtctgcaaatcccagcaggtatcattctcccttccatggcaatcggcgccttgtcagggcgcgccatcggtatcatcatggagatatggcagcacaaccatcccaactttttcgccttcagctcatgcgatccagatacgagctgtgtcacgcctggggtctacgctatgatcggggccgcggccacgttagctggtgtcactcgcctgactgtttctatcgttgtcatcatgtttgagttaacgggtgctctcacatacgtcttgccgattatgattgcggtcatgatatcaaaatgggtcggcgacgccttctctcgccgcggtatatatgaatcttggatccatttcaacgcatatccctttctcgacactggcgacgagggcagcggtgcccaacaagtccccgatataaccggtggccagattatgacgcgaatcgaggacctcgtggtcctcacagccacgggccataccattcagtcgttgcggaacgtgttggaatcatgtacataccgcggatttcccgttgtcagcgatcctcgtgatgctatcctgctaggttatatctctcggtccgagctggcctacaacctgaacgcatgcaatctgcccccagaaacagaagccttcttcaaccaccaacccctcgccgacccacgctcaaccctggacctacggccttggatggaccaaacgcccctcacactacccagccgcagctctctccacctcgcagtatcttacttccaaaaattaggcgtccgatacgtgatattcagcgatcgtggcgcattgcaaggtctcttaactaagaaggattgctggtacgtgctgaatggcgctgaagagatgtcaagaacgggtggtccttcagcgggtatcggccgcggtgctggcatcgaggatagtgaacccttggccgatggtgaggataatggactcttgggatcggatagagatagattgggtcctgaatcgccgagtgatgatcgggctagtgggattttatag

SEQ ID NO: 18123 - protein, 874 aa, Muscodor strobelii
  misc_feature: SGI Peptide ID NO. 566067
  misc_feature (681)..(817): Pfam Id: PF00571 Pfam Desc: CBS domain pair
  misc_feature (283)..(641): Pfam Id: PF00654 Pfam Desc: Voltage gated chloride channel
  misc_feature (681)..(811): Pfam Id: PF00571 Pfam Desc: CBS domain pair
  misc_feature (344)..(641): Pfam Id: PF00654 Pfam Desc: Voltage gated chloride channel
  misc_feature (283)..(342): Pfam Id: PF00654 Pfam Desc: Voltage gated chloride channel
  misc_feature (31)..(865): NCBI GI: 46122147 Blast Desc: FG05451.1 [Gibberella zeae PH-1]
  misc_feature (31)..(865): NCBI GI: 256729924 Blast Desc: [Nectria haematococca mpVI 77-13-4]
  misc_feature (24)..(857): NCBI GI: 164425058 Blast Desc: NCU06444 [Neurospora crassa OR74A] gi|157070772|gb|EAA28099.2| NCU06444 [Neurospora crassa OR74A]
  misc_feature (153)..(869): NCBI GI: 261360160 Blast Desc: chloride channel protein [Verticillium albo-atrum VaMs.102]
  misc_feature (15)..(874): NCBI GI: 145611334 Blast Desc: MGG_00468 [Magnaporthe grisea 70-15] gi|145018637|gb|EDK02916.1| MGG_00468 [Magnaporthe grisea 70-15]
  misc_feature (14)..(859): NCBI GI: 169621269 Blast Desc: SNOG_13843 [Phaeosphaeria nodorum SN15] gi|160704215|gb|EAT78867.2| SNOG_13843 [Phaeosphaeria nodorum SN15]
  misc_feature (12)..(856): NCBI GI: 238496551 Blast Desc: voltage-gated chloride channel, [Aspergillus flavus NRRL3357] gi|220694391|gb|EED50735.1| voltage-gated chloride channel, [Aspergillus flavus NRRL3357]
  misc_feature (67)..(859): NCBI GI: 71001730 Blast Desc: voltage-gated chloride channel [Aspergillus fumigatus Af293] gi|66853184|gb|EAL93508.1| voltage-gated chloride channel, [Aspergillus fumigatus Af293]
  misc_feature (67)..(859): NCBI GI: 159129609 Blast Desc: voltage-gated chloride channel, [Aspergillus fumigatus A1163]
  misc_feature (62)..(856): NCBI GI: 226280226 Blast Desc: voltage-gated chloride channel [Paracoccidioides brasiliensis Pb01]
MASSRNLINPFEEEAESSSSRSPNESRPPIHRDDPDRLDDFFDDDDISNAQNVLGDDPLHPDAGDAPLSFKRKQKQSIFSQPSRMLSALTGNRFGSRSPASSHPGTGTATPIGLRSIDDARSDAGMANGSKDGIPGGDWYVEGPGRRVGYEDLTAIDWIFEYTKERQRLRVLYSSATGVIGYLQQLADASQVWIILVLTGMAVGALAAGIDIISDWLGDIKTGYCASGPDGGAFYLNKQFCCWGYDQGAKCVGWKPWAAALGVGSTGGKWFLEYFFFIVFSITFALGAAFLVKEYAIYAKHSGIPEIKTLLGGFIIRRFLGSWTLVTKSLGLCLAVASGMCVARKREVLSAAAASGISVAFGSPIGGVLFSLEQLSYYFPDKTMWQSFVCAMTAAVVLQALDPFRTGKLVLYQVKFSTTWHGFEIIPFALLGILGGIYGGLFIKANMRVARWKKSVDWLPGPLVQVAAVALLTALINYPNFYMRAQSSELVSSLFSDCRLILDDPFLLCKTGAASASTIVLLIFASILGFFLASITFGLQIPAGIILPSMAIGALSGRAIGIIMEIWQHNHPNFFAFSSCDPDTSCVTPGVYAMIGAAATLAGVTRLTVSIVVIMFELTGALTYVLPIMIAVMISKWVGDAFSRRGIYESWIHFNAYPFLDTGDEGSGAQQVPDITGGQIMTRIEDLVVLTATGHTIQSLRNVLESCTYRGFPVVSDPRDAILLGYISRSELAYNLNACNLPPETEAFFNHQPLADPRSTLDLRPWMDQTPLTLPSRSSLHLAVSYFQKLGVRYVIFSDRGALQGLLTKKDCWYVLNGAEEMSRTGGPSAGIGRGAGIEDSEPLADGEDNGLLGSDRDRLGPESPSDDRASGIL

SEQ ID NO: 18124 - DNA, 2997 bp, Muscodor strobelii
  misc_feature: SGI EST ID NO. CUFF.42747.0
  misc_feature: Variant of the nucleotide sequence at SEQ ID NO 18122
cgggcacggaacactttgtacctacctacaggtgtctccataggtgcatcttaacaattaagggatccatagaccaggagtcgagcatcatcgataagagccgagaccaacccatctttgtcgacccgaggcgtcagaacgaacatggcagtttgcagccttgcgcctttagcatggcaagcagcaggaatctcataaaccccttcgaggaggaggctgagtcctcctcgtcgcgatcgcccaacgagtcccggcctccgatccatcgcgacgatcccgaccgcttggacgacttctttgacgatgacgatatcagcaatgcgcagaatgtcctcggcgatgacccgttgcatccagatgccggagacgcgcctctaagcttcaagcgcaagcagaagcaatccattttctcccagccgagtcgcatgctgtcagcattgacaggtaaccgcttcgggtcacgttcacccgcctcctcacacccgggtacgggaacagcaacgccaattggtctccgctctattgacgatgcgcgaagtgatgctggaatggccaatggatccaaagacggcatcccagggggtgattggtatgtcgagggacctgggaggagagtaggctacgaagatctgacggccatcgactggattttcgaatacaccaaagagcgacaacgtttgcgcgtcttgtactcaagcgctactggagtcataggctacctgcaacagctggccgatgcgagccaggtctggataattcttgtactcactggcatggccgttggtgctctggctgctggaatagacataatttcggattggctcggtgatatcaagactggctactgcgcatcaggtccggatgggggcgcattctatttgaataagcagttctgctgctggggttatgatcaaggcgccaagtgcgtcggatggaagccatgggccgcagctctcggcgtaggctccactggcggcaagtggttccttgagtatttctttttcatcgtcttctctattacgttcgcactaggggctgcgttcttggttaaggagtacgcaatttacgcaaagcatagcggtatacctgagataaagacgctcttaggcggtttcattattcgacgttttctcggcagctggaccctggttacaaaatctctaggcctttgtcttgccgtcgcatctggcatgtggttaggcaaggagggcccattggtgcatgtggcatgttgttgcgctaatctttttataaaattatttccaatcattaataacaacgaagcaagaaaacgagaagtgctctctgccgctgcggcttcgggcatatctgttgcatttggatctcccattggaggcgtactgttcagtctagagcaactgtcttactatttccccgataaaactatgtggcagagttttgtgtgtgccatgacggcagcagtggtattacaagccctcgacccctttcgaacgggcaaacttgtcttgtatcaagtcaagttctccacgacctggcacggatttgagataataccatttgccctcctaggaatcttgggaggcatatacgggggtcttttcatcaaggccaatatgcgtgttgcgcgatggaagaaatcagtggactggctcccaggcccattagtccaggtcgctgctgtcgcgctcctgaccgctctcatcaactatcctaatttctacatgcgagctcagtcttccgagctcgtttcctccctattctccgattgtcgtcttatcctcgatgacccatttctcctctgcaaaacgggagccgcatccgccagcacgattgtcctattgattttcgcatccatattaggctttttcctggcttcaatcaccttcggtctgcaaatcccagcaggtatcattctcccttccatggcaatcggcgccttgtcagggcgcgccatcggtatcatcatggagatatggcagcacaaccatcccaactttttcgccttcagctcatgcgatccagatacgagctgtgtcacgcctggggtctacgctatgatcggggccgcggccacgttagctggtgtcactcgcctgactgtttctatcgttgtcatcatgtttgagttaacgggtgctctcacatacgtcttgccgattatgattgcggtcatgatatcaaaatgggtcggcgacgccttctctcgccgcggtatatatgaatcttggatccatttcaacgcatatccctttctcgacactggcgacgagggcagcggtgcccaacaagtccccgatataaccggtggccagattatgacgcgaatcgaggacctcgtggtcctcacagccacgggccataccattcagtcgttgcggaacgtgttggaatcatgtacataccgcggatttcccgttgtcagcgatcctcgtgatgctatcctgctaggttatatctctcggtccgagctggcctacaacctgaacgcatgcaatctgcccccagaaacagaagccttcttcaaccaccaacccctcgccgacccacgctcaaccctggacctacggccttggatggaccaaacgcccctcacactacccagccgcagctctctccacctcgcagtatcttacttccaaaaattaggcgtccgatacgtgatattcagcgatcgtggcgcattgcaaggtctcttaactaagaaggattgctggtacgtgctgaatggcgctgaagagatgtcaagaacgggtggtccttcagcgggtatcggccgcggtgctggcatcgaggatagtgaacccttggccgatggtgaggataatggactcttgggatcggatagagatagattgggtcctgaatcgccgagtgatgatcgggctagtgggattttatagacactgcaatatagacatttgctattgctatttgatatgagtattattccttgtttcaatgttgtgtttgatgtgttcgatatctgagctgtctaacaccagaacaagaacgata

SEQ ID NO: 18125 - DNA, 1662 bp, Muscodor strobelii
  misc_feature: SGI cDNA ID NO. 566068
  misc_feature: Encodes the peptide sequence at SEQ ID NO 18126
atgacggagtcaacggagatccagaaggtccgccagttgctggccgccaaagatgatacctctcgcttcgtggggttgcttcttctaaagaccactctcgacaaccatgcatcgtccatgcaatatgaacagatcactgaacgctctgaagagaccacacagcgcatactcgagtcgatacatagtcttgtgctgcagcctcatgacaccaccaccggtggcgcatcacatcttgccacgcttgaagtcggcagttggatcccattgatagagattgcttcaaagcacgacgtaatcttctcgatcttctattggacatgggttgaaggtagtgcttctgtctcggttggggccatgcagctaaagatcgacgaggctcttcagttgttcatatcttccttcaagcggcagaacccgactccattggttgaattcatcacaaagattctaagcaatctgaacccccttctgcgaccatcgagcctacgatggcttcaatctgtcacgactctgatgaaacagctgtcttctaacaaaccaactgaagacgggcgccgcgcttatatacattgtagcgcagtccttttagaagtatatccagaacaggcacctcaactactattttccgatgagccgaaagcatcaaaacaaattgcctatttgttcgtcaaaatggtccaagttgacatcatgtccactatacatgttttgattccgaagctcaatagcgagcaatacatgtcaatatcaaagcgcattgctgcggcactggacataatgacctctttcgtggggttccttattggaagcagcgaagaagacgaaaatgaggacgagaacttgccgcagcatagtttctctccggatcagattctgaaaatccacgaagatctagtcagaacagtgggagatactatggagtttcttcgtgatcgctgggacgaccacctagcaagagcacgtggaatccaaccgacccaaggccaggagttaattatatttgatgatcctgtcacagccgccgctgtgaggttcatagctgcttggcttcgtgatgacgacggcgaaaccttgcgatcacaagctgcaggtctatttgacctgttcgccgaactatacaagctgaacctaacctcgaaagactcgacagagctacgcctacccattctcgctgcggctgaaggtgtgatcacaacggaaaaaggactagaagccatccgcaccaccaacttcgtatcacaatgtctgatgccagatctacagcatatactcctaagccaggtcacagacttgagtagtgctgattatctgcgtggctctgttataatctttacattggacctgatcgaggaacatgacgacgcgtccccgctcaaaattgccaagacggacattatcgacttcatagcacgttctcctgtcctagcatgtagtgaagcgatgaaagcatcggacccttcaatacttcactttaggagcgatctgataaataaagcgataacagtagtcttgacggaacccggagtcaagcaagagaccagggcttctcttaaaaatgcagcctcgaccgctgttcgaaactggcaaatcctcgaagacgaagaaatggttgcaagaatgaggcattcgctagccgtcctggaacgaagcacggcttcatag

SEQ ID NO: 18126 - protein, 553 aa, Muscodor strobelii
  misc_feature: SGI Peptide ID NO. 566068
  misc_feature (130)..(471): Pfam Id: PF09161 Pfam Desc: Domain of function (DUF1941)
  misc_feature (130)..(325): Pfam Id: PF09161 Pfam Desc: Domain of function (DUF1941)
  misc_feature (330)..(406): Pfam Id: PF09161 Pfam Desc: Domain of function (DUF1941)
  misc_feature (49)..(511): NCBI GI: 171686878 Blast Desc: protein product [Podospora anserina] gi|170943400|emb|CAP69053.1| protein product [Podospora anserina]
  misc_feature (7)..(441): NCBI GI: 154302945 Blast Desc: BC1G_09216 [Botryotinia fuckeliana B05.10] gi|150855140|gb|EDN30332.1| BC1G_09216 [Botryotinia fuckeliana B05.10]
  misc_feature (7)..(435): NCBI GI: 156048204 Blast Desc: SS1G_08833 [Sclerotinia sclerotiorum 1980] gi|154693230|gb|EDN92968.1| SS1G_08833 [Sclerotinia sclerotiorum 1980]
  misc_feature (3)..(453): NCBI GI: 39974773 Blast Desc: MGG_00467 [Magnaporthe grisea 70-15] gi|145018638|gb|EDK02917.1| MGG_00467 [Magnaporthe grisea 70-15]
  misc_feature (45)..(453): NCBI GI: 256729733 Blast Desc: NECHADRAFT_47078 [Nectria haematococca mpVI 77-13-4]
  misc_feature (49)..(424): NCBI GI: 85084569 Blast Desc: NCU06445 [Neurospora crassa OR74A] gi|28918426|gb|EAA28100.1| [Neurospora crassa OR74A]
  misc_feature (49)..(424): NCBI GI: 261360161 Blast Desc: conserved [Verticillium albo-atrum VaMs.102]
  misc_feature (49)..(404): NCBI GI: 46122149 Blast Desc: FG05452.1 [Gibberella zeae PH-1]
  misc_feature (118)..(406): NCBI GI: 116191959 Blast Desc: CHGG_05697 [Chaetomium globosum CBS 148.51] gi|88181610|gb|EAQ89078.1| CHGG_05697 [Chaetomium globosum CBS 148.51]
  misc_feature (229)..(380): NCBI GI: 213405973 Blast Desc: DUF1941 family protein [Schizosaccharomyces japonicus yFS275] gi|212001805|gb|EEB07465.1| DUF1941 family protein [Schizosaccharomyces japonicus yFS275]
MTESTEIQKVRQLLAAKDDTSRFVGLLLLKTTLDNHASSMQYEQITERSEETTQRILESIHSLVLQPHDTTTGGASHLATLEVGSWIPLIEIASKHDVIFSIFYWTWVEGSASVSVGAMQLKIDEALQLFISSFKRQNPTPLVEFITKILSNLNPLLRPSSLRWLQSVTTLMKQLSSNKPTEDGRRAYIHCSAVLLEVYPEQAPQLLFSDEPKASKQIAYLFVKMVQVDIMSTIHVLIPKLNSEQYMSISKRIAAALDIMTSFVGFLIGSSEEDENEDENLPQHSFSPDQILKIHEDLVRTVGDTMEFLRDRWDDHLARARGIQPTQGQELIIFDDPVTAAAVRFIAAWLRDDDGETLRSQAAGLFDLFAELYKLNLTSKDSTELRLPILAAAEGVITTEKGLEAIRTTNFVSQCLMPDLQHILLSQVTDLSSADYLRGSVIIFTLDLIEEHDDASPLKIAKTDIIDFIARSPVLACSEAMKASDPSILHFRSDLINKAITVVLTEPGVKQETRASLKNAASTAVRNWQILEDEEMVARMRHSLAVLERSTAS

SEQ ID NO: 18127 - DNA, 3547 bp, Muscodor strobelii
  misc_feature: SGI EST ID NO. CUFF.42749.0
  misc_feature: Variant of the nucleotide sequence at SEQ ID NO 18125
ctcgcctcttctttgacctacaccagacacgccccttgtagaatgtttggagggtatagatggctagggcgtgtctatggctttaggggatgcgctatcagtaacgaacagaattggtcacagcaatcaaagacacaatctgatttgttactcgtagcctgaaattgtagaccaccaacttttacccaagccatggtcaacactttggtttcttgtttctcgaaggcgtaccgctggttttgattgtggacaataatgatgacttgacacaagtccacacttcacaaggcttccattagcacacgagataagatcagaatgacggagtcaacggagatccagaaggtccgccagttgctggccgccaaagatgatacctctcgcttcgtggggttgcttcttctaaagaccactctcgacaaccatgcatcgtccatgcaatatgaacagatcactgaacggtgagtcttgaatctagagtcttgttcaattgtatgattatgccatgggccttaatttcgattgctcatacaaagtcctaggcttccaaagctaatctttatgatatttggaactccgtttcagcaaagttcttggaccgtcttatacgcactggttcccgcccaacatcaaatgaagcggatcaatcacgagacatgcttaatgtggctgtcgctgtcatatacaccttcgtcaagctattaaatgactgcgctctaaatgagaaactctattcacggataccagggttgatcaacgcgactctctatgcctctgaagagaccacacagcgcatactcgagtcgatacatagtcttgtgctgcagcctcatgacaccaccaccggtggcgcatcacatcttgccacgcttgaagtcggcagttggatcccattgatagagattgcttcaaagcacgacgtaatcttctcgatcttctattggacatgggttgaaggtagtgcttctgtctcggttggggccatgcagctaaagatcgacgaggctcttcagttgttcatatcttccttcaagcggcagaacccgactccattggttgaattcatcacaaagattctaagcaatctgaacccccttctgcgaccatcgagcctacgatggcttcaatctgtcacgactctgatgaaacagctgtcttctaacaaaccaactgaagacgggcgccgcgcttatatacattgtagcgcagtccttttagaagtatatccagaacaggcacctcaactactattttccgatgagccgaaagcatcaaaacaaattgcctatttgttcgtcaaaatggtccaagttgacatcatgtccactatacatgttttgattccgaagctcaatagcgagcaatacatgtcaatatcaaagcgcattgctgcggcactggacataatgacctctttcgtggggttccttattggaagcagcgaagaagacgaaaatgaggacgagaacttgccgcagcatagtttctctccggatcagattctgaaaatccacgaagatctagtcagaacagtgggagatactatggagtttcttcgtgatcgctgggacgaccacctagcaagagcacgtggaatccaaccgacccaaggccaggagttaattatatttgatgatcctgtcacagccgccgctgtgaggttcatagctgcttggcttcgtgatgacgacggcgaaaccttgcgatcacaagctgcaggtctatttgacctgttcgccgaactatacaagctgaacctaacctcgaaagactcgacagagctacgcctacccattctcgctgcggctgaaggtgtgatcacaacggaaaaaggactagaagccatccgcaccaccaacttcgtatcacaatgtctgatgccagatctacagcatatactcctaagccaggtcacagacttgagtagtgctgattatctgcgtggctctgttataatctttacattggacctgatcgaggaacatgacgacgcgtccccgctcaaaattgccaagacggacattatcgacttcatagcacgttctcctgtcctagcatgtagtgaagcgatgaaagcatcggacccttcaatacttcactttaggagcgatctgataaataaagcgataacagtagtcttgacggaacccggagtcaagcaagagaccagggcttctcttaaaaatgcagcctcgaccgctgttcgaaactggcaaatcctcgaagacgaagaaatggttgcaagaatgaggcattcgctagccgtcctggaacgaagcacggcttcatagccattaaaaacagcattaaataaaatgtaaaatgtttatcaattcatgactttgctcgagagcgggtatcagaccacaacttatcaataatctggaaaacagccgtgacatccttcatcacagcactatccaccttgccaccaagtctttgttgaatcttatcaggatgccatctaacacgttcatccttgagcttggcgaggaactccgcctcgccgacttccgtgggatcaataccgaagacataaaactctctgacagcagcagcatccacatcatcgcgacgcgcactctgaacaggccaggaaatagtatacagtgaaccgtcccaggaatcccaggcttgaatgtacttgtcccagtaatctttccagccacgcttcctctttctctcctcgcctttccggagactacgctccatctccttcgtcaaacgcgcagcttcttcatcatgtaagtctttctcccttctgcgctgctccctccgagctcgctcctcgagaagtccctgatgtgtcttctcccacatcttgcgtcgcacaaaggtagcgtattcctcgtcgtccatgcgctctagttcgccgtctggacccgcgcgctcttggctatacacgtggatgggttggccgtagacgccttcccagtaggcggcgccctcgtcgtcggccatggcgtcgaagagggattctcggaaggcggcctcggcgtctagcgctggggcttcgtggggattcggtggcgttggggagcgtgtgcgctctcgccgccttttgtggcggtggtggtgcttatgtctgtggtgtcggcgagacgattcacggtcgtggtcgtgatctcgatcgcgagaccggtctcggtgtgtggtgtcatctctatcgtcgtagtcgcgctcgcgtcgccgagaagagcgatgggagcttgagtgggctgatttgaagcgaaatttagatgtcctccttgatgatgatggttctaccgtgggttcggtcttctgttcttcatcgaggggttccgggggtgggggttcgctatgcgtgaggtcgtcatgggtgggcccttttgaagcagaagccttttcggtgttaaaagaggataatatgtgccgcctcttaggcgatgatggggtggtttccatcacggcatcgtgtgcctatgtgttcccagattatttgctaatgagcctatgctctgcctgcagaaagggaatgttaagtttagttgcgatgacgcgggaaatcaagggtcattgagatgga

SEQ ID NO: 18128 - DNA, 1092 bp, Muscodor strobelii
  misc_feature: SGI cDNA ID NO. 566069
  misc_feature: Encodes the peptide sequence at SEQ ID NO 18129
atggaaaccaccccatcatcgcctaagaggcggcacatattatcctcttttaacaccgaaaaggcttctgcttcaaaagggcccacccatgacgacctcacgcatagcgaacccccacccccggaacccctcgatgaagaacagaagaccgaacccacggtagaaccatcatcatcaaggaggacatctaaatttcgcttcaaatcagcccactcaagctcccatcgctcttctcggcgacgcgagcgcgactacgacgatagagatgacaccacacaccgagaccggtctcgcgatcgagatcacgaccacgaccgtgaatcgtctcgccgacaccacagacataagcaccaccaccgccacaaaaggcggcgagagcgcacacgctccccaacgccaccgaatccccacgaagccccagcgctagacgccgaggccgccttccgagaatccctcttcgacgccatggccgacgacgagggcgccgcctactgggaaggcgtctacggccaacccatccacgtgtatagccaagagcgcgcgggtccagacggcgaactagagcgcatggacgacgaggaatacgctacctttgtgcgacgcaagatgtgggagaagacacatcagggacttctcgaggagcgagctcggagggagcagcgcagaagggagaaagacttacatgatgaagaagctgcgcgtttgacgaaggagatggagcgtagtctccggaaaggcgaggagagaaagaggaagcgtggctggaaagattactgggacaagtacattcaagcctgggattcctgggacggttcactgtatactatttcctggcctgttcagagtgcgcgtcgcgatgatgtggatgctgctgctgtcagagagttttatgtcttcggtattgatcccacggaagtcggcgaggcggagttcctcgccaagctcaaggatgaacgtgttagatggcatcctgataagattcaacaaagacttggtggcaaggtggatagtgctgtgatgaaggatgtcacggctgttttccagattattgataagttgtggtctgatacccgctctcgagcaaagtcatga

SEQ ID NO: 18129 - protein, 363 aa, Muscodor strobelii
  misc_feature: SGI Peptide ID NO. 566069
  misc_feature (131)..(361): NCBI GI: 46122159 Blast Desc: FG05457.1 [Gibberella zeae PH-1]
  misc_feature (1)..(361): NCBI GI: 256729923 Blast Desc: NECHADRAFT_83848 [Nectria haematococca mpVI 77-13-4]
  misc_feature (130)..(358): NCBI GI: 85086987 Blast Desc: NCU00330 [Neurospora crassa OR74A] gi|28918896|gb|EAA28565.1| [Neurospora crassa OR74A]
  misc_feature (1)..(358): NCBI GI: 261360282 Blast Desc: conserved [Verticillium albo-atrum VaMs.102]
  misc_feature (134)..(358): NCBI GI: 171685784 Blast Desc: protein product [Podospora anserina] gi|170942853|emb|CAP68506.1| protein product [Podospora anserina]
  misc_feature (134)..(359): NCBI GI: 156033001 Blast Desc: SS1G_13576 [Sclerotinia sclerotiorum 1980] gi|154698979|gb|EDN98717.1| SS1G_13576 [Sclerotinia sclerotiorum 1980]
  misc_feature (134)..(358): NCBI GI: 154301483 Blast Desc: BC1G_10411 [Botryotinia fuckeliana B05.10] gi|150856151|gb|EDN31343.1| BC1G_10411 [Botryotinia fuckeliana B05.10]
  misc_feature (130)..(360): NCBI GI: 169774831 Blast Desc: [Aspergillus oryzae RIB40] gi|83769746|dbj|BAE59881.1| protein product [Aspergillus oryzae]
  misc_feature (130)..(360): NCBI GI: 238496557 Blast Desc: conserved [Aspergillus flavus NRRL3357] gi|220694394|gb|EED50738.1| conserved [Aspergillus flavus NRRL3357]
  misc_feature (40)..(360): NCBI GI: 121715778 Blast Desc: conserved [Aspergillus clavatus NRRL 1] gi|119403655|gb|EAW14072.1| conserved [Aspergillus clavatus NRRL 1]
METTPSSPKRRHILSSFNTEKASASKGPTHDDLTHSEPPPPEPLDEEQKTEPTVEPSSSRRTSKFRFKSAHSSSHRSSRRRERDYDDRDDTTHRDRSRDRDHDHDRESSRRHHRHKHHHRHKRRRERTRSPTPPNPHEAPALDAEAAFRESLFDAMADDEGAAYWEGVYGQPIHVYSQERAGPDGELERMDDEEYATFVRRKMWEKTHQGLLEERARREQRRREKDLHDEEAARLTKEMERSLRKGEERKRKRGWKDYWDKYIQAWDSWDGSLYTISWPVQSARRDDVDAAAVREFYVFGIDPTEVGEAEFLAKLKDERVRWHPDKIQQRLGGKVDSAVMKDVTAVFQIIDKLWSDTRSRAKS

SEQ ID NO: 18130 - DNA, 1218 bp, Muscodor strobelii
  misc_feature: SGI cDNA ID NO. 566070
  misc_feature: Encodes the peptide sequence at SEQ ID NO 18131
atgagcaagccaggtctttccttcggcctcaatctggccaaaaaaccaggcagcgcaaaaccagcaccaccaaaacggaagcccatgttcggaggtgacgatgattccgatgacgacaataacatgaaaaataaggggcctcaagcaacgagcatcactgaattcgatgatgacttcgtatccggtccattcaaaagccagaacccaacaagcaaaatcgcaagatccaaaggcctacctgccaaccaacccccttccagcaagaataaaaacccacaaatatctcagtatggcgacctatcaagcgccctagagtcgcggcggcaccaagaggccgccgaagagctcgacccctccatatacgactacgatgcagtctacgactcactgaagcccgagaagaaagtcacccaggaggatatcgagcgcaaaccaaaatacatgaaaaacttgatcgcgtctgcagcggtacggaagagagacgctgtgatagcagaggagaagaagattgcgcgtgaaagagaggaggagggcgaggagtatgcggataaggagaagttcgtcacggaagcgtataagaaacaacaagaggagaatagaaggcttgaggaagaagagcgcaggagggaggaggaagaggctaggaagaataagggagggggtatgacggcattctacaaagatttgttagaacgtggtgatcagaggcatgccgaagttgtcaaggcggctgccgaacaggcaaaagctggtccgaaaccgcaggatgatacgggcgaggagaagacgaagacggaggctgatgttgcgcgcgagataaatcagaacggcggtacgattgctatcaatgaggatgggcaggtagtggataagcgggagcttcttaagggtggtcttaaccttggtgcgaagaagacggcgccgcagaaggatatgaataagggtcctgaccggagggacgagcgcgatcagcaacgtgggtttgttggagcgggtggtaagcaagctatgcgcgaacggcagaccagaatgcttgaggcgcaactggagcagtctctcaagaggtctatggagcaggaagaggaagaaaggcagaaggtcgagcgtgcgtccaagagtcgcaagacggatgcggatgtttcgagtgccaaggagagatatctcgcgcgtaagagactggccgagaaagagaagaaaaaggctgctggggctagttga

SEQ ID NO: 18131 - protein, 405 aa, Muscodor strobelii
  misc_feature: SGI Peptide ID NO. 566070
  misc_feature (1)..(388): NCBI GI: 46125739 Blast Desc: FG07247.1 [Gibberella zeae PH-1]
  misc_feature (1)..(400): NCBI GI: 156032999 Blast Desc: SS1G_13575 [Sclerotinia sclerotiorum 1980] gi|154698978|gb|EDN98716.1| SS1G_13575 [Sclerotinia sclerotiorum 1980]
  misc_feature (1)..(400): NCBI GI: 39976925 Blast Desc: MGG_06365 [Magnaporthe grisea 70-15] gi|145016228|gb|EDK00718.1| MGG_06365 [Magnaporthe grisea 70-15]
  misc_feature (1)..(400): NCBI GI: 171686638 Blast Desc: protein product [Podospora anserina] gi|170943280|emb|CAP68933.1| protein product [Podospora anserina]
  misc_feature (49)..(400): NCBI GI: 85109800 Blast Desc: NCU06243 [Neurospora crassa OR74A] gi|28924745|gb|EAA33858.1| [Neurospora crassa OR74A]
  misc_feature (1)..(401): NCBI GI: 239606340 Blast Desc: conserved [Ajellomyces dermatitidis ER-3]
  misc_feature (1)..(402): NCBI GI: 116192247 Blast Desc: CHGG_05841 [Chaetomium globosum CBS 148.51] gi|88181754|gb|EAQ89222.1| CHGG_05841 [Chaetomium globosum CBS 148.51]
  misc_feature (1)..(401): NCBI GI: 261190084 Blast Desc: conserved [Ajellomyces dermatitidis SLH14081] gi|239591280|gb|EEQ73861.1| conserved [Ajellomyces dermatitidis SLH14081]
  misc_feature (1)..(398): NCBI GI: 226293824 Blast Desc: conserved [Paracoccidioides brasiliensis Pb18]
  misc_feature (1)..(398): NCBI GI: 225684203 Blast Desc: conserved [Paracoccidioides brasiliensis Pb03]
MSKPGLSFGLNLAKKPGSAKPAPPKRKPMFGGDDDSDDDNNMKNKGPQATSITEFDDDFVSGPFKSQNPTSKIARSKGLPANQPPSSKNKNPQISQYGDLSSALESRRHQEAAEELDPSIYDYDAVYDSLKPEKKVTQEDIERKPKYMKNLIASAAVRKRDAVIAEEKKIAREREEEGEEYADKEKFVTEAYKKQQEENRRLEEEERRREEEEARKNKGGGMTAFYKDLLERGDQRHAEVVKAAAEQAKAGPKPQDDTGEEKTKTEADVAREINQNGGTIAINEDGQVVDKRELLKGGLNLGAKKTAPQKDMNKGPDRRDERDQQRGFVGAGGKQAMRERQTRMLEAQLEQSLKRSMEQEEEERQKVERASKSRKTDADVSSAKERYLARKRLAEKEKKKAAGAS

SEQ ID NO: 18132 - DNA, 252 bp, Muscodor strobelii
  misc_feature: SGI cDNA ID NO. 566071
  misc_feature: Reduced expression when VOC is produced
  misc_feature: Encodes the peptide sequence at SEQ ID NO 18133
atggactccgaatcagtcaagctcgaggtgatccgccaagtcaagcagcaatatgccatggaaaacgcaaaacaattaatcgagaaaatcaacgaccactgttttgagcgatgcgtcccgaagcccggatcctccctctcatctagcgagaccacctgcttcacggcgtgcatggaaaagtacatgggcgcatggaacgcagtcagcaatacatacatcagcagactccagcgagagggcggaggacactga

SEQ ID NO: 18133 - protein, 83 aa, Muscodor strobelii
  misc_feature: SGI Peptide ID NO. 566071
  misc_feature (11)..(75): Pfam Id: PF02953 Pfam Desc: Tim10/DDP family zinc finger
  misc_feature (3)..(79): NCBI GI: 154289230 Blast Desc: BC1G_16208 [Botryotinia fuckeliana B05.10] gi|150850726|gb|EDN25919.1| BC1G_16208 [Botryotinia fuckeliana B05.10]
  misc_feature (3)..(81): NCBI GI: 156032997 Blast Desc: SS1G_13574 [Sclerotinia sclerotiorum 1980] gi|154698977|gb|EDN98715.1| SS1G_13574 [Sclerotinia sclerotiorum 1980]
  misc_feature (7)..(79): NCBI GI: 169626280 Blast Desc: SNOG_16426 [Phaeosphaeria nodorum SN15] gi|160705806|gb|EAT76251.2| SNOG_16426 [Phaeosphaeria nodorum SN15]
  misc_feature (1)..(81): NCBI GI: 256732792 Blast Desc: [Nectria haematococca mpVI 77-13-4]
  misc_feature (7)..(82): NCBI GI: 189209612 Blast Desc: mitochondrial import inner membrane translocase subunit TIM13 [Pyrenophora tritici-repentis Pt-1C-BFP] gi|187977231|gb|EDU43857.1| mitochondrial import inner membrane
  misc_feature (1)..(81): NCBI GI: 46125741 Blast Desc: FG07248.1 [Gibberella zeae PH-1] gi|90101772|sp|Q4I6B0.1|TIM13_GIBZE RecName: Full=Mitochondrial import inner membrane translocase subunit TIM13
  misc_feature (1)..(83): NCBI GI: 116192245 Blast Desc: CHGG_05840 [Chaetomium globosum CBS 148.51] gi|88181753|gb|EAQ89221.1| CHGG_05840 [Chaetomium globosum CBS 148.51]
  misc_feature (1)..(83): NCBI GI: 261360276 Blast Desc: mitochondrial import inner membrane translocase subunit TIM13 [Verticillium albo-atrum VaMs.102]
  misc_feature (6)..(79): NCBI GI: 115383948 Blast Desc: conserved [Aspergillus terreus NIH2624] gi|114196213|gb|EAU37913.1| conserved [Aspergillus terreus NIH2624]
  misc_feature (3)..(79): NCBI GI: 255946315 Blast Desc: Pc20g14480 [Penicillium chrysogenum Wisconsin 54-1255] gi|211588660|emb|CAP86777.1| Pc20g14480 [Penicillium chrysogenum Wisconsin 54-1255]
  misc_feature: Useful for introducing or modulating the production of volatile compounds
MDSESVKLEVIRQVKQQYAMENAKQLIEKINDHCFERCVPKPGSSLSSSETTCFTACMEKYMGAWNAVSNTYISRLQREGGGH

SEQ ID NO: 18134 - DNA, 2819 bp, Muscodor strobelii
  misc_feature: SGI EST ID NO. CUFF.42786.0
  misc_feature: Variant of the nucleotide sequence at SEQ ID NO 18132
cagaaacgtggttgggacaccgtttggtggtgtaagtcactcgttacctgacacggaatccattagcttgcagcatcaactgacatcttgtaggtgaaagcatctggctacggtagggaacacacgatagagacgctatacgagtggacgcaaccgaaagctgtgcacacactgtcaggccagggcatcaattttgagtggcgagctgtgcacgacgtcttcggtgccgagggtagcgatgcactatgatgaggcgtcgctgatcccgtctaaagacctctactagatgtgtttccagtgtttgaactaaaaggcacgaaaaccttttagagcaatctagtttctgtaaatactacctagtagtcgacccgggactcacgtatctttgaatggggaaaatgttggcaaattggcacccatcgttttccagtcctgttcttctagacctacgcaatcagcctcaatgatcatctagaatcatgtatggaagatcaatgacgatggccctttctgaaaagtagtatgggaggcctaagggggtgttgctatttgctagatgaatgaagatgacaatttggtaaggtatgataatttgtcttccaggtcccactggcaatgggtgaggactcacaggtgcaggtgacgtgcacgccaagagaacgctaaagtcaagcacccggcggctccagtcccaagcgttaggacctgcaagcaaaaattggagaccctctgcggaaagcttcagctcttctcaaaattgatattatcgcatcatcaactcccagaaatacaattgctaaagtacacttccgctcttctactaccagaaattcgaaacgatggactccgaatcagtcaagctcgaggtgatccgccaagtcaagcagcaatatgccatggaaaacgcaaaacaattaatcgagaaaatcaacgaccactgttttgagcgatgcgtcccgaagcccggatcctccctctcatctagcgagaccacctgcttcacggcgtgcatggaaaagtacatgggcgcatggaacgcagtcagcaatacatacatcagcagactccagcgagagggcggaggacactgaaccagcacgagtaccagttcataaccgacatatcggcttgaccacgagtttcgagtcggttcgatcgcctgtatataatgagaagagaggagatccgtgtacctatatactgtacgacaacggcgacgacgttttgtggcagtttagacgtcaccccgaaagggataggcgggctttgaagagctgatatgctctgacgaatgctttggcgtggttggctagcgatctataaacaggagtatagaatttgtacattaacgagactagtgtacgatcaacgaagaaaaaagaacaatctcgacattagctatctcatgggtttcggattgagcgtttctcggagggtttgctgtcgcaacttgggtggtctttacaagttttattcttatgctaacatgtagcacatggagcacgtcaactagccccagcagcctttttcttctctttctcggccagtctcttacgcgcgagatatctctccttggcactcgaaacatccgcatccgtcttgcgactcttggacgcacgctcgaccttctgcctttcttcctcttcctgctccatagacctcttgagagactgctccagttgcgcctcaagcattctggtctgccgttcgcgcatagcttgcttaccacccgctccaacaaacccacgttgctgatcgcgctcgtccctccggtcaggacccttattcatatccttctgcggcgccgtcttcttcgcaccaaggttaagaccacccttaagaagctcccgcttatccactacctgcccatcctcattgatagcaatcgtaccgccgttctgatttatctcgcgcgcaacatcagcctccgtcttcgtcttctcctcgcccgtatcatcctgcggtttcggaccagcttttgcctgttcggcagccgccttgacaacttcggcatgcctctgatcaccacgttctaacaaatctttgtagaatgccgtcataccccctcccttattcttcctagcctcttcctcctccctcctgcgctcttcttcctcaagccttctattctcctcttgttgtttcttatacgcttccgtgacgaacttctccttatccgcatactcctcgccctcctcctctctttcacgcgcaatcttcttctcctctgctatcacagcgtctctcttccgtaccgctgcagacgcgatcaagtttttcatgtattttggtttgcgctcgatatcctcctgggtgactttcttctcgggcttcagtgagtcgtagactgcatcgtagtcgtatatggaggggtcgagctcttcggcggcctcttggtgccgccgcgactctagggcgcttgataggtcgccatactgagatatttgtgggtttttattcttgctggaagggggttggttggcaggtaggcctttggatcttgcgattttgcttgttgggttctggcttttgaatggaccggatacgaagtcatcatcgaattcagtgatgctcgttgcttgaggccccttatttttcatgttattgtcgtcatcggaatcatcgtcacctccgaacatgggcttccgttttggtggtgctggttttgcgctgcctggttttttggccagattgaggccgaaggaaagacctggcttgctcatcttggacggtgtggacgtgttgtatagtgtggctagagttgagattggttgtcgcttttcattcaaggccagctttaacgaaatgcgcggttgcgg

SEQ ID NO: 18135 - DNA, 1605 bp, Muscodor strobelii
  misc_feature: SGI cDNA ID NO. 566072
  misc_feature: Encodes the peptide sequence at SEQ ID NO 18136
atgcgagtagaggacccctcgcggcatctcgacctcagcgcgaagcgaagcatattcccagagttcccagaactctctacctaccgctactcatgcgatgatcctcaaaagagatgggcagtcgagaaccccgctaccggcaaaatcatcacaacacttcaatcaggagacgagaagactgtagccgcagccgtggaagcctctcacgaagcttacgtcaagcgctggaagcctctgactgcccttgagcgaggagagtatctctttaaatgtgccgatgaacttgaaaaacacgtcgacgagctttccatactcctatgtctcgagaatggaaagcctcagcaggatgcgaagagattcgactgcggctttctcgtcaatattttcagatattttgggtcaattgtcggcaaacttccgtctcacttcttcgaccgtgggagctcttactgcacaattcaccatgagcctttcggcgtgtgtgtcgggatcctccccttcaattggccgcccattcatacaggtggaaaagttgctcctgcgatcgcggcaggaaacacgttcatcttgaagcctggcgagcaggcgccgctgacggtgattcgcatcgtagaaattgtcttgcctaaggatgtggtccaagtcattccaggactaggtcctgaagtaccccaagcattgatcaatcacccactggtaggcaaggtgtcattcaccggctcaacagctgccggtgccgcagtcgccacgacggcgtccaagttcgtcaagcccgtggtactcgaactaggaggcaaggacgcgttcgtcgtcttcgacgatgctgattttgatgctgccgtgcgctgcgctctcgagggtgcatattttaacaagggagaagcatgtacagccgcttcacgcatcctagtccagcgaggtatctatgagaagttcgtcgagaaacttgctgccggagtcaagaaaattcagatgggcaatggcatggatccaaagactcatgtcggacctcaagtgtcaaaagtgcagcaaaagaagttgctcgactatatcgagctcggaaagaaagaaggagcacgaattgcagcacaggctgagttaccgtccgaccctgaatgcaaggatgggtttttcatcccagcgacactgttcgctgatgttcgcgaggatatgaagattgccagcgatgagatgtttggagctatcggtaagcatcagatatcaaattgtgatcaagaacttctcgctcagtatgccacagcaaccgttatgccgttcgatactttcgaggacgccattcgagttgtaaactcgagcaactacggcttgacgtcgatcgttttcactgagaatcagatcaaagcaaatcgatacgtccgggcagttgaagctgggatggtatgggtcaacaactacaacagaaacgtggttgggacaccgtttggtggtgtgaaagcatctggctacggtagggaacacacgatagagacgctatacgagtggacgcaaccgaaagctgtgcacacactgtcaggccagggcatcaattttgagtggcgagctgtgcacgacgtcttcggtgccgagggtagcgatgcactatga

SEQ ID NO: 18136 - protein, 534 aa, Muscodor strobelii
  misc_feature: SGI Peptide ID NO. 566072
  misc_feature (28)..(507): Pfam Id: PF00171 Pfam Desc: Aldehyde dehydrogenase family
  misc_feature (28)..(400): Pfam Id: PF00171 Pfam Desc: Aldehyde dehydrogenase family
  misc_feature (421)..(507): Pfam Id: PF00171 Pfam Desc: Aldehyde dehydrogenase family
  misc_feature (14)..(525): NCBI GI: 106879077 Blast Desc: dehydrogenase [Monascus purpureus]
  misc_feature (23)..(525): NCBI GI: 54025234 Blast Desc: aldehyde dehydrogenase [Nocardia farcinica IFM 10152] gi|54016742|dbj|BAD58112.1| aldehyde dehydrogenase [Nocardia farcinica IFM 10152]
  misc_feature (31)..(508): NCBI GI: 58268384 Blast Desc: aldehyde dehydrogenase (alddh) [Cryptococcus neoformans var. neoformans JEC21] gi|134112772|ref|XP_774929.1| CNBF0940 [Cryptococcus neoformans var. neoformans B-3501A] var.
  misc_feature (43)..(507): NCBI GI: 226349640 Blast Desc: aldehyde dehydrogenase [Rhodococcus opacus B4] gi|226245555|dbj|BAH55902.1| aldehyde dehydrogenase [Rhodococcus opacus B4]
  misc_feature (37)..(507): NCBI GI: 161085576 Blast Desc: aldehyde dehydrogenase family 1 subfamily A3 [Rattus norvegicus]
  misc_feature (37)..(507): NCBI GI: 23463283 Blast Desc: aldehyde dehydrogenase 1A3 [Rattus norvegicus] gi|52782764|sp|Q8K4D8.1|AL1A3_RAT RecName: Full=Aldehyde dehydrogenase family 1 member A3; AltName: Full=Aldehyde 6; 3; 6
  misc_feature (37)..(507): NCBI GI: 149057108 Blast Desc: aldehyde dehydrogenase family 1, subfamily A3, isoform CRA_a [Rattus norvegicus] gi|183986519|gb|AAI66415.1| Aldehyde dehydrogenase 1 family, member A3 [Rattus norvegicus]
  misc_feature (37)..(507): NCBI GI: 170650621 Blast Desc: aldehyde dehydrogenase 1A3 [Mus musculus] gi|52782793|sp|Q9JHW9.1|AL1A3_MOUSE RecName: Full=Aldehyde dehydrogenase family 1 member A3; AltName: Full=Aldehyde 6; 3; 3
  misc_feature (37)..(507): NCBI GI: 11320879 Blast Desc: AF152359_1 aldehyde dehydrogenase-6 [Mus musculus]
  misc_feature (37)..(513): NCBI GI: 167461352 Blast Desc: Aldehyde dehydrogenase [Paenibacillus larvae subsp. larvae BRL-230010]
  misc_feature (37)..(507): SWISSPROT Homolog: EC 1.2.1.5 Aldehyde dehydrogenase (NAD(P)(+))
  misc_feature: Useful for introducing or modulating the production of volatile compounds
  misc_feature: Useful for fungicidal and/or biocontrol applications
MRVEDPSRHLDLSAKRSIFPEFPELSTYRYSCDDPQKRWAVENPATGKIITTLQSGDEKTVAAAVEASHEAYVKRWKPLTALERGEYLFKCADELEKHVDELSILLCLENGKPQQDAKRFDCGFLVNIFRYFGSIVGKLPSHFFDRGSSYCTIHHEPFGVCVGILPFNWPPIHTGGKVAPAIAAGNTFILKPGEQAPLTVIRIVEIVLPKDVVQVIPGLGPEVPQALINHPLVGKVSFTGSTAAGAAVATTASKFVKPVVLELGGKDAFVVFDDADFDAAVRCALEGAYFNKGEACTAASRILVQRGIYEKFVEKLAAGVKKIQMGNGMDPKTHVGPQVSKVQQKKLLDYIELGKKEGARIAAQAELPSDPECKDGFFIPATLFADVREDMKIASDEMFGAIGKHQISNCDQELLAQYATATVMPFDTFEDAIRVVNSSNYGLTSIVFTENQIKANRYVRAVEAGMVWVNNYNRNVVGTPFGGVKASGYGREHTIETLYEWTQPKAVHTLSGQGINFEWRAVHDVFGAEGSDAL

SEQ ID NO: 18137 - DNA, 1593 bp, Muscodor strobelii
  misc_feature: SGI cDNA ID NO. 566073
  misc_feature: Encodes the peptide sequence at SEQ ID NO 18138
atgcgagtagaggacccctcgcggcatctcgacctcagcgcgaagcgaagcatattcccagagttcccagaactctctacctaccgctactcatgcgatgatcctcaaaagagatgggcagtcgagaaccccgctaccggcaaaatcatcacaacacttcaatcaggagacgagaagactgtagccgcagccgtggaagcctctcacgaagcttacgtcaagcgctggaagcctctgactgcccttgagcgaggagagtatctctttaaatgtgccgatgaacttgaaaaacacgtcgacgagctttccatactcctatgtctcgagaatggaaagcctcagcaggatgcgaagagattcgactgcggctttctcgtcaatattttcagatattttgggtcaattgtcggcaaacttccgtctcacttcttcgaccgtgggagctcttactgcacaattcaccatgagcctttcggcgtgtgtgtcgggatcctccccttcaattggccgcccattcatacaggtggaaaagttgctcctgcgatcgcggcaggaaacacgttcatcttgaagcctggcgagcaggcgccgctgacgctgtcgacagtcttgcctaaggatgtggtccaagtcattccaggactaggtcctgaagtaccccaagcattgatcaatcacccactggtaggcaaggtgtcattcaccggctcaacagctgccggtgccgcagtcgccacgacggcgtccaagttcgtcaagcccgtggtactcgaactaggaggcaaggacgcgttcgtcgtcttcgacgatgctgattttgatgctgccgtgcgctgcgctctcgagggtgcatattttaacaagggagaagcatgtacagccgcttcacgcatcctagtccagcgaggtatctatgagaagttcgtcgagaaacttgctgccggagtcaagaaaattcagatgggcaatggcatggatccaaagactcatgtcggacctcaagtgtcaaaagtgcagcaaaagaagttgctcgactatatcgagctcggaaagaaagaaggagcacgaattgcagcacaggctgagttaccgtccgaccctgaatgcaaggatgggtttttcatcccagcgacactgttcgctgatgttcgcgaggatatgaagattgccagcgatgagatgtttggagctatcggtaagcatcagatatcaaattgtgatcaagaacttctcgctcagtatgccacagcaaccgttatgccgttcgatactttcgaggacgccattcgagttgtaaactcgagcaactacggcttgacgtcgatcgttttcactgagaatcagatcaaagcaaatcgatacgtccgggcagttgaagctgggatggtatgggtcaacaactacaacagaaacgtggttgggacaccgtttggtggtgtgaaagcatctggctacggtagggaacacacgatagagacgctatacgagtggacgcaaccgaaagctgtgcacacactgtcaggccagggcatcaattttgagtggcgagctgtgcacgacgtcttcggtgccgagggtagcgatgcactatga

SEQ ID NO: 18138 - protein, 530 aa, Muscodor strobelii
  misc_feature: SGI Peptide ID NO. 566073
  misc_feature (28)..(503): Pfam Id: PF00171 Pfam Desc: Aldehyde dehydrogenase family
  misc_feature (28)..(396): Pfam Id: PF00171 Pfam Desc: Aldehyde dehydrogenase family
  misc_feature (417)..(503): Pfam Id: PF00171 Pfam Desc: Aldehyde dehydrogenase family
  misc_feature (14)..(521): NCBI GI: 106879077 Blast Desc: dehydrogenase [Monascus purpureus]
  misc_feature (23)..(521): NCBI GI: 54025234 Blast Desc: aldehyde dehydrogenase [Nocardia farcinica IFM 10152] gi|54016742|dbj|BAD58112.1| aldehyde dehydrogenase [Nocardia farcinica IFM 10152]
  misc_feature (31)..(508): NCBI GI: 58268384 Blast Desc: aldehyde dehydrogenase (alddh) [Cryptococcus neoformans var. neoformans JEC21] gi|134112772|ref|XP_774929.1| CNBF0940 [Cryptococcus neoformans var. neoformans B-3501A] var.
  misc_feature (43)..(503): NCBI GI: 226349640 Blast Desc: aldehyde dehydrogenase [Rhodococcus opacus B4] gi|226245555|dbj|BAH55902.1| aldehyde dehydrogenase [Rhodococcus opacus B4]
  misc_feature (37)..(503): NCBI GI: 161085576 Blast Desc: aldehyde dehydrogenase family 1 subfamily A3 [Rattus norvegicus]
  misc_feature (37)..(503): NCBI GI: 149057108 Blast Desc: aldehyde dehydrogenase family 1, subfamily A3, isoform CRA_a [Rattus norvegicus] gi|183986519|gb|AAI66415.1| Aldehyde dehydrogenase 1 family, member A3 [Rattus norvegicus]
  misc_feature (37)..(503): NCBI GI: 23463283 Blast Desc: aldehyde dehydrogenase 1A3 [Rattus norvegicus] gi|52782764|sp|Q8K4D8.1|AL1A3_RAT RecName: Full=Aldehyde dehydrogenase family 1 member A3; AltName: Full=Aldehyde 6; 3; 6
  misc_feature (37)..(503): NCBI GI: 170650621 Blast Desc: aldehyde dehydrogenase 1A3 [Mus musculus] gi|52782793|sp|Q9JHW9.1|AL1A3_MOUSE RecName: Full=Aldehyde dehydrogenase family 1 member A3; AltName: Full=Aldehyde 6; 3; 3
  misc_feature (37)..(503): NCBI GI: 11320879 Blast Desc: AF152359_1 aldehyde dehydrogenase-6 [Mus musculus]
  misc_feature (37)..(503): NCBI GI: 228908577 Blast Desc: Aldehyde dehydrogenase [Bacillus thuringiensis IBL 200] gi|228851042|gb|EEM95857.1| Aldehyde dehydrogenase [Bacillus thuringiensis IBL 200]
  misc_feature (37)..(503): SWISSPROT Homolog: EC 1.2.1.5 Aldehyde dehydrogenase (NAD(P)(+))
  misc_feature: Useful for introducing or modulating the production of volatile compounds
  misc_feature: Useful for fungicidal and/or biocontrol applications
MRVEDPSRHLDLSAKRSIFPEFPELSTYRYSCDDPQKRWAVENPATGKIITTLQSGDEKTVAAAVEASHEAYVKRWKPLTALERGEYLFKCADELEKHVDELSILLCLENGKPQQDAKRFDCGFLVNIFRYFGSIVGKLPSHFFDRGSSYCTIHHEPFGVCVGILPFNWPPIHTGGKVAPAIAAGNTFILKPGEQAPLTLSTVLPKDVVQVIPGLGPEVPQALINHPLVGKVSFTGSTAAGAAVATTASKFVKPVVLELGGKDAFVVFDDADFDAAVRCALEGAYFNKGEACTAASRILVQRGIYEKFVEKLAAGVKKIQMGNGMDPKTHVGPQVSKVQQKKLLDYIELGKKEGARIAAQAELPSDPECKDGFFIPATLFADVREDMKIASDEMFGAIGKHQISNCDQELLAQYATATVMPFDTFEDAIRVVNSSNYGLTSIVFTENQIKANRYVRAVEAGMVWVNNYNRNVVGTPFGGVKASGYGREHTIETLYEWTQPKAVHTLSGQGINFEWRAVHDVFGAEGSDAL

SEQ ID NO: 18139 - DNA, 1014 bp, Muscodor strobelii
  misc_feature: SGI cDNA ID NO. 566074
  misc_feature: Encodes the peptide sequence at SEQ ID NO 18140
atgaaggctggtcagtggaatccaaaaacacaagaggtggagataaatgatgtgcccattccagagcccgcaccgggacagtttctagtgaagatagtctcagcttcactatgccactccgatctcttgacgggcatgagacccgacaaaacattaacaatgggccacgaaggcgcaggcgtcattgagaagattcacccttcggctgcgggcaaaggtttcaaaatcggcgacgtgatcggcttcaactatttccttggttgctgcttcgaatgtgatggatgtatggtgcacaacgtttggtgcgagaatggcacgcccttgacgcagggtctgcagaccgatggtttcttcgctgagtacactatcgtcgattatcataacgctattatccttcctaaagaactagatgtgaagaaagcgagcccactcttctgcgctggaattactgcattccacgccatagatagttgtgagttacagcctggtcaatggatcgcgatagtgggctgcggcggactagggcagtatgctactcagtacgctaaagcaatgggggctaaggtgattggtgtcgatatcaacgacgatgtgctcgattctgtgaaggaactaggcgcagacgccgtcttcaattcgaggacgaatgccaactacgtcgcagagataaagaaactcaccggcaagggctgcgatactgcggccgtattctctgcagctcaggctgcattcactagcgcccctgatttactgcgcattggtggtattctaatggtcgtcggcgtcgccaaggataatcttcaattctcgacttttgacttgatcaccggaaagtttcgagtcaagggcgacagcacgagcattccacaacggatgcccaaggctgtcgaattcactgctaagcataaaattcaacctgatgttgactataacaagatcgaagacctgccaagaatggttaaagatatgcgtgaaggcaaggcaaaacgtcgacaagttgtcctgttcgaataa

SEQ ID NO: 18140 - protein, 337 aa, Muscodor strobelii
  misc_feature: SGI Peptide ID NO. 566074
  misc_feature (25)..(132): Pfam Id: PF08240 Pfam Desc: Alcohol dehydrogenase GroES-like domain
  misc_feature (162)..(301): Pfam Id: PF00107 Pfam Desc: Zinc-binding dehydrogenase
  misc_feature (166)..(210): Pfam Id: PF02826 Pfam Desc: D-isomer specific 2-hydroxyacid dehydrogenase, NAD binding domain
  misc_feature (1)..(336): NCBI GI: 189208556 Blast Desc: alcohol dehydrogenase [Pyrenophora tritici-repentis Pt-1C-BFP] gi|187976704|gb|EDU43330.1| alcohol dehydrogenase [Pyrenophora tritici-repentis Pt-1C-BFP]
  misc_feature (46)..(336): NCBI GI: 169613472 Blast Desc: SNOG_09867 [Phaeosphaeria nodorum SN15] gi|160702732|gb|EAT83132.2| SNOG_09867 [Phaeosphaeria nodorum SN15]
  misc_feature (11)..(337): NCBI GI: 261355415 Blast Desc: alcohol dehydrogenase [Verticillium albo-atrum VaMs.102]
  misc_feature (1)..(337): NCBI GI: 259485280 Blast Desc: TPA: conserved [Aspergillus nidulans FGSC A4]
  misc_feature (1)..(319): NCBI GI: 67538232 Blast Desc: AN5286.2 [Aspergillus nidulans FGSC A4] gi|40743256|gb|EAA62446.1| AN5286.2 [Aspergillus nidulans FGSC A4]
  misc_feature (1)..(337): NCBI GI: 189191574 Blast Desc: alcohol dehydrogenase [Pyrenophora tritici-repentis Pt-1C-BFP] gi|187973732|gb|EDU41231.1| alcohol dehydrogenase [Pyrenophora tritici-repentis Pt-1C-BFP]
  misc_feature (48)..(335): NCBI GI: 256724756 Blast Desc: NECHADRAFT_84382 [Nectria haematococca mpVI 77-13-4]
  misc_feature (1)..(336): NCBI GI: 256725248 Blast Desc: NECHADRAFT_88510 [Nectria haematococca mpVI 77-13-4]
  misc_feature (12)..(327): NCBI GI: 169624274 Blast Desc: SNOG_15393 [Phaeosphaeria nodorum SN15] gi|111056206|gb|EAT77326.1| SNOG_15393 [Phaeosphaeria nodorum SN15]
  misc_feature (1)..(334): NCBI GI: 262037728 Blast Desc: alcohol dehydrogenase 1 [Leptotrichia goodfellowii F0264] gi|261748200|gb|EEY35597.1| alcohol dehydrogenase 1 [Leptotrichia goodfellowii F0264]
  misc_feature (9)..(336): SWISSPROT Homolog: EC 1.1.1.1 Alcohol dehydrogenase
MKAGQWNPKTQEVEINDVPIPEPAPGQFLVKIVSASLCHSDLLTGMRPDKTLTMGHEGAGVIEKIHPSAAGKGFKIGDVIGFNYFLGCCFECDGCMVHNVWCENGTPLTQGLQTDGFFAEYTIVDYHNAIILPKELDVKKASPLFCAGITAFHAIDSCELQPGQWIAIVGCGGLGQYATQYAKAMGAKVIGVDINDDVLDSVKELGADAVFNSRTNANYVAEIKKLTGKGCDTAAVFSAAQAAFTSAPDLLRIGGILMVVGVAKDNLQFSTFDLITGKFRVKGDSTSIPQRMPKAVEFTAKHKIQPDVDYNKIEDLPRMVKDMREGKAKRRQVVLFE

SEQ ID NO: 18141 - DNA, 1686 bp, Muscodor strobelii
  misc_feature: SGI cDNA ID NO. 566075
  misc_feature: Encodes the peptide sequence at SEQ ID NO 18142
atgctagtaagccagacagggcctgggaaacacatttgggcttactcaggacttctcggtggccgtaacattcactacacgcttcacgttgacgaagaaatggttgaagaggagccgcaacgtaacaacgacagtcccaccatcccgccgccactacgacacatggaagatatgtcgaatgtcctagacaaagagcacatgacagaactgacagaacgacaagccgtgggatccgcagttatcgctgcgataaagaagacggcttacctagaaggcaccgatttcaagttggagtatgccgctcatgctaccctgcagagaggtagcttggagcgcctggcactggaagctgatataccgctcagctcatatttgatcccaccactactcaattggagagttgaccagacagagcaccgcgcgactccctttgcctccagcgcctttcgcctcagcccaatatttcatattgccgaaggatacaccactatcccacagaagaacaatatggcgacccgtacgctggaggctcgcttcgagcgtatgtcggtcaacgacgaaaacgagtatcataagtccaaggtcactacgacgacgacacagttggcccagagcaatagcaggccgaacctctacaaggttgcgctccagacccagaacacaagcaccgtcaccgccgctgtcaccctaccctcacaagctgcccagcgcaaggccgcccagccagcatctcccacacggaaagccattgccacaacgactgtcgtcgcaacccgcatctcacaagacgagctcgcccaggtcgagcgcaaatctgtcacattaatagagcagccctctttgcccaagcaattccacctgggcatgttcgagattggtcggcccctgggcaagggcaagttcggaagagtctacttggcccgcgagcgcaccagtgggtttatctgcgccctcaaggtgctgcacaagagcgagctgtcacaaggcaaggtagagaagcaggttcgccgagaaatcgagattcagagtaacctcagacatcccaacattcttcagctcttcggacatttccacgatagcaaaagagtattcctcattctcgaattcgcggcaaagggtgaactatacaagcacttacgccgcgagaaccgctttcccgaatggaaggcatctcagtacatcgcccagatggccagtgctctacgctacctgcaccgcaagcacgttatccatcgagatatcaagcctgagaatattctcatgggaatacatggcgaaatcaaaatatccgattttggctggagcgtccacgcgcctaacaaccgtcgtgagaccatgtgcggaaccctagactatctcccccctgagatggttaagtctggtagctccgacaactcgtacaatgaaaagatcgatttgtggagtttgggtgttctgacatacgagttccttgtgggtgaggcgccttttgaggatacgcctgtcatgacacagagaagaattgcccgggctgatatgaccatcccatcctttgtcagcccggaggcgagggacctaattaaaagactgcttgtccttgatccagagaagagactacctcttgagcaagtgcagacacatccctggatcctcaaacactgtgtgaaggcggaacgtggagctaatcgcgagagggcaaaccaataa

SEQ ID NO: 18142 - protein, 561 aa, Muscodor strobelii
  misc_feature: SGI Peptide ID NO. 566075
  misc_feature (290)..(543): Pfam Id: PF00069 Pfam Desc: Protein kinase domain
  misc_feature (290)..(541): Pfam Id: PF07714 Pfam Desc: Protein tyrosine kinase
  misc_feature (290)..(433): Pfam Id: PF07714 Pfam Desc: Protein tyrosine kinase
  misc_feature (170)..(559): NCBI GI: 46125163 Blast Desc: FG06959.1 [Gibberella zeae PH-1]
  misc_feature (170)..(558): NCBI GI: 171686540 Blast Desc: protein product [Podospora anserina] gi|170943231|emb|CAP68884.1| protein product [Podospora anserina]
  misc_feature (170)..(559): NCBI GI: 39974749 Blast Desc: MGG_00479 [Magnaporthe grisea 70-15] gi|145018624|gb|EDK02903.1| MGG_00479 [Magnaporthe grisea 70-15]
  misc_feature (172)..(558): NCBI GI: 116208166 Blast Desc: CHGG_03376 [Chaetomium globosum CBS 148.51] gi|88183973|gb|EAQ91441.1| CHGG_03376 [Chaetomium globosum CBS 148.51]
  misc_feature (170)..(519): NCBI GI: 261360293 Blast Desc: serine/threonine-protein kinase [Verticillium albo-atrum VaMs.102]
  misc_feature (172)..(561): NCBI GI: 226284576 Blast Desc: serine/threonine-protein kinase [Paracoccidioides brasiliensis Pb01]
  misc_feature (170)..(561): NCBI GI: 256732716 Blast Desc: [Nectria haematococca mpVI 77-13-4]
  misc_feature (172)..(561): NCBI GI: 261187376 Blast Desc: serine/threonine-protein kinase Eg2 [Ajellomyces dermatitidis SLH14081] gi|239594693|gb|EEQ77274.1| serine/threonine-protein kinase Eg2 [Ajellomyces dermatitidis Eg2
  misc_feature (172)..(561): NCBI GI: 225684186 Blast Desc: serine/threonine-protein kinase [Paracoccidioides brasiliensis Pb03] gi|226293807|gb|EEH49227.1| serine/threonine-protein kinase [Paracoccidioides brasiliensis
  misc_feature (170)..(556): NCBI GI: 115386018 Blast Desc: serine/threonine-protein kinase Eg2 [Aspergillus terreus NIH2624] gi|114190548|gb|EAU32248.1| serine/threonine-protein kinase Eg2 [Aspergillus terreus NIH2624]
MLVSQTGPGKHIWAYSGLLGGRNIHYTLHVDEEMVEEEPQRNNDSPTIPPPLRHMEDMSNVLDKEHMTELTERQAVGSAVIAAIKKTAYLEGTDFKLEYAAHATLQRGSLERLALEADIPLSSYLIPPLLNWRVDQTEHRATPFASSAFRLSPIFHIAEGYTTIPQKNNMATRTLEARFERMSVNDENEYHKSKVTTTTTQLAQSNSRPNLYKVALQTQNTSTVTAAVTLPSQAAQRKAAQPASPTRKAIATTTVVATRISQDELAQVERKSVTLIEQPSLPKQFHLGMFEIGRPLGKGKFGRVYLARERTSGFICALKVLHKSELSQGKVEKQVRREIEIQSNLRHPNILQLFGHFHDSKRVFLILEFAAKGELYKHLRRENRFPEWKASQYIAQMASALRYLHRKHVIHRDIKPENILMGIHGEIKISDFGWSVHAPNNRRETMCGTLDYLPPEMVKSGSSDNSYNEKIDLWSLGVLTYEFLVGEAPFEDTPVMTQRRIARADMTIPSFVSPEARDLIKRLLVLDPEKRLPLEQVQTHPWILKHCVKAERGANRERANQ

SEQ ID NO: 18143 - DNA, 2703 bp, Muscodor strobelii
  misc_feature: SGI EST ID NO. CUFF.42834.0
  misc_feature: Variant of the nucleotide sequence at SEQ ID NO 18141
ctcagctcatatttgatcccaccactactcaattggagagttgaccagacagagcaccgcgcgactccctttgcctccagcgcctttcgcctcagcccaatatttcatattgccgaaggatacaccactatcccacagaagaacaatatggcgacccgtacgctggaggctcgcttcgagcgtatgtcggtcaacgacgaaaacgagtatcataagtccaaggtcactacgacgacgacacagttggcccagagcaatagcaggccgaacctctacaaggttgcgctccagacccagaacacaagcaccgtcaccgccgctgtcaccctaccctcacaagctgcccagcgcaaggccgcccagccagcatctcccacacggaaagccattgccacaacgactgtcgtcgcaacccgcatctcacaagacgagctcgcccaggtcgagcgcaaatctgtcacattaatagagcagccctctttgcccaagcaattccacctgggcatgttcgagattggtcggcccctgggcaagggcaagttcggaagagtctacttggcccgcgagcgcaccagtgggtttatctgcgccctcaaggtgctgcacaagagcgagctgtcacaaggcaaggtagagaagcaggttcgccgagaaatcgagattcagagtaacctcagacatcccaacattcttcagctcttcggacatttccacgatagcaaaagagtattcctcattctcgaattcgcggcaaagggtgaactatacaagcacttacgccgcgagaaccgctttcccgaatggaaggcatctcagtacatcgcccagatggccagtgctctacgctacctgcaccgcaagcacgttatccatcgagatatcaagcctgagaatattctcatgggaatacatggcgaaatcaaaatatccgattttggctggagcgtccacgcgcctaacaaccgtcgtgagaccatgtgcggaaccctagactatctcccccctgagatggttaagtctggtagctccgacaactcgtacaatgaaaagatcgatttgtggagtttgggtgttctgacatacgagttccttgtgggtgaggcgccttttgaggatacgcctgtcatgacacagagaagaattgcccgggctgatatgaccatcccatcctttgtcagcccggaggcgagggacctaattaaaagactgcttgtccttgatccagagaagagactacctcttgagcaagtgcagacacatccctggatcctcaaacactgtgtgaaggcggaacgtggagctaatcgcgagagggcaaaccaataacgagggtcttatgaattaatgaacgacttctcatttgtatcatatcaatcataacggcgccggcgtctgtggcattagggcattgggtgttctacgaaatctgttggagttaagggagatggctagatagttccatcgacacggaaataaagtaactttgacatggccaatggctttgtttcatttcacatatatctccctgttcgcaagggagcgggtattctcgatgatgctaatagtacacattgtgcgctctctcgcaaagaccatacgagttcttttctctttcttcatctatagacttcatcgaatggtcttgtatctgagaaacatgagtcccagacctgattgaccactttcaccgcatgaacatcatctttacatgacggccgggccagtaaagacattactgctcgctttcgtacacaattctggaactgttgtgtcaaagtgagatttcctctcgtgaaggtttctttcgtccatctgcactcgccactcaacatggctgcacggatctgtatttattgccgacgttagtgaaaaattctagaacctgaactgccgccaattacagctgcgggagtcacatacttcggtgcaagcggaatgcctcagatcttttttcccttcccaatcaaccttgtagcgcagatggtcccaggcgtggaccatctcatgggcgagtgtatcttctaaatgggcttgatttttgatctcattggcacatattaaaactccgacgtcaggatgaaaccctccgctcgattttgctacctgaccgtcctcggtcagacgagtaggacatcgttggcatataatgttggatccgtccaatttgccgccaagatcttcgatcttttggcggagaaaacgcacagtgggagagtatttgagtgcccagtcgcgatatgaatcgcatcgtttgcagtcatactcctcgttggctacatggcggctttctctgtagtggaaggcgccctcgggagttatggaccctgtcacgatcttgaaatagttcacccaccacgccgtcttcgggtcgaaccctgtgcgcttcgggtcattttcgaggtaattaggaggctcagcagacgatgatatcggcgttggctgggatgaagccgtaggcgtgggcgtcgttgactgcgaggacatggtatattcgtgtggtaggtcagactctccgatggtcgaggtcgacgcaaccggatttgttgttgcgctcgtctattttcatgggtcggagccacaatgatgatgctctcgatctcaatatgatgcaaagaaggcttgcgattatgcgtctcaaaattctctcggtgatatcttcttcaatggatgtctcgagataaccagaagccagacacagtgaaa

SEQ ID NO: 18144 - DNA, 792 bp, Muscodor strobelii
  misc_feature: SGI cDNA ID NO. 566076
  misc_feature: Encodes the peptide sequence at SEQ ID NO 18145
atgtcctcgcagtcaacgacgcccacgcctacggcttcatcccagccaacgccgatatcatcgtctgctgagcctcctaattacctcgaaaatgacccgaagcgcacagggttcgacccgaagacggcgtggtgggtgaactatttcaagatcgtgacagggtccataactcccgagggcgccttccactacagagaaagccgccatgtagccaacgaggagtatgactgcaaacgatgcgattcatatcgcgactgggcactcaaatactctcccactgtgcgttttctccgccaaaagatcgaagatcttggcggcaaattggacggatccaacattatatgccaacgatgtcctactcgtctgaccgaggacggtcaggtagcaaaatcgagcggagggtttcatcctgacgtcggagttttaatatgtgccaatgagatcaaaaatcaagcccatttagaagatacactcgcccatgagatggtccacgcctgggaccatctgcgctacaaggttgattgggaagggaaaaaagatctgaggcattccgcttgcaccgaaatccgtgcagccatgttgagtggcgagtgcagatggacgaaagaaaccttcacgagaggaaatctcactttgacacaacagttccagaattgtgtacgaaagcgagcagtaatgtctttactggcccggccgtcatgtaaagatgatgttcatgcggtgaaagtggtcaatcaggtctgggactcatgtttctcagatacaagaccattcgatgaagtctatagatga

SEQ ID NO: 18145 - protein, 263 aa, Muscodor strobelii
  misc_feature: SGI Peptide ID NO. 566076
  misc_feature (31)..(263): NCBI GI: 256733166 Blast Desc: NECHADRAFT_39121 [Nectria haematococca mpVI 77-13-4]
  misc_feature (15)..(263): NCBI GI: 187470881 Blast Desc: NECHADRAFT_39121 [Nectria haematococca mpVI 77-13-4]
  misc_feature (5)..(263): NCBI GI: 74614125 Blast Desc: NECHADRAFT_39121 [Nectria haematococca mpVI 77-13-4]
  misc_feature (26)..(263): NCBI GI: 261360292 Blast Desc: metalloprotease ATP23 [Verticillium albo-atrum VaMs.102]
  misc_feature (5)..(263): NCBI GI: 39974747 Blast Desc: MGG_00480 [Magnaporthe grisea 70-15] gi|187470640|sp|A4RF31.1|ATP23_MAGGR RecName: Full=Mitochondrial inner membrane protease ATP23 gi|145018623|gb|EDK02902.1| grisea
  misc_feature (5)..(263): NCBI GI: 46125165 Blast Desc: FG06960.1 [Gibberella zeae PH-1]
  misc_feature (28)..(263): NCBI GI: 171686542 Blast Desc: protein product [Podospora anserina] gi|170943232|emb|CAP68885.1| protein product [Podospora anserina]
  misc_feature (5)..(263): NCBI GI: 164428845 Blast Desc: NCU00107 [Neurospora crassa OR74A] gi|157072305|gb|EAA27995.2| conserved [Neurospora crassa OR74A]
  misc_feature (1)..(263): NCBI GI: 156047844 Blast Desc: SS1G_08652 [Sclerotinia sclerotiorum 1980] gi|187470643|sp|A7ETJ6.1|ATP23_SCLS1 RecName: Full=Mitochondrial inner membrane protease atp23 gi|154693050|gb|EDN92788.1| 1980]
  misc_feature (25)..(263): NCBI GI: 187470886 Blast Desc: SS1G_08652 [Sclerotinia sclerotiorum 1980] gi|187470643|sp|A7ETJ6.1|ATP23_SCLS1 RecName: Full=Mitochondrial inner membrane protease atp23 gi|154693050|gb|EDN92788.1| 1980]
MSSQSTTPTPTASSQPTPISSSAEPPNYLENDPKRTGFDPKTAWWVNYFKIVTGSITPEGAFHYRESRHVANEEYDCKRCDSYRDWALKYSPTVRFLRQKIEDLGGKLDGSNIICQRCPTRLTEDGQVAKSSGGFHPDVGVLICANEIKNQAHLEDTLAHEMVHAWDHLRYKVDWEGKKDLRHSACTEIRAAMLSGECRWTKETFTRGNLTLTQQFQNCVRKRAVMSLLARPSCKDDVHAVKVVNQVWDSCFSDTRPFDEVYR

SEQ ID NO: 18146 - DNA, 2412 bp, Muscodor strobelii
  misc_feature: SGI EST ID NO. CUFF.42835.1
  misc_feature: Variant of the nucleotide sequence at SEQ ID NO 18144
caccgagagaattttgagacgcataatcgcaagccttctttgcatcatattgagatcgagagcatcatcattgtggctccgacccatgaaaatagacgagcgcaacaacaaatccggttgcgtcgacctcgaccatcggagagtctgacctaccacacgaatataccatgtcctcgcagtcaacgacgcccacgcctacggcttcatcccagccaacgccgatatcatcgtctgctgagcctcctaattacctcgaaaatgacccgaagcgcacagggttcgacccgaagacggcgtggtgggtgaactatttcaagatcgtgacagggtccataactcccgagggcgccttccactacagagaaagccgccatgtagccaacgaggagtatgactgcaaacgatgcgattcatatcgcgactgggcactcaaatactctcccactgtgcgttttctccgccaaaagatcgaagatcttggcggcaaattggacggatccaacattatatgccaacgatgtcctactcgtctgaccgaggacggtcaggtagcaaaatcgagcggagggtttcatcctgacgtcggagttttaatatgtgccaatgagatcaaaaatcaagcccatttagaagatacactcgcccatgagatggtccacgcctgggaccatctgcgctacaaggttgattgggaagggaaaaaagatctgaggcattccgcttgcaccgaaatccgtgcagccatgttgagtggcgagtgcagatggacgaaagaaaccttcacgagaggaaatctcactttgacacaacagttccagaattgtgtacgaaagcgagcagtaatgtctttactggcccggccgtcatgtaaagatgatgttcatgcggtgaaagtggtcaatcaggtctgggactcatgtttctcagatacaagaccattcgatgaagtctatagatgaagaaagagaaaagaactcgtatggtctttgcgagagagcgcacaatgtgtactattagcatcatcgagaatacccgctcccttgcgaacagggagatatatgtgaaatgaaacaaagccattggccatgtcaaagttactttatttccgtgtcgatggaactatctagccatctcccttaactccaacagatttcgtagaacacccaatgccctaatgccacagacgccggcgccgttatgattgatatgatacaaatgagaagtcgttcattaattcataagaccctcgttattggtttgccctctcgcgattagctccacgttccgccttcacacagtgtttgaggatccagggatgtgtctgcacttgctcaagaggtagtctcttctctggatcaaggacaagcagctgagtatcaagttagcatatgtgaaatcattccgcagtatttatcatgcgcaactcactcttttaattaggtccctcgcctccgggctgacaaaggatgggatggtcatatcagcccgggcaattcttctctgtgtcatgacaggcgtatcctcaaaaggcgcctcacccacaaggaactcgtatgtcagaacacccaaactccacaaatcgatcttttcattgtacgagttgtcggagctaccagacttaaccatctcaggggggagatagtctagggttccgcacatggtctcacgacggttgttaggcgcgtggacgctccagccaaaatcggatattttgatttcgccatgtattcccatgagaatattctcaggcttgatatctcgatggataacgtgcttgcggtgcaggtagcgtagagcactggccatctgggcgatgtactgagatgccttccattcgggaaagcggttctcgcggcgtaagtgcttgtatagttcaccctttgccgcgaattcgagaatgaggaatactcttttgctatcgtggaaatgtccgaagagctgaagaatgttgggatgtctgaggttactctgaatctcgatttctcggcgaacctgcttctctaccttgccttgtgacagctcgctcttgtgcagcaccttgagggcgcagataaacccactggtgcgctcgcgggccaagtagactcttccgaacttgcccttgcccaggggccgaccaatctcgaacatgcccaggtggaattgcttgggcaaagagggctgctctattaatgtgacagatttgcgctcgacctgggcgagctcgtcttgtgagatgcgggttgcgacgacagtcgttgtggcaatggctttccgtgtgggagatgctggctgggcggccttgcgctgggcagcttgtgagggtagggtgacagcggcggtgacggtgcttgtgttctgggtctggagcgcaaccttgtagaggttcggcctgctattgctctgggccaactgtgtcgtcgtcgtagtgac

SEQ ID NO: 18147 - DNA, 1434 bp, Muscodor strobelii
  misc_feature: SGI cDNA ID NO. 566077
  misc_feature: Reduced expression when VOC is produced
  misc_feature: Encodes the peptide sequence at SEQ ID NO 18148
atgacaacgggctttaatttgtcgttggcgccctacatgaagggatccaagtcactgaccgtagttatcaagctcggaaccagctccatcgttgacgaaaaatctcatgagcccctactctcaatactgagttctattgtcgaaacagctgtgaagttgcgcaaagatggccacaaagtcgtcatcgtgtcctccggggctattggcgttgggctgcgacgtatgaacatcgacaagcgacctaaacatctctcgcagctgcaagcccttgcagccataggccaatgtcgtctcattggcatctgggataacttgtttgagcatatgcgccagcccatcgctcaaatcttgctcactcgaaacgatattgcagatcgatcgagatatatcaatgcgcaaaatacaatggcggaacttttggagatgggagtgattcccatcgttaatgagaatgacacgttggcggttgcggagatcaaattcggcgacaacgatacgttgtctgctattacagctgccatggtccatgcagattacctgttcctcatgacagacgtagattgtctgtatactaagaatccgagaacacatgcagatgctcaaccaatagaagaggttgaggatataggggcaataaatgcggatgtctcaagcgcaggctcatcacttggcacaggtggaatgggtacaaaaattgttgcagcccgtcttgcgacatctgctggcgttaccactattatcacgcgatcctcaactccaggcaacatctccaagattgtgcgctatctccaggctacaagagctctaaacggtaccaacacgccctccttatcgtcaaatctcaccacacaagagactacggcagtggcaacacccatcgactcactttctcacgccacaacatccttaagtttggacgcactcgacaagcccccccttcatactcgctttcttccattctcaacgccgatccgagatcgatatttctggcttcttcacggtctcgcaccacacggtacgctgtatatcgactccggttgccacactgcactgtctgagaaagccggtcttcttccagtgggtgtgctaggtgtagaaggaactttcgcgcaacaagaagcagtacggcttgttgtggttgatcgcccttccgaggatgtcttgagatcagccgaatccatcagctgggaaaactatagccctgttgaggtcggaagagcattggtcaactacgctgctccagaaatcacacgtataaaggggaagcgtagctccaaaattggcgaattgctaggctacgcggatagcgaatatgttgcttaccgggacaatatcagtctctttagaagagagagccggtctgtctcacctgcgcccgatgcaattataaatgccaatgtaggtggcgttgcaggctatgaagcagggagctga

SEQ ID NO: 18148 - protein, 477 aa, Muscodor strobelii
  misc_feature: SGI Peptide ID NO. 566077
  misc_feature (19)..(249): Pfam Id: PF00696 Pfam Desc: Amino acid kinase family
  misc_feature (339)..(431): Pfam Id: PF01472 Pfam Desc: PUA domain
  misc_feature (13)..(437): NCBI GI: 154290079 Blast Desc: BC1G_15819 [Botryotinia fuckeliana B05.10] gi|150848453|gb|EDN23646.1| BC1G_15819 [Botryotinia fuckeliana B05.10]
  misc_feature (13)..(457): NCBI GI: 164428843 Blast Desc: glutamate 5-kinase [Neurospora crassa OR74A] gi|157072304|gb|EAA27994.2| glutamate 5-kinase [Neurospora crassa OR74A]
  misc_feature (11)..(448): NCBI GI: 171686544 Blast Desc: protein product [Podospora anserina] gi|170943233|emb|CAP68886.1| protein product [Podospora anserina]
  misc_feature (13)..(460): NCBI GI: 242775954 Blast Desc: glutamate 5-kinase, [Talaromyces stipitatus ATCC 10500] gi|218722362|gb|EED21780.1| glutamate 5-kinase, [Talaromyces stipitatus ATCC 10500]
  misc_feature (13)..(459): NCBI GI: 212532571 Blast Desc: glutamate 5-kinase, [Penicillium marneffei ATCC 18224] gi|210071806|gb|EEA25895.1| glutamate 5-kinase, [Penicillium marneffei ATCC 18224]
  misc_feature (16)..(447): NCBI GI: 145235876 Blast Desc: protein product [Aspergillus niger] gi|134075033|emb|CAK44832.1| protein product [Aspergillus niger]
  misc_feature (16)..(453): NCBI GI: 259480028 Blast Desc: TPA: glutamate 5-kinase (Eurofung) [Aspergillus nidulans FGSC A4]
  misc_feature (16)..(449): NCBI GI: 121698057 Blast Desc: glutamate 5-kinase, [Aspergillus clavatus NRRL 1] gi|119395842|gb|EAW06274.1| glutamate 5-kinase, [Aspergillus clavatus NRRL 1]
  misc_feature (13)..(458): NCBI GI: 261187372 Blast Desc: glutamate 5-kinase [Ajellomyces dermatitidis SLH14081] gi|239594691|gb|EEQ77272.1| glutamate 5-kinase [Ajellomyces dermatitidis SLH14081] gi|239606489|gb|EEQ83476.1| glutamate
  misc_feature (13)..(460): NCBI GI: 240272952 Blast Desc: glutamate 5-kinase [Ajellomyces capsulatus H143]
  misc_feature (9)..(443): SWISSPROT Homolog: EC 2.7.2.11 Glutamate 5-kinase
  misc_feature: Useful for introducing or modulating the production of volatile compounds
MTTGFNLSLAPYMKGSKSLTVVIKLGTSSIVDEKSHEPLLSILSSIVETAVKLRKDGHKVVIVSSGAIGVGLRRMNIDKRPKHLSQLQALAAIGQCRLIGIWDNLFEHMRQPIAQILLTRNDIADRSRYINAQNTMAELLEMGVIPIVNENDTLAVAEIKFGDNDTLSAITAAMVHADYLFLMTDVDCLYTKNPRTHADAQPIEEVEDIGAINADVSSAGSSLGTGGMGTKIVAARLATSAGVTTIITRSSTPGNISKIVRYLQATRALNGTNTPSLSSNLTTQETTAVATPIDSLSHATTSLSLDALDKPPLHTRFLPFSTPIRDRYFWLLHGLAPHGTLYIDSGCHTALSEKAGLLPVGVLGVEGTFAQQEAVRLVVVDRPSEDVLRSAESISWENYSPVEVGRALVNYAAPEITRIKGKRSSKIGELLGYADSEYVAYRDNISLFRRESRSVSPAPDAIINANVGGVAGYEAGS

SEQ ID NO: 18149 - DNA, 1646 bp, Muscodor strobelii
  misc_feature: SGI EST ID NO. CUFF.42825.0
  misc_feature: Variant of the nucleotide sequence at SEQ ID NO 18147
ccaatatccaacatgacaacgggctttaatttgtcgttggcgccctacatgaagggatccaagtcactgaccgtagttatcaagctcggaaccagctccatcgttgacgaaaaatctcatgagcccctactctcaatactgagttctattgtcgaaacagctgtgaagttgcgcaaagatggccacaaagtcgtcatcgtgtcctccggggctattggcgttgggctgcgacgtatgaacatcgacaagcgacctaaacatctctcgcagctgcaagcccttgcagccataggccaatgtcgtctcattggcatctgggataacttgtttgagcatatgcgccagcccatcgctcaaatcttgctcactcgaaacgatattgcagatcgatcgagatatatcaatgcgcaaaatacaatggcggaacttttggagatgggagtgattcccatcgttaatgagaatgacacgttggcggttgcggagatcaaattcggcgacaacgatacgttgtctgctattacagctgccatggtccatgcagattacctgttcctcatgacagacgtagattgtctgtatactaagaatccgagaacacatgcagatgctcaaccaatagaagaggttgaggatataggggcaataaatgcggatgtctcaagcgcaggctcatcacttggcacaggtggaatgggtacaaaaattgttgcagcccgtcttgcgacatctgctggcgttaccactattatcacgcgatcctcaactccaggcaacatctccaagattgtgcgctatctccaggctacaagagctctaaacggtaccaacacgccctccttatcgtcaaatctcaccacacaagagactacggcagtggcaacacccatcgactcactttctcacgccacaacatccttaagtttggacgcactcgacaagcccccccttcatactcgctttcttccattctcaacgccgatccgagatcgatatttctggcttcttcacggtctcgcaccacacggtacgctgtatatcgactccggttgccacactgcactgtctgagaaagccggtcttcttccagtgggtgtgctaggtgtagaaggaactttcgcgcaacaagaagcagtacggcttgttgtggttgatcgcccttccgaggatgtcttgagatcagccgaatccatcagctgggaaaactatagccctgttgaggtcggaagagcattggtcaactacgctgctccagaaatcacacgtataaaggggaagcgtagctccaaaattggcgaattgctaggctacgcggatagcgaatatgttgcttaccgggacaatatcagtctctttagaagagagagccggtctgtctcacctgcgcccgatgcaattataaatgccaatgtaggtggcgttgcaggctatgaagcagggagctgagaataggttggcgataattgtgatattaattttcgctggctatgcccagagggtcgagactcaacactgttctgctcaagcgacattactttcgtacattaatacatctagcaagattgtgttacttgcagagattttgctaaagacattatttatgaggtatgcagaaaggctagataaaaaatggaagtgttgaccct

SEQ ID NO: 18150 - DNA, 789 bp, Muscodor strobelii
  misc_feature: SGI cDNA ID NO. 566078
  misc_feature: Encodes the peptide sequence at SEQ ID NO 18151
atggacactcgcggggatatgaacatggcccgagagctccaggctcagttctccggtagaggcggaggcggaaacgggaacggaaacggcggtggcaagcgaggtggtcgcaaaggtcgcagtcgcggcgaccgagccggtcgagctcagaatcacgaatactttggtcatgacactgatcgacaccaagtcccttcctaccagcccccaacctactcgtccttccaggcgcccagaccgtctgcccatcaggctcctcgtcgacccaaccctgccgtgcgagtgccacgcaaccctaatgcccaacctgcatactatggttctcttgttgagagtaactctcctggtcaacccactaccgctctcgatgctggtaccacgcagtctcacgccatcagcaacaagcgcaagtttggagacgtgggctctggagacaagggtccccgctctcagcggccccagaacaacgaaaaccgacctatcgcccgccccgccagcccgatggatttgacagacgactactatggcactactaactcgggccatggtaagaacgaacagcgcaagaaggccgagaaggatgagcgcaattatcctcttggcactggtactgaagctaacatgaaccacaactggtatcccgaagaatggtggtctcgctgcgtctcgctgggccaagtagattgctgggctagactgggtgctgccatgacagacatctatagggaggtcaatgacaaggaaaaaggagaaaaagcgaaaaagccacaaaacgcaaggacagggtga

SEQ ID NO: 18151 - protein, 262 aa, Muscodor strobelii
  misc_feature: SGI Peptide ID NO. 566078
MDTRGDMNMARELQAQFSGRGGGGNGNGNGGGKRGGRKGRSRGDRAGRAQNHEYFGHDTDRHQVPSYQPPTYSSFQAPRPSAHQAPRRPNPAVRVPRNPNAQPAYYGSLVESNSPGQPTTALDAGTTQSHAISNKRKFGDVGSGDKGPRSQRPQNNENRPIARPASPMDLTDDYYGTTNSGHGKNEQRKKAEKDERNYPLGTGTEANMNHNWYPEEWWSRCVSLGQVDCWARLGAAMTDIYREVNDKEKGEKAKKPQNARTG

SEQ ID NO: 18152 - DNA, 708 bp, Muscodor strobelii
  misc_feature: SGI cDNA ID NO. 566079
  misc_feature: Encodes the peptide sequence at SEQ ID NO 18153
atggacactcgcggggatatgaacatggcccgagagctccaggctcagttctccggtagaggcggaggcggaaacgggaacggaaacggcggtggcaagcgaggtggtcgcaaaggtcgcagtcgcggcgaccgagccggtcgagctcagaatcacgaatactttggtcatgacactgatcgacaccaagtcccttcctaccagcccccaacctactcgtccttccaggcgcccagaccgtctgcccatcaggctcctcgtcgacccaaccctgccgtgcgagtgccacgcaaccctaatgcccaacctgcatactatggttctcttgttgagagtaactctcctggtcaacccactaccgctctcgatgctggtaccacgcagtctcacgccatcagcaacaagcgcaagtttggagacgtgggctctggagacaagggtccccgctctcagcggccccagaacaacgaaaaccgacctatcgcccgccccgccagcccgatggatttgacagacgactactatggcactactaactcgggccatggtaagaacgaacagcgcaagaaggccgagaaggatgagcgcaattatcctcttggcactggtactgtacgtaactctctggcatatttctcttcggagagtagaagccctactggtatcccgaagaatggtggtctcgctgcgtctcgctgggccaagtag

SEQ ID NO: 18153 - protein, 235 aa, Muscodor strobelii
  misc_feature: SGI Peptide ID NO. 566079
MDTRGDMNMARELQAQFSGRGGGGNGNGNGGGKRGGRKGRSRGDRAGRAQNHEYFGHDTDRHQVPSYQPPTYSSFQAPRPSAHQAPRRPNPAVRVPRNPNAQPAYYGSLVESNSPGQPTTALDAGTTQSHAISNKRKFGDVGSGDKGPRSQRPQNNENRPIARPASPMDLTDDYYGTTNSGHGKNEQRKKAEKDERNYPLGTGTVRNSLAYFSSESRSPTGIPKNGGLAASRWAK

SEQ ID NO: 18154 - DNA, 408 bp, Muscodor strobelii
  misc_feature: SGI cDNA ID NO. 566080
  misc_feature: Encodes the peptide sequence at SEQ ID NO 18155
atgcttgcctcgatcctcacaattgccaccgccttgacggcatccgtatccgcaggtcctctcctcaaagcccgcgaaacccataatgccgccatcgtaggcgtaaatcgcagcaccggcgcatacggaatatacttcgagtactttgccgtattcgccgctgatgatttcgtttctgggctccctgggtttgccgtatcgtgcaaccacaaccatgcctcattttataatggagtggccgactgcatgtttgcgcctgatggcgttactgtgactgttagctggccaggtaataatggtacaaatgaggctattgttacgtatacattcgatggccagactgcttcaggcacagcaaattgggatggcggtagtgatggatccttcccctttaccatgagcacctag

SEQ ID NO: 18155 - protein, 135 aa, Muscodor strobelii
  misc_feature: SGI Peptide ID NO. 566080
MLASILTIATALTASVSAGPLLKARETHNAAIVGVNRSTGAYGIYFEYFAVFAADDFVSGLPGFAVSCNHNHASFYNGVADCMFAPDGVTVTVSWPGNNGTNEAIVTYTFDGQTASGTANWDGGSDGSFPFTMST

SEQ ID NO: 18156 - DNA, 1926 bp, Muscodor strobelii
  misc_feature: SGI cDNA ID NO. 566081
  misc_feature: Encodes the peptide sequence at SEQ ID NO 18157
atgcatccaactgggatctcctcgaagatcagtacaaggcacgaagcggacaaaaaggctaaaaaggaaagcaagaacacgcggctacctttgaagctaccagatggacgtgtacaagccgtgtctgcgccggtggaagccgcaattgagagcgatgatgactggctagatgggggcgatgaccactcagtcccgagcgacaatgaggccacggaactcatcgcagaacccaagatccctgtgaagcaacagattcgcgaggccaaagaagagctggcaaaaatcgcaaccatgctcaatagcgatcctgacgagaatgtaggcgcgttcaaggctctcaacaagattggggagagtagaatccccgctatcattacgttgtcactagctacacgcatggcgatttacaaagatataatcccgggatacagaatacgcgctgtttctgaagacgcgccgtctcaggagagccttagcaaggacgtgagaaaactacggactttcgagactgctctcgttacaggctaccaagtatacgtgaaagaacttgcgcgctatgctaaagcggggcgacgtggtgactcgaacggcattgccagcgttgccatcacatgcgcctgcacgctgctcacttcagttccacacttcaatttccgtggcgatctcatcaaaatacttgtcggaaagctaagccatcggcgcgttgataaagactttgtcaagtgtctagacgccttcaaagaactgttccagaacgatgatgaaggccgcccgtctttcgaggctgtttcgacaattggcaggatgatgaagtctaaagaattcaatgtggacgaatcagttttgaatctatttctacatttgcgtcttctgtccgaatactcgggcagagcttccaacgaagcagcagaccagctagagacgggaccgaagggcaagaaaccgaagttcaagaagcagttccgaacgaagagattaagaaaggagatgaaagaacagaaggctctcgataaggatatggctgccgccgatgctcttgtaagttacgaagagcgcgatcggatgcagtccgacactttgaaagctgtgtttggcatttactttcggattctcaaacttcgcactcctcatatcatgggcgctgttttggagggactggcgaagtacagtcacctgattaaccagaatttctttggggatctcctcgaagctctcaaggatctcatcaggcatagtgattttctcgaagacgcagatgaccagcccgaaggcgcggaggaagaagacgatgaaacaactactatccgcaatcctacccgtgaagcacttctctgcactgtcacagcgtttgccttgcttgccggccaagatgcgcacaacgcacgctcagatctccacctcgatctctccttcttcaccacccacctctggaagacattgatccctgtatccctcaaccccgacctcgagctcggcgctcgctcgctccatctacaggaccctgacgcgccagtaagaccaagcggcgccaaagtcaatctccagacgacaaccgtcttactcatccgttgtctaacggccgtcttgatcccaccttggaacattcgcagcacacccccactccgcctggcctccttcgccaagcaattgatgagtacatccctccaagtacccgagaagagtgctcaggccattctcgccctattagctgacgtaggcaatacccatggacgcaagatcgcagctttatggaatactgaggagcgcaaaggtgacggcgtgtacaaccctttgtcggaaaacgagcaaggcagtaatccgttcgcggccagtatctgggagggtgagcttttacgaaagcattactgtcccaaagttcgagaaggggtcaagattctagagaagagcatccaaaatggtacataa

SEQ ID NO: 18157 - protein, 641 aa, Muscodor strobelii
  misc_feature: SGI Peptide ID NO. 566081
  misc_feature (85)..(179): Pfam Id: PF07540 Pfam Desc: Nucleolar complex-associated protein
  misc_feature (18)..(637): NCBI GI: 39940488 Blast Desc: MGG_04996 [Magnaporthe grisea 70-15] gi|145010764|gb|EDJ95420.1| MGG_04996 [Magnaporthe grisea 70-15]
  misc_feature (18)..(637): NCBI GI: 256729723 Blast Desc: NECHADRAFT_95586 [Nectria haematococca mpVI 77-13-4]
  misc_feature (18)..(637): NCBI GI: 46122175 Blast Desc: FG05465.1 [Gibberella zeae PH-1]
  misc_feature (28)..(639): NCBI GI: 171685824 Blast Desc: protein product [Podospora anserina] gi|170942873|emb|CAP68526.1| protein product [Podospora anserina]
  misc_feature (28)..(625): NCBI GI: 116207268 Blast Desc: CHGG_02927 [Chaetomium globosum CBS 148.51] gi|88183524|gb|EAQ90992.1| CHGG_02927 [Chaetomium globosum CBS 148.51]
  misc_feature (27)..(639): NCBI GI: 85087014 Blast Desc: NCU00337 [Neurospora crassa OR74A] gi|28918903|gb|EAA28572.1| conserved [Neurospora crassa OR74A]
  misc_feature (12)..(637): NCBI GI: 156044983 Blast Desc: SS1G_09680 [Sclerotinia sclerotiorum 1980] gi|154694075|gb|EDN93813.1| SS1G_09680 [Sclerotinia sclerotiorum 1980]
  misc_feature (18)..(637): NCBI GI: 154303392 Blast Desc: BC1G_09267 [Botryotinia fuckeliana B05.10] gi|150854578|gb|EDN29770.1| BC1G_09267 [Botryotinia fuckeliana B05.10]
  misc_feature (18)..(639): NCBI GI: 261360289 Blast Desc: nucleolar complex-associated protein [Verticillium albo-atrum VaMs.102]
  misc_feature (18)..(637): NCBI GI: 189209622 Blast Desc: nuclear export protein Noc3 [Pyrenophora tritici-repentis Pt-1C-BFP] gi|187977236|gb|EDU43862.1| nuclear export protein Noc3 [Pyrenophora tritici-repentis Pt-1C-BFP]
MHPTGISSKISTRHEADKKAKKESKNTRLPLKLPDGRVQAVSAPVEAAIESDDDWLDGGDDHSVPSDNEATELIAEPKIPVKQQIREAKEELAKIATMLNSDPDENVGAFKALNKIGESRIPAIITLSLATRMAIYKDIIPGYRIRAVSEDAPSQESLSKDVRKLRTFETALVTGYQVYVKELARYAKAGRRGDSNGIASVAITCACTLLTSVPHFNFRGDLIKILVGKLSHRRVDKDFVKCLDAFKELFQNDDEGRPSFEAVSTIGRMMKSKEFNVDESVLNLFLHLRLLSEYSGRASNEAADQLETGPKGKKPKFKKQFRTKRLRKEMKEQKALDKDMAAADALVSYEERDRMQSDTLKAVFGIYFRILKLRTPHIMGAVLEGLAKYSHLINQNFFGDLLEALKDLIRHSDFLEDADDQPEGAEEEDDETTTIRNPTREALLCTVTAFALLAGQDAHNARSDLHLDLSFFTTHLWKTLIPVSLNPDLELGARSLHLQDPDAPVRPSGAKVNLQTTTVLLIRCLTAVLIPPWNIRSTPPLRLASFAKQLMSTSLQVPEKSAQAILALLADVGNTHGRKIAALWNTEERKGDGVYNPLSENEQGSNPFAASIWEGELLRKHYCPKVREGVKILEKSIQNGT

SEQ ID NO: 18158 - DNA, 3081 bp, Muscodor strobelii
  misc_feature: SGI EST ID NO. CUFF.42890.2
  misc_feature: Variant of the nucleotide sequence at SEQ ID NO 18156
agaaaagatctaggagtcgtaggataagcataatattacccaagcaaatgcctacggaggccaggttatcccgagcaaaagacgtggcgactatgagtaggggttagactgtgcgtcgaagcagagtgcgtatagaagatgggaggtctagaatgggaggtcgcacggtttgcaatcgagttgagtacgtagtagacacgatcttttatgagtcgaaatacatatcgatcagcgtcgggtgcatcgctgaggggggcgatcaatggttttaagtcggtcgtatagttggcgagcttctcgaagaggattttctggatcggccatgttagctctaccttgtgcgagcaagcggcgtacggcgacaacaatgggcataccgtctcttcctctgttagtggcctcattatgtccgcggttcagcaattttcggtggcttgttgttgtagaaatctcgtgatgaaaagcgcagcctgtcaagcaaagcactaaatggagcttgagatcgcagcgccccagtgtgcccaggcgcaaaagccgtagtggggtggaataactaggagtcttgggattctgccgctttggaaattttggcggtgaggggcaggaatcaatccggttggttctactcgggcgataggctcttatcagtacggaagggtccatggaccaaacttattgaactggctaaggccgtaggtgaataatttcctctgcccgtcacatcataacatttagaaagtggaaacatggtacttcgggacaagactcattcagaaagaaattgacgagccattagtgagcttcagaaaacgttcctctaacaaatcactcacaccatctcatcgatcggtcccttggctccaaaaatggcgactagacctactaaaaagaggaaattgacaccacctcagtcggaggacgagggaggttcacagtctgacgctaggatccaaaaagctttcttcaaaaatgcatccaactgggatctcctcgaagatcagtacaaggcacgaagcggacaaaaaggctaaaaaggaaagcaagaacacgcggctacctttgaagctaccagatggacgtgtacaagccgtgtctgcgccggtggaagccgcaattgagagcgatgatgactggctagatgggggcgatgaccactcagtcccgagcgacaatgaggccacggaactcatcgcagaacccaagatccctgtgaagcaacagattcgcgaggccaaagaagagctggcaaaaatcgcaaccatgctcaatagcgatcctgacgagaatgtaggcgcgttcaaggctctcaacaagattggggagagtagaatccccgctatcattacgttgtcactagctacacgcatggcgatttacaaagatataatcccgggatacagaatacgcgctgtttctgaagacgcgccgtctcaggagagccttagcaaggacgtgagaaaactacggactttcgagactgctctcgttacaggctaccaagtatacgtgaaagaacttgcgcgctatgctaaagcggggcgacgtggtgactcgaacggcattgccagcgttgccatcacatgcgcctgcacgctgctcacttcagttccacacttcaatttccgtggcgatctcatcaaaatacttgtcggaaagctaagccatcggcgcgttgataaagactttgtcaagtgtctagacgccttcaaagaactgttccagaacgatgatgaaggccgcccgtctttcgaggctgtttcgacaattggcaggatgatgaagtctaaagaattcaatgtggacgaatcagttttgaatctatttctacatttgcgtcttctgtccgaatactcgggcagagcttccaacgaagcagcagaccagctagagacgggaccgaagggcaagaaaccgaagttcaagaagcagttccgaacgaagagattaagaaaggagatgaaagaacagaaggctctcgataaggatatggctgccgccgatgctcttgtaagttacgaagagcgcgatcggatgcagtccgacactttgaaagctgtgtttggcatttactttcggattctcaaacttcgcactcctcatatcatgggcgctgttttggagggactggcgaagtacagtcacctgattaaccagaatttctttggggatctcctcgaagctctcaaggatctcatcaggcatagtgattttctcgaagacgcagatgaccagcccgaaggcgcggaggaagaagacgatgaaacaactactatccgcaatcctacccgtgaagcacttctctgcactgtcacagcgtttgccttgcttgccggccaagatgcgcacaacgcacgctcagatctccacctcgatctctccttcttcaccacccacctctggaagacattgatccctgtatccctcaaccccgacctcgagctcggcgctcgctcgctccatctacaggaccctgacgcgccagtaagaccaagcggcgccaaagtcaatctccagacgacaaccgtcttactcatccgttgtctaacggccgtcttgatcccaccttggaacattcgcagcacacccccactccgcctggcctccttcgccaagcaattgatgagtacatccctccaagtacccgagaagagtgctcaggccattctcgccctattagctgacgtaggcaatacccatggacgcaagatcgcagctttatggaatactgaggagcgcaaaggtgacggcgtgtacaaccctttgtcggaaaacgagcaaggcagtaatccgttcgcggccagtatctgggagggtgagcttttacgaaagcattactgtcccaaagttcgagaaggggtcaagattctagagaagagcatccaaaatggtacataaacggctgtatgatgcgaacaaattcgaggtcaaattagtgcgctccttcggacatatgccctaacgccgatatatagtccttcgtaagatccgaatagacaaacatcaagttgtatgtccgaaaagacagaaaatatccaggtcggactagtgatgacttactacatgccaggtatcatgttgcgg

SEQ ID NO: 18159 - DNA, 561 bp, Muscodor strobelii
  misc_feature: SGI cDNA ID NO. 566082
  misc_feature: Reduced expression when VOC is produced
  misc_feature: Encodes the peptide sequence at SEQ ID NO 18160
atgaggccactaacagaggaagagacgaaaatcctcttcgagaagctcgccaactatacgaccgacttaaaaccattgatcgcccccctcagcgatgcacccgacgctgatcgatatgtatttcgactcataaaagatcgtgtctactacgtactcaactcgattgcaaacctcgccacgtcttttgctcgggataacctggcctccgtaggcatttgcttgggcaaattcacgaagactttgaagttcaggctgcacattactgctcttcctatattagccgcccatgcgaggtacaagatttggatcaaaccaaatggtgtaatgccttttttatacggttctcacatctccaaagcccatgtcggccgctggactgaggattgtccttccaacgtgggagtaatcatatacgacatgggagacaacccattaggctttggcgtagccgccagaagtacggctgaagcgcgcagattggatccaaccggaatcgtcgtcttcagacaagcagactgtggagaatatctgagagatgaagacaccctcttcgcaggctaa

SEQ ID NO: 18160 - protein, 186 aa, Muscodor strobelii
  misc_feature: SGI Peptide ID NO. 566082
  misc_feature (1)..(185): NCBI GI: 46125169 Blast Desc: FG06962.1 [Gibberella zeae PH-1]
  misc_feature (1)..(185): NCBI GI: 156044985 Blast Desc: conserved [Sclerotinia sclerotiorum 1980] gi|154694076|gb|EDN93814.1| conserved [Sclerotinia sclerotiorum 1980]
  misc_feature (1)..(185): NCBI GI: 154303390 Blast Desc: conserved [Botryotinia fuckeliana B05.10] gi|150854577|gb|EDN29769.1| conserved [Botryotinia fuckeliana B05.10]
  misc_feature (1)..(186): NCBI GI: 164428841 Blast Desc: NCU00105 [Neurospora crassa OR74A] gi|157072303|gb|EAA27993.2| NCU00105 [Neurospora crassa OR74A]
  misc_feature (1)..(186): NCBI GI: 116208172 Blast Desc: CHGG_03379 [Chaetomium globosum CBS 148.51] gi|88183976|gb|EAQ91444.1| CHGG_03379 [Chaetomium globosum CBS 148.51]
  misc_feature (1)..(186): NCBI GI: 171686546 Blast Desc: protein product [Podospora anserina] gi|170943234|emb|CAP68887.1| protein product [Podospora anserina]
  misc_feature (1)..(185): NCBI GI: 67903008 Blast Desc: AN8491.2 [Aspergillus nidulans FGSC A4] gi|40747957|gb|EAA67113.1| AN8491.2 [Aspergillus nidulans FGSC A4] gi|259484440|tpe|CBF80662.1| TPA: 60S ribosome biogenesis A4]
  misc_feature (1)..(185): NCBI GI: 39974743 Blast Desc: MGG_00482 [Magnaporthe grisea 70-15] gi|145018621|gb|EDK02900.1| MGG_00482 [Magnaporthe grisea 70-15]
  misc_feature (1)..(184): NCBI GI: 119174946 Blast Desc: CIMG_09413 [Coccidioides immitis RS] gi|240106997|gb|EER25184.1| 60S ribosome subunit biogenesis protein Nip7p, [Coccidioides posadasii C735 delta SOWgp]
  misc_feature (1)..(185): NCBI GI: 261360290 Blast Desc: 60S ribosome subunit biogenesis protein NIP7 [Verticillium albo-atrum VaMs.102]
  misc_feature: Useful for introducing or modulating the production of volatile compounds
MRPLTEEETKILFEKLANYTTDLKPLIAPLSDAPDADRYVFRLIKDRVYYVLNSIANLATSFARDNLASVGICLGKFTKTLKFRLHITALPILAAHARYKIWIKPNGVMPFLYGSHISKAHVGRWTEDCPSNVGVIIYDMGDNPLGFGVAARSTAEARRLDPTGIVVFRQADCGEYLRDEDTLFAG

SEQ ID NO: 18161 - DNA, 4321 bp, Muscodor strobelii
  misc_feature: SGI EST ID NO. CUFF.42889.1
  misc_feature: Variant of the nucleotide sequence at SEQ ID NO 18159
ccgcaacatgatacctggcatgtagtaagtcatcactagtccgacctggatattttctgtcttttcggacatacaacttgatgtttgtctattcggatcttacgaaggactatatatcggcgttagggcatatgtccgaaggagcgcactaatttgacctcgaatttgttcgcatcatacagccgtttatgtaccattttggatgctcttctctagaatcttgaccccttctcgaactttgggacagtaatgctttcgtaaaagctcaccctcccagatactggccgcgaacggattactgccttgctcgttttccgacaaagggttgtacacgccgtcacctttgcgctcctcagtattccataaagctgcgatcttgcgtccatgggtattgcctacgtcagctaatagggcgagaatggcctgagcactcttctcgggtacttggagggatgtactcatcaattgcttggcgaaggaggccaggcggagtgggggtgtgctgcgaatgttccaaggtgggatcaagacggccgttagacaacggatgagtaagacggttgtcgtctggagattgactttggcgccgcttggtcttactggcgcgtcagggtcctgtagatggagcgagcgagcgccgagctcgaggtcggggttgagggatacagggatcaatgtcttccagaggtgggtggtgaagaaggagagatcgaggtggagatctgagcgtgcgttgtgcgcatcttggccggcaagcaaggcaaacgctgtgacagtgcagagaagtgcttcacgggtaggattgcggatagtagttgtttcatcgtcttcttcctccgcgccttcgggctggtcatctgcgtcttcgagaaaatcactatgcctgatgagatccttgagagcttcgaggagatccccaaagaaattctggttaatcaggtgactgtacttcgccagtccctccaaaacagcgcccatgatatgaggagtgcgaagtttgagaatccgaaagtaaatgccaaacacagctttcaaagtgtcggactgcatccgatcgcgctcttcgtaacttacaagagcatcggcggcagccatatccttatcgagagccttctgttctttcatcctagggtaagattagctcaaacagcccgttaaaagattcaagtaactaagacgggattttaattttcttctatccgccagggaatctcgtgtttttacatactcctttcttaatctcttcgttcggaactgcttcttgaacttcggtttcttgcccttcggtcccgtctctagctggtctgctgcttcgttggaagctctgcccgagtattcggacagaagacgcaaatgtagaaatagattcaaaactgattcgtccacattgaattctttagacttcatcatcctgccaattgtcgaaacagcctcgaaagacgggcggccttcatcatcgttctggaacagttctttgaaggcgtctagacacttgacaaagtctttatcaacgcgccgatggcttagctttccgacaagtattttgatgagatcgccacggaaattgaagtgtggaactgaagtgagcagcgtgcaggcgcatgtgatggcaacgctggcaatgccgttcgagtcaccacgtcgccccgctttagcatagcgcgcaagttctttcacgtatacttggtagcctgtaacgagagcagtctcgaaagtccgtagttttctcacgtccttgctaaggctctcctgagacggcgcgtcttcagaaacagcgcgtattctgtatcccgggattatatctttgtaaatcgccatgcgtgtagctagtgacaacgtaatgatagcggggattctactctccccaatcttgttgagagccttgaacgcgcctacattctcgtcaggatcgctattgagcatggttgcgatttttgccagctcttctttggcctcgcgaatctgttgcttcacagggatcttgggttctgcgatgagttccgtggcctcattgtcgctcgggactgagtggtcatcgcccccatctagccagtcatcatcgctctcaattgcggcttccaccggcgcagacacggcttgtacacgtccatctggtagcttcaaaggtagccgcgtgttcttgctttcctttttagcctttttgtccgcttcgtgccttgtactgatcttcgaggagatcccagttggatgcatttttgaagaaagctttttggatcctagcgtcagactgtgaacctccctcgtcctccgactgaggtggtgtcaatttcctctttttagtaggtctagtcgccatttttggagccaagggaccgatcgatgagatggtgtgagtgatttgttagaggaacgttttctgaagctcactaatggctcgtcaatttctttctgaatgagtcttgtcccgaagtaccatgtttccactttctaaatgttatgatgtgacgggcagaggaaattattcacctacggccttagccagttcaataagtttggtccatggacccttccgtactgataagagcctatcgcccgagtagaaccaaccggattgattcctgcccctcaccgccaaaatttccaaagcggcagaatcccaagactcctagttattccaccccactacggcttttgcgcctgggcacactggggcgctgcgatctcaagctccatttagtgctttgcttgacaggctgcgcttttcatcacgagatttctacaacaacaagccaccgaaaattgctgaaccgcggacataatgaggccactaacagaggaagagacgaaaatcctcttcgagaagctcgccaactatacgaccgacttaaaaccattgatcgcccccctcagcgatgcacccgacgctgatcgatatgtatttcgactcataaaagatcgtgtctactacgtactcaactcgattgcaaacctcgccacgtcttttgctcgggataacctggcctccgtaggcatttgcttgggcaaattcacgaagactttgaagttcaggctgcacattactgctcttcctatattagccgcccatgcgaggtacaagatttggatcaaaccaaatggtgtaatgccttttttatacggttctcacatctccaaagcccatgtcggccgctggactgaggattgtccttccaacgtgggagtaatcatatacgacatgggagacaacccattaggctttggcgtagccgccagaagtacggctgaagcgcgcagattggatccaaccggaatcgtcgtcttcagacaagcagactgtggagaatatctgagagatgaagacaccctcttcgcaggctaaatcgtctggggaaggacgctggagtttggggtttgtcattttgataggaacaaaagcatagaaggcgttatgaggataccaaattcagttaccgtccatctgcaaccccatttgcgggtcattctaatggtagttgctatacttatgtaccatccttttattcgactttcgaatgaagtcctcatttgcgtacaattcaatatgtgggcgccgaagtctcttcgaatatgcgcgcaggagtcttaattttgcagctcgtttcattcatgttcctggaagtgaggctctatggtctggtagtcgcatacatggattgatggacacacgtgttgagtgagggctatcgcctaaaagcctacttcttggtcgcccttatgtaatcacagacttcggctgcaaagactcatacttgggtctcgtcctatcaccgattgttgtctctaatatgacaattttggtttctcggtgctcgccgcgtcttgcctcttctagccacggtatatcgaccgcggatacgtgctgcctggcgaactctatcagtggctgcgaattgggggcgttgacacgtattccaacacaggagacacgaggaaagccgagggaagcagcaaggcgatcctcgcaggattttgaatagccaactaatcgcgtcggcggctgagttgggtgctttttggacgcgactgctaccatctgagggagatggctgctcagagcatttggttgaccagaccgggcaacaaatatgagagaatagaaagaacacgctgaatcgttccctggtgtatcgctttcttgtaagtttcctgcttctgatgatgccttttgtaaagaacgggtgattgaggataatccaacatcgacatatgcctgaagttccgggataggaggtgttggcggttcgtccgctttcttgctagcctccttccgttttctcttcttggctcggacacctttagatggttggatatgctgaacgcg

SEQ ID NO: 18162 - DNA, 744 bp, Muscodor strobelii
  misc_feature: SGI cDNA ID NO. 566083
  misc_feature: Encodes the peptide sequence at SEQ ID NO 18163
atggagaagaaaaagaaactggcattccagcttgatacgccatactcggcagtttcatggcctcaaatatcgccagaagaccaaaatacagtcctcgagcttctatgcagcttgctatctcctataggccatcatcgcgttcagcatatccaaccatctaaaggtgtccgagccaagaagagaaaacggaaggaggctagcaagaaagcggacgaaccgccaacacctcctatcccggaacttcaggcatatgtcgatgttggattatcctcaatcacccgttctttacaaaaggcatcatcagaagcaggaaacttacaagaaagcgatacaccagggaacgattcagcgtgttctttctattctctcatatttgttgcccggtctggtcaaccaaatgctctgagcagccatctccctcagatggtagcagtcgcgtccaaaaagcacccaactcagccgccgacgcgattagttggctattcaaaatcctgcgaggatcgccttgctgcttccctcggctttcctcgtgtctcctgtgttggaatacgtgtcaacgcccccaattcgcagccactgatagagttcgccaggcagcacgtatccgcggtcgatataccgtggctagaagaggcaagacgcggcgagcaccgagaaaccaaaattgtcatattagagacaacaatcggtgataggacgagacccaagtatgagtctttgcagccgaagtctgtgattacataa

SEQ ID NO: 18163 - protein, 247 aa, Muscodor strobelii
  misc_feature: SGI Peptide ID NO. 566083
  misc_feature (3)..(230): NCBI GI: 171685796 Blast Desc: protein product [Podospora anserina] gi|170942859|emb|CAP68512.1| protein product [Podospora anserina]
  misc_feature (4)..(232): NCBI GI: 85086940 Blast Desc: NCU00319 [Neurospora crassa OR74A] gi|28918885|gb|EAA28554.1| conserved [Neurospora crassa OR74A]
  misc_feature (4)..(237): NCBI GI: 256729921 Blast Desc: NECHADRAFT_95587 [Nectria haematococca mpVI 77-13-4]
  misc_feature (4)..(229): NCBI GI: 261360287 Blast Desc: conserved [Verticillium albo-atrum VaMs.102]
  misc_feature (3)..(230): NCBI GI: 154301457 Blast Desc: BC1G_10398 [Botryotinia fuckeliana B05.10] gi|150856138|gb|EDN31330.1| BC1G_10398 [Botryotinia fuckeliana B05.10]
  misc_feature (4)..(230): NCBI GI: 46122171 Blast Desc: FG05463.1 [Gibberella zeae PH-1]
  misc_feature (3)..(230): NCBI GI: 116207254 Blast Desc: CHGG_02920 [Chaetomium globosum CBS 148.51] gi|88183517|gb|EAQ90985.1| CHGG_02920 [Chaetomium globosum CBS 148.51]
  misc_feature (2)..(230): NCBI GI: 156033019 Blast Desc: SS1G_13585 [Sclerotinia sclerotiorum 1980] gi|154698988|gb|EDN98726.1| SS1G_13585 [Sclerotinia sclerotiorum 1980]
  misc_feature (2)..(216): NCBI GI: 189206790 Blast Desc: conserved [Pyrenophora tritici-repentis Pt-1C-BFP] gi|187975822|gb|EDU42448.1| conserved [Pyrenophora tritici-repentis Pt-1C-BFP]
  misc_feature (3)..(146): NCBI GI: 145602324 Blast Desc: MGG_05001 [Magnaporthe grisea 70-15] gi|145010756|gb|EDJ95412.1| MGG_05001 [Magnaporthe grisea 70-15]
MEKKKKLAFQLDTPYSAVSWPQISPEDQNTVLELLCSLLSPIGHHRVQHIQPSKGVRAKKRKRKEASKKADEPPTPPIPELQAYVDVGLSSITRSLQKASSEAGNLQESDTPGNDSACSFYSLIFVARSGQPNALSSHLPQMVAVASKKHPTQPPTRLVGYSKSCEDRLAASLGFPRVSCVGIRVNAPNSQPLIEFARQHVSAVDIPWLEEARRGEHRETKIVILETTIGDRTRPKYESLQPKSVIT

SEQ ID NO: 18164 - DNA, 1335 bp, Muscodor strobelii
  misc_feature: SGI EST ID NO. CUFF.42890.3
  misc_feature: Variant of the nucleotide sequence at SEQ ID NO 18162
gtgcctcttacacattgagaggttcattataatacctcggtgtttttgctttttacctcgttaacaaactcaacatggagaagaaaaagaaactggcattccagcttgatacgccatactcggcagtttcatggcctcaaatatcgccagaagaccaaaatacagtcctcgagcttctatgcagcttgctatctcctataggccatcatcgcgttcagcatatccaaccatctaaaggtgtccgagccaagaagagaaaacggaaggaggctagcaagaaagcggacgaaccgccaacacctcctatcccggaacttcaggcatatgtcgatgttggattatcctcaatcacccgttctttacaaaaggcatcatcagaagcaggaaacttacaagaaagcgatacaccagggaacgattcagcgtgttctttctattctctcatatttgttgcccggtctggtcaaccaaatgctctgagcagccatctccctcagatggtagcagtcgcgtccaaaaagcacccaactcagccgccgacgcgattagttggctattcaaaatcctgcgaggatcgccttgctgcttccctcggctttcctcgtgtctcctgtgttggaatacgtgtcaacgcccccaattcgcagccactgatagagttcgccaggcagcacgtatccgcggtcgatataccgtggctagaagaggcaagacgcggcgagcaccgagaaaccaaaattgtcatattagagacaacaatcggtgataggacgagacccaagtatgagtctttgcagccgaagtctgtgattacataagggcgaccaagaagtaggcttttaggcgatagccctcactcaacacgtgtgtccatcaatccatgtatgcgactaccagaccatagagcctcacttccaggaacatgaatgaaacgagctgcaaaattaagactcctgcgcgcatattcgaagagacttcggcgcccacatattgaattgtacgcaaatgaggacttcattcgaaagtcgaataaaaggatggtacataagtatagcaactaccattagaatgacccgcaaatggggttgcagatggacggtaactgaatttggtatcctcataacgccttctatgcttttgttcctatcaaaatgacaaaccccaaactccagcgtccttccccagacgatttagcctgcgaagagggtgtcttcatctctcagatattctccacagtctgcttgtctgaagacgacgattccggttggatccaatctgcgcgcttcagccgtacttctggcggctacgccaactacaaatgaatgtcagtggccg

SEQ ID NO: 18165 - DNA, 7599 bp, Muscodor strobelii
  misc_feature: SGI cDNA ID NO. 566084
  misc_feature: Encodes the peptide sequence at SEQ ID NO 18166
atggaccccgagtcaagatccgacgagccgcgagaccgtgccctgtcttctgagcccagctcgacccgccccaaccccttcgacgacggcgacttgtctgcccgcaagcgccgccgtacctcccgctccggcacgcgctccctctccgtcgagtctcccctctcccaccgcccccctacttcagactcggccgcccacgacatgaagctcgacacccccgagcctgtgcctccaagcaccccgcgcggttcctctccggtccccgagcccgtctccagcaaggtcaccatcaacctgcgaaatgccgatgcagacacagtcccggcctctccagtgtctccaacgccgctcccaccgccaggcgaccgtgtccaggccagcgttgaggatgctgagattatcgatgtgatgcaaagccagtctgccgacgacctttcttcgtccccgtccattatgaacagcccagcggagcctggcatgtcggtggaggatctggagcaggagaccgcatcccgcacccgacatgaggagaacgcaaggaacacgagccttgtcgaaaaggtctttgagttcccctaccgaggtgacaacgaggcgctagtggatactgcccatcgtatcgtgaagcacctgcgctcaagtatgtcgcctgccagtctctgtcaagcgccaacgtctaactctgatgccccagattcggcccaggtagacgacgccgtgcaccatatccacttatggctcagccgttgcctagctcaagcacagtcggaaccatctactacgctcattgaattatatcacgagcacaagggattctggagactacttgcagatatatattttcacttcgctaataggttgctgtactgtgataacagaagggtacggggcctcatcatagactctggggtctcctttgcacgtctggccgcgctcgtccttaatatcgacgctcaggcgctagtgacgggccaattcgtgacggaaagcgacctggaccttacctgtccgtattatctgcggtcacttgcctcattcccgcctcgagaggatcacgacggaggcctcgacggttatgagccccgcgacgtgtttcagggcaaccttggtggttcattggccgcattcgtggcattcgtcaccgattgcatcagcaaattaagtcaatttcctagaagaaacttggattacttgtcccactgctgcttcttcacgcttgctataatccgagacagtgtttataagatcgcacatccggtgacggttcctgctgacttgcttgatcgtgcaaaggataacctagagaagggctacattatttatactgagatatcagctgccattgacgccatgattgagaagtccataagtagcctttccacagacaccacgataggcctaatccagtggtcgacagagattctgaggcattgtttccaaggcaactgtgcactggctgccgcacttgtcgatcagcatcatcaagatcatccagaactacttggtcgatttgccgaggaggctattctcctagagcgccgcatacaggtcgcttgcacgctgatcaagtcttctcaaatgcagttgagagtccacgctgctggctcattgtgtgaggagctagttgctcaatggaaaacatatcagcaacagcaacaccatcgggatggcctcgaggatggctacttccagtatcttcaatacatatcgcattatgtgacaaatactggcatcgtggcgtacatcatcggcccaacttgccacccggaggtcaccattgcttgtgccaatatcatagggtttcttgcagtgacgaggacatattcggaaacggagactgatctcctctggcagacgctcaccaccacgcaggaccctcggatctgcaaagccctagtcaagatgatgtgtaccattataacattgttcccaccgtcggatatggcgcttctccttgagaagttccaaaacttacccatcgatgctttctcttccccgacaatgcgagagcttttcgataaccttacagagtttctcgtcaagggccatcccatggtcccatgggacgtctgcgtgcgcctgctcagagaatcatcagtcttgaccaccaggggatgccttgcacatcctgagatctatcaatttgcttccatgaaaatccagaggctactgcgcctagccagcctagatgaagatggtcgatgcactattgcgttgagttgcttggcagaccttaattcatcgtctcagacaacatctggcagtttgcagatattgcatctgcttacacagcacccgccgaatttgaaacctttcgttgaccaccacaatttaacgacactgctgataaatgacttggatactgctcttcaatcggcaaaatctatgggctttgcgaacgtttactcgcatcaagtctggcaggcgcgccgaagactgatcagcagtgtcatccaatactatcccacgacaattggaattgagcaaggtcaaagactatgggacaatctcgtgggtgacaaagctgccagtcaggaggatagaaatctggcatgggatgatctgaacgttgcatttgcacgagatcaatcccgaaaccaattctattctgactgccttagtgtatttctcccacgattgccgccttcttgttactgtcgcggttgtcttgcatttgtccgtggagtaatacttcctctagcccgcgaaggggatacgctagtccacacccttgttcttgacgacgaagacagtctcaaagctgctggattagaattgctttggcagatcatcctaacggcacccgatcaaacaatcgcagatcaggccatatcgacacttgtctacgacatttacgtaaatagcaaaatcatcgctacgtacgcgctcccacgtgcccggaaagttcatttctcgctggcccaacgatgcttgtcacagttgaaggctgctgcacagaagctgaaggatttcagcgatggtacaacgagtggtgatgatgaaccgatggtcatcgtggcgacggacagccaatttcgagaccaagagtttcaattcgctcgttcgttgaaagtactgtctatgctcctgagaacactacgaacgaaatcacacttttcgatccctgatctgcgctctttcatgttaccatcgccagatgagatcaatggcgacctcgccgatctaaaataccaatcatttgaaggggaaacgcatggcgacgtgaagccgctgagaattgggctcaagaatagtgctgcatctttactcgccactatacgtgaggccactggctttggcagctaccggctatattatcagggtagaacactgattccctccgaagctgatagttgcaagtcactagaagatctcaggatttgcagtggattaatactggtcaaaaaggagcaagattctgcatcttctgctctgcgcgtgaaacctggtgcatcacccctagagatggacatcctcactcactttcaggatctatgggactatcttagtatggaagaaaacttggctcgagagatatatggttttctttgtactcttccagccgacgattcaatacttgcagtatttgagggcccaaaaacctcttatcgcgaggtgtttcctctcggtcagccgttcaaatccctttacgcgatacatgcgttgcgcgagtatctgagcagccgaaggcttaggaccaccgtgccacgctcatctgctcctcttggcgaaatcggacacggttcaaatgatcaacaagatgccgtagctaaagctatctcatggcttgtttctgctgtatgtgatgctaatgtggtggatgactgcccgtcggaaggcgttcgaataatgctcgcttttcaaatcgtcgataactttcttctgctcttgaaaggtgatgtgaatctgcatctaatcgatcaactccttactccggccttttacgaacgactcattgccctaattgcgatgggggcaagagctgaaagcagcaatgggggcaatgaacttgttcatcgatgttttgacgcattgcttgagtgttgcgccaagagccacgatttctggacactctttcgaacccagattgcgacaaaagaaatgatttgcaatctcttacttggtgaggatcggccttatatccgaaagagcattgcaaaacatatcagcagcaggaccgcatacaccgatacctcctcgcatgtgacgacaattgaatttgccgagctcttctggcctatcgtttttgggcttttgcctcatgctatttcccaatcgcacaaatgcgaggaggtatttgtcttagcttcgcatctactgagaaagctcattgacagcgggtctacgatgtttgacctagttgcatctgcagaagaatgtgaacgtttcttattgtctcatcttgggactgaagatgtggctcatccagagatagtcgaccatgttgcatatggcctcatcagcattgtgcaccaaagcatcaagcacatcactgattcggcagaggttggacaaggtaatcttccgcagttctctgcgagcaggatctttacgcaacacttatttccacctgaacacggagcgggtcttttgggccccaaggtcatcatacaggcgtcttcgcgaaacatgttatatgacattgtactggctctaacaaacaaaaaccagagagagatgattccgattctacaaagtctgcataggctgacacagccctttgaagcggaagggccacgattctatcagtatgatattccgcagtcattcgacaggcaaagtgccgttcggtccatctgcggatactctggactgagaaatctatctaatacatgttatctgaattcgcttttcacacagctattcatgaacatgagtttccggcagttcatacttggagcaaaggtcgaggaaccgagttctcgtcaattgctacacgagactcaaatcttgtttgcgtacctccagaacagcaagcgcaggttcatagacccacaagcttgcgtcgagcagatcatgctaggcgatcaacccatcgacattcacaaccaaatggatgttgatgaattctatattcttctctttgaccgttgggaggcgcaactagctaacgaggccgaaaggaaagcgctgaggtccatctatgggggccaattggttcaccagatcaaatccaaggagtgtgaacacatttccgaacgagttgagccgttttcagccattcagtgtgacataaaaggaaaggcaagcttagcggaaagcctgcaatcttatgtcgatggcgagatcatggaaggagacaacaagtacaagtgtaccagttgcgatcgacatgttgatgccgtcaagagagcatgcctcaaagatcttccagacaacctcatttttcatctcaaaaggttcgactttgatcttcgcctcctacaacgcaacaagattaatgattattttgctttcccgcatgagatcaacatgcaaccgtacactgtgcaatacttatccgatccttcaaacagcgccgagccggatatgttcgagctggtaggtattctcgtgcattcaggcacagccgagaccggtcattactactctttcactcgtgaacacccgacaagctccaagacaccttcttgggtcgagttcaatgatgaaacggtgaatcaatgggatccactgcaaatggaaaatgcgtgctatggaggtgcagacaacggggtcatgtttgaaaaggcgtatagcgcgtatatgctcttctatcagcgttcgtcggctttgcaacgagagcaggagtcattcgaggccgctggcaattccaaacgtccccggactacaattccccctcaactcgagcttcaagtcaggcgtgacaattgggaaattacccagcgccataacctcttcgacaggtcacacataccctttgtgtcaaaggttctcgacattgtctggtcaagaaagtgctcgatcgatcatcaaattgaaaatcttgcgatgaacgtcgctttaggtcacctggatcaaattgtcacccgagccaaggacttcccggacttcgacagatttagcaatacgattatccaggcttgtcaccgatgctctaagtgcagttttgcattcttcgtttacttcaggcaattcaaggaagctttgaggatgatggtctcccgaaacgccgacttgagcatccgccatgacattggagtcagttttctcttcgcattgaagaaaataaaagccagcctccccgatgaatacggaaacgatcttcaaatcggcgacgaagtcaactccacctctagtgattcagatttgacagtcttagaagcaactgcggatctgtttatgtacatatctgacacgttccacgctcgtctgacagcttggcctgaggtcttcggtactattgttgacttcgctaaaatgggccaacttgagtcgagtgccttgcttgaccgagacttcttgagaagggccataatgatcgtggcgccatcagactcatacggtccccagttcagcagattgattgctaatcttaataagagaaacgccacaagagccgccaattacgaggctattatcgatctaattgatactctcatggccatcatggatggcgacatggggaattacgtcgaggctccctttggccggctctctgcatcattaccagacgagttgatcccgttcacggcagaggagattaacttacttcatcagccatgggacgatggcgttcaggcgagcgtctttgttgacagacttatattgcttaaccagcaccccgttgcaacagacagcatacttcgacggcttatttcatacaatgattcgctggacgacgtggtattcaatactctgagacgtagcgccacgggacagatcgtgacatacccaatgactccatttctgcgcgcggccttgttgtattgcgcgtctagcgggtcaagtgcaagagttagggatctcatcacacacatcgcttatcaatgcaaagcacttcacacaaccgagggtcagtcattcttcgaattccagcgagatgttttcgctggggctcgtagcacaggagagagcaacgaaacgatcacgctgcaaggactacgaaatcttccccactgggtaccgggcctcttgggctatgcggatcgtgccgtgagtctggctaccgaaaactttgtgaacgaaaaagtactcaagcatggcccgagccctgcgtttgagtacacagatggtggggtcgaaagatcacgagcaatgatcgttgctgctaaggaacttgctgtcagctgtctagaatatttgaaagacacatatgttctacacagagcccaggctgcgcgcgattcaataatccctcttcaccaagtcatacgaaactgcgaagcttattttgaggcacatccggacactgaggaagaattgaatcatgtattcaaggaacaacgtttaccagtactgaatgccatgacttccttaacggttgacgagatagacgacgacggctcggattgggagcagtccgttgcgtctgatgacagcctcgccgagctaagcagtatgcaagtagatcacgacttcgtagaaggcaccttgtag

SEQ ID NO: 18166 - protein, 2532 aa, Muscodor strobelii
  misc_feature: SGI Peptide ID NO. 566084
  misc_feature (1600)..(1919): Pfam Id: PF00443 Pfam Desc: Ubiquitin carboxyl-terminal hydrolase
  misc_feature (1)..(2523): NCBI GI: 256729724 Blast Desc: NECHADRAFT_71149 [Nectria haematococca mpVI 77-13-4]
  misc_feature (1)..(2518): NCBI GI: 46122169 Blast Desc: FG05462.1 [Gibberella zeae PH-1]
  misc_feature (8)..(2481): NCBI GI: 171685794 Blast Desc: protein product [Podospora anserina] gi|170942858|emb|CAP68511.1| protein product [Podospora anserina]
  misc_feature (137)..(2515): NCBI GI: 116207252 Blast Desc: CHGG_02919 [Chaetomium globosum CBS 148.51] gi|88183516|gb|EAQ90984.1| CHGG_02919 [Chaetomium globosum CBS 148.51]
  misc_feature (1)..(2532): NCBI GI: 145602322 Blast Desc: MGG_05002 [Magnaporthe grisea 70-15] gi|145010755|gb|EDJ95411.1| MGG_05002 [Magnaporthe grisea 70-15]
  misc_feature (368)..(2532): NCBI GI: 85086944 Blast Desc: NCU00320 [Neurospora crassa OR74A] gi|28918886|gb|EAA28555.1| [Neurospora crassa OR74A]
  misc_feature (1)..(2292): NCBI GI: 261360286 Blast Desc: ubiquitin carboxyl-terminal hydrolase [Verticillium albo-atrum VaMs.102]
  misc_feature (1)..(2514): NCBI GI: 261190146 Blast Desc: ubiquitin C-terminal hydrolase [Ajellomyces dermatitidis SLH14081] gi|239591311|gb|EEQ73892.1| ubiquitin C-terminal hydrolase [Ajellomyces dermatitidis SLH14081]
  misc_feature (1)..(2514): NCBI GI: 239606372 Blast Desc: ubiquitin C-terminal hydrolase [Ajellomyces dermatitidis ER-3]
  misc_feature (3)..(2466): NCBI GI: 225559415 Blast Desc: ubiquitin carboxyl-terminal hydrolase [Ajellomyces capsulatus G186AR]
MDPESRSDEPRDRALSSEPSSTRPNPFDDGDLSARKRRRTSRSGTRSLSVESPLSHRPPTSDSAAHDMKLDTPEPVPPSTPRGSSPVPEPVSSKVTINLRNADADTVPASPVSPTPLPPPGDRVQASVEDAEIIDVMQSQSADDLSSSPSIMNSPAEPGMSVEDLEQETASRTRHEENARNTSLVEKVFEFPYRGDNEALVDTAHRIVKHLRSSMSPASLCQAPTSNSDAPDSAQVDDAVHHIHLWLSRCLAQAQSEPSTTLIELYHEHKGFWRLLADIYFHFANRLLYCDNRRVRGLIIDSGVSFARLAALVLNIDAQALVTGQFVTESDLDLTCPYYLRSLASFPPREDHDGGLDGYEPRDVFQGNLGGSLAAFVAFVTDCISKLSQFPRRNLDYLSHCCFFTLAIIRDSVYKIAHPVTVPADLLDRAKDNLEKGYIIYTEISAAIDAMIEKSISSLSTDTTIGLIQWSTEILRHCFQGNCALAAALVDQHHQDHPELLGRFAEEAILLERRIQVACTLIKSSQMQLRVHAAGSLCEELVAQWKTYQQQQHHRDGLEDGYFQYLQYISHYVTNTGIVAYIIGPTCHPEVTIACANIIGFLAVTRTYSETETDLLWQTLTTTQDPRICKALVKMMCTIITLFPPSDMALLLEKFQNLPIDAFSSPTMRELFDNLTEFLVKGHPMVPWDVCVRLLRESSVLTTRGCLAHPEIYQFASMKIQRLLRLASLDEDGRCTIALSCLADLNSSSQTTSGSLQILHLLTQHPPNLKPFVDHHNLTTLLINDLDTALQSAKSMGFANVYSHQVWQARRRLISSVIQYYPTTIGIEQGQRLWDNLVGDKAASQEDRNLAWDDLNVAFARDQSRNQFYSDCLSVFLPRLPPSCYCRGCLAFVRGVILPLAREGDTLVHTLVLDDEDSLKAAGLELLWQIILTAPDQTIADQAISTLVYDIYVNSKIIATYALPRARKVHFSLAQRCLSQLKAAAQKLKDFSDGTTSGDDEPMVIVATDSQFRDQEFQFARSLKVLSMLLRTLRTKSHFSIPDLRSFMLPSPDEINGDLADLKYQSFEGETHGDVKPLRIGLKNSAASLLATIREATGFGSYRLYYQGRTLIPSEADSCKSLEDLRICSGLILVKKEQDSASSALRVKPGASPLEMDILTHFQDLWDYLSMEENLAREIYGFLCTLPADDSILAVFEGPKTSYREVFPLGQPFKSLYAIHALREYLSSRRLRTTVPRSSAPLGEIGHGSNDQQDAVAKAISWLVSAVCDANVVDDCPSEGVRIMLAFQIVDNFLLLLKGDVNLHLIDQLLTPAFYERLIALIAMGARAESSNGGNELVHRCFDALLECCAKSHDFWTLFRTQIATKEMICNLLLGEDRPYIRKSIAKHISSRTAYTDTSSHVTTIEFAELFWPIVFGLLPHAISQSHKCEEVFVLASHLLRKLIDSGSTMFDLVASAEECERFLLSHLGTEDVAHPEIVDHVAYGLISIVHQSIKHITDSAEVGQGNLPQFSASRIFTQHLFPPEHGAGLLGPKVIIQASSRNMLYDIVLALTNKNQREMIPILQSLHRLTQPFEAEGPRFYQYDIPQSFDRQSAVRSICGYSGLRNLSNTCYLNSLFTQLFMNMSFRQFILGAKVEEPSSRQLLHETQILFAYLQNSKRRFIDPQACVEQIMLGDQPIDIHNQMDVDEFYILLFDRWEAQLANEAERKALRSIYGGQLVHQIKSKECEHISERVEPFSAIQCDIKGKASLAESLQSYVDGEIMEGDNKYKCTSCDRHVDAVKRACLKDLPDNLIFHLKRFDFDLRLLQRNKINDYFAFPHEINMQPYTVQYLSDPSNSAEPDMFELVGILVHSGTAETGHYYSFTREHPTSSKTPSWVEFNDETVNQWDPLQMENACYGGADNGVMFEKAYSAYMLFYQRSSALQREQESFEAAGNSKRPRTTIPPQLELQVRRDNWEITQRHNLFDRSHIPFVSKVLDIVWSRKCSIDHQIENLAMNVALGHLDQIVTRAKDFPDFDRFSNTIIQACHRCSKCSFAFFVYFRQFKEALRMMVSRNADLSIRHDIGVSFLFALKKIKASLPDEYGNDLQIGDEVNSTSSDSDLTVLEATADLFMYISDTFHARLTAWPEVFGTIVDFAKMGQLESSALLDRDFLRRAIMIVAPSDSYGPQFSRLIANLNKRNATRAANYEAIIDLIDTLMAIMDGDMGNYVEAPFGRLSASLPDELIPFTAEEINLLHQPWDDGVQASVFVDRLILLNQHPVATDSILRRLISYNDSLDDVVFNTLRRSATGQIVTYPMTPFLRAALLYCASSGSSARVRDLITHIAYQCKALHTTEGQSFFEFQRDVFAGARSTGESNETITLQGLRNLPHWVPGLLGYADRAVSLATENFVNEKVLKHGPSPAFEYTDGGVERSRAMIVAAKELAVSCLEYLKDTYVLHRAQAARDSIIPLHQVIRNCEAYFEAHPDTEEELNHVFKEQRLPVLNAMTSLTVDEIDDDGSDWEQSVASDDSLAELSSMQVDHDFVEGTL

SEQ ID NO: 18167 - DNA, 9277 bp, Muscodor strobelii
  misc_feature: SGI EST ID NO. CUFF.42927.2
  misc_feature: Variant of the nucleotide sequence at SEQ ID NO 18165
ctgcattttacccagactctttggtcggtctaatacgcagcgcaagcttcttagcgtggaaacaagcttcgacagacacacgctccgtactaggcagaggtaccgagataccgagataccaccagtgaaccttaatctcctaccagctgaggctcaagtgcctgtagcgtgcgttggcaagaggcagcagatactgttagctttactgacgtgcattgcacctacctcctgccttgcgggacaggggttacttcccgacgactggagatccgaatcgttcctccaagcacctactgtaggtacctgaggtactttgcctactacccccgcggcccgccacagaacactgggtacctcccctccaagacgtctcttttttgggagcttctccaatgcgcggcagtctgtcgtcacactttcgaccacttttttacaccactaattgcagcagctcccttcagctcgcagcctcccgagccagacacacgtcgtccgcgtcgtgctcaacaaacaggctgcccgtctcgcacgcgctgccactcgtgtgctctgcctcttcgtcttctcttctcccgcagcatccatgctctctgcatctctcttcgctctataactttttaatcgggcccccagcattctaccccgcacaattcacacaagtccacccacatgctaaccttgtcgtccgctgccagacgctgccgagcctcgtcgaggggccgctgcacatcccaccaccgccaccgcttgcaccactgcttgcagcgacgcgagtatccttgctcgcagccctcgcgtctcccagatggaccccgagtcaagatccgacgagccgcgagaccgtgccctgtcttctgagcccagctcgacccgccccaaccccttcgacgacggcgacttgtctgcccgcaagcgccgccgtacctcccgctccggcacgcgctccctctccgtcgagtctcccctctcccaccgcccccctacttcagactcggccgcccacgacatgaagctcgacacccccgagcctgtgcctccaagcaccccgcgcggttcctctccggtccccgagcccgtctccagcaaggtcaccatcaacctgcgaaatgccgatgcagacacagtcccggcctctccagtgtctccaacgccgctcccaccgccaggcgaccgtgtccaggccagcgttgaggatgctgagattatcgatgtgatgcaaagccagtctgccgacgacctttcttcgtccccgtccattatgaacagcccagcggagcctggcatgtcggtggaggatctggagcaggagaccgcatcccgcacccgacatgaggagaacgcaaggaacacgagccttgtcgaaaaggtctttgagttcccctaccgaggtgacaacgaggcgctagtggatactgcccatcgtatcgtgaagcacctgcgctcaaattcggcccaggtagacgacgccgtgcaccatatccacttatggctcagccgttgcctagctcaagcacagtcggaaccatctactacgctcattgaattatatcacgagcacaagggattctggagactacttgcagatatatattttcacttcgctaataggttgctgtactgtgataacagaagggtacggggcctcatcatagactctggggtctcctttgcacgtctggccgcgctcgtccttaatatcgacgctcaggcgctagtgacgggccaattcgtgacggaaagcgacctggaccttacctgtccgtattatctgcggtcacttgcctcattcccgcctcgagaggatcacgacggaggcctcgacggttatgagccccgcgacgtgtttcagggcaaccttggtggttcattggccgcattcgtggcattcgtcaccgattgcatcagcaaattaagtcaatttcctagaagaaacttggattacttgtcccactgctgcttcttcacgcttgctataatccgagacagtgtttataagatcgcacatccggtgacggttcctgctgacttgcttgatcgtgcaaaggataacctagagaagggctacattatttatactgagatatcagctgccattgacgccatgattgagaagtccataagtagcctttccacagacaccacgataggcctaatccagtggtcgacagagattctgaggcattgtttccaaggcaactgtgcactggctgccgcacttgtcgatcagcatcatcaagatcatccagaactacttggtcgatttgccgaggaggctattctcctagagcgccgcatacaggtcgcttgcacgctgatcaagtcttctcaaatgcagttgagagtccacgctgctggctcattgtgtgaggagctagttgctcaatggaaaacatatcagcaacagcaacaccatcgggatggcctcgaggatggctacttccagtatcttcaatacatatcgcattatgtgacaaatactggcatcgtggcgtacatcatcggcccaacttgccacccggaggtcaccattgcttgtgccaatatcatagggtttcttgcagtgacgaggacatattcggaaacggagactgatctcctctggcagacgctcaccaccacgcaggaccctcggatctgcaaagccctagtcaagatgatgtgtaccattataacattgttcccaccgtcggatatggcgcttctccttgagaagttccaaaacttacccatcgatgctttctcttccccgacaatgcgagagcttttcgataaccttacagagtttctcgtcaagggccatcccatggtcccatgggacgtctgcgtgcgcctgctcagagaatcatcagtcttgaccaccaggggatgccttgcacatcctgagatctatcaatttgcttccatgaaaatccagaggctactgcgcctagccagcctagatgaagatggtcgatgcactattgcgttgagttgcttggcagaccttaattcatcgtctcagacaacatctggcagtttgcagatattgcatctgcttacacagcacccgccgaatttgaaacctttcgttgaccaccacaatttaacgacactgctgataaatgacttggatactgctcttcaatcggcaaaatctatgggctttgcgaacgtttactcgcatcaagtctggcaggcgcgccgaagactgatcagcagtgtcatccaatactatcccacgacaattggaattgagcaaggtcaaagactatgggacaatctcgtgggtgacaaagctgccagtcaggaggatagaaatctggcatgggatgatctgaacgttgcatttgcacgagatcaatcccgaaaccaattctattctgactgccttagtgtatttctcccacgattgccgccttcttgttactgtcgcggttgtcttgcatttgtccgtggagtaatacttcctctagcccgcgaaggggatacgctagtccacacccttgttcttgacgacgaagacagtctcaaagctgctggattagaattgctttggcagatcatcctaacggcacccgatcaaacaatcgcagatcaggccatatcgacacttgtctacgacatttacgtaaatagcaaaatcatcgctacgtacgcgctcccacgtgcccggaaagttcatttctcgctggcccaacgatgcttgtcacagttgaaggctgctgcacagaagctgaaggatttcagcgatggtacaacgagtggtgatgatgaaccgatggtcatcgtggcgacggacagccaatttcgagaccaagagtttcaattcgctcgttcgttgaaagtactgtctatgctcctgagaacactacgaacgaaatcacacttttcgatccctgatctgcgctctttcatgttaccatcgccagatgagatcaatggcgacctcgccgatctaaaataccaatcatttgaaggggaaacgcatggcgacgtgaagccgctgagaattgggctcaagaatagtgctgcatctttactcgccactatacgtgaggccactggctttggcagctaccggctatattatcagggtagaacactgattccctccgaagctgatagttgcaagtcactagaagatctcaggatttgcagtggattaatactggtcaaaaaggagcaagattctgcatcttctgctctgcgcgtgaaacctggtgcatcacccctagagatggacatcctcactcactttcaggatctatgggactatcttagtatggaagaaaacttggctcgagagatatatggttttctttgtactcttccagccgacgattcaatacttgcagtatttgagggcccaaaaacctcttatcgcgaggtgtttcctctcggtcagccgttcaaatccctttacgcgatacatgcgttgcgcgagtatctgagcagccgaaggcttaggaccaccgtgccacgctcatctgctcctcttggcgaaatcggacacggttcaaatgatcaacaagatgccgtagctaaagctatctcatggcttgtttctgctgtatgtgatgctaatgtggtggatgactgcccgtcggaaggcgttcgaataatgctcgcttttcaaatcgtcgataactttcttctgctcttgaaaggtgatgtgaatctgcatctaatcgatcaactccttactccggccttttacgaacgactcattgccctaattgcgatgggggcaagagctgaaagcagcaatgggggcaatgaacttgttcatcgatgttttgacgcattgcttgagtgttgcgccaagagccacgatttctggacactctttcgaacccagattgcgacaaaagaaatgatttgcaatctcttacttggtgaggatcggccttatatccgaaagagcattgcaaaacatatcagcagcaggaccgcatacaccgatacctcctcgcatgtgacgacaattgaatttgccgagctcttctggcctatcgtttttgggcttttgcctcatgctatttcccaatcgcacaaatgcgaggaggtatttgtcttagcttcgcatctactgagaaagctcattgacagcgggtctacgatgtttgacctagttgcatctgcagaagaatgtgaacgtttcttattgtctcatcttgggactgaagatgtggctcatccagagatagtcgaccatgttgcatatggcctcatcagcattgtgcaccaaagcatcaagcacatcactgattcggcagaggttggacaaggtaatcttccgcagttctctgcgagcaggatctttacgcaacacttatttccacctgaacacggagcgggtcttttgggccccaaggtcatcatacaggcgtcttcgcgaaacatgttatatgacattgtactggctctaacaaacaaaaaccagagagagatgattccgattctacaaagtctgcataggctgacacagccctttgaagcggaagggccacgattctatcagtatgatattccgcagtcattcgacaggcaaagtgccgttcggtccatctgcggatactctggactgagaaatctatctaatacatgttatctgaattcgcttttcacacagctattcatgaacatgagtttccggcagttcatacttggagcaaaggtcgaggaaccgagttctcgtcaattgctacacgagactcaaatcttgtttgcgtacctccagaacagcaagcgcaggttcatagacccacaagcttgcgtcgagcagatcatgctaggcgatcaacccatcgacattcacaaccaaatggatgttgatgaattctatattcttctctttgaccgttgggaggcgcaactagctaacgaggccgaaaggaaagcgctgaggtccatctatgggggccaattggttcaccagatcaaatccaaggagtgtgaacacatttccgaacgagttgagccgttttcagccattcagtgtgacataaaaggaaaggcaagcttagcggaaagcctgcaatcttatgtcgatggcgagatcatggaaggagacaacaagtacaagtgtaccagttgcgatcgacatgttgatgccgtcaagagagcatgcctcaaagatcttccagacaacctcatttttcatctcaaaaggttcgactttgatcttcgcctcctacaacgcaacaagattaatgattattttgctttcccgcatgagatcaacatgcaaccgtacactgtgcaatacttatccgatccttcaaacagcgccgagccggatatgttcgagctggtaggtattctcgtgcattcaggcacagccgagaccggtcattactactctttcactcgtgaacacccgacaagctccaagacaccttcttgggtcgagttcaatgatgaaacggtgaatcaatgggatccactgcaaatggaaaatgcgtgctatggaggtgcagacaacggggtcatgtttgaaaaggcgtatagcgcgtatatgctcttctatcagcgttcgtcggctttgcaacgagagcaggagtcattcgaggccgctggcaattccaaacgtccccggactacaattccccctcaactcgagcttcaagtcaggcgtgacaattgggaaattacccagcgccataacctcttcgacaggtcacacataccctttgtgtcaaaggttctcgacattgtctggtcaagaaagtgctcgatcgatcatcaaattgaaaatcttgcgatgaacgtcgctttaggtcacctggatcaaattgtcacccgagccaaggacttcccggacttcgacagatttagcaatacgattatccaggcttgtcaccgatgctctaagtgcagttttgcattcttcgtttacttcaggcaattcaaggaagctttgaggatgatggtctcccgaaacgccgacttgagcatccgccatgacattggagtcagttttctcttcgcattgaagaaaataaaagccagcctccccgatgaatacggaaacgatcttcaaatcggcgacgaagtcaactccacctctagtgattcagatttgacagtcttagaagcaactgcggatctgtttatgtacatatctgacacgttccacgctcgtctgacagcttggcctgaggtcttcggtactattgttgacttcgctaaaatgggccaacttgagtcgagtgccttgcttgaccgagacttcttgagaagggccataatgatcgtggcgccatcagactcatacggtccccagttcagcagattgattgctaatcttaataagagaaacgccacaagagccgccaattacgaggctattatcgatctaattgatactctcatggccatcatggatggcgacatggggaattacgtcgaggctccctttggccggctctctgcatcattaccagacgagttgatcccgttcacggcagaggagattaacttacttcatcagccatgggacgatggcgttcaggcgagcgtctttgttgacagacttatattgcttaaccagcaccccgttgcaacagacagcatacttcgacggcttatttcatacaatgattcgctggacgacgtggtattcaatactctgagacgtagcgccacgggacagatcgtgacatacccaatgactccatttctgcgcgcggccttgttgtattgcgcgtctagcgggtcaagtgcaagagttagggatctcatcacacacatcgcttatcaatgcaaagcacttcacacaaccgagggtcagtcattcttcgaattccagcgagatgttttcgctggggctcgtagcacaggagagagcaacgaaacgatcacgctgcaaggactacgaaatcttccccactgggtaccgggcctcttgggctatgcggatcgtgccgtgagtctggctaccgaaaactttgtgaacgaaaaagtactcaagcatggcccgagccctgcgtttgagtacacagatggtggggtcgaaagatcacgagcaatgatcgttgctgctaaggaacttgctgtcagctgtctagaatatttgaaagacacatatgttctacacagagcccaggctgcgcgcgattcaataatccctcttcaccaagtcatacgaaactgcgaagcttattttgaggcacatccggacactgaggaagaattgaatcatgtattcaaggaacaacgtttaccagtactgaatgccatgacttccttaacggttgacgagatagacgacgacggctcggattgggagcagtccgttgcgtctgatgacagcctcgccgagctaagcagtatgcaagtagatcacgacttcgtagaaggcaccttgtagtgactcgatatcactatgagctatgtccaagagtgacagcatcgattctcggacgagtcttccagggcatttgttttgaagaggatgaaattggtagcggcggtgtctggcgtctgacctgtatattttctcgacggcgtctgggtttgttttgaagcgatatcggctgtagagaaatggtggctttgttattttgtcagagacgccctctgagcaatggccacgaaactctgagagaatacggggtgaatagtattatctgcgggcgatcaacattcgggctacccacagaattgatgaaggatagcactagccgatgcgaaacatctgcgcatgtatctaattacatgagctatctcaagtctcctcggagtccaagcgccttattcatcgcatgagaggaaagtgcccactacgacttgatgtattcggtgatgtgtttcggagcgtggtgactgatatccctttgctcgtttgcccgcatttcaccaggcattcgagagatgcccatcgtgggaaagtagttcacaaatctatttttgacaagctctacagcgtctaagtagcagtgcgtcaaacctatcacaatggtaggcgatgaacacagtggggaaatctagatatgtagggaatcaatattttagagtattggagagtttatggactcggatgcatgtcacggttgacaaaatacccagctttgttgttgatctcttgtggacaaaaatgtttcaacatcggttgtatgggcccttgcattgaagatatctacatgtacctaatctatattaaactcagaccgttatgctacatataaggggcctaattggttaggattctgacggtattgcaatttcttgattgaatctgtagcctactgggatatgagatgtgattgtgatgtgttacctctagcggtgacggagg

SEQ ID NO: 18168 - DNA, 7545 bp, Muscodor strobelii
  misc_feature: SGI cDNA ID NO. 566085
  misc_feature: Encodes the peptide sequence at SEQ ID NO 18169
atggaccccgagtcaagatccgacgagccgcgagaccgtgccctgtcttctgagcccagctcgacccgccccaaccccttcgacgacggcgacttgtctgcccgcaagcgccgccgtacctcccgctccggcacgcgctccctctccgtcgagtctcccctctcccaccgcccccctacttcagactcggccgcccacgacatgaagctcgacacccccgagcctgtgcctccaagcaccccgcgcggttcctctccggtccccgagcccgtctccagcaaggtcaccatcaacctgcgaaatgccgatgcagacacagtcccggcctctccagtgtctccaacgccgctcccaccgccaggcgaccgtgtccaggccagcgttgaggatgctgagattatcgatgtgatgcaaagccagtctgccgacgacctttcttcgtccccgtccattatgaacagcccagcggagcctggcatgtcggtggaggatctggagcaggagaccgcatcccgcacccgacatgaggagaacgcaaggaacacgagccttgtcgaaaaggtctttgagttcccctaccgaggtgacaacgaggcgctagtggatactgcccatcgtatcgtgaagcacctgcgctcaaattcggcccaggtagacgacgccgtgcaccatatccacttatggctcagccgttgcctagctcaagcacagtcggaaccatctactacgctcattgaattatatcacgagcacaagggattctggagactacttgcagatatatattttcacttcgctaataggttgctgtactgtgataacagaagggtacggggcctcatcatagactctggggtctcctttgcacgtctggccgcgctcgtccttaatatcgacgctcaggcgctagtgacgggccaattcgtgacggaaagcgacctggaccttacctgtccgtattatctgcggtcacttgcctcattcccgcctcgagaggatcacgacggaggcctcgacggttatgagccccgcgacgtgtttcagggcaaccttggtggttcattggccgcattcgtggcattcgtcaccgattgcatcagcaaattaagtcaatttcctagaagaaacttggattacttgtcccactgctgcttcttcacgcttgctataatccgagacagtgtttataagatcgcacatccggtgacggttcctgctgacttgcttgatcgtgcaaaggataacctagagaagggctacattatttatactgagatatcagctgccattgacgccatgattgagaagtccataagtagcctttccacagacaccacgataggcctaatccagtggtcgacagagattctgaggcattgtttccaaggcaactgtgcactggctgccgcacttgtcgatcagcatcatcaagatcatccagaactacttggtcgatttgccgaggaggctattctcctagagcgccgcatacaggtcgcttgcacgctgatcaagtcttctcaaatgcagttgagagtccacgctgctggctcattgtgtgaggagctagttgctcaatggaaaacatatcagcaacagcaacaccatcgggatggcctcgaggatggctacttccagtatcttcaatacatatcgcattatgtgacaaatactggcatcgtggcgtacatcatcggcccaacttgccacccggaggtcaccattgcttgtgccaatatcatagggtttcttgcagtgacgaggacatattcggaaacggagactgatctcctctggcagacgctcaccaccacgcaggaccctcggatctgcaaagccctagtcaagatgatgtgtaccattataacattgttcccaccgtcggatatggcgcttctccttgagaagttccaaaacttacccatcgatgctttctcttccccgacaatgcgagagcttttcgataaccttacagagtttctcgtcaagggccatcccatggtcccatgggacgtctgcgtgcgcctgctcagagaatcatcagtcttgaccaccaggggatgccttgcacatcctgagatctatcaatttgcttccatgaaaatccagaggctactgcgcctagccagcctagatgaagatggtcgatgcactattgcgttgagttgcttggcagaccttaattcatcgtctcagacaacatctggcagtttgcagatattgcatctgcttacacagcacccgccgaatttgaaacctttcgttgaccaccacaatttaacgacactgctgataaatgacttggatactgctcttcaatcggcaaaatctatgggctttgcgaacgtttactcgcatcaagtctggcaggcgcgccgaagactgatcagcagtgtcatccaatactatcccacgacaattggaattgagcaaggtcaaagactatgggacaatctcgtgggtgacaaagctgccagtcaggaggatagaaatctggcatgggatgatctgaacgttgcatttgcacgagatcaatcccgaaaccaattctattctgactgccttagtgtatttctcccacgattgccgccttcttgttactgtcgcggttgtcttgcatttgtccgtggagtaatacttcctctagcccgcgaaggggatacgctagtccacacccttgttcttgacgacgaagacagtctcaaagctgctggattagaattgctttggcagatcatcctaacggcacccgatcaaacaatcgcagatcaggccatatcgacacttgtctacgacatttacgtaaatagcaaaatcatcgctacgtacgcgctcccacgtgcccggaaagttcatttctcgctggcccaacgatgcttgtcacagttgaaggctgctgcacagaagctgaaggatttcagcgatggtacaacgagtggtgatgatgaaccgatggtcatcgtggcgacggacagccaatttcgagaccaagagtttcaattcgctcgttcgttgaaagtactgtctatgctcctgagaacactacgaacgaaatcacacttttcgatccctgatctgcgctctttcatgttaccatcgccagatgagatcaatggcgacctcgccgatctaaaataccaatcatttgaaggggaaacgcatggcgacgtgaagccgctgagaattgggctcaagaatagtgctgcatctttactcgccactatacgtgaggccactggctttggcagctaccggctatattatcagggtagaacactgattccctccgaagctgatagttgcaagtcactagaagatctcaggatttgcagtggattaatactggtcaaaaaggagcaagattctgcatcttctgctctgcgcgtgaaacctggtgcatcacccctagagatggacatcctcactcactttcaggatctatgggactatcttagtatggaagaaaacttggctcgagagatatatggttttctttgtactcttccagccgacgattcaatacttgcagtatttgagggcccaaaaacctcttatcgcgaggtgtttcctctcggtcagccgttcaaatccctttacgcgatacatgcgttgcgcgagtatctgagcagccgaaggcttaggaccaccgtgccacgctcatctgctcctcttggcgaaatcggacacggttcaaatgatcaacaagatgccgtagctaaagctatctcatggcttgtttctgctgtatgtgatgctaatgtggtggatgactgcccgtcggaaggcgttcgaataatgctcgcttttcaaatcgtcgataactttcttctgctcttgaaaggtgatgtgaatctgcatctaatcgatcaactccttactccggccttttacgaacgactcattgccctaattgcgatgggggcaagagctgaaagcagcaatgggggcaatgaacttgttcatcgatgttttgacgcattgcttgagtgttgcgccaagagccacgatttctggacactctttcgaacccagattgcgacaaaagaaatgatttgcaatctcttacttggtgaggatcggccttatatccgaaagagcattgcaaaacatatcagcagcaggaccgcatacaccgatacctcctcgcatgtgacgacaattgaatttgccgagctcttctggcctatcgtttttgggcttttgcctcatgctatttcccaatcgcacaaatgcgaggaggtatttgtcttagcttcgcatctactgagaaagctcattgacagcgggtctacgatgtttgacctagttgcatctgcagaagaatgtgaacgtttcttattgtctcatcttgggactgaagatgtggctcatccagagatagtcgaccatgttgcatatggcctcatcagcattgtgcaccaaagcatcaagcacatcactgattcggcagaggttggacaaggtaatcttccgcagttctctgcgagcaggatctttacgcaacacttatttccacctgaacacggagcgggtcttttgggccccaaggtcatcatacaggcgtcttcgcgaaacatgttatatgacattgtactggctctaacaaacaaaaaccagagagagatgattccgattctacaaagtctgcataggctgacacagccctttgaagcggaagggccacgattctatcagtatgatattccgcagtcattcgacaggcaaagtgccgttcggtccatctgcggatactctggactgagaaatctatctaatacatgttatctgaattcgcttttcacacagctattcatgaacatgagtttccggcagttcatacttggagcaaaggtcgaggaaccgagttctcgtcaattgctacacgagactcaaatcttgtttgcgtacctccagaacagcaagcgcaggttcatagacccacaagcttgcgtcgagcagatcatgctaggcgatcaacccatcgacattcacaaccaaatggatgttgatgaattctatattcttctctttgaccgttgggaggcgcaactagctaacgaggccgaaaggaaagcgctgaggtccatctatgggggccaattggttcaccagatcaaatccaaggagtgtgaacacatttccgaacgagttgagccgttttcagccattcagtgtgacataaaaggaaaggcaagcttagcggaaagcctgcaatcttatgtcgatggcgagatcatggaaggagacaacaagtacaagtgtaccagttgcgatcgacatgttgatgccgtcaagagagcatgcctcaaagatcttccagacaacctcatttttcatctcaaaaggttcgactttgatcttcgcctcctacaacgcaacaagattaatgattattttgctttcccgcatgagatcaacatgcaaccgtacactgtgcaatacttatccgatccttcaaacagcgccgagccggatatgttcgagctggtaggtattctcgtgcattcaggcacagccgagaccggtcattactactctttcactcgtgaacacccgacaagctccaagacaccttcttgggtcgagttcaatgatgaaacggtgaatcaatgggatccactgcaaatggaaaatgcgtgctatggaggtgcagacaacggggtcatgtttgaaaaggcgtatagcgcgtatatgctcttctatcagcgttcgtcggctttgcaacgagagcaggagtcattcgaggccgctggcaattccaaacgtccccggactacaattccccctcaactcgagcttcaagtcaggcgtgacaattgggaaattacccagcgccataacctcttcgacaggtcacacataccctttgtgtcaaaggttctcgacattgtctggtcaagaaagtgctcgatcgatcatcaaattgaaaatcttgcgatgaacgtcgctttaggtcacctggatcaaattgtcacccgagccaaggacttcccggacttcgacagatttagcaatacgattatccaggcttgtcaccgatgctctaagtgcagttttgcattcttcgtttacttcaggcaattcaaggaagctttgaggatgatggtctcccgaaacgccgacttgagcatccgccatgacattggagtcagttttctcttcgcattgaagaaaataaaagccagcctccccgatgaatacggaaacgatcttcaaatcggcgacgaagtcaactccacctctagtgattcagatttgacagtcttagaagcaactgcggatctgtttatgtacatatctgacacgttccacgctcgtctgacagcttggcctgaggtcttcggtactattgttgacttcgctaaaatgggccaacttgagtcgagtgccttgcttgaccgagacttcttgagaagggccataatgatcgtggcgccatcagactcatacggtccccagttcagcagattgattgctaatcttaataagagaaacgccacaagagccgccaattacgaggctattatcgatctaattgatactctcatggccatcatggatggcgacatggggaattacgtcgaggctccctttggccggctctctgcatcattaccagacgagttgatcccgttcacggcagaggagattaacttacttcatcagccatgggacgatggcgttcaggcgagcgtctttgttgacagacttatattgcttaaccagcaccccgttgcaacagacagcatacttcgacggcttatttcatacaatgattcgctggacgacgtggtattcaatactctgagacgtagcgccacgggacagatcgtgacatacccaatgactccatttctgcgcgcggccttgttgtattgcgcgtctagcgggtcaagtgcaagagttagggatctcatcacacacatcgcttatcaatgcaaagcacttcacacaaccgagggtcagtcattcttcgaattccagcgagatgttttcgctggggctcgtagcacaggagagagcaacgaaacgatcacgctgcaaggactacgaaatcttccccactgggtaccgggcctcttgggctatgcggatcgtgccgtgagtctggctaccgaaaactttgtgaacgaaaaagtactcaagcatggcccgagccctgcgtttgagtacacagatggtggggtcgaaagatcacgagcaatgatcgttgctgctaaggaacttgctgtcagctgtctagaatatttgaaagacacatatgttctacacagagcccaggctgcgcgcgattcaataatccctcttcaccaagtcatacgaaactgcgaagcttattttgaggcacatccggacactgaggaagaattgaatcatgtattcaaggaacaacgtttaccagtactgaatgccatgacttccttaacggttgacgagatagacgacgacggctcggattgggagcagtccgttgcgtctgatgacagcctcgccgagctaagcagtatgcaagtagatcacgacttcgtagaaggcaccttgtag

SEQ ID NO: 18169 - protein, 2514 aa, Muscodor strobelii
  misc_feature: SGI Peptide ID NO. 566085
  misc_feature (1582)..(1901): Pfam Id: PF00443 Pfam Desc: Ubiquitin carboxyl-terminal hydrolase
  misc_feature (1)..(2505): NCBI GI: 256729724 Blast Desc: NECHADRAFT_71149 [Nectria haematococca mpVI 77-13-4]
  misc_feature (1)..(2500): NCBI GI: 46122169 Blast Desc: FG05462.1 [Gibberella zeae PH-1]
  misc_feature (8)..(2463): NCBI GI: 171685794 Blast Desc: protein product [Podospora anserina] gi|170942858|emb|CAP68511.1| protein product [Podospora anserina]
  misc_feature (208)..(2497): NCBI GI: 116207252 Blast Desc: CHGG_02919 [Chaetomium globosum CBS 148.51] gi|88183516|gb|EAQ90984.1| CHGG_02919 [Chaetomium globosum CBS 148.51]
  misc_feature (1)..(2514): NCBI GI: 145602322 Blast Desc: MGG_05002 [Magnaporthe grisea 70-15] gi|145010755|gb|EDJ95411.1| MGG_05002 [Magnaporthe grisea 70-15]
  misc_feature (350)..(2514): NCBI GI: 85086944 Blast Desc: NCU00320 [Neurospora crassa OR74A] gi|28918886|gb|EAA28555.1| [Neurospora crassa OR74A]
  misc_feature (1)..(2274): NCBI GI: 261360286 Blast Desc: ubiquitin carboxyl-terminal hydrolase [Verticillium albo-atrum VaMs.102]
  misc_feature (1)..(2496): NCBI GI: 239606372 Blast Desc: ubiquitin C-terminal hydrolase [Ajellomyces dermatitidis ER-3]
  misc_feature (1)..(2496): NCBI GI: 261190146 Blast Desc: ubiquitin C-terminal hydrolase [Ajellomyces dermatitidis SLH14081] gi|239591311|gb|EEQ73892.1| ubiquitin C-terminal hydrolase [Ajellomyces dermatitidis SLH14081]
  misc_feature (3)..(2448): NCBI GI: 225559415 Blast Desc: ubiquitin carboxyl-terminal hydrolase [Ajellomyces capsulatus G186AR]
MDPESRSDEPRDRALSSEPSSTRPNPFDDGDLSARKRRRTSRSGTRSLSVESPLSHRPPTSDSAAHDMKLDTPEPVPPSTPRGSSPVPEPVSSKVTINLRNADADTVPASPVSPTPLPPPGDRVQASVEDAEIIDVMQSQSADDLSSSPSIMNSPAEPGMSVEDLEQETASRTRHEENARNTSLVEKVFEFPYRGDNEALVDTAHRIVKHLRSNSAQVDDAVHHIHLWLSRCLAQAQSEPSTTLIELYHEHKGFWRLLADIYFHFANRLLYCDNRRVRGLIIDSGVSFARLAALVLNIDAQALVTGQFVTESDLDLTCPYYLRSLASFPPREDHDGGLDGYEPRDVFQGNLGGSLAAFVAFVTDCISKLSQFPRRNLDYLSHCCFFTLAIIRDSVYKIAHPVTVPADLLDRAKDNLEKGYIIYTEISAAIDAMIEKSISSLSTDTTIGLIQWSTEILRHCFQGNCALAAALVDQHHQDHPELLGRFAEEAILLERRIQVACTLIKSSQMQLRVHAAGSLCEELVAQWKTYQQQQHHRDGLEDGYFQYLQYISHYVTNTGIVAYIIGPTCHPEVTIACANIIGFLAVTRTYSETETDLLWQTLTTTQDPRICKALVKMMCTIITLFPPSDMALLLEKFQNLPIDAFSSPTMRELFDNLTEFLVKGHPMVPWDVCVRLLRESSVLTTRGCLAHPEIYQFASMKIQRLLRLASLDEDGRCTIALSCLADLNSSSQTTSGSLQILHLLTQHPPNLKPFVDHHNLTTLLINDLDTALQSAKSMGFANVYSHQVWQARRRLISSVIQYYPTTIGIEQGQRLWDNLVGDKAASQEDRNLAWDDLNVAFARDQSRNQFYSDCLSVFLPRLPPSCYCRGCLAFVRGVILPLAREGDTLVHTLVLDDEDSLKAAGLELLWQIILTAPDQTIADQAISTLVYDIYVNSKIIATYALPRARKVHFSLAQRCLSQLKAAAQKLKDFSDGTTSGDDEPMVIVATDSQFRDQEFQFARSLKVLSMLLRTLRTKSHFSIPDLRSFMLPSPDEINGDLADLKYQSFEGETHGDVKPLRIGLKNSAASLLATIREATGFGSYRLYYQGRTLIPSEADSCKSLEDLRICSGLILVKKEQDSASSALRVKPGASPLEMDILTHFQDLWDYLSMEENLAREIYGFLCTLPADDSILAVFEGPKTSYREVFPLGQPFKSLYAIHALREYLSSRRLRTTVPRSSAPLGEIGHGSNDQQDAVAKAISWLVSAVCDANVVDDCPSEGVRIMLAFQIVDNFLLLLKGDVNLHLIDQLLTPAFYERLIALIAMGARAESSNGGNELVHRCFDALLECCAKSHDFWTLFRTQIATKEMICNLLLGEDRPYIRKSIAKHISSRTAYTDTSSHVTTIEFAELFWPIVFGLLPHAISQSHKCEEVFVLASHLLRKLIDSGSTMFDLVASAEECERFLLSHLGTEDVAHPEIVDHVAYGLISIVHQSIKHITDSAEVGQGNLPQFSASRIFTQHLFPPEHGAGLLGPKVIIQASSRNMLYDIVLALTNKNQREMIPILQSLHRLTQPFEAEGPRFYQYDIPQSFDRQSAVRSICGYSGLRNLSNTCYLNSLFTQLFMNMSFRQFILGAKVEEPSSRQLLHETQILFAYLQNSKRRFIDPQACVEQIMLGDQPIDIHNQMDVDEFYILLFDRWEAQLANEAERKALRSIYGGQLVHQIKSKECEHISERVEPFSAIQCDIKGKASLAESLQSYVDGEIMEGDNKYKCTSCDRHVDAVKRACLKDLPDNLIFHLKRFDFDLRLLQRNKINDYFAFPHEINMQPYTVQYLSDPSNSAEPDMFELVGILVHSGTAETGHYYSFTREHPTSSKTPSWVEFNDETVNQWDPLQMENACYGGADNGVMFEKAYSAYMLFYQRSSALQREQESFEAAGNSKRPRTTIPPQLELQVRRDNWEITQRHNLFDRSHIPFVSKVLDIVWSRKCSIDHQIENLAMNVALGHLDQIVTRAKDFPDFDRFSNTIIQACHRCSKCSFAFFVYFRQFKEALRMMVSRNADLSIRHDIGVSFLFALKKIKASLPDEYGNDLQIGDEVNSTSSDSDLTVLEATADLFMYISDTFHARLTAWPEVFGTIVDFAKMGQLESSALLDRDFLRRAIMIVAPSDSYGPQFSRLIANLNKRNATRAANYEAIIDLIDTLMAIMDGDMGNYVEAPFGRLSASLPDELIPFTAEEINLLHQPWDDGVQASVFVDRLILLNQHPVATDSILRRLISYNDSLDDVVFNTLRRSATGQIVTYPMTPFLRAALLYCASSGSSARVRDLITHIAYQCKALHTTEGQSFFEFQRDVFAGARSTGESNETITLQGLRNLPHWVPGLLGYADRAVSLATENFVNEKVLKHGPSPAFEYTDGGVERSRAMIVAAKELAVSCLEYLKDTYVLHRAQAARDSIIPLHQVIRNCEAYFEAHPDTEEELNHVFKEQRLPVLNAMTSLTVDEIDDDGSDWEQSVASDDSLAELSSMQVDHDFVEGTL

SEQ ID NO: 18170 - DNA, 9277 bp, Muscodor strobelii; identical to SEQ ID NO: 18167
  misc_feature: SGI EST ID NO. CUFF.42927.2
  misc_feature: Variant of the nucleotide sequence at SEQ ID NO 18168

SEQ ID NO: 18171 - DNA, 1671 bp, Muscodor strobelii
  misc_feature: SGI cDNA ID NO. 566086
  misc_feature: Elevated expression when VOC is produced
  misc_feature: Encodes the peptide sequence at SEQ ID NO 18172
atgtcctttacgaaacagcgtataagttcaccacgagaggctggaacgtcactctttgatgcgcataatctaccgccgcaaatcacaggcgccctcgaatatgcatcgaaacgtcttgtacggaagaatctacacattactctcatcgttgtcaaaaacgagtatcagattcccagctcagcaccatgcacgactccttcgatgacctcgcccccacaaacaccagactgctccatgacgggcttcgccacgccatcccgtttcacatcctcagtcactgggcttcgtcagctcgtacggcgcggcaccggcagcagctcccttgcgtcgaccataaccacggcgtcggattccacacctaatacgcccagctttgcgccgccaccaatggagcctatcatgagccctcgacgttggatgttgcctctgtcgccagggagcccattgacaccgttgacaccacacactccggcaagcattgccacgactgccacctcgacttcagctacctcatcaagcgccaggagtcagggtccagaatcctttggtatccgacttgtctatacgtcatcactctcgccaaaggatgacaggacacttcggacgacgatgattaaagctgaacgcaagtttcacctaggggccggggcattaccaaccatcacaacggccatggcatgtggattcaatgccgaactagtgcggcggagcatcattcaaaacgaggtgctattctcgtctggtggactggcactcctaggtctggataggttatatacctttaaggcagcgctcgctgcatatgctcggtcgatcatcacgacgcagagcgtatcaacgccgctgggatcaccaggcttatcgaatcaccccctcagcacccagacacccgcgcctacatccacagcaccaaataactcacggttgctagaagacactgtcgattcattacgacggttgatactatccaacaagggtggccagcccatgttcaagacagacttatatcgcagcttcgactggatgagcatccatcctaaggcgttagcggacgtcgaacagatgtataaaaatgcatacggcggtcctgataggcagggaccattcataatgcccactggtgtgactggcgcagaggagaaagaatgtaaagtcgattcgaggaggatgggtttcgtcaagataggaacgccaccaaagtcacagacaacacccgttttgaagctgaatactaattttgcgacgacgccgcgagttgtccgcccgcagcccagatccatagcacagactgtggagacacagccaaaaagagacgttgagtctgtcgtacatgacagtaccaacaccaaagtgcacacctcagacgacgaagcaatagaaatcaagttggacgggttagatatatgtgacgaagaagagggagatcgcacagcacatccgcttcgagacggaccgttacgaccatcgttattctggcccgggggccgtgcgctgggggtctcgatcgatgagctgctgtcgcctgtggaccagagacagtcgcatcaattgggacccatgacgccgaacggctacgatgatatttcacccatcacgcggggcgaatggggccatcttttccaaggggagacctggactacgggacgccaggtcggagtagagacatgttga

SEQ ID NO: 18172 - protein, 556 aa, Muscodor strobelii
  misc_feature: SGI Peptide ID NO. 566086
  misc_feature (5)..(555): NCBI GI: 46122167 Blast Desc: FG05461.1 [Gibberella zeae PH-1]
  misc_feature (1)..(556): NCBI GI: 145602320 Blast Desc: MGG_05003 [Magnaporthe grisea 70-15] gi|145010754|gb|EDJ95410.1| MGG_05003 [Magnaporthe grisea 70-15]
  misc_feature (5)..(415): NCBI GI: 256729725 Blast Desc: NECHADRAFT_83844 [Nectria haematococca mpVI 77-13-4]
  misc_feature (1)..(366): NCBI GI: 116207250 Blast Desc: CHGG_02918 [Chaetomium globosum CBS 148.51] gi|88183515|gb|EAQ90983.1| CHGG_02918 [Chaetomium globosum CBS 148.51]
  misc_feature (5)..(362): NCBI GI: 171685792 Blast Desc: protein product [Podospora anserina] gi|170942857|emb|CAP68510.1| protein product [Podospora anserina]
  misc_feature (1)..(374): NCBI GI: 156033013 Blast Desc: SS1G_13582 [Sclerotinia sclerotiorum 1980] gi|154698985|gb|EDN98723.1| SS1G_13582 [Sclerotinia sclerotiorum 1980]
  misc_feature (5)..(367): NCBI GI: 85086948 Blast Desc: NCU00321 [Neurospora crassa OR74A] gi|28918887|gb|EAA28556.1| [Neurospora crassa OR74A]
  misc_feature (186)..(375): NCBI GI: 255935569 Blast Desc: Pc13g03740 [Penicillium chrysogenum Wisconsin 54-1255] gi|211583431|emb|CAP91443.1| Pc13g03740 [Penicillium chrysogenum Wisconsin 54-1255]
  misc_feature (189)..(390): NCBI GI: 67539892 Blast Desc: AN6116.2 [Aspergillus nidulans FGSC A4] gi|40738901|gb|EAA58091.1| AN6116.2 [Aspergillus nidulans FGSC A4] gi|259479694|tpe|CBF70153.1| TPA: conserved [Aspergillus FGSC
  misc_feature (1)..(61): NCBI GI: 154301475 Blast Desc: [Botryotinia fuckeliana B05.10] gi|150856147|gb|EDN31339.1| [Botryotinia fuckeliana B05.10]
  misc_feature: Useful for introducing or modulating the production of volatile compounds
MSFTKQRISSPREAGTSLFDAHNLPPQITGALEYASKRLVRKNLHITLIVVKNEYQIPSSAPCTTPSMTSPPQTPDCSMTGFATPSRFTSSVTGLRQLVRRGTGSSSLASTITTASDSTPNTPSFAPPPMEPIMSPRRWMLPLSPGSPLTPLTPHTPASIATTATSTSATSSSARSQGPESFGIRLVYTSSLSPKDDRTLRTTMIKAERKFHLGAGALPTITTAMACGFNAELVRRSIIQNEVLFSSGGLALLGLDRLYTFKAALAAYARSIITTQSVSTPLGSPGLSNHPLSTQTPAPTSTAPNNSRLLEDTVDSLRRLILSNKGGQPMFKTDLYRSFDWMSIHPKALADVEQMYKNAYGGPDRQGPFIMPTGVTGAEEKECKVDSRRMGFVKIGTPPKSQTTPVLKLNTNFATTPRVVRPQPRSIAQTVETQPKRDVESVVHDSTNTKVHTSDDEAIEIKLDGLDICDEEEGDRTAHPLRDGPLRPSLFWPGGRALGVSIDELLSPVDQRQSHQLGPMTPNGYDDISPITRGEWGHLFQGETWTTGRQVGVETC

SEQ ID NO: 18173 - DNA, 2225 bp, Muscodor strobelii
  misc_feature: SGI EST ID NO. CUFF.42822.0
  misc_feature: Variant of the nucleotide sequence at SEQ ID NO 18171
tctacccctacctaaacacacgtcgtccgtttcagatggccttgtttcaaattgccatgtggtccagctatctgttagccgccctactatatttgtccttgtgagcctacatgtcatcatttccgtagcacaccaccccatacagtaccccatgcacaacattccgttcttcgtttcaggggtccatgtttactagaagtctgattttggatctctttgtttcagatcgacatttcgaaacgatggcagatctgtcacatcatagatagcttcatgcagatataactattcatctcaaccctcctccacatcctgctcatcaacccgtgaaacctcgagactcggcacctaccatcacataaaaacaaggaaggctgagcatttcattcgcgcagattgcactgcctcttcctctttgctttcttcgcttgtagtatttccctttcctacctgcctatcatgtcctttacgaaacagcgtataagttcaccacgagaggctggaacgtcactctttgatgcgcataatctaccgccgcaaatcacaggcgccctcgaatatgcatcgaaacgtcttgtacggaagaatctacacattactctcatcgttgtcaaaaacgagtatcagattcccagctcagcaccatgcacgactccttcgatgacctcgcccccacaaacaccagactgctccatgacgggcttcgccacgccatcccgtttcacatcctcagtcactgggcttcgtcagctcgtacggcgcggcaccggcagcagctcccttgcgtcgaccataaccacggcgtcggattccacacctaatacgcccagctttgcgccgccaccaatggagcctatcatgagccctcgacgttggatgttgcctctgtcgccagggagcccattgacaccgttgacaccacacactccggcaagcattgccacgactgccacctcgacttcagctacctcatcaagcgccaggagtcagggtccagaatcctttggtatccgacttgtctatacgtcatcactctcgccaaaggatgacaggacacttcggacgacgatgattaaagctgaacgcaagtttcacctaggggccggggcattaccaaccatcacaacggccatggcatgtggattcaatgccgaactagtgcggcggagcatcattcaaaacgaggtgctattctcgtctggtggactggcactcctaggtctggataggttatatacctttaaggcagcgctcgctgcatatgctcggtcgatcatcacgacgcagagcgtatcaacgccgctgggatcaccaggcttatcgaatcaccccctcagcacccagacacccgcgcctacatccacagcaccaaataactcacggttgctagaagacactgtcgattcattacgacggttgatactatccaacaagggtggccagcccatgttcaagacagacttatatcgcagcttcgactggatgagcatccatcctaaggcgttagcggacgtcgaacagatgtataaaaatgcatacggcggtcctgataggcagggaccattcataatgcccactggtgtgactggcgcagaggagaaagaatgtaaagtcgattcgaggaggatgggtttcgtcaagataggaacgccaccaaagtcacagacaacacccgttttgaagctgaatactaattttgcgacgacgccgcgagttgtccgcccgcagcccagatccatagcacagactgtggagacacagccaaaaagagacgttgagtctgtcgtacatgacagtaccaacaccaaagtgcacacctcagacgacgaagcaatagaaatcaagttggacgggttagatatatgtgacgaagaagagggagatcgcacagcacatccgcttcgagacggaccgttacgaccatcgttattctggcccgggggccgtgcgctgggggtctcgatcgatgagctgctgtcgcctgtggaccagagacagtcgcatcaattgggacccatgacgccgaacggctacgatgatatttcacccatcacgcggggcgaatggggccatcttttccaaggggagacctggactacgggacgccaggtcggagtagagacatgttgacatgttgagcgatcaacgattaaaaactttgtggagtttagcattttgttagcgcttgtatgaataatgatacctcaagagtcaaatatcgtgct

SEQ ID NO: 18174 - DNA, 828 bp, Muscodor strobelii
  misc_feature: SGI cDNA ID NO. 566087
  misc_feature: Encodes the peptide sequence at SEQ ID NO 18175
atggccgaggaattcaacccggatgtcttggaggagcagccggcgggcgacgtcgagatggccgaggagacggagcaggacgtcgagggcgccgacaacacggccgacctgcctttcgccgagggcggcgagactgacccgcgcaccaccttcatcagctacctgacgagtcccgtcgtcaccctgatcgtcggcgccgccgagaacgagaccatcctcaccgcccaccaggctctgctgacccagagccccttcttcgccgacgcctgcgccgcttttgcccaagacggaagtccgcggcagatcgacctgcaagctgaggagatcgacgccgtcggctgcttcctcgagtacctctacacgggcgactacttccccaagaagctgccgggccagcgcgtcctcgagcccgacccgtccgtgcccgccgtcgacgagacgggcgaccagctgctcaagcatgcccgcgtctacaccatcgccgagaagttcggcatcgacaagctcaagaacctcgccagcagcaagatccactgcgtcaactccaccgccaagggcgagatcacctacgctcgctacatctacgcctacaccagcaaggacgacaccgccgtccgcgcccccgtcgccaacttctgggccacgcgcagccataccctgcgtgccgaggccgaggacgagttcaggaatctgtgtctggagtacccgcagtttggttacgatgttcttacgcgcgtgctcgacgagaaactcaagcgcgagaagaacgagaagatgcaccccgctactgggagcgcgaggaagcgcgccaggcactcaaatgtatag

SEQ ID NO: 18175 - protein, 275 aa, Muscodor strobelii
  misc_feature: SGI Peptide ID NO. 566087
  misc_feature (1)..(274): NCBI GI: 85109673 Blast Desc: NCU08550 [Neurospora crassa OR74A] gi|28924680|gb|EAA33796.1| conserved [Neurospora crassa OR74A]
  misc_feature (1)..(274): NCBI GI: 171685384 Blast Desc: protein product [Podospora anserina] gi|170942653|emb|CAP68305.1| protein product [Podospora anserina]
  misc_feature (13)..(274): NCBI GI: 256726421 Blast Desc: [Nectria haematococca mpVI 77-13-4]
  misc_feature (13)..(274): NCBI GI: 46124293 Blast Desc: FG06524.1 [Gibberella zeae PH-1]
  misc_feature (14)..(275): NCBI GI: 39956710 Blast Desc: MGG_09114 [Magnaporthe grisea 70-15] gi|145016517|gb|EDK00947.1| MGG_09114 [Magnaporthe grisea 70-15]
  misc_feature (48)..(275): NCBI GI: 156048418 Blast Desc: SS1G_08940 [Sclerotinia sclerotiorum 1980] gi|154693337|gb|EDN93075.1| SS1G_08940 [Sclerotinia sclerotiorum 1980]
  misc_feature (1)..(274): NCBI GI: 116208454 Blast Desc: CHGG_03520 [Chaetomium globosum CBS 148.51] gi|88184117|gb|EAQ91585.1| CHGG_03520 [Chaetomium globosum CBS 148.51]
  misc_feature (48)..(245): NCBI GI: 154300634 Blast Desc: BC1G_10905 [Botryotinia fuckeliana B05.10] gi|150856512|gb|EDN31704.1| BC1G_10905 [Botryotinia fuckeliana B05.10]
  misc_feature (16)..(271): NCBI GI: 225559514 Blast Desc: conserved [Ajellomyces capsulatus G186AR]
  misc_feature (16)..(271): NCBI GI: 240272946 Blast Desc: conserved [Ajellomyces capsulatus H143]
MAEEFNPDVLEEQPAGDVEMAEETEQDVEGADNTADLPFAEGGETDPRTTFISYLTSPVVTLIVGAAENETILTAHQALLTQSPFFADACAAFAQDGSPRQIDLQAEEIDAVGCFLEYLYTGDYFPKKLPGQRVLEPDPSVPAVDETGDQLLKHARVYTIAEKFGIDKLKNLASSKIHCVNSTAKGEITYARYIYAYTSKDDTAVRAPVANFWATRSHTLRAEAEDEFRNLCLEYPQFGYDVLTRVLDEKLKREKNEKMHPATGSARKRARHSNV

SEQ ID NO: 18176 - DNA, 2745 bp, Muscodor strobelii
  misc_feature: SGI EST ID NO. CUFF.42917.0
  misc_feature: Variant of the nucleotide sequence at SEQ ID NO 18174
tgcgtgcctaggcagatgcctccctgcagacagatgacttgagatataggtacgtaccagtcgaccagtcaggctaggccaagtcgggagctctagctgccatccatgcgccccagccacccctttctttgccgggccaacgtgtgcgacagctctcgcattggccaatgccacctgccgtcgcatcccaccaaacatcacgcaggctctctcgagtacctaagcgttggtttgccaaagccttgtcccattttcgtctgactgcgaacacgtcgcacacactctctcgccgtctcttgcgcgccatcctctcgttgaccacatctcgtcgcattccagctgtgaagtggcttgagcccatcctagggacctctctttcgcaatcttgcgccgcattcctttggctctgcgcaaccatcgtccgcccgaaacacattttcatttcacccacttaatccagcgccatggccgaggaattcaacccggatgtcttggaggagcagccggcgggcgacgtcgagatggccgaggagacggagcaggacgtcgagggcgccgacaacacggccgacctgcctttcgccgagggcggcgagactgacccgcgcaccaccttcatcagctacctgacgagtcccgtcgtcaccctgatcgtcggcgccgccgagaacgagaccatcctcaccgcccaccaggctctgctgacccagagccccttcttcgccgacgcctgcgccgcttttgcccaagacggaagtccgcggcagatcgacctgcaagctgaggagatcgacgccgtcggctgcttcctcgagtacctctacacgggcgactacttccccaagaagctgccgggccagcgcgtcctcgagcccgacccgtccgtgcccgccgtcgacgagacgggcgaccagctgctcaagcatgcccgcgtctacaccatcgccgagaagttcggcatcgacaagctcaagaacctcgccagcagcaagatccactgcgtcaactccaccgccaagggcgagatcacctacgctcgctacatctacgcctacaccagcaaggacgacaccgccgtccgcgcccccgtcgccaacttctgggccacgcgcagccataccctgcgtgccgaggccgaggacgagttcaggaatctgtgtctggagtacccgcagtttggttacgatgttcttacgcgcgtgctcgacgagaaactcaagcgcgagaagaacgagaagatgcaccccgctactgggagcgcgaggaagcgcgccaggcactcaaatgtatagattattggagatgttggctgttgaggtgtaagaaatcccggtatgttgctttgcgccaagtcgtggctacaagttgtggaccatgggtatggatatggagaggtacgaaatcacttcagcgacatttctgctcgggaaggggcatctttgtaccatcattttcgacacggtggattcggattccgctctacacaaatgacgtgggctgttttccctttgttgtgacggggcgggacgggacatcctagacatcgctgaactgcttggtcttggtcatggttgaccgtggggcactggatgggatgggatgatgtacaatacctaaacaaaaagctggatctctgggacatgcaggttcatatagcgtcgagcttggtttctatgttgctgagataggcgttatttgatctacctaatctaaggtgacatcgaggcatgtatttctttggcgtaaaagggggaccgtgagatgctgatgctgatattcgtgtactattctcttatatggatatatcaaggcccaatctagtgggctacaagctctaatatgacgtttcttgcacatatgtataaccccaaaggtaactgtctcccaaaattgcaacattgtatcacctcatgtgaggtgcccgaagtccccgtaccaatcttacaaactaatacacgttcgctccaagttcttgtacgagtttcgtacctacgataagatcaacctgtccacgaccaaacccaaggcgctgccaattcgtcctcgtcttgctcagcttggagtccctcaaagacatcaggcagatcatcgtcccagtaatccctagggatcgaattagcagatgttcgcactgtccaattccattcccgtctgtagtttgttcgcaaaaaaagcatcgatctcattcctttagtaggaaaacgcagtccacataccaaccatcaggcttctcgaagttcatagaccagatcgccctattgttctggctctcaatcagatcctcaagatccagcgccttgaacttggttctcagttgtcccagcgtgtttcgctgcagcatgtatccgacgcgttcccaatacggagacaagttgccgcacgtgtactcgtacttcagcgacggtgacacgaatagaccagcgcggagggagattccgcctccatccccgttgttagcttgggtcttcgtcccgcagatctggaagctcgaacattcgagcacgctatcgggtttctctggtttccgcacgcctgcggtgtctagggccatggtccatgtgtccgggcccccgatgaaccgatcttcgggtgcgtgatggcctagtggatagctacggaaaggcttttttctgtataggctcttccgcggcatgtggaacattgctcgtgggtcgtggctatttgtgtcgtgacttacgtatacaggcgctgtgcggatgcggtagcctcggcgcgagtatttcc

SEQ ID NO: 18177 - DNA, 1026 bp, Muscodor strobelii
  misc_feature: SGI cDNA ID NO. 566088
  misc_feature: Elevated expression when VOC is produced
  misc_feature: Encodes the peptide sequence at SEQ ID NO 18178
atgagagcagacataagagcctacttatgggacatcaacgaaaagctacagcgatatttcgagaatccccaagcatttcgggcggagcttggccgtgttgacgggttaatatcaggcagctttgcgctgcaatttttcgcctgtacttattggcccgaatcagacttagacctcaatattcgcgatggcgcgggcgtggaagaaatgacggactatctcatcgatcgagaggggtacatcctttcgactgagaaggatatagaggagatccgatacgctgaaatggccagctatggaacattggaagaagtctcaagagttatgaccttctacaagggcaaatccacatctaatagtcgaaaccagcgtaaggtgcagatagtggctaccaaacagcagcccgtgaaagcaatcctgaacggatactatacaacatgtatcatgaatttcatctcgtggaacagaaatactcgcgccgaggctaccgcatccgcacagcgcctgtatacaaaaaagcctttccgtagctatccactaggccatcacgcacccgaagatcggttcatcgggggcccggacacatggaccatggccctagacaccgcaggcgtgcggaaaccagagaaacccgatagcgtgctcgaatgttcgagcttccagatctgcgggacgaagacccaagctaacaacggggatggaggcggaatctccctccgcgctggtctattcgtgtcaccgtcgctgaagtacgagtacacgtgcggcaacttgtctccgtattgggaacgcgtcggatacatgctgcagcgaaacacgctgggacaactgagaaccaagttcaaggcgctggatcttgaggatctgattgagagccagaacaatagggcgatctggtctatgaacttcgagaagcctgatggttgggattactgggacgatgatctgcctgatgtctttgagggactccaagctgagcaagacgaggacgaattggcagcgccttgggtttggtcgtggacaggttga

SEQ ID NO: 18178 - protein, 341 aa, Muscodor strobelii
  misc_feature: SGI Peptide ID NO. 566088
  misc_feature (11)..(320): NCBI GI: 256721412 Blast Desc: NECHADRAFT_88423 [Nectria haematococca mpVI 77-13-4]
  misc_feature (10)..(154): NCBI GI: 242209890 Blast Desc: [Postia placenta Mad-698-R] gi|220730133|gb|EED83995.1| [Postia placenta Mad-698-R]
  misc_feature (4)..(186): NCBI GI: 170085847 Blast Desc: [Laccaria bicolor S238N-H82] gi|164651699|gb|EDR15939.1| [Laccaria bicolor S238N-H82]
  misc_feature (10)..(204): NCBI GI: 169844535 Blast Desc: [Coprinopsis cinerea okayama7#130] gi|116509728|gb|EAU92623.1| [Coprinopsis cinerea okayama7#130]
  misc_feature (10)..(163): NCBI GI: 242216675 Blast Desc: [Postia placenta Mad-698-R] gi|220726688|gb|EED80629.1| [Postia placenta Mad-698-R]
  misc_feature (10)..(331): NCBI GI: 169845439 Blast Desc: [Coprinopsis cinerea okayama7#130] gi|116509504|gb|EAU92399.1| [Coprinopsis cinerea okayama7#130]
  misc_feature (3)..(153): NCBI GI: 169845441 Blast Desc: [Coprinopsis cinerea okayama7#130] gi|116509505|gb|EAU92400.1| [Coprinopsis cinerea okayama7#130]
  misc_feature (15)..(155): NCBI GI: 119194221 Blast Desc: [Coccidioides immitis RS]
  misc_feature (10)..(217): NCBI GI: 242216721 Blast Desc: [Postia placenta Mad-698-R] gi|220726711|gb|EED80652.1| [Postia placenta Mad-698-R]
  misc_feature (10)..(152): NCBI GI: 170115779 Blast Desc: [Laccaria bicolor S238N-H82] gi|164636031|gb|EDR00331.1| [Laccaria bicolor S238N-H82]
  misc_feature: Useful for introducing or modulating the production of volatile compounds
MRADIRAYLWDINEKLQRYFENPQAFRAELGRVDGLISGSFALQFFACTYWPESDLDLNIRDGAGVEEMTDYLIDREGYILSTEKDIEEIRYAEMASYGTLEEVSRVMTFYKGKSTSNSRNQRKVQIVATKQQPVKAILNGYYTTCIMNFISWNRNTRAEATASAQRLYTKKPFRSYPLGHHAPEDRFIGGPDTWTMALDTAGVRKPEKPDSVLECSSFQICGTKTQANNGDGGGISLRAGLFVSPSLKYEYTCGNLSPYWERVGYMLQRNTLGQLRTKFKALDLEDLIESQNNRAIWSMNFEKPDGWDYWDDDLPDVFEGLQAEQDEDELAAPWVWSWTG

SEQ ID NO: 18179 - DNA, 2863 bp, Muscodor strobelii
  misc_feature: SGI EST ID NO. CUFF.42918.1
  misc_feature: Variant of the nucleotide sequence at SEQ ID NO 18177
attgtatcttcccacgagcaactctattatttcatgaaactgtccccttgaccgacccaagcgactcaaacgttgcattacacaggaaatactcgcgccgaggctaccgcatccgcacagcgcctgtatacgtaagtcacgacacaaatagccacgacccacgagcaatgttccacatgccgcggaagagcctatacagaaaaaagcctttccgtagctatccactaggccatcacgcacccgaagatcggttcatcgggggcccggacacatggaccatggccctagacaccgcaggcgtgcggaaaccagagaaacccgatagcgtgctcgaatgttcgagcttccagatctgcgggacgaagacccaagctaacaacggggatggaggcggaatctccctccgcgctggtctattcgtgtcaccgtcgctgaagtacgagtacacgtgcggcaacttgtctccgtattgggaacgcgtcggatacatgctgcagcgaaacacgctgggacaactgagaaccaagttcaaggcgctggatcttgaggatctgattgagagccagaacaatagggcgatctggtctatgaacttcgagaagcctgatggttgggattactgggacgatgatctgcctgatgtctttgagggactccaagctgagcaagacgaggacgaattggcagcgccttgggtttggtcgtggacaggttgatcttatcgtaggtacgaaactcgtacaagaacttggagcgaacgtgtattagtttgtaagattggtacggggacttcgggcacctcacatgaggtgatacaatgttgcaattttgggagacagttacctttggggttatacatatgtgcaagaaacgtcatattagagcttgtagcccactagattgggccttgatatatccatataagagaatagtacacgaatatcagcatcagcatctcacggtcccccttttacgccaaagaaatacatgcctcgatgtcaccttagattaggtagatcaaataacgcctatctcagcaacatagaaaccaagctcgacgctatatgaacctgcatgtcccagagatccagctttttgtttaggtattgtacatcatcccatcccatccagtgccccacggtcaaccatgaccaagaccaagcagttcagcgatgtctaggatgtcccgtcccgccccgtcacaacaaagggaaaacagcccacgtcatttgtgtagagcggaatccgaatccaccgtgtcgaaaatgatggtacaaagatgccccttcccgagcagaaatgtcgctgaagtgatttcgtacctctccatatccatacccatggtccacaacttgtagccacgacttggcgcaaagcaacataccgggatttcttacacctcaacagccaacatctccaataatctatacatttgagtgcctggcgcgcttcctcgcgctcccagtagcggggtgcatcttctcgttcttctcgcgcttgagtttctcgtcgagcacgcgcgctatcacaacaatcagtctcaatcacaccgaagaaattacagggagaaaaatgaagaaactcactaagaacatcgtaaccaaactgcgggtactccagacacagattcctgaactcgtcctcggcctcggcacgcagggtatggctgcgcgtggcccagaagttggcgacgggggcgcggacggcggtgtcgtccttgctggtgtaggcgtagatgtagcgagcgtaggtgatctcgcccttggcggtggagttgacgcagtggatcttgctgctggcgaggttcttgagcttgtcgatgccgaacttctcggcgatggtgtagacgcgggcatgcttgagcagctggtcgcccgtctcgtcgacggcgggcacggacgggtcgggctcgaggacgcgctggcccggcagcttcttggggaagtagtcgcccgtgtagaggtactcgaggaagcagccgacggcgtcgatctcctcagcttgcaggtcgatctgccgcggctgtaggtggggggtcacggtggttagatgcgagcgcaaaggtatgtagaaacgtatttcagtgagtgaagatgggcgcttacacttccgtcttgggcaaaagcggcgcaggcgtcggcgaagaaggggctctgggtcagcagagcctggtgggcggtgaggatggtctcgttctcggcggcgccgacgatcagggtgacgacgggactcgtcaggtagctgatgaaggtggtgcgcgggtcagtctcgccgccctcggcgaaaggcaggtcggccgtgttgtcggcgccctcgacgtcctgctccgtctcctcggccatctcgacgtcgcccgccggctgctcctccaagacatccgggttgaattcctcggccatggcgctggattaagtgggtgaaatgaaaatgtgtttcgggcggacgatggttgcgcagagccaaaggaatgcggcgcaagattgcgaaagagaggtccctaggatgggctcaagccacttcacagctggaatgcgacgagatgtggtcaacgagaggatggcgcgcaagagacggcgagagagtgtgtgcgacgtgttcgcagtcagacgaaaatgggacaaggctttggcaaaccaacgcttaggtactcgagagagcctgcgtgatgtttggtgggatgcgacggcaggtggcattggccaatgcgagagctgtcgcacacgttggcccggcaaagaaaggggtggctggggcgcatggatggcagctagagctcccgacttggcctagcctgactggtcgactggtacgtacctatatctcaagtcatctgtctgcagggaggcatctgcctaggcacgca

SEQ ID NO: 18180 - DNA, 798 bp, Muscodor strobelii
  misc_feature: SGI cDNA ID NO. 566089
  misc_feature: Elevated expression when VOC is produced
  misc_feature: Encodes the peptide sequence at SEQ ID NO 18181
atggagtccgtcaggaagggaaagattctcattcaaacacctaggtggttcattggccttcgtgtcgcacagatcgtcatatcgttgattgtcgtcgctctggctgggttcttcatccatggttattatgcggattgcttgggtttcgctatcgtatctgggttgttcacatggataatagctgtctatgctatactgtctgagcacaatgcttcgtgccgtgctgcatataacacttgggcaatcctgtctctggacttcgtgatgatcatcttctggttggccagcctaggcgctaatgctgctttccgtgctgcttttacaacctcagtcacagcttcgtgctcagacgacggcagtgctatcaatgccggtcactgtacagtctacagcaagcgttatgccgttgccaaccaagtcggactcggcgcactctccggtgttgccggcgtatctgctattatgctcctgctcttcattgctacgttcgcatatgttgcacacttcttccgcctcgagtggcaaaagcacagctcagacaacgataccgagaaggctaccggcgttgctgctaatgctcccgctgctactatgtctcccgagcagtcacagcaagcacaaccattcctcaaccaacaaccaactggatatgcccctcagcatgagcagaccactgcctacgacccttatactggctacactggaggtcagggagtctacggccataacgtacctcaacagccctacagtcatcatggcacaccggctcctggacaaccatactaccccactcagtaa

SEQ ID NO: 18181 - protein, 265 aa, Muscodor strobelii
  misc_feature: SGI Peptide ID NO. 566089
  misc_feature (5)..(265): NCBI GI: 116203007 Blast Desc: CHGG_09388 [Chaetomium globosum CBS 148.51] gi|88177906|gb|EAQ85374.1| CHGG_09388 [Chaetomium globosum CBS 148.51]
  misc_feature (12)..(219): NCBI GI: 85086204 Blast Desc: NCU04034 [Neurospora crassa OR74A] gi|28918743|gb|EAA28413.1| NCU04034 [Neurospora crassa OR74A] gi|39979223|emb|CAE85593.1| [Neurospora crassa]
  misc_feature (12)..(208): NCBI GI: 171682754 Blast Desc: protein product [Podospora anserina] gi|170941336|emb|CAP66986.1| protein product [Podospora anserina]
  misc_feature (6)..(170): NCBI GI: 256734907 Blast Desc: NECHADRAFT_75635 [Nectria haematococca mpVI 77-13-4]
  misc_feature (6)..(226): NCBI GI: 46120552 Blast Desc: FG04923.1 [Gibberella zeae PH-1]
  misc_feature (14)..(102): NCBI GI: 171687781 Blast Desc: protein product [Podospora anserina] gi|170943852|emb|CAP69504.1| protein product [Podospora anserina]
  misc_feature (12)..(96): NCBI GI: 156051270 Blast Desc: SS1G_07042 [Sclerotinia sclerotiorum 1980] gi|154704820|gb|EDO04559.1| SS1G_07042 [Sclerotinia sclerotiorum 1980]
  misc_feature (17)..(96): NCBI GI: 154316077 Blast Desc: BC1G_03623 [Botryotinia fuckeliana B05.10] gi|150846410|gb|EDN21603.1| BC1G_03623 [Botryotinia fuckeliana B05.10]
  misc_feature: Useful for introducing or modulating the production of volatile compounds
MESVRKGKILIQTPRWFIGLRVAQIVISLIVVALAGFFIHGYYADCLGFAIVSGLFTWIIAVYAILSEHNASCRAAYNTWAILSLDFVMIIFWLASLGANAAFRAAFTTSVTASCSDDGSAINAGHCTVYSKRYAVANQVGLGALSGVAGVSAIMLLLFIATFAYVAHFFRLEWQKHSSDNDTEKATGVAANAPAATMSPEQSQQAQPFLNQQPTGYAPQHEQTTAYDPYTGYTGGQGVYGHNVPQQPYSHHGTPAPGQPYYPTQ

SEQ ID NO: 18182 - DNA, 1815 bp, Muscodor strobelii
  misc_feature: SGI EST ID NO. CUFF.42829.0
  misc_feature: Variant of the nucleotide sequence at SEQ ID NO 18180
gggactttatcacaagttacaccagattcgaatcgcaagtcaagtttctcagatagcaatctcgtccaattagtcagctaagttctacataagatttgctaactcctcgaattgtctcgcaattaggaggtatgtacggtccttctcaatctttctcaatcacaacaacgtgactaagacgacgttggcgccctcaatgccttgccacacagcaagcaaaactctcgggtcaacatcgtcgcggattactttgtcgtacaggctagaccctgccgaggaagaacaagccagtctgaaagtgcgtgcatgcatctcaagcgcgagcccgagttgcaaactacaaatctgcctgccaagcagtttgacaggcacaatattgggtcttcgtttcgtgcgagaccctgagtggttagaaaagctgaaaatggttggcagaaatggggttgggctggactcctggagcaacagcgctccactggtggtgcggctgagcacttagctggcaattagctgaacgaagactatgcgagtttccgacaagtcacaccaaacttgccccagctccagacagtcgcagtctttgtcggcagtctggacgtggatacatgtctggcgcttgatttcggagagcgagctggaagaacagctgcaagtgatggcggttcaatctccacacaactagacaggcgagacctggctcgacttggcggctgaattttgagagagggtcaagggttgaaatagaaatctacaaaatggttctcttttcgcagtttatgttgctaaggcgtcactcacttctcgtctagacaagagtcaagaaccaaattccagatacagcttcggagtccatcatcgggctaactatttaccatggagtccgtcaggaagggaaagattctcattcaaacacctaggtggttcattggccttcgtgtcgcacagatcgtcatatcgttgattgtcgtcgctctggctgggttcttcatccatggttattatgcggattgcttgggtttcgctatcgtatctgggttgttcacatggataatagctgtctatgctatactgtctgagcacaatgcttcgtgccgtgctgcatataacacttgggcaatcctgtctctggacttcgtgatgatcatcttctggttggccagcctaggcgctaatgctgctttccgtgctgcttttacaacctcagtcacagcttcgtgctcagacgacggcagtgctatcaatgccggtcactgtacagtctacagcaagcgttatgccgttgccaaccaagtcggactcggcgcactctccggtgttgccggcgtatctgctattatgctcctgctcttcattgctacgttcgcatatgttgcacacttcttccgcctcgagtggcaaaagcacagctcagacaacgataccgagaaggctaccggcgttgctgctaatgctcccgctgctactatgtctcccgagcagtcacagcaagcacaaccattcctcaaccaacaaccaactggatatgcccctcagcatgagcagaccactgcctacgacccttatactggctacactggaggtcagggagtctacggccataacgtacctcaacagccctacagtcatcatggcacaccggctcctggacaaccatactaccccactcagtaaaggttcgtggccctgaaccatgtgtatcgcgggtgttttgagctttatctagagtgcatgatgggttggagtaggtcagactggcgaggcgttcggcataccaattgcataagatttaagataatataatataattttccaaga

SEQ ID NO: 18183 - DNA, 1359 bp, Muscodor strobelii
  misc_feature: SGI cDNA ID NO. 566090
  misc_feature: Encodes the peptide sequence at SEQ ID NO 18184
atggctgacgacgcaggtgctcaagccgatgtggtcccagaacttggcgacaatgttgacccccttcccgacaacctacgggcatatattgaccgttggatatggtggcatagactgatgtttccctggtccgacatagcgatcatcagagatgattatcagcccgagttggtcgacctttctgtgaaagggtcacccttcctcgacctcgcgggaaccgggttatgtggactcttcctcagcctgattctcatgctccattttgagtttcatagcgggtggctcacgaagcaagggtatcatatttatatcctacaagtgttcagcaaggctttaatctccttactgatcgctgtccaaagcaccatacgtttcgagatcataggaacgaccatggaatatcaaggtatacgcttgatcaggaaaacaaggaactgcatccacgtctttttctttcgccgcttcggctggcgtcaggttttgcccaacgggcaaccattgtggcgggatgcgaacggggtgctcgagatcgacgatactcccacgggcctctctaaggatttgttacgattcatcgctggtgcagccataacattcgtagcgtatttgatcgcctgcactgtgaactttctcgaggcgtgtggtatagcttccgtgcaacacattctgcttctactcagccctcactggatcctccaggctgtcgattctccgcgttacatggacaacaaatggctccctagtacgctcatctataactgcattgtgccattaccattcgaagacgtgataccttactgtctccagttcatgcagtcggtctttctttggctattagggattctattcatggccaaggctgatagaatcctattacgcggttaccgtgtccgagatcctaaatacgagctattctggtccctggcccaggccacgaacatccatctgatttggcttacgagctaccaaattgcttacggcatcatatccaatgctgaaaatcaacttgttgtcccaagcttatggagcgttattctccattggccaggctcttggaggctgtttttccctgaagggagcttgatcgctggcttgttgatatttggcctaaattggcttctatgggatctctctctgcaatgtgcgcggcttcttttacccctgtggctgaacgtcattaaatggcaaactccgttctcccagttgggcattgatcggtgggcaattctctggtacgaatacctcagagaacaaagttttcttcctccggtggggttgcgtcccaacaccgtagccttcctttggccgttcctctttggtctgaaaagctcatggccaagcggagtggtagattactag

SEQ ID NO: 18184 - protein, 452 aa, Muscodor strobelii
  misc_feature: SGI Peptide ID NO. 566090
MADDAGAQADVVPELGDNVDPLPDNLRAYIDRWIWWHRLMFPWSDIAIIRDDYQPELVDLSVKGSPFLDLAGTGLCGLFLSLILMLHFEFHSGWLTKQGYHIYILQVFSKALISLLIAVQSTIRFEIIGTTMEYQGIRLIRKTRNCIHVFFFRRFGWRQVLPNGQPLWRDANGVLEIDDTPTGLSKDLLRFIAGAAITFVAYLIACTVNFLEACGIASVQHILLLLSPHWILQAVDSPRYMDNKWLPSTLIYNCIVPLPFEDVIPYCLQFMQSVFLWLLGILFMAKADRILLRGYRVRDPKYELFWSLAQATNIHLIWLTSYQIAYGIISNAENQLVVPSLWSVILHWPGSWRLFFPEGSLIAGLLIFGLNWLLWDLSLQCARLLLPLWLNVIKWQTPFSQLGIDRWAILWYEYLREQSFLPPVGLRPNTVAFLWPFLFGLKSSWPSGVVDY

SEQ ID NO: 18185 - DNA, 1611 bp, Muscodor strobelii
  misc_feature: SGI cDNA ID NO. 566091
  misc_feature: Reduced expression when VOC is produced
  misc_feature: Encodes the peptide sequence at SEQ ID NO 18186
atgatcgcgtctaacggcgccaacggcgcctctatctctgcgcttcctcacctgccgcctcgtgccgccaccgcgctctcggccaccgacctcatcggcaacacgcccctcgtcagactcaacaagatcccgcagtcgctaggcatacaatgcgaggtctacgccaaggtcgagctgttcagcgcgggcggcagcgtcaaagaccgcatcgctctgcgcatgattgaggccgcggagcgcagcggccgcatcaagcccggcgacaccctgatcgagcccaccagcggcaacacgggcatcggcctggcgctcgtcggcgccgtcaagggctacaagaccatcatcaccctgcccgagaagatgtcggccgagaaggtctccgtgctcaaggccctcggcgccaccatcatccgcactcccacccaggccgcctgggacagccccgagagccacatcggagtcgcgcgccgtctggtcaaggagattcccaatgcccacattctcgaccagtactccaacgagaacaaccctctggcccatgagttcggcaccgccgaggaaatctgggagcagaccaatggccgcatcacctgcatcgttgccggcgccggtaccggcggcactatcaccggccttgccaacggtctgcgcaagcacaacaaggacgtcaagatcgtagccgcagacccccaaggcagtattcttgctcttcccgagtctctgaacgaggaacatcgcgacgagccgtacaaggtggaaggcattggctacgatttcattcccgaagtcctcgatcagctaaaggtcgacaagtggtataaaacagatgacaatgaatctttccagctggctcggaggttaatcgcagaagagggcctactcgtgggtggcagctcgggcagtgctatggccgccatggtcaaagctacgaaggatctgaagcttggaaaggacgatgtcgtggtcgtcatgctgccagatagcatccgtagctacctgtcgaaattcgccgacgacgattggcttgccgccaatgatctccttttgcccgctgacgccgctgcgaaggccgctgtcgccgaaaacggcaacggcaacggcaagatcgccacccacgagaagcccgacgacccgtatgtcggagccacgacccgctcgctccggctcaagcccgtaacgtctgttttgtcgacgagctcatgcggcgaagctatcgagacgatgcgagatcgcggtttcgatcagctgcccgttctggctggacccggcgggaaactggtgggtcttgtgaccctaggaaacttgctcagcttcatctcgcggggcagagccactgcgcaaagcgaagtcggggacgtcatgatcaactttggaaaagtggacgaagtggtgacagatatccgcgagggcaagggcgccaagaggccgcgcgagtacgtcgagatcacgctcgacacgcctctcagcgagctgagccgcttcttcgagtggaacagcgccgctgtcgtgacggaaccctcggggagcaaggagcaggcgctcaccaagccggtcgctgttgtcaccaaagtcgacttgttgacatggatggtcaagcaggccaaagtctaa

SEQ ID NO: 18186 - protein, 536 aa, Muscodor strobelii
  misc_feature: SGI Peptide ID NO. 566091
  misc_feature (386)..(531): Pfam Id: PF00571 Pfam Desc: CBS domain pair
  misc_feature (28)..(327): Pfam Id: PF00291 Pfam Desc: Pyridoxal-phosphate dependent enzyme
  misc_feature (386)..(505): Pfam Id: PF00571 Pfam Desc: CBS domain pair
  misc_feature (27)..(534): NCBI GI: 242775969 Blast Desc: cystathionine beta-synthase, [Talaromyces stipitatus ATCC 10500] gi|218722365|gb|EED21783.1| cystathionine beta-synthase, [Talaromyces stipitatus ATCC 10500]
  misc_feature (11)..(536): NCBI GI: 169619084 Blast Desc: SNOG_12735 [Phaeosphaeria nodorum SN15] gi|111058913|gb|EAT80033.1| SNOG_12735 [Phaeosphaeria nodorum SN15]
  misc_feature (27)..(536): NCBI GI: 261187559 Blast Desc: cystathionine beta-synthase [Ajellomyces dermatitidis SLH14081] gi|239594150|gb|EEQ76731.1| cystathionine beta-synthase [Ajellomyces dermatitidis SLH14081]
  misc_feature (19)..(536): NCBI GI: 238837710 Blast Desc: cystathionine beta-synthase [Microsporum canis CBS 113480]
  misc_feature (11)..(505): NCBI GI: 189210283 Blast Desc: cystathionine beta-synthase [Pyrenophora tritici-repentis Pt-1C-BFP] gi|187977566|gb|EDU44192.1| cystathionine beta-synthase [Pyrenophora tritici-repentis
  misc_feature (16)..(535): NCBI GI: 226293802 Blast Desc: cystathionine beta-synthase [Paracoccidioides brasiliensis Pb18]
  misc_feature (16)..(531): NCBI GI: 145235884 Blast Desc: protein product [Aspergillus niger] gi|134075037|emb|CAK44836.1| protein product [Aspergillus niger]
  misc_feature (16)..(533): NCBI GI: 226284571 Blast Desc: cystathionine beta-synthase [Paracoccidioides brasiliensis Pb01]
  misc_feature (27)..(523): NCBI GI: 239606475 Blast Desc: cystathionine beta-synthase [Ajellomyces dermatitidis ER-3]
  misc_feature (16)..(528): NCBI GI: 154274321 Blast Desc: cystathionine beta-synthase [Ajellomyces capsulatus NAm1] gi|150415620|gb|EDN10973.1| cystathionine beta-synthase [Ajellomyces capsulatus NAm1]
  misc_feature (21)..(530): SWISSPROT Homolog: EC 4.2.1.22 Cystathionine beta-synthase
  misc_feature: Useful for introducing or modulating the production of volatile compounds
MIASNGANGASISALPHLPPRAATALSATDLIGNTPLVRLNKIPQSLGIQCEVYAKVELFSAGGSVKDRIALRMIEAAERSGRIKPGDTLIEPTSGNTGIGLALVGAVKGYKTIITLPEKMSAEKVSVLKALGATIIRTPTQAAWDSPESHIGVARRLVKEIPNAHILDQYSNENNPLAHEFGTAEEIWEQTNGRITCIVAGAGTGGTITGLANGLRKHNKDVKIVAADPQGSILALPESLNEEHRDEPYKVEGIGYDFIPEVLDQLKVDKWYKTDDNESFQLARRLIAEEGLLVGGSSGSAMAAMVKATKDLKLGKDDVVVVMLPDSIRSYLSKFADDDWLAANDLLLPADAAAKAAVAENGNGNGKIATHEKPDDPYVGATTRSLRLKPVTSVLSTSSCGEAIETMRDRGFDQLPVLAGPGGKLVGLVTLGNLLSFISRGRATAQSEVGDVMINFGKVDEVVTDIREGKGAKRPREYVEITLDTPLSELSRFFEWNSAAVVTEPSGSKEQALTKPVAVVTKVDLLTWMVKQAKV

SEQ ID NO: 18187 - DNA, 903 bp, Muscodor strobelii
  misc_feature: SGI cDNA ID NO. 566092
  misc_feature: Reduced expression when VOC is produced
  misc_feature: Encodes the peptide sequence at SEQ ID NO 18188
atgtcgctgcaggacgtcaaggatgtggtcgagtacctcatgacgccatctgtcccggtggtcgtcgtaggactcctcatcgtcttcatcgcccccatcctcgtccacctcttcatctcgcgctccaccccgtacacctcgctcccctccatcctcctcgcggggccacccggcgccggcaagacctctctcctcacgcttctcgagcgcggcgacaccgcggccagcacccacacctcccagcggccccacgccatcgagctcaccgtctccgaccacccaggcgcctccaccttccgcgaagccgcccgcgacgacgcccccggctcccacaagaagttcctcctcatcgacacccctggccacggcaagctgcgcggccatgccttcgcccagctcggcggcgacggtaaaagcagcaagaaatcccagactcccttcggcgactccgccatgttgcgcggagtagtctacgtcctcgatgccgccaccatggacgactcgctcgccgacgctgccacctacctctacgatatcttgctctctctccagaagcgtgcaggcgcaggacgtacctcccgcgcgcctaacgccgtgcacgtcctcatcgctgccaataagctcgacctcttcacggctctaccagcatctctcgtgcgcagcagcctcgaggcggagctcggcaggatacggcagtcccgtagcaagggtctgctggactcgggcgtgggaaccgatgatatcgggtcggaggaacaggacaactggcttggcgagtatggctcagagaaattctctttcagccagatgagagaatttgagatggaggtcgatgtcatcggtggaagtgtgctcgagcagaatatagataaatggtgggactggattgctcagcgcatctag

SEQ ID NO: 18188 - protein, 300 aa, Muscodor strobelii
  misc_feature: SGI Peptide ID NO. 566092
  misc_feature (46)..(277): Pfam Id: PF09439 Pfam Desc: Signal recognition particle receptor beta subunit
  misc_feature (112)..(238): Pfam Id: PF09439 Pfam Desc: Signal recognition particle receptor beta subunit
  misc_feature (46)..(85): Pfam Id: PF09439 Pfam Desc: Signal recognition particle receptor beta subunit
  misc_feature (1)..(300): NCBI GI: 171685500 Blast Desc: protein product [Podospora anserina] gi|170942711|emb|CAP68364.1| protein product [Podospora anserina]
  misc_feature (1)..(300): NCBI GI: 46124331 Blast Desc: FG06543.1 [Gibberella zeae PH-1]
  misc_feature (8)..(300): NCBI GI: 256726544 Blast Desc: NECHADRAFT_39533 [Nectria haematococca mpVI 77-13-4]
  misc_feature (11)..(300): NCBI GI: 39972163 Blast Desc: MGG_07383 [Magnaporthe grisea 70-15] gi|145016558|gb|EDK00988.1| MGG_07383 [Magnaporthe grisea 70-15]
  misc_feature (2)..(300): NCBI GI: 116208284 Blast Desc: CHGG_03435 [Chaetomium globosum CBS 148.51] gi|88184032|gb|EAQ91500.1| CHGG_03435 [Chaetomium globosum CBS 148.51]
  misc_feature (9)..(300): NCBI GI: 261354213 Blast Desc: conserved [Verticillium albo-atrum VaMs.102]
  misc_feature (7)..(296): NCBI GI: 156048408 Blast Desc: SS1G_08935 [Sclerotinia sclerotiorum 1980] gi|154693332|gb|EDN93070.1| SS1G_08935 [Sclerotinia sclerotiorum 1980]
  misc_feature (6)..(295): NCBI GI: 164425855 Blast Desc: NCU08217 [Neurospora crassa OR74A] gi|157071093|gb|EAA30071.2| [Neurospora crassa OR74A]
  misc_feature (1)..(272): NCBI GI: 169619092 Blast Desc: SNOG_12739 [Phaeosphaeria nodorum SN15] gi|160703745|gb|EAT80037.2| SNOG_12739 [Phaeosphaeria nodorum SN15]
  misc_feature (1)..(300): NCBI GI: 189210279 Blast Desc: conserved [Pyrenophora tritici-repentis Pt-1C-BFP] gi|187977564|gb|EDU44190.1| conserved [Pyrenophora tritici-repentis Pt-1C-BFP]
  misc_feature: Useful for introducing or modulating the production of volatile compounds
MSLQDVKDVVEYLMTPSVPVVVVGLLIVFIAPILVHLFISRSTPYTSLPSILLAGPPGAGKTSLLTLLERGDTAASTHTSQRPHAIELTVSDHPGASTFREAARDDAPGSHKKFLLIDTPGHGKLRGHAFAQLGGDGKSSKKSQTPFGDSAMLRGVVYVLDAATMDDSLADAATYLYDILLSLQKRAGAGRTSRAPNAVHVLIAANKLDLFTALPASLVRSSLEAELGRIRQSRSKGLLDSGVGTDDIGSEEQDNWLGEYGSEKFSFSQMREFEMEVDVIGGSVLEQNIDKWWDWIAQRI

SEQ ID NO: 18189 - DNA, 2160 bp, Muscodor strobelii
  misc_feature: SGI cDNA ID NO. 566093
  misc_feature: Encodes the peptide sequence at SEQ ID NO 18190
atgtcacaaaccgtttcggccaacggcgcgcctgcccagcctgcagcgaagggcagcgccgccacgcccaagctgaactcccaagatctggagatgggcgatctacaggccagcaatgcgccgtctcctgatcccgacatcatgcaaatcgcccgcctcggcgacatcccagccatggagaaactattcgagtcgccagacttcgatgccacctacaccgaccatgaaggaattacacccttacattgggccgccatcaacaaccagtatgccatgtgcaagttcctcatcgacaagggcgccgacatcaacaagaaaggaggcgactccgtagccactccgctccaatgggccgcccagcgctccaactactacaccgtaaatctcttgcttcagcatggcgccgacccccttatcaccgacgctcagggctacaacaccttacatatctccacattcaacggcaacgttctgctagtagtcttgctgctgcaccaaggcatcccagttgatgttgcggacgcgtatggccataccagcctcatgtgggctgcctataaaggatttccgcaatgcgtcgatctatatctccgatggggcgcaagtgtccatgcgacggacgagcaggggttcacagcgctgcactgggccttggtgaagggctcgccacagtgtatcctcaagctcatagagtatggtaccgaccgatttgccaagacacagactggaaagactcctgcgataacagctaaggacttgaatacggttggtgcttggcatcgtgcgttgcgcgagtgtggctacgacaaggacggacatgcggccgtcccctggtggccaggtgcctcgttcttcctcaaggacaagagaggcttcatgaacaaagtcttgtttctcctgccgacagcgatgctctggattgagtttacggtggtgtcacggttgcccatctttctctctgccttcgtcgccctttttgtcgcctttggctttcagtgggttgcaaatcagattctcgagtacgcgccctcggatttgagacatctccataaaacgccttggctggccggcatctttgccggatccttgttcctaattggtgtccaatggcttttggcactagcaccaggaacatattcctctcatccgctcgtgaacctgatgttcctaatttccttcggcttcactacatatttttacacggcttcaatgatttatgatcctggcttcgtgcctaaaatgaacggaattgccgagcagaaggctgtgattgacgacttactcagccagtggaaatttgatgaatcgaatttctgcgttacttgtatgatacgtacacctctacgaagtaagcactgtaggaggtgccagcgctgtgttgccaaacatgaccatcattgcccctgggtcaataattgcgtaggcatcaacaatcatcgccatttcttcatctatctgctaagcttggtcctgggcatattaacctttgactggctcatgtactactacttcaccgagtcgtccaagtcggtttccacggagtgtctggtgttgtccgaatcattttgcaaaatcgtcaacaccgacgcatttacggtgctcatcgggctctgggggacattgcagcttacgtgggttagtatgctcatcttcgtgcagtttatccaagtggcccgagctatgacgacgtatgaaaacatgtatgggattcaagatggcagtgcctcgagtataatgtctgcattcagtagtactggagcaccattagacccgaaccaccccagctctggggctccgccttccgctgctcacgatccactcggcgcgaagaaacacggacacaaccaccgaggctttttgcaacaatggagtagaattctcggtgtcgacaccttcatcgagaccgccactggtcgtggtgcagcaggacagaagaaccagaaaaagaagaacccatacagtaaaggttatgtgcaaaactgtagggatttctggtgcgaccctgcgcccgtattcgggcggagagagaacggcgacgcgatgtttggaggtgatcgcatcaattatacagatgtgtacgaaagcccggccgcgatgggtctgggattgacgggcagaagaagaggagaatacgaggctgtggccagcgaggaggtctga

SEQ ID NO: 18190 - protein, 719 aa, Muscodor strobelii
  misc_feature: SGI Peptide ID NO. 566093
  misc_feature (76)..(108): Pfam Id: PF00023 Pfam Desc: Ankyrin repeat
  misc_feature (209)..(241): Pfam Id: PF00023 Pfam Desc: Ankyrin repeat
  misc_feature (176)..(208): Pfam Id: PF00023 Pfam Desc: Ankyrin repeat
  misc_feature (110)..(142): Pfam Id: PF00023 Pfam Desc: Ankyrin repeat
  misc_feature (428)..(492): Pfam Id: PF01529 Pfam Desc: DHHC zinc finger domain
  misc_feature (113)..(142): Pfam Id: PF00023 Pfam Desc: Ankyrin repeat
  misc_feature (15)..(719): NCBI GI: 46124329 Blast Desc: FG06542.1 [Gibberella zeae PH-1] gi|82592611|sp|Q4I8B6.1|AKR1_GIBZE RecName: Full=Palmitoyltransferase AKR1; AltName: Full=Ankyrin protein
  misc_feature (12)..(719): NCBI GI: 39972161 Blast Desc: MGG_07382 [Magnaporthe grisea 70-15] gi|145016557|gb|EDK00987.1| MGG_07382 [Magnaporthe grisea 70-15]
  misc_feature (11)..(719): NCBI GI: 82592612 Blast Desc: MGG_07382 [Magnaporthe grisea 70-15] gi|145016557|gb|EDK00987.1| MGG_07382 [Magnaporthe grisea 70-15]
  misc_feature (6)..(719): NCBI GI: 116208286 Blast Desc: CHGG_03436 [Chaetomium globosum CBS 148.51] gi|88184033|gb|EAQ91501.1| CHGG_03436 [Chaetomium globosum CBS 148.51]
  misc_feature (11)..(719): NCBI GI: 164425857 Blast Desc: palmitoyltransferase AKR1 [Neurospora crassa OR74A] gi|157071094|gb|EAA30072.2| palmitoyltransferase AKR1 [Neurospora crassa OR74A]
  misc_feature (6)..(718): NCBI GI: 154300654 Blast Desc: BC1G_10915 [Botryotinia fuckeliana B05.10] gi|150856522|gb|EDN31714.1| BC1G_10915 [Botryotinia fuckeliana B05.10]
  misc_feature (104)..(719): NCBI GI: 261354214 Blast Desc: palmitoyltransferase AKR1 [Verticillium albo-atrum VaMs.102]
  misc_feature (2)..(719): NCBI GI: 171685498 Blast Desc: protein product [Podospora anserina] gi|170942710|emb|CAP68363.1| protein product [Podospora anserina]
  misc_feature (14)..(719): NCBI GI: 121698089 Blast Desc: palmitoyltransferase (SidR), [Aspergillus clavatus NRRL 1] gi|119395851|gb|EAW06283.1| palmitoyltransferase (SidR), [Aspergillus clavatus NRRL 1]
  misc_feature (14)..(718): NCBI GI: 82592609 Blast Desc: palmitoyltransferase (SidR), [Aspergillus clavatus NRRL 1] gi|119395851|gb|EAW06283.1| palmitoyltransferase (SidR), [Aspergillus clavatus NRRL 1]
MSQTVSANGAPAQPAAKGSAATPKLNSQDLEMGDLQASNAPSPDPDIMQIARLGDIPAMEKLFESPDFDATYTDHEGITPLHWAAINNQYAMCKFLIDKGADINKKGGDSVATPLQWAAQRSNYYTVNLLLQHGADPLITDAQGYNTLHISTFNGNVLLVVLLLHQGIPVDVADAYGHTSLMWAAYKGFPQCVDLYLRWGASVHATDEQGFTALHWALVKGSPQCILKLIEYGTDRFAKTQTGKTPAITAKDLNTVGAWHRALRECGYDKDGHAAVPWWPGASFFLKDKRGFMNKVLFLLPTAMLWIEFTVVSRLPIFLSAFVALFVAFGFQWVANQILEYAPSDLRHLHKTPWLAGIFAGSLFLIGVQWLLALAPGTYSSHPLVNLMFLISFGFTTYFYTASMIYDPGFVPKMNGIAEQKAVIDDLLSQWKFDESNFCVTCMIRTPLRSKHCRRCQRCVAKHDHHCPWVNNCVGINNHRHFFIYLLSLVLGILTFDWLMYYYFTESSKSVSTECLVLSESFCKIVNTDAFTVLIGLWGTLQLTWVSMLIFVQFIQVARAMTTYENMYGIQDGSASSIMSAFSSTGAPLDPNHPSSGAPPSAAHDPLGAKKHGHNHRGFLQQWSRILGVDTFIETATGRGAAGQKNQKKKNPYSKGYVQNCRDFWCDPAPVFGRRENGDAMFGGDRINYTDVYESPAAMGLGLTGRRRGEYEAVASEEV

SEQ ID NO: 18191 - DNA, 2820 bp, Muscodor strobelii
  misc_feature: SGI EST ID NO. CUFF.43062.1
  misc_feature: Variant of the nucleotide sequence at SEQ ID NO 18189
ctggaggatacctggatgagatgacggccgagcctcccagctctacagcttttattacgaatactacttcgttgagcccttcaattctgtgtttgtccaagggattgactcttctgttggcatttggtagcaagctcgcgccgccttgatctccccgtcgtgtgctattggtcttttctctgttctttccgtcgccatccctggcccggcctcttttagttacgccctgtattgttctagtattgttcacggcttctacgcacacacccgagactgtgtgctgcatctacgatcacgactcacgataacctatcacgccgtgtgcagcctgctgtcagaaccagtaatagtagcatgtcaccatccaattcgtactcccaccgctcccgataatacgccctgtaattcctccgcgtgaacgccgactgtgcaacctgttctagctgtccacctgcatagagcttcaccactcgctgtctgcgctcatgtcacaaaccgtttcggccaacggcgcgcctgcccagcctgcagcgaagggcagcgccgccacgcccaagctgaactcccaagatctggagatgggcgatctacaggccagcaatgcgccgtctcctgatcccgacatcatgcaaatcgcccgcctcggcgacatcccagccatggagaaactattcgagtcgccagacttcgatgccacctacaccgaccatgaaggaattacacccttacattgggccgccatcaacaaccagtatgccatgtgcaagttcctcatcgacaagggcgccgacatcaacaagaaaggaggcgactccgtagccactccgctccaatgggccgcccagcgctccaactactacaccgtaaatctcttgcttcagcatggcgccgacccccttatcaccgacgctcagggctacaacaccttacatatctccacattcaacggcaacgttctgctagtagtcttgctgctgcaccaaggcatcccagttgatgttgcggacgcgtatggccataccagcctcatgtgggctgcctataaaggatttccgcaatgcgtcgatctatatctccgatggggcgcaagtgtccatgcgacggacgagcaggggttcacagcgctgcactgggccttggtgaagggctcgccacagtgtatcctcaagctcatagagtatggtaccgaccgatttgccaagacacagactggaaagactcctgcgataacagctaaggacttgaatacggttggtgcttggcatcgtgcgttgcgcgagtgtggctacgacaaggacggacatgcggccgtcccctggtggccaggtgcctcgttcttcctcaaggacaagagaggcttcatgaacaaagtcttgtttctcctgccgacagcgatgctctggattgagtttacggtggtgtcacggttgcccatctttctctctgccttcgtcgccctttttgtcgcctttggctttcagtgggttgcaaatcagattctcgagtacgcgccctcggatttgagacatctccataaaacgccttggctggccggcatctttgccggatccttgttcctaattggtgtccaatggcttttggcactagcaccaggaacatattcctctcatccgctcgtgaacctgatgttcctaatttccttcggcttcactacatatttttacacggcttcaatgatttatgatcctggcttcgtgcctaaaatgaacggaattgccgagcagaaggctgtgattgacgacttactcagccagtggaaatttgatgaatcgaatttctgcgttacttgtatgatacgtacacctctacgaagtaagcactgtaggaggtgccagcgctgtgttgccaaacatgaccatcattgcccctgggtcaataattgcgtaggcatcaacaatcatcgccatttcttcatctatctgctaagcttggtcctgggcatattaacctttgactggctcatgtactactacttcaccgagtcgtccaagtcggtttccacggagtgtctggtgttgtccgaatcattttgcaaaatcgtcaacaccgacgcatttacggtgctcatcgggctctgggggacattgcagcttacgtgggttagtatgctcatcttcgtgcagtttatccaagtggcccgagctatgacgacgtatgaaaacatgtatgggattcaagatggcagtgcctcgagtataatgtctgcattcagtagtactggagcaccattagacccgaaccaccccagctctggggctccgccttccgctgctcacgatccactcggcgcgaagaaacacggacacaaccaccgaggctttttgcaacaatggagtagaattctcggtgtcgacaccttcatcgagaccgccactggtcgtggtgcagcaggacagaagaaccagaaaaagaagaacccatacagtaaaggttatgtgcaaaactgtagggatttctggtgcgaccctgcgcccgtattcgggcggagagagaacggcgacgcgatgtttggaggtgatcgcatcaattatacagatgtgtacgaaagcccggccgcgatgggtctgggattgacgggcagaagaagaggagaatacgaggctgtggccagcgaggaggtctgaaccgccccaattgtagcaaatgcccgctctcacggtggcgatgtatattttgctcaggcatcgagcaacttttgatgaaatccaaagtcgcgctgttgacatcactacacttaacggtagcaatacaaaacataattagaaatatcacccggtcttatccaccatctttgcagag

SEQ ID NO: 18192 - DNA, 1125 bp, Muscodor strobelii
  misc_feature: SGI cDNA ID NO. 566094
  misc_feature: Encodes the peptide sequence at SEQ ID NO 18193
atgaagacatccattctcgtccttggcgctctcgcgttacacaacgcggtagcaagtcctctgcactcgtctcgagcagcggcaacaacatggatgggcacgaacctatattacctgcaaggtctaagtgaatcggaccaagacagctatatcaacaccctagcaagttacggcgtgaaagtagtccgcgtctgggccaatgctcagccaggtaacggcgagtgtgtgaaaggaagcaagagtgcaacttatgtgcctgcttttgagacaagtatcggaaaatacaactatgagactcttgatgctctcgaccttgtcatcaataagttggctaacaaaggcatgaaggtcgtcatctctcctcacgacggtaactcgcttattggcgactatcggaaagatgtctactacgacaactggggcgcggatgggttctacaagaactccgatgcgcgcagcgcctacaagaaccgtatcaacgccatggtgaactacaaaggcaaaacctccggcaaagtctggaagaactggaccgatgcgatcctcgctttcgatctccaaaacgagccaatgtgcgccgagacctccctgtgtaagaacaacgaccaagcgggctggctctgcgacatcgcgctcgcgatgcggatctccctcggcggccaaaaccccatcaagatcgccaccggatccgtaggcggcgacgcatccaacaactgcatcacgatctcggcagcgaccaattgcggacaaatcgacataattgcagctcataagtacggagggccccaatcctccaacggcgggcaatggtccaacagcgcggcctcctggctgtccgcgtccaacggcaagctcgtcttcgtcgaagaatggggcgccaactccgcgctcgcttctcagtcctctgacttccctgcccaggccgctgacatcgacgctggcggtattccaaacttgtactggcagtttttgcccccgcagaactcggcctgtccctatgatcccaagaatgacgccggtgatcactttggaatttacgtcaacgggaatgtggatatcaagagcgctgtgcagaaggcgaatagttctcctgcgaagcaggattggtctgctattgttccttag

SEQ ID NO: 18193 - protein, 374 aa, Muscodor strobelii
  misc_feature: SGI Peptide ID NO. 566094
  misc_feature (1)..(345): NCBI GI: 189204880 Blast Desc: beta-1,3-mannanase [Pyrenophora tritici-repentis Pt-1C-BFP] gi|187985874|gb|EDU51362.1| beta-1,3-mannanase [Pyrenophora tritici-repentis Pt-1C-BFP]
  misc_feature (8)..(325): NCBI GI: 169622129 Blast Desc: SNOG_14280 [Phaeosphaeria nodorum SN15] gi|160704704|gb|EAT78517.2| SNOG_14280 [Phaeosphaeria nodorum SN15]
  misc_feature (27)..(345): NCBI GI: 115384384 Blast Desc: ATEG_01374 [Aspergillus terreus NIH2624] gi|114196431|gb|EAU38131.1| ATEG_01374 [Aspergillus terreus NIH2624]
  misc_feature (34)..(334): NCBI GI: 40645341 Blast Desc: beta-1,3-mannanase [Paecilomyces lilacinus]
  misc_feature (31)..(323): NCBI GI: 83646457 Blast Desc: glycosyl hydrolase [Hahella chejuensis KCTC 2396] gi|83634500|gb|ABC30467.1| glycosyl hydrolase [Hahella chejuensis KCTC 2396]
  misc_feature (18)..(349): NCBI GI: 169609573 Blast Desc: SNOG_07878 [Phaeosphaeria nodorum SN15] gi|160701872|gb|EAT84154.2| SNOG_07878 [Phaeosphaeria nodorum SN15]
  misc_feature (115)..(320): NCBI GI: 169624762 Blast Desc: SNOG_15642 [Phaeosphaeria nodorum SN15] gi|160705232|gb|EAT77017.2| SNOG_15642 [Phaeosphaeria nodorum SN15]
  misc_feature (4)..(323): NCBI GI: 116195218 Blast Desc: CHGG_04207 [Chaetomium globosum CBS 148.51] gi|88180120|gb|EAQ87588.1| CHGG_04207 [Chaetomium globosum CBS 148.51]
  misc_feature (31)..(221): NCBI GI: 167750140 Blast Desc: EUBSIR_01109 [Eubacterium siraeum DSM 15702] gi|167656883|gb|EDS01013.1| EUBSIR_01109 [Eubacterium siraeum DSM 15702]
  misc_feature (8)..(192): NCBI GI: 117927824 Blast Desc: cellulose-binding family II protein [Acidothermus cellulolyticus 11B] gi|117648287|gb|ABK52389.1| cellulose-binding, family II [Acidothermus cellulolyticus 11B]
MKTSILVLGALALHNAVASPLHSSRAAATTWMGTNLYYLQGLSESDQDSYINTLASYGVKVVRVWANAQPGNGECVKGSKSATYVPAFETSIGKYNYETLDALDLVINKLANKGMKVVISPHDGNSLIGDYRKDVYYDNWGADGFYKNSDARSAYKNRINAMVNYKGKTSGKVWKNWTDAILAFDLQNEPMCAETSLCKNNDQAGWLCDIALAMRISLGGQNPIKIATGSVGGDASNNCITISAATNCGQIDIIAAHKYGGPQSSNGGQWSNSAASWLSASNGKLVFVEEWGANSALASQSSDFPAQAADIDAGGIPNLYWQFLPPQNSACPYDPKNDAGDHFGIYVNGNVDIKSAVQKANSSPAKQDWSAIVP

SEQ ID NO: 18194 - DNA, 689 bp, Muscodor strobelii
  misc_feature: SGI EST ID NO. CUFF.42842.0
  misc_feature: Variant of the nucleotide sequence at SEQ ID NO 18192
ctctgagcgcaccttcttttcccagttcaacaaccagtcactcgtcttgaagcattactctttgatcaagtaaactcagaaacagcgaagatgaagacatccattctcgtccttggcgctctcgcgttacacaacgcggtagcaagtcctctgcactcgtctcgagcagcggcaacaacatggatgggcacgaacctatattacctgcaaggtctaagtgaatcggaccaagacagctatatcaacaccctagcaagttacggcgtgaaagtagtccgcgtctgggccaatgctcagccaggtaacggcgagtgtgtgaaaggaagcaagagtgcaacttatgtgcctgcttttgagacaagtatcggaaaatacaactatgagactcttgatgctctcgaccttgtcatcaataagttggctaacaaaggcatgaaggtcgtcatctctcctcacgacggtaactcgcttattggcgactatcggaaagatgtctactacgacaactggggcgcggatgggttctacaagaactccgatgcgcgcagcgcctacaagaaccgtatcaacgccatggtgaactacaaaggcaaaacctccggcaaagtctggaagaactggaccgatgcgatcctcgctttcgatctccaaaacgagccaatgtgcgccgagacctccctgtgtaagaa

SEQ ID NO: 18195 - DNA, 813 bp, Muscodor strobelii
  misc_feature: SGI cDNA ID NO. 566095
  misc_feature: Encodes the peptide sequence at SEQ ID NO 18196
atggcgaatacatatgttctcatctcaggtggtaacagaggcctcggtctcgagactgtcaaagccctcctaggatcggacgccggtgccgcgccgtatcacatcttcctaggaagcagaaatttggagaatgggcaagcagttgctgcaaagctgccaacctctcatggcaatgccgtgtcggcgatccagctggatatcacatctcctgaatccgtgtctaacgccgtcaagcgagtagagagcgaagcgggtcgattggacgtgcttatcaacaacgctggtgtcaactacgattcaatggaggacgaaacagaaaagatgagactaatatacgacattaacgtggtctcgactgcaaggatgatcacttcgttcaaaccactcttgctgacccagccagctggcagagagatgactaaacgtatgatcaacgttaccagtagtatgggatcgattgcgtcgcgttacaacccacagtttgaatggttagtatttacatggatctttgttgcagaacaacatcattcgaattattctcaactccacacagcatatcggtgcacaaaggcagcgctcggcatgctgactgcctgtactgcctacgacctgaaagatgtagcgaaggttcatgctttcgatccgggctgggtggctacagaatttggaggtcaggaggcggcaactgcgcaacaatggggtgcagtcgatccgagagtatccgcgtcggcttgccgggatgttgtcgagggcaaaagagacaatgagagggaggttattgttagtataaatggagatactttcccctggtaa

SEQ ID NO: 18196 - protein, 270 aa, Muscodor strobelii
  misc_feature: SGI Peptide ID NO. 566095
  misc_feature (4)..(158): Pfam Id: PF00106 Pfam Desc: short chain dehydrogenase
  misc_feature (4)..(101): Pfam Id: PF00106 Pfam Desc: short chain dehydrogenase
  misc_feature (3)..(270): NCBI GI: 212536736 Blast Desc: short chain dehydrogenase/reductase, [Penicillium marneffei ATCC 18224] gi|210070923|gb|EEA25013.1| short chain dehydrogenase/reductase, [Penicillium marneffei ATCC 18224]
  misc_feature (2)..(270): NCBI GI: 189194017 Blast Desc: conserved [Pyrenophora tritici-repentis Pt-1C-BFP] gi|187978911|gb|EDU45537.1| conserved [Pyrenophora tritici-repentis Pt-1C-BFP]
  misc_feature (6)..(270): NCBI GI: 189209299 Blast Desc: PTRG_10651 [Pyrenophora tritici-repentis Pt-1C-BFP] gi|187977075|gb|EDU43701.1| PTRG_10651 [Pyrenophora tritici-repentis Pt-1C-BFP]
  misc_feature (6)..(270): NCBI GI: 154289341 Blast Desc: short chain dehydrogenase [Botryotinia fuckeliana B05.10] gi|150849882|gb|EDN25075.1| short chain dehydrogenase [Botryotinia fuckeliana B05.10]
  misc_feature (4)..(270): NCBI GI: 169769300 Blast Desc: [Aspergillus oryzae RIB40] gi|83766978|dbj|BAE57118.1| protein product [Aspergillus oryzae]
  misc_feature (5)..(270): NCBI GI: 46115898 Blast Desc: FG03791.1 [Gibberella zeae PH-1]
  misc_feature (6)..(265): NCBI GI: 145249618 Blast Desc: An14g05250 [Aspergillus niger] gi|134081831|emb|CAK42086.1| protein product [Aspergillus niger]
  misc_feature (6)..(232): NCBI GI: 255535215 Blast Desc: short-chain dehydrogenase/reductase SDR [Flavobacteriaceae bacterium 3519-10] gi|255341411|gb|ACU07524.1| short-chain dehydrogenase/reductase SDR [Flavobacteriaceae
  misc_feature (9)..(268): NCBI GI: 171677718 Blast Desc: protein product [Podospora anserina] gi|170936927|emb|CAP61586.1| protein product [Podospora anserina]
  misc_feature (6)..(270): NCBI GI: 256724418 Blast Desc: NECHADRAFT_105729 [Nectria haematococca mpVI 77-13-4]
  misc_feature (2)..(270): SWISSPROT Homolog: EC 1.1.1.189 Prostaglandin-E(2) 9-reductase
  misc_feature (2)..(270): SWISSPROT Homolog: EC 1.1.1.197 15-hydroxyprostaglandin dehydrogenase (NADP(+))
  misc_feature (2)..(270): SWISSPROT Homolog: EC 1.1.1.184 Carbonyl reductase (NADPH)
MANTYVLISGGNRGLGLETVKALLGSDAGAAPYHIFLGSRNLENGQAVAAKLPTSHGNAVSAIQLDITSPESVSNAVKRVESEAGRLDVLINNAGVNYDSMEDETEKMRLIYDINVVSTARMITSFKPLLLTQPAGREMTKRMINVTSSMGSIASRYNPQFEWLVFTWIFVAEQHHSNYSQLHTAYRCTKAALGMLTACTAYDLKDVAKVHAFDPGWVATEFGGQEAATAQQWGAVDPRVSASACRDVVEGKRDNEREVIVSINGDTFPW

SEQ ID NO: 18197 - DNA, 1608 bp, Muscodor strobelii
  misc_feature: SGI EST ID NO. CUFF.42848.0
  misc_feature: Variant of the nucleotide sequence at SEQ ID NO 18195
caactctccacgttttgagggcggctggggcaatgcgtctgtagcatccagaatgatgatgctggaaatggcgcgggagcagccgaagatatcttgaaatagaccacgcaatgcgatcgggcacgatgatatgacttcgtaactccattaatgtccggctttgagatgtgcatcttggtagataagagatgtcgcctggcttgggttgaaagagccaaacgcatggatagcacagcgagatagttcacaatattggtatcatggcgaatacatatgttctcatctcaggtggtaacagaggcctcggtctcgagactgtcaaagccctcctaggatcggacgccggtgccgcgccgtatcacatcttcctaggaagcagaaatttggagaatgggcaagcagttgctgcaaagctgccaacctctcatggcaatgccgtgtcggcgatccagctggatatcacatctcctgaatccgtgtctaacgccgtcaagcgagtagagagcgaagcgggtcgattggacgtgcttatcaacaacgctggtgtcaactacgattcaatggaggacgaaacagaaaagatgagactaatatacgacattaacgtggtctcgactgcaaggatgatcacttcgttcaaaccactcttgctgacccagccagctggcagagagatgactaaacgtatgatcaacgttaccagtagtatgggatcgattgcgtcgcgttacaacccacagtttgaatggttagtatttacatggatctttgttgcagaacaacatcattcgagtagcagtactaacgttcttctaccttagtacgtgtttttgtcaaacaatgagaaccgtccttgctcgcgaacttcggtgagagcattagcccttggcacaatactaatctccttttctatagattattctcaactccacacagcatatcggtgcacaaaggcagcgctcggcatgctgactgcctgtactgcctacgacctgaaagatgtagcgaaggttcatgctttcgatccgggctgggtggctacagaatttggaggtcaggaggcggcaactgcgcaacaatggggtgcagtcgatccgagagtatccgcgtcggcttgccgggatgttgtcgagggcaaaagagacaatgagagggaggttattgttagtataaatggagatactttcccctggtaaaacggaccaaacaaggcacatcctgtagttacatcgaaacgctcaaggactttcaagcgcttcctgcttgtgtcatggaatatcatcgaactagcgagactcagtgttcgaaatagacaaacaacagaaacataacactacatatttagaagctctacgatgcctctcttgtgctcgcgctagcaatggatcgcatataacataggtagctaatggccatatgtatgatgatttctcaaacaacgtgctgccgactaattcagcactgcatatgcaaaatccctcgtatcaaccttgcgttatcctagcattgtcagatgtccctcggccgaacagtcttgtgatgagtcccgagcataattcgagattccatgcaacatttctataattgcagggtgaagttgcaataaac

SEQ ID NO: 18198 - DNA, 705 bp, Muscodor strobelii
  misc_feature: SGI cDNA ID NO. 566096
  misc_feature: Encodes the peptide sequence at SEQ ID NO 18199
atggcgaatacatatgttctcatctcaggtggtaacagaggcctcggtctcgagactgtcaaagccctcctaggatcggacgccggtgccgcgccgtatcacatcttcctaggaagcagaaatttggagaatgggcaagcagttgctgcaaagctgccaacctctcatggcaatgccgtgtcggcgatccagctggatatcacatctcctgaatccgtgtctaacgccgtcaagcgagtagagagcgaagcgggtcgattggacgtgcttatcaacaacgctggtgtcaactacgattcaatggaggacgaaacagaaaagatgagactaatatacgacattaacgtggtctcgactgcaaggatgatcacttcgttcaaaccactcttgctgacccagccagctggcagagagatgactaaacattattctcaactccacacagcatatcggtgcacaaaggcagcgctcggcatgctgactgcctgtactgcctacgacctgaaagatgtagcgaaggttcatgctttcgatccgggctgggtggctacagaatttggaggtcaggaggcggcaactgcgcaacaatggggtgcagtcgatccgagagtatccgcgtcggcttgccgggatgttgtcgagggcaaaagagacaatgagagggaggttattgttagtataaatggagatactttcccctggtaa

SEQ ID NO: 18199 - protein, 234 aa, Muscodor strobelii
  misc_feature: SGI Peptide ID NO. 566096
  misc_feature (4)..(169): Pfam Id: PF00106 Pfam Desc: short chain dehydrogenase
  misc_feature (4)..(101): Pfam Id: PF00106 Pfam Desc: short chain dehydrogenase
  misc_feature (2)..(234): NCBI GI: 189194017 Blast Desc: conserved [Pyrenophora tritici-repentis Pt-1C-BFP] gi|187978911|gb|EDU45537.1| conserved [Pyrenophora tritici-repentis Pt-1C-BFP]
  misc_feature (3)..(234): NCBI GI: 212536736 Blast Desc: short chain dehydrogenase/reductase, [Penicillium marneffei ATCC 18224] gi|210070923|gb|EEA25013.1| short chain dehydrogenase/reductase, [Penicillium marneffei ATCC 18224]
  misc_feature (4)..(234): NCBI GI: 169769300 Blast Desc: [Aspergillus oryzae RIB40] gi|83766978|dbj|BAE57118.1| protein product [Aspergillus oryzae]
  misc_feature (6)..(234): NCBI GI: 67516487 Blast Desc: AN0525.2 [Aspergillus nidulans FGSC A4] gi|40747468|gb|EAA66624.1| AN0525.2 [Aspergillus nidulans FGSC A4] gi|259489218|tpe|CBF89309.1| TPA: conserved [Aspergillus FGSC
  misc_feature (6)..(234): NCBI GI: 189209299 Blast Desc: PTRG_10651 [Pyrenophora tritici-repentis Pt-1C-BFP] gi|187977075|gb|EDU43701.1| PTRG_10651 [Pyrenophora tritici-repentis Pt-1C-BFP]
  misc_feature (1)..(232): NCBI GI: 259480750 Blast Desc: TPA: conserved [Aspergillus nidulans FGSC A4]
  misc_feature (8)..(234): NCBI GI: 238501766 Blast Desc: short-chain dehydrogenase, [Aspergillus flavus NRRL3357] gi|220692354|gb|EED48701.1| short-chain dehydrogenase, [Aspergillus flavus NRRL3357]
  misc_feature (6)..(234): NCBI GI: 256724418 Blast Desc: NECHADRAFT_105729 [Nectria haematococca mpVI 77-13-4]
  misc_feature (6)..(229): NCBI GI: 145249618 Blast Desc: An14g05250 [Aspergillus niger] gi|134081831|emb|CAK42086.1| protein product [Aspergillus niger]
  misc_feature (9)..(232): NCBI GI: 171677718 Blast Desc: protein product [Podospora anserina] gi|170936927|emb|CAP61586.1| protein product [Podospora anserina]
  misc_feature (1)..(185): SWISSPROT Homolog: EC 1.1.1.138 Mannitol 2-dehydrogenase (NADP(+))
MANTYVLISGGNRGLGLETVKALLGSDAGAAPYHIFLGSRNLENGQAVAAKLPTSHGNAVSAIQLDITSPESVSNAVKRVESEAGRLDVLINNAGVNYDSMEDETEKMRLIYDINVVSTARMITSFKPLLLTQPAGREMTKHYSQLHTAYRCTKAALGMLTACTAYDLKDVAKVHAFDPGWVATEFGGQEAATAQQWGAVDPRVSASACRDVVEGKRDNEREVIVSINGDTFPW

SEQ ID NO: 18200 - DNA, 1608 bp, Muscodor strobelii; identical to SEQ ID NO: 18197
  misc_feature: SGI EST ID NO. CUFF.42848.0
  misc_feature: Variant of the nucleotide sequence at SEQ ID NO 18198

SEQ ID NO: 18201 - DNA, 2148 bp, Muscodor strobelii
  misc_feature: SGI cDNA ID NO. 566097
  misc_feature: Encodes the peptide sequence at SEQ ID NO 18202
atgcttctccgcaatccgcgattgaaacggccgccatgcagcctcttctgcggcaccacaagctgtagcaccaggagtcttgggtgggccggagcccggccgcgacagaccttctcgagcctcggcgcacccgctcagcaagatcaaggcaatgttcaacatgagcttcgacgcgacctcgatccgcccccggctcagcaccatggcacaaacgcgacgccgcccatgaccaccttgaagggccagccgctggaccgcaagcttgtcgagtcggtgctcaagcgacgcttcttctacgcgcccactgccgagatatacggtggtgtcgccggcttctacgactacgggccgccgggatgctcgctgcactcagccatcgtcgatgtatggcgccgccacttcgtgctcgaggaggacatgctcgaagtcgacactcccatcctcaccccgcgcgtcgttctcgagacgagtggccacgtccaacgcttctgcgactacgttgtgaaagacgccaccaccggccaggtcttacgagcagaccatgtcgtacaagaggtcttgcaagacagacttgagagacacaatcggacccgagattctaagcccggccgcggcaatgtttccaagaagccgcaattagacgacgcaaccgtccagcagtacgaggagatcctagccaagatcgacaactatgacgcccaggcgctctctgatctcatctcgacacaccagatccggaacccaaactcgggtcaacaattcaaactacctgtgcagacccagaatctcatgttcaaggtccccataggaaacagcaggaaggacgctttcctacgcccagagacggcacagggccagtttttgaacttctccagacttctggaatttaaccataattctatcccctttgcgtctgcatccgttgggaaatcaggacgcaacgaaatctcgcctaaggctgggctgctccgcgtaaaggagttcaccatggccgagattgagcactacgttgatcctgaaagtgaaaagaggcatatgcgctttgacgaaatctcggacgtccaagtcaacctgctcactcgccaggtccagcttgcaggaaagacaatcgccgcacctatcagtgttggcgaagcggtccgcagcggcgtcgtcaacaaccagactgtaggttacttcatcgcccgtattcaactgtttctgctcaagctcggcattgccccggataaaattcgatttcgggagcatatggaaaatgaaatggcccattatgctcaatactgtgtggatgccgaattgttgaccagctacggatggatcgaggtcgtgggatgcgcggatcgaagtgcctatgacctaagcagacatactaaagcgagcggagttcctctggttgttcgtgaggctagagaaatgccattaaaaatcactgagtttatggtagacctaaagaaagcctttagacctcactacaagagagatgctcctctcgtagaggctgccctggcacggttgacccaagacgcgaaagcccaactttctgtcactcttagcataagtgggaaggtcacaatcgatgtcccgggcattgggcaggatggcaaggtcgaactaacttccgacctcgtcgtagtcgaacagagaacgcgagtggaacatagcagggagtatgtccctggagttatcgagccgtcctttggtattggccgtatcttatactgcctttgtgagcacgttttctggacacgcgaggacactggagaacgacgacctgttctctcatttccaccagccatggccccaaataaggtcctcctggttgctctggactctaaaccggactttaaaccactagtatccgagctggcgacattggttcgaaagcgaggactatcaacaagggtcgacacttctagcgccagcatcggtagacggtacgcaagaaacgacgagttgggaacaccttttgccatcacggttgattaccagactttggaggacaaaacggtcacacttcgcgagcgcgatacaatggcgcaagtccgtgctagcccagccgagatcgtagatgttatcgtgcaacttgttgacggaagtttgacttggcaccaggtcattgagaaatattccgccggcaacccattgtaa

SEQ ID NO: 18202 - protein, 715 aa, Muscodor strobelii
  misc_feature: SGI Peptide ID NO. 566097
  misc_feature (603)..(695): Pfam Id: PF03129 Pfam Desc: Anticodon binding domain
  misc_feature (122)..(437): Pfam Id: PF00587 Pfam Desc: tRNA synthetase class II core domain (G, H, P, S and T)
  misc_feature (76)..(705): NCBI GI: 70998636 Blast Desc: glycyl-tRNA synthetase [Aspergillus fumigatus Af293] gi|66851676|gb|EAL92002.1| glycyl-tRNA synthetase [Aspergillus fumigatus Af293] gi|159126226|gb|EDP51342.1| glycyl-tRNA A1163]
  misc_feature (77)..(705): NCBI GI: 225562196 Blast Desc: glycyl-tRNA synthetase [Ajellomyces capsulatus G186AR]
  misc_feature (76)..(705): NCBI GI: 119498573 Blast Desc: glycyl-tRNA synthetase [Neosartorya fischeri NRRL 181] gi|119414208|gb|EAW24147.1| glycyl-tRNA synthetase [Neosartorya fischeri NRRL 181]
  misc_feature (77)..(705): NCBI GI: 261189484 Blast Desc: glycyl-tRNA synthetase [Ajellomyces dermatitidis SLH14081] gi|239591730|gb|EEQ74311.1| glycyl-tRNA synthetase [Ajellomyces dermatitidis SLH14081] gi|239608956|gb|EEQ85943.1|
  misc_feature (77)..(705): NCBI GI: 240277283 Blast Desc: glycyl-tRNA synthetase [Ajellomyces capsulatus H143]
  misc_feature (77)..(708): NCBI GI: 238844288 Blast Desc: glycyl-tRNA synthetase 1 [Microsporum canis CBS 113480]
  misc_feature (73)..(705): NCBI GI: 46125161 Blast Desc: FG06958.1 [Gibberella zeae PH-1]
  misc_feature (76)..(705): NCBI GI: 255943789 Blast Desc: Pc20g01010 [Penicillium chrysogenum Wisconsin 54-1255] gi|211587397|emb|CAP85430.1| Pc20g01010 [Penicillium chrysogenum Wisconsin 54-1255]
  misc_feature (76)..(705): NCBI GI: 115438430 Blast Desc: glycyl-tRNA synthetase 1 [Aspergillus terreus NIH2624] gi|114188879|gb|EAU30579.1| glycyl-tRNA synthetase 1 [Aspergillus terreus NIH2624]
  misc_feature (77)..(705): NCBI GI: 226281365 Blast Desc: glycyl-tRNA synthetase [Paracoccidioides brasiliensis Pb01]
  misc_feature (83)..(704): SWISSPROT Homolog: EC 6.1.1.14 Glycine--tRNA ligase
MLLRNPRLKRPPCSLFCGTTSCSTRSLGWAGARPRQTFSSLGAPAQQDQGNVQHELRRDLDPPPAQHHGTNATPPMTTLKGQPLDRKLVESVLKRRFFYAPTAEIYGGVAGFYDYGPPGCSLHSAIVDVWRRHFVLEEDMLEVDTPILTPRVVLETSGHVQRFCDYVVKDATTGQVLRADHVVQEVLQDRLERHNRTRDSKPGRGNVSKKPQLDDATVQQYEEILAKIDNYDAQALSDLISTHQIRNPNSGQQFKLPVQTQNLMFKVPIGNSRKDAFLRPETAQGQFLNFSRLLEFNHNSIPFASASVGKSGRNEISPKAGLLRVKEFTMAEIEHYVDPESEKRHMRFDEISDVQVNLLTRQVQLAGKTIAAPISVGEAVRSGVVNNQTVGYFIARIQLFLLKLGIAPDKIRFREHMENEMAHYAQYCVDAELLTSYGWIEVVGCADRSAYDLSRHTKASGVPLVVREAREMPLKITEFMVDLKKAFRPHYKRDAPLVEAALARLTQDAKAQLSVTLSISGKVTIDVPGIGQDGKVELTSDLVVVEQRTRVEHSREYVPGVIEPSFGIGRILYCLCEHVFWTREDTGERRPVLSFPPAMAPNKVLLVALDSKPDFKPLVSELATLVRKRGLSTRVDTSSASIGRRYARNDELGTPFAITVDYQTLEDKTVTLRERDTMAQVRASPAEIVDVIVQLVDGSLTWHQVIEKYSAGNPL

SEQ ID NO: 18203 - DNA, 2650 bp, Muscodor strobelii
  misc_feature: SGI EST ID NO. CUFF.42949.2
  misc_feature: Variant of the nucleotide sequence at SEQ ID NO 18201
ggcttacctaagttcgtgcagtcttgttttctccaattcgacgggtacgtagtatttcggcagtggcagagcagtcgacgaagcagactcaattcaacaaagccgctctctgatgcttctccgcaatccgcgattgaaacggccgccatgcagcctcttctgcggcaccacaagctgtagcaccaggagtcttgggtgggccggagcccggccgcgacagaccttctcgagcctcggcgcacccgctcagcaagatcaaggcaatgttcaacatgagcttcgacgcgacctcgatccgcccccggctcagcaccatggcacaaacgcgacgccgcccatgaccaccttgaagggccagccgctggaccgcaagcttgtcgagtcggtgctcaagcgacgcttcttctacgcgcccactgccgagatatacggtggtgtcgccggcttctacgactacgggccgccgggatgctcgctgcactcagccatcgtcgatgtatggcgccgccacttcgtgctcgaggaggacatgctcgaagtcgacactcccatcctcaccccgcgcgtcgttctcgagacgagtggccacgtccaacgcttctgcgactacgttgtgaaagacgccaccaccggccaggtcttacgagcagaccatgtcgtacaagaggtcttgcaagacagacttgagagacacaatcggacccgagattctaagcccggccgcggcaatgtttccaagaagccgcaattagacgacgcaaccgtccagcagtacgaggagatcctagccaagatcgacaactatgacgcccaggcgctctctgatctcatctcgacacaccagatccggaacccaaactcgggtcaacaattcaaactacctgtgcagacccagaatctcatgttcaaggtccccataggaaacagcaggaaggacgctttcctacgcccagagacggcacagggccagtttttgaacttctccagacttctggaatttaaccataattctatcccctttgcgtctgcatccgttgggaaatcaggacgcaacgaaatctcgcctaaggctgggctgctccgcgtaaaggagttcaccatggccgagattgagcactacgttgatcctgaaagtgaaaagaggcatatgcgctttgacgaaatctcggacgtccaagtcaacctgctcactcgccaggtccagcttgcaggaaagacaatcgccgcacctatcagtgttggcgaagcggtccgcagcggcgtcgtcaacaaccagactgtaggttacttcatcgcccgtattcaactgtttctgctcaagctcggcattgccccggataaaattcgatttcgggagcatatggaaaatgaaatggcccattatgctcaatactgtgtggatgccgaattgttgaccagctacggatggatcgaggtcgtgggatgcgcggatcgaagtgcctatgacctaagcagacatactaaagcgagcggagttcctctggttgttcgtgaggctagagaaatgccattaaaaatcactgagtttatggtagacctaaagaaagcctttagacctcactacaagagagatgctcctctcgtagaggctgccctggcacggttgacccaagacgcgaaagcccaactttctgtcactcttagcataagtgggaaggtcacaatcgatgtcccgggcattgggcaggatggcaaggtcgaactaacttccgacctcgtcgtagtcgaacagagaacgcgagtggaacatagcagggagtatgtccctggagttatcgagccgtcctttggtattggccgtatcttatactgcctttgtgagcacgttttctggacacgcgaggacactggagaacgacgacctgttctctcatttccaccagccatggccccaaataaggtcctcctggttgctctggactctaaaccggactttaaaccactagtatccgagctggcgacattggttcgaaagcgaggactatcaacaagggtcgacacttctagcgccagcatcggtagacggtacgcaagaaacgacgagttgggaacaccttttgccatcacggttgattaccagactttggaggacaaaacggtcacacttcgcgagcgcgatacaatggcgcaagtccgtgctagcccagccgagatcgtagatgttatcgtgcaacttgttgacggaagtttgacttggcaccaggtcattgagaaatattccgccggcaacccattgtaaactattgtaaattatcaggaaatgggacgctgcatggtgtgcgattgtattgtacatatagaagatacccatattcgcatgaccagacaatggtccaaagcccaatgcttaattcgtttgaaaaagaaagagtacttctaagctgcacgtcaagaatatatcatatgggaataacccaatgtgcgtcggtctctgaaatatgattgtttattcactgatgcctcaccaggacaagcgggcgtattctttagtgttctagcatcaggaacgtggatgatcgattcacaacgatgtatggtatcgtgagtgcttgatcggaatattgcatttggtaaacaactttgcgatgtattggacaaagtctgagagctcgattgaagacaaaacaga

SEQ ID NO: 18204 - DNA, 951 bp, Muscodor strobelii
  misc_feature: SGI cDNA ID NO. 566098
  misc_feature: Encodes the peptide sequence at SEQ ID NO 18205
atgtgcgagaaagacatttacacagagctccggccagacggccgaatcaagacctcggaggagcctagatctttctgcaacatcgagagaagatattgcgagaggacaaaggaataccaccatcctgccgagcagaggaagtcgacctacacccaatacccgccaacaccgccgatgtcctcccactcagagaacacttccgactcggaacgttcaagcaaacgaagctctggcatctacgtcaatggccgcaaagtatcggacatctctagaaggcggtcctccaggcacgagcgacagtcgagcagcgatcgcctttcatacgagggaagctcttcactatcgcggtctcctctacgctcgccaactttccaccagcatagcataccatcaagtcctgtcgtcgacgcatacgacagatacagtagctcttaccgcgacagcgttgtcgacgaacgtgatcggccttcctcatcacaccacccctctatcaaagtcgagattgtcaacaatgactcggcacatcgccgaaagggatcttcatccaagacgagctcatcgcgcgacagcgacgaggatgaacgcagacaccgacgccaacggagagcttcggtccacttcgaagagccacccaaggtcaaaaaggaacagcgcaagcaatcagagattgcccgtgccaacgacgcaattgctaaccgcacagcggtgccacacacatctaaaaccccttaccgacgtggatcggtatctcttggctcgctggtatctacgactgagcaattgcgcattgatgaggagaagatgaggcgacgaaaagaaaaggaaattcggaaggagcgcgagcgcgaagaggcagaccaaaaacagcgactaaaggaccgcatgaacaacgtctctacttcgaataggaggacaagctactacggaaactcaacaccctactacggctaa

SEQ ID NO: 18205 - protein, 316 aa, Muscodor strobelii
  misc_feature: SGI Peptide ID NO. 566098
  misc_feature (1)..(295): NCBI GI: 256726397 Blast Desc: NECHADRAFT_79572 [Nectria haematococca mpVI 77-13-4]
  misc_feature (1)..(295): NCBI GI: 46124367 Blast Desc: FG06561.1 [Gibberella zeae PH-1]
MCEKDIYTELRPDGRIKTSEEPRSFCNIERRYCERTKEYHHPAEQRKSTYTQYPPTPPMSSHSENTSDSERSSKRSSGIYVNGRKVSDISRRRSSRHERQSSSDRLSYEGSSSLSRSPLRSPTFHQHSIPSSPVVDAYDRYSSSYRDSVVDERDRPSSSHHPSIKVEIVNNDSAHRRKGSSSKTSSSRDSDEDERRHRRQRRASVHFEEPPKVKKEQRKQSEIARANDAIANRTAVPHTSKTPYRRGSVSLGSLVSTTEQLRIDEEKMRRRKEKEIRKEREREEADQKQRLKDRMNNVSTSNRRTSYYGNSTPYYG

SEQ ID NO: 18206 - DNA, 1951 bp, Muscodor strobelii
  misc_feature: SGI EST ID NO. CUFF.42868.0
  misc_feature: Variant of the nucleotide sequence at SEQ ID NO 18204
gggagatcgaacccctgccgtatgggctgcgcgcaaaaaatatggccaaccctatgaaatgtcttcttccgtcttgtattaaaggatcgcgcccaccaccaccatcccctcccgcttccgtcctgtccatcgcatgatacccatctgtccattgttgtaccgtcacgattccccgtcggtattgtaactgtatactacggtcaataccctgcctgtagcattccatcgcgcttccatatctgttcgaccactaccggacctcgaagctcgacccccgaagcccgaggtatagacgcgcatctcccttgcgaccggaccacattccaacgccgccgtggcctcttctccgagagtcattataaacaattcgattcgcagccatcggcaacgacgccaggaagaagccctggtcttggaatcacactcttatccggcctgcctcccaaggaggacctccagaaggccccgcgtcgttcaacccaacccacccagacacatagaggacgacacctcagtcggcttcacaatgtgcgagaaagacatttacacagagctccggccagacggccgaatcaagacctcggaggagcctagatctttctgcaacatcgagagaagatattgcgagaggacaaaggaataccaccatcctgccgagcagaggaagtcgacctacacccaatacccgccaacaccgccgatgtcctcccactcagagaacacttccgactcggaacgttcaagcaaacgaagctctggcatctacgtcaatggccgcaaagtatcggacatctctagaaggcggtcctccaggcacgagcgacagtcgagcagcgatcgcctttcatacgagggaagctcttcactatcgcggtctcctctacgctcgccaactttccaccagcatagcataccatcaagtcctgtcgtcgacgcatacgacagatacagtagctcttaccgcgacagcgttgtcgacgaacgtgatcggccttcctcatcacaccacccctctatcaaagtcgagattgtcaacaatgactcggcacatcgccgaaagggatcttcatccaagacgagctcatcgcgcgacagcgacgaggatgaacgcagacaccgacgccaacggagagcttcggtccacttcgaagagccacccaaggtcaaaaaggaacagcgcaagcaatcagagattgcccgtgccaacgacgcaattgctaaccgcacagcggtgccacacacatctaaaaccccttaccgacgtggatcggtatctcttggctcgctggtatctacgactgagcaattgcgcattgatgaggagaagatgaggcgacgaaaagaaaaggaaattcggaaggagcgcgagcgcgaagaggcagaccaaaaacagcgactaaaggaccgcatgaacaacgtctctacttcgaataggaggacaagctactacggaaactcaacaccctactacggctaagcacaaacaatttatcaacaaaaaaaaacaccaaacaacttgctgcgaattcatgtcacaaacatatagacagactggggacacacttggctggagttatagcactattttgtcttactactcaggcgttgccttaacactgttggagcgattttgtgtactaaatgataccattataacttgtgtagaaagggatagggttggattggaaaacactgtatgagcagcagacggcttgtattctcaggaacacagtgctacaagaatagagtcttcacaaccgatcgaagatcacaacctaaacttctcgtcctggaactcactcgtgcttgacttgctacccatgaatgcgtacatttgcgcgttctagtctaccacaggtgaagggatgcgacgacagcaaaagcaaaaaaaacgaatgaaccccaccaagacatcgcggggtcttgtcgagaaagttcgcgcccattgcgc

SEQ ID NO: 18207 - DNA, 1434 bp, Muscodor strobelii
  misc_feature: SGI cDNA ID NO. 566099
  misc_feature: Encodes the peptide sequence at SEQ ID NO 18208
atggcgcctcactacgaatttggcggtccctttggcgctgccgcgatcgtgattggccttcctgtgctcctgtatacctttgcattcgcatgtaatgatatatcgggatgtcctgcaccatctcttttggagccgagctcctttaatctggacactttcaaggccgagataggatggcccggcttcggtggtcttcacagctggcaggtcaccggcgttacccttggttatcaccttttcagcctgatcctttggaaaatcctacctgcagagaaggtgctgggcactaaattgctacaacatgggcgtcctctggaataccgaatgaacgctttctcatcgaccctagtccatttagccatatgtgcagtgggaacttatctgcaaggcgcgaatttcatcgtttggacgtacatcacggacaattacatccagatgctaaccgcgaatatacttatcgctaccgtcatggcaatttttgtttacgtcaaaagctttactgttgataccaattatcctaacaaggatatgcgagaacttgcagctggtggacataccggaaacctcatctatgatttctacattggtcgtgagcttaatcctcgaatcactatcccgatatttggcgagatcgacttgaaaactttttgcgaaatgcgtcaaggtcttactgggtggatcctgatggatcttgctttcgtggccaaacagtatcgaacgtatggttttgtgtcagacagcatcatctttgtctccgccttccaggcttactacgtactggacggacagtatttggaggctggaatcatgacaatgatggacatcacgacagacgggttcggctatatgttgtcatttggtgatcttgcctgggtgccgttcctctactcgacccaaactcgctacctctccgttttcccagttcaactcggatgggcgggtgtcgccgccgcctccgccgtgttcgcaactggtctatacatcttcagagccgcgaactcgcagaagaacgttttccgcaacaacccgactgatcctggtgtagccaacttgtcatatatacagaccaagcgaggcactagactactgactgccggatggtggggcaagtctcggcacatcaattattttggagattggctacaggcctcgcctttcagcttgcctactggtatctcaggatacagcatcttgtctgctggtagtgcaattgctacctcccacgctgcgaatatgctcgacggtcgcgtgatcgtccaggaccaagcaaagggttggggcattatattcacctatttctacgtactctactttggtatattgctcatccatcgcgaaggccgagacgacgctgcgtgcgcaaagaaatacggtgatgactgggtcaagtacaagaagcaagtcaaatatcacatcataccctatatttactag

SEQ ID NO: 18208 - protein, 477 aa, Muscodor strobelii
  misc_feature: SGI Peptide ID NO. 566099
  misc_feature (1)..(477): Pfam Id: PF01222 Pfam Desc: Ergosterol biosynthesis ERG4/ERG24 family
  misc_feature (4)..(477): NCBI GI: 238491534 Blast Desc: C-14 sterol reductase, [Aspergillus flavus NRRL3357] gi|220697417|gb|EED53758.1| C-14 sterol reductase, [Aspergillus flavus NRRL3357]
  misc_feature (4)..(477): NCBI GI: 169773545 Blast Desc: [Aspergillus oryzae RIB40] gi|83769102|dbj|BAE59239.1| protein product [Aspergillus oryzae]
  misc_feature (4)..(477): NCBI GI: 238839552 Blast Desc: Delta(14)-sterol reductase [Microsporum canis CBS 113480]
  misc_feature (4)..(477): NCBI GI: 145229629 Blast Desc: An01g07000 [Aspergillus niger] gi|134055232|emb|CAK43818.1| protein product [Aspergillus niger]
  misc_feature (4)..(477): NCBI GI: 145604380 Blast Desc: c-14 sterol reductase [Magnaporthe grisea 70-15] gi|145012380|gb|EDJ97036.1| c-14 sterol reductase [Magnaporthe grisea 70-15]
  misc_feature (3)..(477): NCBI GI: 119196285 Blast Desc: CIMG_02517 [Coccidioides immitis RS]
  misc_feature (3)..(477): NCBI GI: 240110938 Blast Desc: C-14 sterol reductase, [Coccidioides posadasii C735 delta SOWgp]
  misc_feature (5)..(477): NCBI GI: 256725912 Blast Desc: [Nectria haematococca mpVI 77-13-4]
  misc_feature (1)..(477): NCBI GI: 255956891 Blast Desc: Pc21g22280 [Penicillium chrysogenum Wisconsin 54-1255] gi|211590909|emb|CAP97125.1| Pc21g22280 [Penicillium chrysogenum Wisconsin 54-1255]
  misc_feature (5)..(477): NCBI GI: 1370272 Blast Desc: STR2 [Nectria haematococca]
  misc_feature (4)..(477): SWISSPROT Homolog: EC 1.3.1.70 Delta(14)-sterol reductase
MAPHYEFGGPFGAAAIVIGLPVLLYTFAFACNDISGCPAPSLLEPSSFNLDTFKAEIGWPGFGGLHSWQVTGVTLGYHLFSLILWKILPAEKVLGTKLLQHGRPLEYRMNAFSSTLVHLAICAVGTYLQGANFIVWTYITDNYIQMLTANILIATVMAIFVYVKSFTVDTNYPNKDMRELAAGGHTGNLIYDFYIGRELNPRITIPIFGEIDLKTFCEMRQGLTGWILMDLAFVAKQYRTYGFVSDSIIFVSAFQAYYVLDGQYLEAGIMTMMDITTDGFGYMLSFGDLAWVPFLYSTQTRYLSVFPVQLGWAGVAAASAVFATGLYIFRAANSQKNVFRNNPTDPGVANLSYIQTKRGTRLLTAGWWGKSRHINYFGDWLQASPFSLPTGISGYSILSAGSAIATSHAANMLDGRVIVQDQAKGWGIIFTYFYVLYFGILLIHREGRDDAACAKKYGDDWVKYKKQVKYHIIPYIY

SEQ ID NO: 18209 - DNA, 2358 bp, Muscodor strobelii
  misc_feature: SGI EST ID NO. CUFF.42880.0
  misc_feature: Variant of the nucleotide sequence at SEQ ID NO 18207
cacgaactcattcccaacgccttctttcacctttgcacctacattgaagctgtgcatccccatcttcaaagtagtctgctctccagtcatggcgcctcactacgaatttggcggtccctttggcgctgccgcgatcgtgattggccttcctgtgctcctgtatacctttgcattcgcatgtaatgatatatcgggatgtcctgcaccatctcttttggagccgagctcctttaatctggacactttcaaggccgagataggatggcccggcttcggtggtcttcacagctggcaggtcaccggcgttacccttggttatcaccttttcagcctgatcctttggaaaatcctacctgcagagaaggtgctgggcactaaattgctacaacatgggcgtcctctggaataccgaatgaacgctttctcatcgaccctagtccatttagccatatgtgcagtgggaacttatctgcaaggcgcgaatttcatcgtttggacgtacatcacggacaattacatccagatgctaaccgcgaatatacttatcgctaccgtcatggcaatttttgtttacgtcaaaagctttactgttgataccaattatcctaacaaggatatgcgagaacttgcagctggtggacataccggaaacctcatctatgatttctacattggtcgtgagcttaatcctcgaatcactatcccgatatttggcgagatcgacttgaaaactttttgcgaaatgcgtcaaggtcttactgggtggatcctgatggatcttgctttcgtggccaaacagtatcgaacgtatggttttgtgtcagacagcatcatctttgtctccgccttccaggcttactacgtactggacggacagtatttggaggctggaatcatgacaatgatggacatcacgacagacgggttcggctatatgttgtcatttggtgatcttgcctgggtgccgttcctctactcgacccaaactcgctacctctccgttttcccagttcaactcggatgggcgggtgtcgccgccgcctccgccgtgttcgcaactggtctatacatcttcagagccgcgaactcgcagaagaacgttttccgcaacaacccgactgatcctggtgtagccaacttgtcatatatacagaccaagcgaggcactagactactgactgccggatggtggggcaagtctcggcacatcaattattttggagattggctacaggcctcgcctttcagcttgcctactggtatctcaggatacagcatcttgtctgctggtagtgcaattgctacctcccacgctgcgaatatgctcgacggtcgcgtgatcgtccaggaccaagcaaagggttggggcattatattcacctatttctacgtactctactttggtatattgctcatccatcgcgaaggccgagacgacgctgcgtgcgcaaagaaatacggtgatgactgggtcaagtacaagaagcaagtcaaatatcacatcataccctatatttactaggttcggtgtcataaagacttctttcttccgaagcggaagcacgatcaaaataacgagatctgcccctcgcacgacggatcagaacagagagaacgaagactaggtggcaaaccgttctgccaaaacgattggcctagttcgcacacatgtactacgcatatagaacacatattacatggaggtgcgcaaagtatacatatatactgcaggcgagacataattaatatcatagtggaattattcgacacactgtgttgtgccccctatccgttttccctgcgacttgcggtcctcgctctttggcacagcatgcagaagttaatgtagctagtagtgctgacatttcctatctagtcatgggatctgtaagatatgagatcgtcgggacgattaaggttctgcaccatcccgaaaatgcggcgttgtgttgcatatctgcgagggaccccttggttacctgatggaggtgcagcgaaaaagggtgcactcgatctggaagacaaatgaatcactgttctctctgatctattcatggagtcaactacagaacgactggtgtgctattaccagagcgcaaacccttagtcaagtaccatgctctaatcattgtggattgcccatgtcctacatcgtcgctgtatcctaagaagctaactttgccgtgagttgcggccaacaacttcttaatttcgttatggagcggcactcatagtgtctcttaagagggtatcatagaatttatagtaactcaataactcatccttgacagacaagatgtattttaagcttcccgcctctgcatgttcaaggcgtgtttcttacccagtcaagactcg

SEQ ID NO: 18210 - DNA, 1461 bp, Muscodor strobelii
  misc_feature: SGI cDNA ID NO. 566100
  misc_feature: Elevated expression when VOC is produced
  misc_feature: Encodes the peptide sequence at SEQ ID NO 18211
atgggcggtatcataatgatcattggaactctcatccagattacagcatatccgacacatgcgccactggcccagtttattattggtcgcatagtcacaggtgtcgggaacggtataaatacttcaacaataccaacgtatcaagccgagtgcagtaaaacatcaaatcgtggccttctcatttgtatccaaggaggcatcattgcctttggaactcttatcggtaaggaacgaaatgcttactggattgattacgggtcctcttttggccccgatgacctcgtttggaggtttcccattgctttccagatcgttttcggcttcgcgctgtctgtggctatgttctggcttcctgaatctccgaggtggctattgacccacgagcggtatgaagaggccaataaagtgatcgctggtctccgaggatacgaaatggatagccaggagactgctttagagcgcgacattatcctcgactcaattagggcgtctggcgtatttggagggaagagcactcccttcaaagcacttttcacaaacggcaagacgcaacactttcgacgcatgcttctgggtgccagcagccagttcatgcaacaagtcggtggatgcaacgccgtcatttattttttccctattctgtgcgaacggttcatcacaattggggaccataatatggctttattacttggaggtgtcaatgcaatagtctatgccatcttcgtacgtaatcagtatactatccgtccatcggtcgactcgatcatgctggcaacagtatcatggtttctgatcgagcgagtcggtcgtagaaagctttttatttggggaactgtcggtcaaggattgagcatggtactggctttcgctgctctgatcccaggcacaagctctgcagctatcggcacctgcgttgcgctttttacgtacattgcaagttttggagctacctggctgccacttccttggctatatcccgctgaaataagtccaattatgacccgcgcaaaggccaatgcggtctcgacgtgtacaaactggctattcaactttttcatcgtattgattactcctattctggtcaccaatgaatcacatccttgtcttcagacggtgcccctcaagattggttgggggacattcctattctttgccgtgctcaactccaccttcataccgattatatactttttctaccccgaaacagcatatcgatccttggaagagattgacatcattttcgctaaaggctatgtcgagaaaatatcctatgttaaagctgcaaaggatctgccgttattgtcggacgccgaagtagaagaggaagcgttgagatatggccttattgacacggcggcacggggtgcagtcaatgcatccaagaaagccagtggtgaagtacacgtcgactcttctagcaagaagagtttcgaaggttcgggaagcaaagaggagatttga

SEQ ID NO: 18211 - protein, 486 aa, Muscodor strobelii
  misc_feature: SGI Peptide ID NO. 566100
  misc_feature (1)..(414): Pfam Id: PF00083 Pfam Desc: Sugar (and other) transporter
  misc_feature (260)..(414): Pfam Id: PF00083 Pfam Desc: Sugar (and other) transporter
  misc_feature (1)..(210): Pfam Id: PF00083 Pfam Desc: Sugar (and other) transporter
  misc_feature (1)..(485): NCBI GI: 39964490 Blast Desc: MGG_09852 [Magnaporthe grisea 70-15] gi|145011159|gb|EDJ95815.1| MGG_09852 [Magnaporthe grisea 70-15]
  misc_feature (1)..(476): NCBI GI: 46122923 Blast Desc: FG05839.1 [Gibberella zeae PH-1]
  misc_feature (1)..(478): NCBI GI: 212546137 Blast Desc: hexose carrier protein, [Penicillium marneffei ATCC 18224] gi|210064742|gb|EEA18837.1| hexose carrier protein, [Penicillium marneffei ATCC 18224]
  misc_feature (1)..(448): NCBI GI: 242824286 Blast Desc: sugar transporter, [Talaromyces stipitatus ATCC 10500] gi|218713148|gb|EED12573.1| sugar transporter, [Talaromyces stipitatus ATCC 10500]
  misc_feature (1)..(485): NCBI GI: 121709036 Blast Desc: hexose carrier protein [Aspergillus clavatus NRRL 1] gi|119400435|gb|EAW10860.1| hexose carrier protein [Aspergillus clavatus NRRL 1]
  misc_feature (2)..(480): NCBI GI: 171695602 Blast Desc: protein product [Podospora anserina] gi|170948043|emb|CAP60207.1| protein product [Podospora anserina]
  misc_feature (2)..(464): NCBI GI: 119489462 Blast Desc: hexose carrier protein [Neosartorya fischeri NRRL 181] gi|119411053|gb|EAW20998.1| hexose carrier protein [Neosartorya fischeri NRRL 181]
  misc_feature (1)..(468): NCBI GI: 240107393 Blast Desc: Sugar transporter family protein [Coccidioides posadasii C735 delta SOWgp]
  misc_feature (1)..(462): NCBI GI: 156037402 Blast Desc: SS1G_12412 [Sclerotinia sclerotiorum 1980] gi|154697823|gb|EDN97561.1| SS1G_12412 [Sclerotinia sclerotiorum 1980]
  misc_feature (1)..(462): NCBI GI: 154293215 Blast Desc: BC1G_14590 [Botryotinia fuckeliana B05.10] gi|150845630|gb|EDN20823.1| BC1G_14590 [Botryotinia fuckeliana B05.10]
  misc_feature: Useful for introducing or modulating the production of volatile compounds
MGGIIMIIGTLIQITAYPTHAPLAQFIIGRIVTGVGNGINTSTIPTYQAECSKTSNRGLLICIQGGIIAFGTLIGKERNAYWIDYGSSFGPDDLVWRFPIAFQIVFGFALSVAMFWLPESPRWLLTHERYEEANKVIAGLRGYEMDSQETALERDIILDSIRASGVFGGKSTPFKALFTNGKTQHFRRMLLGASSQFMQQVGGCNAVIYFFPILCERFITIGDHNMALLLGGVNAIVYAIFVRNQYTIRPSVDSIMLATVSWFLIERVGRRKLFIWGTVGQGLSMVLAFAALIPGTSSAAIGTCVALFTYIASFGATWLPLPWLYPAEISPIMTRAKANAVSTCTNWLFNFFIVLITPILVTNESHPCLQTVPLKIGWGTFLFFAVLNSTFIPIIYFFYPETAYRSLEEIDIIFAKGYVEKISYVKAAKDLPLLSDAEVEEEALRYGLIDTAARGAVNASKKASGEVHVDSSSKKSFEGSGSKEEI

SEQ ID NO: 18212 - DNA, 955 bp, Muscodor strobelii
  misc_feature: SGI EST ID NO. CUFF.42902.0
  misc_feature: Variant of the nucleotide sequence at SEQ ID NO 18210
caggatctcgatgtaaagcaagacaaaggggtctgacatgttggatttattctcgctaggcttactggattgattacgggtcctcttttggccccgatgacctcgtttggaggtttcccattgctttccagatcgttttcggcttcgcgctgtctgtggctatgttctggcttcctgaatctccgaggtggctattgacccacgagcggtatgaagaggccaataaagtgatcgctggtctccgaggatacgaaatggatagccaggagactgctttagagcgcgacattatcctcgactcaattagggcgtctggcgtatttggagggaagagcactcccttcaaagcacttttcacaaacggcaagacgcaacactttcgacgcatgcttctgggtgccagcagccagttcatgcaacaagtcggtggatgcaacgccgtcatttattttttccctattctgtgcgaacggttcatcacaattggggaccataatatggctttattacttggaggtgtcaatgcaatagtctatgccatcttcgtacgtaatcagtatactatccgtccatcggtcgactcgatcatgctggttttagatgaaatgagagattttcagtatctcgtctgtatgctaactgccaacaggcaacagtatcatggtttctgatcgagcgagtcggtcgtagaaagctttttatttggggaactgtcggtcaaggattgagcatggtactggctttcgctgctctgatcccaggcacaagctctgcagctatcggcacctgcgttgcgctttttacgtacattgcaagttttggagctacctggctgccacttccttggctatatcccgctgaaataagtccaattatgacccgcgcaaaggccaatgcggtctcgacgtgtacaaactggctattcaactttttcatcgtattgattactcctatt

SEQ ID NO: 18213 - DNA, 897 bp, Muscodor strobelii
  misc_feature: SGI cDNA ID NO. 566101
  misc_feature: Elevated expression when VOC is produced
  misc_feature: Encodes the peptide sequence at SEQ ID NO 18214
atgcgcagccacccggtcgtatcatggttctgtagttgtctgctggtggtgctcgctgctgcgcagaccacgacgtcaactacagacacttcagcaacggcagcgtcaacgtctcaaacaattgcacctacaaccgattcagcaactagtgcgccgacaggttcgacaacgggaacgacgaccgggacagcgaccagctcgggatctggctcatatggctcaacgcctcctgatgttttgcttcaagttcccgagcttcatgtggggaagatcgaacttgatgttgacaatctccgtgcagagttgaacctcgctgcccaagttgcttcactcgtggaaatcaacgcaggggtccaggtgggtgtcactaaggtcaacattacgattgccgacgtgaatgcagaattggaactgatcatccgcttgggaaatcttgtgctgatgctatcatacgatattgtgaacaggacactggaatcattaaatctcaacccgcttctcatcaacataattgatgacgtagtggatcttgtcgatacagtggtcggagctgttgatggtctacttgggtctatcgtgaacggtgattcgaagattaacttcatcatcgacaaccttggaaacatcgtgcaagaggttgaaggtaccgcaggaaacttgttgagcagtattgtgggaaacttcgaacagaacatgacatatactggtgcacaacaggttctagacgggggcttaattcagaagacatattcctactcgccactaaatgcgcttgtaaacatcgtatttaatagccttaatcaagttgtgcaagccgttgtcgtcaaaagcaatggcagtagctcaacgtcatcgacagttacaccgacagccacccctgcaaggcgcaggtattag

SEQ ID NO: 18214 - protein, 298 aa, Muscodor strobelii
  misc_feature: SGI Peptide ID NO. 566101
  misc_feature (74)..(276): NCBI GI: 39972685 Blast Desc: MGG_07644 [Magnaporthe grisea 70-15] gi|145016859|gb|EDK01289.1| MGG_07644 [Magnaporthe grisea 70-15]
  misc_feature (18)..(276): NCBI GI: 46116108 Blast Desc: FG03896.1 [Gibberella zeae PH-1]
  misc_feature (71)..(275): NCBI GI: 85109139 Blast Desc: NCU08523 [Neurospora crassa OR74A] gi|28924391|gb|EAA33525.1| [Neurospora crassa OR74A]
  misc_feature (73)..(293): NCBI GI: 189210217 Blast Desc: conserved [Pyrenophora tritici-repentis Pt-1C-BFP] gi|187977533|gb|EDU44159.1| conserved [Pyrenophora tritici-repentis Pt-1C-BFP]
  misc_feature (7)..(276): NCBI GI: 169619152 Blast Desc: SNOG_12771 [Phaeosphaeria nodorum SN15] gi|160703759|gb|EAT80069.2| SNOG_12771 [Phaeosphaeria nodorum SN15]
  misc_feature (74)..(266): NCBI GI: 171685306 Blast Desc: protein product [Podospora anserina] gi|170942614|emb|CAP68266.1| protein product [Podospora anserina]
  misc_feature (74)..(265): NCBI GI: 169619154 Blast Desc: SNOG_12772 [Phaeosphaeria nodorum SN15] gi|111058950|gb|EAT80070.1| SNOG_12772 [Phaeosphaeria nodorum SN15]
  misc_feature (77)..(239): NCBI GI: 189210219 Blast Desc: conserved [Pyrenophora tritici-repentis Pt-1C-BFP] gi|187977534|gb|EDU44160.1| conserved [Pyrenophora tritici-repentis Pt-1C-BFP]
  misc_feature (77)..(168): NCBI GI: 108759987 Blast Desc: MXAN_4926 [Myxococcus xanthus DK 1622] gi|108463867|gb|ABF89052.1| MXAN_4926 [Myxococcus xanthus DK 1622]
  misc_feature (77)..(275): NCBI GI: 46116106 Blast Desc: FG03895.1 [Gibberella zeae PH-1]
  misc_feature: Useful for introducing or modulating the production of volatile compounds
MRSHPVVSWFCSCLLVVLAAAQTTTSTTDTSATAASTSQTIAPTTDSATSAPTGSTTGTTTGTATSSGSGSYGSTPPDVLLQVPELHVGKIELDVDNLRAELNLAAQVASLVEINAGVQVGVTKVNITIADVNAELELIIRLGNLVLMLSYDIVNRTLESLNLNPLLINIIDDVVDLVDTVVGAVDGLLGSIVNGDSKINFIIDNLGNIVQEVEGTAGNLLSSIVGNFEQNMTYTGAQQVLDGGLIQKTYSYSPLNALVNIVFNSLNQVVQAVVVKSNGSSSTSSTVTPTATPARRRY

SEQ ID NO: 18215 - DNA, 1333 bp, Muscodor strobelii
  misc_feature: SGI EST ID NO. CUFF.42906.0
  misc_feature: Variant of the nucleotide sequence at SEQ ID NO 18213
agcgatattgtgaacaggacactggaatcattaaatctcaacccgcttctcatcaacataattgatgacgtagtggatcttgtcgatacagtggtcggagctgttgatggtctacttgggtctatcgtgaacggtgattcgaagattaacttcatcatcgacaaccttggaaacatcgtgcaagaggttgaaggtaccgcaggaaacttgttgagcagtattgtgggaaacttcgaacagaacatgacatatactggtgcacaacaggttctagacgggggcttaattcagaagacatattcctactcgccactaaatgcgcttgtaaacatcgtatttaatagccttaatcaagttgtgcaagccgttgtcgtcaaaagcaatggcagtagctcaacgtcatcgacagttacaccgacagccacccctgcaaggcgcaggtattagagtgtccaataatatagctacggataattaatcacgatgactaattaagtacatatactctattgcgccgtttgtggctatattgtatcaaagatggtgaaaatcattgctggagacctagatcagtccatgtatgcaaaatgtttgtctacatgagtcgtaactacaaagaactgacatgaactatgtatactgcatggctcacgtctatgcctatgactccccgctgacaggttgaaccggtcccagaaaggggctacgtgtcagtcaacggatcagcgctggacaagtccttgaaaccaacattatcgcaattgggagagtgtcagaacccactgctcagagtttcgctcagtctcgctcgttaagtccctgaccaagctcgcaagtgcgtccacctgtcacttcctatagcctctgcacagcaagagactcaaatctcctctttgcttcccgaaccttcgaaactcttcttgctagaagagtcgacgtgtacttcaccactggctttcttggatgcattgactgcaccccgtgccgccgtgtcaataaggccatatctcaacgcttcctcttctacttcggcgtccgacaataacggcagatcctttgcagctttaacataggatattttctcgacatagcctttagcgaaaatgatgtcaatctcttccaaggatcgatatgctgtttcggggtagaaaaagtatataatcggtatgaaggtggagttgagcacggcaaagaataggaatgtcccccaaccaatctagccgccagaaacgtctcgcgttagtcacttgtcacttgtctgatctcaccttgaggggcaccgtctgaagacaaggatgtgattctcatgttcgacaggtacagttagtactta

SEQ ID NO: 18216 - DNA, 918 bp, Muscodor strobelii
  misc_feature: SGI cDNA ID NO. 566102
  misc_feature: Elevated expression when VOC is produced
  misc_feature: Encodes the peptide sequence at SEQ ID NO 18217
atgagtccgttcatcaggagaatcggtattttctacctcttactgaaactttctgggacactggctcaaagtaacgacggctacattggatacgagcttcatcaaagaggagatcccgagtcggtcgtttacgagacggcggacacaccaggtgttgatcttcccgaggaacctgacgtatttctcaacgcctcggtatctgtcggagagatcgacatcgaagtcgacaacatcacagcgaaggtcaaccttgatgcgaaggtgttgaacctgcttcacttcactgcaggcgtcgacgcttccatcgaccgcgtatcattgaagattcagaacgtcagtgccaaagtcctgctcgaagcgcgtctaggaaacgtcgtccagatggtaggagacgtactcaatgttattgacctaaatcctattgttgcgacactaggacaaggggtcggaaacatcgtcagcaatgtcaccggtgaactcggaggctcctccacgacaacgagcacgacaccttccgctacgaacacgaatagcaaacgagatgctctagattataatttgcagaacaatatcttgtactctgtcaatgattactccggccaatcccacacgaaccgagttttagcgcaaaacgggaccatttttgatgtcgcattagataacaatgggaacgagcatggtcgcaaagctgtggggttttacagcagagacatgactttcacgggtcacaatagatctattacgatagatggaaagaccgagttcgagctaggctaccactatgccccatttcccgggctggaggcgttcgcaaacatctacacgactaccgaaggacaggtcatcaagactagactcattgccgaagcagagggtgcaggaaccagtacagttagtgacgacgacgacgataattaa

SEQ ID NO: 18217 - protein, 305 aa, Muscodor strobelii
  misc_feature: SGI Peptide ID NO. 566102
  misc_feature (26)..(304): NCBI GI: 85109137 Blast Desc: NCU08522 [Neurospora crassa OR74A] gi|28924390|gb|EAA33524.1| conserved [Neurospora crassa OR74A]
  misc_feature (4)..(303): NCBI GI: 171685304 Blast Desc: protein product [Podospora anserina] gi|170942613|emb|CAP68265.1| protein product [Podospora anserina]
  misc_feature (22)..(303): NCBI GI: 39972683 Blast Desc: MGG_07643 [Magnaporthe grisea 70-15] gi|145016858|gb|EDK01288.1| MGG_07643 [Magnaporthe grisea 70-15]
  misc_feature (26)..(303): NCBI GI: 46116106 Blast Desc: FG03895.1 [Gibberella zeae PH-1]
  misc_feature (21)..(303): NCBI GI: 169619154 Blast Desc: SNOG_12772 [Phaeosphaeria nodorum SN15] gi|111058950|gb|EAT80070.1| SNOG_12772 [Phaeosphaeria nodorum SN15]
  misc_feature (24)..(301): NCBI GI: 189210219 Blast Desc: conserved [Pyrenophora tritici-repentis Pt-1C-BFP] gi|187977534|gb|EDU44160.1| conserved [Pyrenophora tritici-repentis Pt-1C-BFP]
  misc_feature (58)..(287): NCBI GI: 46116108 Blast Desc: FG03896.1 [Gibberella zeae PH-1]
  misc_feature (57)..(161): NCBI GI: 134103692 Blast Desc: SACE_7270 [Saccharopolyspora erythraea NRRL 2338] gi|133916315|emb|CAM06428.1| [Saccharopolyspora erythraea NRRL 2338]
  misc_feature (44)..(158): NCBI GI: 256802972 Blast Desc: SvirD4_19343 [Streptomyces viridochromogenes DSM 40736]
  misc_feature (57)..(161): NCBI GI: 239979286 Blast Desc: SalbJ_07609 [Streptomyces albus J1074]
  misc_feature: Useful for introducing or modulating the production of volatile compounds
MSPFIRRIGIFYLLLKLSGTLAQSNDGYIGYELHQRGDPESVVYETADTPGVDLPEEPDVFLNASVSVGEIDIEVDNITAKVNLDAKVLNLLHFTAGVDASIDRVSLKIQNVSAKVLLEARLGNVVQMVGDVLNVIDLNPIVATLGQGVGNIVSNVTGELGGSSTTTSTTPSATNTNSKRDALDYNLQNNILYSVNDYSGQSHTNRVLAQNGTIFDVALDNNGNEHGRKAVGFYSRDMTFTGHNRSITIDGKTEFELGYHYAPFPGLEAFANIYTTTEGQVIKTRLIAEAEGAGTSTVSDDDDDN

SEQ ID NO: 18218 - DNA, 1403 bp, Muscodor strobelii
  misc_feature: SGI EST ID NO. CUFF.42908.0
  misc_feature: Variant of the nucleotide sequence at SEQ ID NO 18216
tggcacagcaggtaccggacgcttggcaagcatggcaaccaatcgggtggtactagttcagatcaatctgttgatatcttgttttgcgcaagactgtaatttcatttagacgcagtcacatctagataggagctttaagcacatgatgcaccttgtcaattagatgcaagggcactgtcaatgccgcacctcctactccgcattgcgattgtgggatcgagatgactatgaagcacatcgcaattgcgcgatccgttcttctttttgcttgtacaagtagatatgatgagctgctgatgtatatccttccctcgcgctcgtgaagacatttcgaagttctccgtcgcccccagcaacaaggcttttgcgctccttactaccaaaatgagtccgttcatcaggagaatcggtattttctacctcttactgaaactttctgggacactggctcaaagtaacgacggctacattggatacgagcttcatcaaagaggagatcccgagtcggtcgtttacgagacggcggacacaccaggtgttgatcttcccgaggaacctgacgtatttctcaacgcctcggtatctgtcggagagatcgacatcgaagtcgacaacatcacagcgaaggtcaaccttgatgcgaaggtgttgaacctgcttcacttcactgcaggcgtcgacgcttccatcgaccgcgtatcattgaagattcagaacgtcagtgccaaagtcctgctcgaagcgcgtctaggaaacgtcgtccagatggtaggagacgtactcaatgttattgacctaaatcctattgttgcgacactaggacaaggggtcggaaacatcgtcagcaatgtcaccggtgaactcggaggctcctccacgacaacgagcacgacaccttccgctacgaacacgaatagcaaacgagatgctctagattataatttgcagaacaatatcttgtactctgtcaatgattactccggccaatcccacacgaaccgagttttagcgcaaaacgggaccatttttgatgtcgcattagataacaatgggaacgagcatggtcgcaaagctgtggggttttacagcagagacatgactttcacgggtcacaatagatctattacgatagatggaaagaccgagttcgagctaggctaccactatgccccatttcccgggctggaggcgttcgcaaacatctacacgactaccgaaggacaggtcatcaagactagactcattgccgaagcagagggtgcaggaaccagtacagttagtgacgacgacgacgataattaatgctaaattagactcatgtataacacactgctgcggacttcacgcactacttaattatatcgtagctgcaagccatataacatgccagattattggttgca

SEQ ID NO: 18219 - DNA, 1536 bp, Muscodor strobelii
  misc_feature: SGI cDNA ID NO. 566103
  misc_feature: Encodes the peptide sequence at SEQ ID NO 18220
atgtccgaaggaaaatacaagcggaaggtgggatgggcccagctggaagacccacttgtgaagcgacagaagcaagaggtgatcatcattgacgacgaagaagagaagaatgatggtatccatcacccgacagacaggagtagccgcaaaaacgaacatacacaacagttccaggacctcgagctgatcacacagacgcaaagaaacttgagtggagacattggggattggtctctacgaactcagaaactagagtttcagtatgagactttagaacaagcgctatgccttcagaaaacaaactccacggctctttctgcccaactccacaatgttgaacgcacatcaacacagcaagaccagattctcaacacgttacggcagcggatacaggagctggagcgcaaatcgactgctgcccaggataacaatgctccgagcgtgagagactctgctaccaagatagccgaaagtcaagggggaagcgaggatatagcaaccacgaagtcaattgcaagagttcagcagtctacgcaaggcatgagagatggaaagcagaatatttcggttcccgagacggtcaagaaaatgccggccgccctacgcttgtcacaacaggactttatgccttgcccgatgttgacgaatcgaggtcttggcaacttgttagtgaatatgaacggtatgtatggaagattccgcacaagaactcttaacggcattcctataacatctactaatttcttcccaaatcatcttcgagccctgtgcgaacttgattctaaggcacattcgagggacattcctttgttttgcgacacacgtaactttgcgttatttgacgtcgattatgtaatccgcggcggaagatctgctgcgtacattggatatcatccggactgcgcgtccgatagcagaagaagcagccatgacgaaatgactgctcaaggactccacgggcttcgcattctcgagatctcgtacgaagtcgcacaagggccgggaggcgcccaggaagtgctcacgaaagaaaaccagctgcaatcgagagcttcgggcctgaaggcatggcagaagatgaatagccccccgcgtttcgtctacgacctgggtcagctcttcctacaccgcagaggcagccacttgaaaggccatcgattcgacctgtggagcacgagatacaacgtagtcatcgacatcatccctccacacaagccagtgtggctagtactccgacctgagttcgagcctctctcgtcgcattcaaaacatcgcaccagtcagcaccagagcagcgaacttccttttccgagccgtcctgattggaaactagggggctctgccgcagcacaacttgccaaaggccttcaaaatctggaattcggcaatagatcgtttgtgcgcagttcaggggcttcgttcttcatcgcgtctgagcttgtcaccgagacactaccatgcgagaccgttcgactgaggtacaagacgccgaatctctgtgaggtgacagacgcaatggctgaaggacgctattaa

SEQ ID NO: 18220 - protein, 511 aa, Muscodor strobelii
  misc_feature: SGI Peptide ID NO. 566103
MSEGKYKRKVGWAQLEDPLVKRQKQEVIIIDDEEEKNDGIHHPTDRSSRKNEHTQQFQDLELITQTQRNLSGDIGDWSLRTQKLEFQYETLEQALCLQKTNSTALSAQLHNVERTSTQQDQILNTLRQRIQELERKSTAAQDNNAPSVRDSATKIAESQGGSEDIATTKSIARVQQSTQGMRDGKQNISVPETVKKMPAALRLSQQDFMPCPMLTNRGLGNLLVNMNGMYGRFRTRTLNGIPITSTNFFPNHLRALCELDSKAHSRDIPLFCDTRNFALFDVDYVIRGGRSAAYIGYHPDCASDSRRSSHDEMTAQGLHGLRILEISYEVAQGPGGAQEVLTKENQLQSRASGLKAWQKMNSPPRFVYDLGQLFLHRRGSHLKGHRFDLWSTRYNVVIDIIPPHKPVWLVLRPEFEPLSSHSKHRTSQHQSSELPFPSRPDWKLGGSAAAQLAKGLQNLEFGNRSFVRSSGASFFIASELVTETLPCETVRLRYKTPNLCEVTDAMAEGRY

SEQ ID NO: 18221 - DNA, 4748 bp, Muscodor strobelii
  misc_feature: SGI EST ID NO. CUFF.43000.0
  misc_feature: Variant of the nucleotide sequence at SEQ ID NO 18219
acggcacctcattgcttggctatttctaatatgctctatgctagttatgtaatccgcggcggaagatctgctgcgtacattggatatcatccggactgcgcgtccgatagcagaagaagcagccatgacgaaatgactgctcaaggactccacgggcttcgcattctcgagatctcgtacgaagtcgcacaagggccgggaggcgcccaggaagtgctcacgaaagaaaaccagctgcaatcgagagcttcgggcctgaaggcatggcagaagatgaatagccccccgcgtttcgtctacgacctgggtcagctcttcctacaccgcagaggcagccacttgaaaggccatcgattcgacctgtggagcacgagatacaacgtagtcatcgacatcatccctccacacaagccagtgtggctagtactccgacctgagttcgagcctctctcgtcgcattcaaaacatcgcaccagtcagcaccagagcagcgaacttccttttccgagccgtcctgattggaaactagggggctctgccgcagcacaacttgccaaaggccttcaaaatctggaattcggcaatagatcgtttgtgcgcagttcaggggcttcgttcttcatcgcgtctgagcttgtcaccgagacactaccatgcgagaccgttcgactgaggtacaagacgccgaatctctgtgaggtgacagacgcaatggctgaaggacgctattaaattcgagacgaattgtctactgtgggagcattgtttcccctagttttatcagctcgggttgattttcttatttgagttcaagtcatcaaatgtttctcacctcagtaactagtcgacatgatgaatgggaccatttgtcaaggtgatgatgtaagatagcattgatatacatcgttgtattccgcatgattgtggatgccgcacagtcgaggactcccgcggtactggatgctgcattatcatggcgttttgcaccatggtcatgttaacataaggatgtacttaggggtgacaatgctttgcgagcaagcacataagcacatactaaagtcatctggatcgatatttcgatgtctactctcggcattaataattcgctgcttttgagaatggtgtttcagaaagtatagcattccttgattatgactaattgaaacttatatagactacaatcacaatgcaatggtaactatcgggacagggatagatatcactattgggacgaaagagtaaatgtttttgaaagcggtgctcgacagcttggaattcggcgcagcatgcttagcgaaatcattcttcattctgtgtgaatttctttctcgagccggttgaagattgctgaatgcattaagaatgtaggctgtggggacgatcactaaaaaaaggtacgacttcatgaagattctattgtaagtaagaggagagagagtatgttgtgtaacatgatagccaatcaatttacagctgagcggcccgaaagacataagaatggaagcaaaacgatccgtgcgcacctgggcagatcaactccaattgaatcgggacgtgcaagggtacgtgctgtatcgcaacctccttggcagcatggcatgccgctggtgaacatgtaacaataccttaggtataggcaagcccccgtatgtagctctcactaactattttatttgacaggccctttagcaagaagcttcaaagccttttccttcctaaactgggcctacataccatgcaatttgatcaatgtcttcgcgacatctactatcacctacctagtagttaataataagccggattgtgactacctagaaccggcagccttaagtatcctgtgctcgtttcttggcgcctccaaattcctatcggcgttcgcttgggtggcagcgagagaagaggaaagaaacatttcgtgcgagttgtgtaggcgatcagcagtttctctagattgatgcattactcaggtctccatcttccgatgcaacctgaagcattgcaaccctcttcaatttcttagttgtcagcaatcattgccactttccgcgcaacagccgctctgtatctcaccgtttcccctcgactgcttactttttccacgcgccatgtcaaacaacccaacatcttgacactaaccaccaaggataatggcccagcatctcgcggcaccccagggcgcgaagcgggccttccctttcgcgtcgtccccaccagggttacatgcggatgattccgagagccgacgaccaccatacctacgacctcctcagccttctgtgaccggtggcctccagccgcctcatgttggcgttgcggttgtgaccatcgaaatgtttcgcgagtaccagagaaacatgggaactactatcgagaatcaaaccaatcaaatagctgaacttcgaggacgtgtacaggtattggaaggacggctccagtcttttgaagatgcagaagatatggctattgacgctgtgcgcgagatacgagaccaggtggttccacgagtcgataaacaccatgaaagccttggcactttgaccgttgctgtgaaccgtcaaaacaacatcttagaagcactagaaaatctgagtcaagagcttcgtgctcaacaaggccgaaccgatgtcacccgttccaatgcttggcgtcctgggcccctcggcgggaccaacgaccaagtgaagagtactctagatgaatttaagttgcagattaccacaagcttcgcgagccttggagagcatgagagaagactagcatctctggaaagaagcgatcgtattgcgcaagaacgtgtaagcatgcttgaacagaaaagtgagcgcgccctggaccctggccaaatatccgcggtgattcagcatcatcaacagcgcctagatgttttggggcgagaactacaacagtgtatcaaaattgcccaggaagcacagaccgtaagcgcaagtcgcaccaaggattgccagtgtgcggcgaccggaaatatgtgtgctagagaacaccacgtgaccagcgagaatcagggcaaagaaatttcgcggactaagtcagtaccgcttacacaagatgaagtatcgcttaacgaagatcctcaacgggtacaacagggtggagcgatatctgtaccccagtttggacaggttatccatcgcctggatgcaatagacaagcgcatgatgcctttagaagaacgaataggcatagtagagaaaggattcgaaaaactctcaaagtcagctgctactcctgaaaacgagaccaaagaactagactcggaggaagaaagtcaataccagatcctgatgcatacagattttcaacgctctgaggatttggcggggttgagaacaaacgaggacgcgcagctactcatgcaactgttctccgagaaagagaaatgcgatgatgcctgctatacggtccagcgtgcatgcgttcacatgtggtcttatcttctctgtcgaagtcggaaggaccccaggcttatttcggacttttggaggagtcctgactggaaagattttcccaccgtgctcgaacttgagcgaagtgacgctatgcctaatggcaagtatttcccgcgatatgtttacgagatcggtgaaatattcaatcgtaaattagccagcaagcatagtgggcgtcaggcaacacatcgttcgacgggatatcatttagtcgtggacgtgacatcacctcagaagtcattatggctcgtatgtgtctaccttccccgaagcaatgcggtattgacctggttgactgataaggccatgagcaaggaagtgagctgacataccatcatgactaggtatatcgatatgaggaggtgagtaatgacacaagaagcttgaaacaaacaatctcgtacaaacaggacaccttctggcacccatttgcagcagtatgcgaatttgatattgcgcaaatctttgagcgtttcgaagattggaagggagcggatacgcctctaggcagctatgtagcatccaaaaagctagtcaagcaaacagctgcgcttatcagaccaacattcattgagccagttcttcaagatgtccaagacagcattcgccgaggatgggattccaattcaacagtcgaagtctctggtaccgatgatacggcgcgatctaaaagagcgcgatagtcacaggacatgcatcaagaaggatgatatattaaaccttagctggatccagaagatgttacaagaattggcccatttgtgtccaaggtaacaggtggggatgagaatagagactcatgcggttagtgtctctatacttctacaaccgatgagcaagtgatgtcccccttaccggtgggctcagacaggtagtttcttgtgatgaaaggagattcttgcatcctaaatcttcgggaccaggtaatttacttcatcgtgtctgggttacagttggtcacaggccgggaagttctagaagcggatgatgcctcaagccgctcccgggaagaagagtgttgaaaagatatacctcccacttgtcctagctatcgggacaagtcgttatccgcgttggtgcatacaagctcgggagagacgactggctaggtcagtgacacctcaatgatgatcgcgagggaaaactttgtatatagacagtacacccacaagggcttgagaagacgttactaggtccgttgggtcaagctcataggacactctccggagctgtgtatttggcacggatagataaacaataatgaaactattcttcgac

SEQ ID NO: 18222 - DNA, 1911 bp, Muscodor strobelii
  misc_feature: SGI cDNA ID NO. 566104
  misc_feature: Reduced expression when VOC is produced
  misc_feature: Encodes the peptide sequence at SEQ ID NO 18223
atggcccagcatctcgcggcaccccagggcgcgaagcgggccttccctttcgcgtcgtccccaccagggttacatgcggatgattccgagagccgacgaccaccatacctacgacctcctcagccttctgtgaccggtggcctccagccgcctcatgttggcgttgcggttgtgaccatcgaaatgtttcgcgagtaccagagaaacatgggaactactatcgagaatcaaaccaatcaaatagctgaacttcgaggacgtgtacaggtattggaaggacggctccagtcttttgaagatgcagaagatatggctattgacgctgtgcgcgagatacgagaccaggtggttccacgagtcgataaacaccatgaaagccttggcactttgaccgttgctgtgaaccgtcaaaacaacatcttagaagcactagaaaatctgagtcaagagcttcgtgctcaacaaggccgaaccgatgtcacccgttccaatgcttggcgtcctgggcccctcggcgggaccaacgaccaagtgaagagtactctagatgaatttaagttgcagattaccacaagcttcgcgagccttggagagcatgagagaagactagcatctctggaaagaagcgatcgtattgcgcaagaacgtgtaagcatgcttgaacagaaaagtgagcgcgccctggaccctggccaaatatccgcggtgattcagcatcatcaacagcgcctagatgttttggggcgagaactacaacagtgtatcaaaattgcccaggaagcacagaccgtaagcgcaagtcgcaccaaggattgccagtgtgcggcgaccggaaatatgtgtgctagagaacaccacgtgaccagcgagaatcagggcaaagaaatttcgcggactaagtcagtaccgcttacacaagatgaagtatcgcttaacgaagatcctcaacgggtacaacagggtggagcgatatctgtaccccagtttggacaggttatccatcgcctggatgcaatagacaagcgcatgatgcctttagaagaacgaataggcatagtagagaaaggattcgaaaaactctcaaagtcagctgctactcctgaaaacgagaccaaagaactagactcggaggaagaaagtcaataccagatcctgatgcatacagattttcaacgctctgaggatttggcggggttgagaacaaacgaggacgcgcagctactcatgcaactgttctccgagaaagagaaatgcgatgatgcctgctatacggtccagcgtgcatgcgttcacatgtggtcttatcttctctgtcgaagtcggaaggaccccaggcttatttcggacttttggaggagtcctgactggaaagattttcccaccgtgctcgaacttgagcgaagtgacgctatgcctaatggcaagtatttcccgcgatatgtttacgagatcggtgaaatattcaatcgtaaattagccagcaagcatagtgggcgtcaggcaacacatcgttcgacgggatatcatttagtcgtggacgtgacatcacctcagaagtcattatggctcgtatgtgtctaccttccccgaagcaatgcggtattgacctggttgactgataaggccatgagcaaggaagacaccttctggcacccatttgcagcagtatgcgaatttgatattgcgcaaatctttgagcgtttcgaagattggaagggagcggatacgcctctaggcagctatgtagcatccaaaaagctagtcaagcaaacagctgcgcttatcagaccaacattcattgagccagttcttcaagatgtccaagacagcattcgccgaggatgggattccaattcaacagtcgaagtctctggtaccgatgatacggcgcgatctaaaagagcgcgatag

SEQ ID NO: 18223 - protein, 636 aa, Muscodor strobelii
  misc_feature: SGI Peptide ID NO. 566104
  misc_feature: Useful for introducing or modulating the production of volatile compounds
MAQHLAAPQGAKRAFPFASSPPGLHADDSESRRPPYLRPPQPSVTGGLQPPHVGVAVVTIEMFREYQRNMGTTIENQTNQIAELRGRVQVLEGRLQSFEDAEDMAIDAVREIRDQVVPRVDKHHESLGTLTVAVNRQNNILEALENLSQELRAQQGRTDVTRSNAWRPGPLGGTNDQVKSTLDEFKLQITTSFASLGEHERRLASLERSDRIAQERVSMLEQKSERALDPGQISAVIQHHQQRLDVLGRELQQCIKIAQEAQTVSASRTKDCQCAATGNMCAREHHVTSENQGKEISRTKSVPLTQDEVSLNEDPQRVQQGGAISVPQFGQVIHRLDAIDKRMMPLEERIGIVEKGFEKLSKSAATPENETKELDSEEESQYQILMHTDFQRSEDLAGLRTNEDAQLLMQLFSEKEKCDDACYTVQRACVHMWSYLLCRSRKDPRLISDFWRSPDWKDFPTVLELERSDAMPNGKYFPRYVYEIGEIFNRKLASKHSGRQATHRSTGYHLVVDVTSPQKSLWLVCVYLPRSNAVLTWLTDKAMSKEDTFWHPFAAVCEFDIAQIFERFEDWKGADTPLGSYVASKKLVKQTAALIRPTFIEPVLQDVQDSIRRGWDSNSTVEVSGTDDTARSKRAR

SEQ ID NO: 18224 - DNA, 4748 bp, Muscodor strobelii; identical to SEQ ID NO: 18221
  misc_feature: SGI EST ID NO. CUFF.43000.0
  misc_feature: Variant of the nucleotide sequence at SEQ ID NO 18222

SEQ ID NO: 18225 - DNA, 711 bp, Muscodor strobelii
  misc_feature: SGI cDNA ID NO. 566105
  misc_feature: Encodes the peptide sequence at SEQ ID NO 18226
atggcaggaatatccatacggcaatggatccgctggcttccagatcgagcgtcagagcccacatccaccttggtgctcacctcacctcagcgtcgcttcgttgacatacgcatatttaaagccatctccaaagacgaggaggaaactcctgaggacctttcggcttcacagctcgactgggcctttgctggcatatcatcttctggaaccaattccgagaatgtaaaatggtctaaatgggtccatatggttgactctagaacgaaaatgccggagacggttgtggatgaaggcaaaatcgttccgcaggataacgagcacaccctcgagtgtggacgtatgatcaatccaagcacagggaaactgacagactacgaagaattgtggttagacaaggaaattgaaagtatctccaatagctctgttagccccaggtcaactgcacgatgtgttgtatatgagttaaagggcgaaataagcgaaggaggtggcatggttgtatttcttgggcgatattgccaagggattgtgaaaataggcgatcagcttgcagtggagaggtggatatggactggtgactggaagcaggctttcagctctggcgatctttggatgccttgcgctgaagcaatgaactctgaggcgtttattggaaccaccgtcgagcgtgaaggtcaggtctggaccgtagtggagtcatgcgacatatga

SEQ ID NO: 18226 - protein, 236 aa, Muscodor strobelii
  misc_feature: SGI Peptide ID NO. 566105
  misc_feature (1)..(232): NCBI GI: 256729486 Blast Desc: NECHADRAFT_47547 [Nectria haematococca mpVI 77-13-4]
  misc_feature (3)..(232): NCBI GI: 116194958 Blast Desc: CHGG_04077 [Chaetomium globosum CBS 148.51] gi|88179990|gb|EAQ87458.1| CHGG_04077 [Chaetomium globosum CBS 148.51]
  misc_feature (1)..(234): NCBI GI: 46117172 Blast Desc: FG04428.1 [Gibberella zeae PH-1]
  misc_feature (13)..(232): NCBI GI: 189205090 Blast Desc: conserved [Pyrenophora tritici-repentis Pt-1C-BFP] gi|187985979|gb|EDU51467.1| conserved [Pyrenophora tritici-repentis Pt-1C-BFP]
  misc_feature (13)..(211): NCBI GI: 169610167 Blast Desc: SNOG_08179 [Phaeosphaeria nodorum SN15] gi|111063335|gb|EAT84455.1| SNOG_08179 [Phaeosphaeria nodorum SN15]
  misc_feature (1)..(136): NCBI GI: 171691606 Blast Desc: protein product [Podospora anserina] gi|170945751|emb|CAP71864.1| protein product [Podospora anserina]
  misc_feature (24)..(171): NCBI GI: 145601957 Blast Desc: MGG_05301 [Magnaporthe grisea 70-15] gi|145010415|gb|EDJ95071.1| MGG_05301 [Magnaporthe grisea 70-15]
  misc_feature (17)..(234): NCBI GI: 156058085 Blast Desc: SS1G_04774 [Sclerotinia sclerotiorum 1980] gi|154702559|gb|EDO02298.1| SS1G_04774 [Sclerotinia sclerotiorum 1980]
  misc_feature (4)..(192): NCBI GI: 85107695 Blast Desc: NCU07907 [Neurospora crassa OR74A] gi|28924029|gb|EAA33187.1| [Neurospora crassa OR74A]
  misc_feature (4)..(232): NCBI GI: 146421266 Blast Desc: PGUG_02254 [Pichia guilliermondii ATCC 6260]
MAGISIRQWIRWLPDRASEPTSTLVLTSPQRRFVDIRIFKAISKDEEETPEDLSASQLDWAFAGISSSGTNSENVKWSKWVHMVDSRTKMPETVVDEGKIVPQDNEHTLECGRMINPSTGKLTDYEELWLDKEIESISNSSVSPRSTARCVVYELKGEISEGGGMVVFLGRYCQGIVKIGDQLAVERWIWTGDWKQAFSSGDLWMPCAEAMNSEAFIGTTVEREGQVWTVVESCDI

SEQ ID NO: 18227 - DNA, 1001 bp, Muscodor strobelii
  misc_feature: SGI EST ID NO. CUFF.42911.0
  misc_feature: Variant of the nucleotide sequence at SEQ ID NO 18225
cgaatatgaaaagtcccagtcgctcaattgctagtacaacaattagctattgttccccttcccgatagcttctcatctgaagcgtcacacaatggcaggaatatccatacggcaatggatccgctggcttccagatcgagcgtcagagcccacatccaccttggtgctcacctcacctcagcgtcgcttcgttgacatacgcatatttaaagccatctccaaagacgaggaggaaactcctgaggacctttcggcttcacagctcgactgggcctttgctggcatatcatcttctggaaccaattccgagaatgtaaaatggtctaaatgggtccatatggttgactctagaacgaaaatgccggagacggttgtggatgaaggcaaaatcgttccgcaggataacgagcacaccctcgagtgtggacgtatgatcaatccaagcacagggaaactgacagactacgaagaattgtggttagacaaggaaattgaaagtatctccaatagctctgttagccccaggtcaactgcacgatgtgttgtatatgagttaaagggcgaaataagcgaaggaggtggcatggttgtatttcttgggcgatattgccaagggattgtgaaaataggcgatcagcttgcagtggagaggtggatatggactggtgactggaagcaggctttcagctctggcgatctttggatgccttgcgctgaagcaatgaactctgaggcgtttattggaaccaccgtcgagcgtgaaggtcaggtctggaccgtagtggagtcatgcgacatatgatgaagataacaaatgatatgagctctgtccccagtgatcttatggctgtttacttcgtttctaatttcgacagagctttctctgcctcctcgaaagcgttgtatcggaaaagcagcttgcgagactcatctccccagggcatttccccaggtgataatagaggcccgtcatagaaacgccgaatctccttgacgacatc

SEQ ID NO: 18228 - DNA, 1224 bp, Muscodor strobelii
  misc_feature: SGI cDNA ID NO. 566106
  misc_feature: Encodes the peptide sequence at SEQ ID NO 18229
atgccccgttatcttcaagccggcgtagcaggcgcgggcatcgctgggttgagcgctgcaatcgcgcttcgccgtgccggctttgaagtcgaagtcttcgagcggttgcggcgctggggtttcgactttgagaaggcgggtgccgtgaaaaatgtatgcacccggtatggtgatgctagagaaatgaacatagggcttgagtttcgatacgaggatattgaagagagcctcggtgcgatgagttggagtcttcatcgggttgacttacatcgacagctcagagagattgctactgcaccgtgtagcgacgaatacagtaatggggaaataaatggccagaagatcgacactccagtcaagatccgactaggctgtgaggtcaagggagtagattgcgagattggtgccatgaaactaaaagatggaagtgaagtggtgaaggacttggtgatcattgcggatggagcacatagtgcattgctttctgattttgtcggatttaatgtcttacctttgccgacaaacagatcaatctatcggtggcttgtaagtatggaagacattctcgctgacgaggagctcgcgaggctatatcgaaatcatcctcctggcttctctggcttcttagatgcggaaaagggcaccttatgggttaattatccttgtcgacagggcaaattgctaaacaatgctgtggttcatgccacggagagtcaagataatgcggcgagtagaaagaacgggcaaacgcatgaaggtaacggtaacggtgacggccgatcaatatggcatgctccagcaacgaaggaagctgtcttgaagacactttcgaattttcatccagctcttcgccgcgtcgtttctatggcttctgaagacggcattcgagtacatgaactcttcaagcgcccatcactggaaaactttgtgcgggggcgtgttgcagtggtaggtgattgtgctcatgtcatgatgccgacatatgctgcaggaggaggggtttccatcgagagtgcgggcgttttagaagtaagtaggctgctctccaatgccggaccacaagggcttagtgtggatgtcgtcaaggagattcggcgtttctatgacgggcctctattatcacctggggaaatgccctggggagatgagtctcgcaagctgcttttccgatacaacgctttcgaggaggcagagaaagctctgtcgaaattagaaacgaagtaa

SEQ ID NO: 18229 - protein, 407 aa, Muscodor strobelii
  misc_feature: SGI Peptide ID NO. 566106
  misc_feature (4)..(368): Pfam Id: PF01494 Pfam Desc: FAD binding domain
  misc_feature (14)..(34): Pfam Id: PF01593 Pfam Desc: Flavin containing amine oxidoreductase
  misc_feature (6)..(35): Pfam Id: PF01266 Pfam Desc: FAD dependent oxidoreductase
  misc_feature (6)..(405): NCBI GI: 85068378 Blast Desc: NCU08050 [Neurospora crassa OR74A] gi|28926986|gb|EAA35945.1| [Neurospora crassa OR74A]
  misc_feature (82)..(403): NCBI GI: 170940387 Blast Desc: protein product [Podospora anserina]
  misc_feature (17)..(407): NCBI GI: 46126501 Blast Desc: FG07628.1 [Gibberella zeae PH-1]
  misc_feature (5)..(361): NCBI GI: 156061775 Blast Desc: SS1G_03033 [Sclerotinia sclerotiorum 1980] gi|154700434|gb|EDO00173.1| SS1G_03033 [Sclerotinia sclerotiorum 1980]
  misc_feature (9)..(342): NCBI GI: 121712252 Blast Desc: salicylate hydroxylase, [Aspergillus clavatus NRRL 1] gi|119401893|gb|EAW12315.1| salicylate hydroxylase, [Aspergillus clavatus NRRL 1]
  misc_feature (9)..(337): NCBI GI: 145607870 Blast Desc: MGG_10014 [Magnaporthe grisea 70-15] gi|145015355|gb|EDJ99891.1| MGG_10014 [Magnaporthe grisea 70-15]
  misc_feature (5)..(344): NCBI GI: 169596386 Blast Desc: SNOG_00952 [Phaeosphaeria nodorum SN15] gi|111071327|gb|EAT92447.1| SNOG_00952 [Phaeosphaeria nodorum SN15]
  misc_feature (24)..(342): NCBI GI: 119473855 Blast Desc: salicylate hydroxylase, [Neosartorya fischeri NRRL 181] gi|119406956|gb|EAW16906.1| salicylate hydroxylase, [Neosartorya fischeri NRRL 181]
  misc_feature (5)..(369): NCBI GI: 67541144 Blast Desc: AN6742.2 [Aspergillus nidulans FGSC A4] gi|40739370|gb|EAA58560.1| AN6742.2 [Aspergillus nidulans FGSC A4] gi|259480334|tpe|CBF71369.1| TPA: salicylate hydroxylase, A4]
  misc_feature (5)..(401): NCBI GI: 212541694 Blast Desc: monoxygenase, [Penicillium marneffei ATCC 18224] gi|210068301|gb|EEA22393.1| monoxygenase, [Penicillium marneffei ATCC 18224]
  misc_feature (131)..(367): SWISSPROT Homolog: EC 1.14.13.90 Zeaxanthin epoxidase
MPRYLQAGVAGAGIAGLSAAIALRRAGFEVEVFERLRRWGFDFEKAGAVKNVCTRYGDAREMNIGLEFRYEDIEESLGAMSWSLHRVDLHRQLREIATAPCSDEYSNGEINGQKIDTPVKIRLGCEVKGVDCEIGAMKLKDGSEVVKDLVIIADGAHSALLSDFVGFNVLPLPTNRSIYRWLVSMEDILADEELARLYRNHPPGFSGFLDAEKGTLWVNYPCRQGKLLNNAVVHATESQDNAASRKNGQTHEGNGNGDGRSIWHAPATKEAVLKTLSNFHPALRRVVSMASEDGIRVHELFKRPSLENFVRGRVAVVGDCAHVMMPTYAAGGGVSIESAGVLEVSRLLSNAGPQGLSVDVVKEIRRFYDGPLLSPGEMPWGDESRKLLFRYNAFEEAEKALSKLETK

SEQ ID NO: 18230 - DNA, 153 bp, Muscodor strobelii
  misc_feature: SGI EST ID NO. CUFF.42920.0
  misc_feature: Variant of the nucleotide sequence at SEQ ID NO 18228
aaaagatggaagtgaagtggtgaaggacttggtgatcattgcggatggagcacatagtgcattgctttctgattttgtcggatttaatgtcttacctttgccgacaaacagatcaatctatcggtggcttgtaagtatggaagacattctcgc

SEQ ID NO: 18231 - DNA, 2202 bp, Muscodor strobelii
  misc_feature: SGI cDNA ID NO. 566107
  misc_feature: Reduced expression when VOC is produced
  misc_feature: Encodes the peptide sequence at SEQ ID NO 18232
atgagcgaccagccaccgccgccgccgccgcacggctcaaacccacgagcgtccacgagcccagacctcccgcctggaaagtacgacatattcatcataccgccgcactcgtccggcgccggcttcctctacctcccctccctgaagcccaatgccaacagtttcgccgctgggtttgcctccgcgctggtgctggtcgtgctgttccagagcatggcgcctgccttcagagtctggtggagcaacttccagggcatgggcaacatgggcatgatgttgctggtcatcgcagttggcgttggcgcatgggctctgggtagaacacagaacgaacgcggcccgtcacagggcgggaacggcggctccagccattcgtggagttacaacccggggagcggtggccattcgagcggcccccgttcaggtgctgggtcatcttcgagttccagaccgcctgacgatgatggcgctccaccccctccaccccctcacggctcaccgccgcctcgtcaatccgggccaccacccgaggcgcacgggtcagaaaggcccaagtcctcgtggcagcagcgccctgacgccgatgcctcctcacagggctcttgggagaaggccagggaggaaactcgcaagaaggaagaggagaagaaagccaaagaggccgagcagcgtaagaaagaggctgatcaaaggcggagagaagaggtagctaagcgtgtgaaggaacttcgagaaaaggaagcaagagaaagggcgaagagagaaaaggaggcaagagagaagagagagcaggaggatcgcgaaaggaacgagcgcgagagactggccagagagaaactagcccgagaagcacgcgcaagggaggatcaagaacgggaagccagggaaagggcggagagggagctgcgtgaaaggcaggccagggaaaaggcagagaccgaagcccgtgaggccaaagagagggcggagagagaagcgcgcgagaaggagcagcgggaaaacgaggagcgagagcgcacgcagagagataaggcgcagaaggaaaaggagctgcgggaacgaagagctcaagaagcgagggagcgagtgctgcgggagcgactggagcacgagaagacaatccgagagaagctcgagcgcgaagccaaagagcgcgaggcagcgcggctcagagaggcccaggcatccaaggtggcagaagaagccaaagccaaggaatccgaagctcccagaaagagcacctacgctttctcctcagtcggtgagaagacgaacccctggccgaatgggaagccacccacgcaagctcctccatcgccaacgaagcctccaccttcagcagcatctacgccgacacctaacgcagcaaggcgacctccgccgcccacggctaagtcatttcgtggtacagatgaggacgcatactcctaccgcccatatgaccaacctaaagcgcattcgcgaaggagatcaggcgagacagtcttcacagagtcctcgtacgcagcgtctcagtcgacctcgaggactactccgccaccatccatgcgcgcaccatactccacaaaggatcctaacaagattgtgatcaaggctgtctatgcctttcttaaccaatactctaagacgcctgcttcgcagctcctctccggcctgcacccggtgacggacggtctgatattgcgtattacgacagagggcctgttcattgatgatgatttgcgaggagtcccacagagagaatgggacgtaaaggcctggacgctgaagactatggggatttattgtccctcgcagatctcgaatgactccaattctgggcggcagccgaacaaatcaggaggtcgcttcaagttttcggcacgtggtcaaccgaagccgctcacaggagaagaggccaaaaactacctggatgacttactagactcctgcaaggacaactgtcgtctgggacctcaccgcggcgcaaaatccactcaaggtagcgaacggaagcaacgaggcttacatgtgcttcaagcgaccctcaaagacgcagaaggcaaacgttatctgttcgttatgccagaagaagagggctggaaagttgccgttgccctccagcgccttcgagaaggaagccaagctcggcagctaggcatgggcattcagcccatgacggcggaagaagctggtggcatgatggaaaacgtcgggtggtaa

SEQ ID NO: 18232 - protein, 733 aa, Muscodor strobelii
  misc_feature: SGI Peptide ID NO. 566107
  misc_feature (20)..(733): NCBI GI: 156051518 Blast Desc: SS1G_07166 [Sclerotinia sclerotiorum 1980] gi|154704944|gb|EDO04683.1| SS1G_07166 [Sclerotinia sclerotiorum 1980]
  misc_feature (199)..(733): NCBI GI: 256732856 Blast Desc: NECHADRAFT_79485 [Nectria haematococca mpVI 77-13-4]
  misc_feature (411)..(733): NCBI GI: 85086616 Blast Desc: NCU00241 [Neurospora crassa OR74A] gi|28918807|gb|EAA28476.1| NCU00241 [Neurospora crassa OR74A]
  misc_feature (473)..(733): NCBI GI: 171685576 Blast Desc: protein product [Podospora anserina] gi|170942749|emb|CAP68402.1| protein product [Podospora anserina]
  misc_feature (441)..(732): NCBI GI: 225556676 Blast Desc: conserved [Ajellomyces capsulatus G186AR]
  misc_feature (394)..(733): NCBI GI: 239606809 Blast Desc: conserved [Ajellomyces dermatitidis ER-3]
  misc_feature (441)..(733): NCBI GI: 226288704 Blast Desc: conserved [Paracoccidioides brasiliensis Pb18]
  misc_feature (411)..(733): NCBI GI: 116208220 Blast Desc: CHGG_03403 [Chaetomium globosum CBS 148.51] gi|88184000|gb|EAQ91468.1| CHGG_03403 [Chaetomium globosum CBS 148.51]
  misc_feature (450)..(733): NCBI GI: 225681561 Blast Desc: conserved [Paracoccidioides brasiliensis Pb03]
  misc_feature (394)..(716): NCBI GI: 261197559 Blast Desc: conserved [Ajellomyces dermatitidis SLH14081] gi|239595812|gb|EEQ78393.1| conserved [Ajellomyces dermatitidis SLH14081]
  misc_feature: Useful for introducing or modulating the production of volatile compounds
MSDQPPPPPPHGSNPRASTSPDLPPGKYDIFIIPPHSSGAGFLYLPSLKPNANSFAAGFASALVLVVLFQSMAPAFRVWWSNFQGMGNMGMMLLVIAVGVGAWALGRTQNERGPSQGGNGGSSHSWSYNPGSGGHSSGPRSGAGSSSSSRPPDDDGAPPPPPPHGSPPPRQSGPPPEAHGSERPKSSWQQRPDADASSQGSWEKAREETRKKEEEKKAKEAEQRKKEADQRRREEVAKRVKELREKEARERAKREKEAREKREQEDRERNERERLAREKLAREARAREDQEREARERAERELRERQAREKAETEAREAKERAEREAREKEQRENEERERTQRDKAQKEKELRERRAQEARERVLRERLEHEKTIREKLEREAKEREAARLREAQASKVAEEAKAKESEAPRKSTYAFSSVGEKTNPWPNGKPPTQAPPSPTKPPPSAASTPTPNAARRPPPPTAKSFRGTDEDAYSYRPYDQPKAHSRRRSGETVFTESSYAASQSTSRTTPPPSMRAPYSTKDPNKIVIKAVYAFLNQYSKTPASQLLSGLHPVTDGLILRITTEGLFIDDDLRGVPQREWDVKAWTLKTMGIYCPSQISNDSNSGRQPNKSGGRFKFSARGQPKPLTGEEAKNYLDDLLDSCKDNCRLGPHRGAKSTQGSERKQRGLHVLQATLKDAEGKRYLFVMPEEEGWKVAVALQRLREGSQARQLGMGIQPMTAEEAGGMMENVGW

SEQ ID NO: 18233 - DNA, 3369 bp, Muscodor strobelii
  misc_feature: SGI EST ID NO. CUFF.43056.0
  misc_feature: Variant of the nucleotide sequence at SEQ ID NO 18231
tgcaaattggaaatttaactgatcccagacatttgggtaggggccatactgggctggggatgtgctagcaggtgatcagacgttgcttggcctgttgtcactggcccgttcgtctggcgcgcgactgtcgttgcatccatctccaagcgagtcccaccagcccgactgtgacttgtccgtttctcgacacagagctccgactctcttcgccagacaaaacaaacattggaagccggggagtgtcgagactttggacagctccatccatccatccattcatccacctacccatcaacatcgtgcatatttagactttgccagacaacctgcatggcttgaccacagccaccgcactgcgtctgctccctcattttgttcgtttttgttttctttctgcaagttgctgcatctcgtccggcgttctgttccatgctacccgatccgtcgcattgcctgctgccttgttgtgataccccttgacgaattacgatccctcacgcccctctgacgatatccaccaccttctcgcgcaacctgcagatatacgcactcggctccccacgcgccatcccctccgcacatctgcgtgcgcctccctgtgcgagtcgctagccaggcgacagtggtgcgaccatgagcgaccagccaccgccgccgccgccgcacggctcaaacccacgagcgtccacgagcccagacctcccgcctggaaagtacgacatattcatcataccgccgcactcgtccggcgccggcttcctctacctcccctccctgaagcccaatgccaacagtttcgccgctgggtttgcctccgcgctggtgctggtcgtgctgttccagagcatggcgcctgccttcagagtctggtggagcaacttccagggcatgggcaacatgggcatgatgttgctggtcatcgcagttggcgttggcgcatgggctctgggtagaacacagaacgaacgcggcccgtcacagggcgggaacggcggctccagccattcgtggagttacaacccggggagcggtggccattcgagcggcccccgttcaggtgctgggtcatcttcgagttccagaccgcctgacgatgatggcgctccaccccctccaccccctcacggctcaccgccgcctcgtcaatccgggccaccacccgaggcgcacgggtcagaaaggcccaagtcctcgtggcagcagcgccctgacgccgatgcctcctcacagggctcttgggagaaggccagggaggaaactcgcaagaaggaagaggagaagaaagccaaagaggccgagcagcgtaagaaagaggctgatcaaaggcggagagaagaggtagctaagcgtgtgaaggaacttcgagaaaaggaagcaagagaaagggcgaagagagaaaaggaggcaagagagaagagagagcaggaggatcgcgaaaggaacgagcgcgagagactggccagagagaaactagcccgagaagcacgcgcaagggaggatcaagaacgggaagccagggaaagggcggagagggagctgcgtgaaaggcaggccagggaaaaggcagagaccgaagcccgtgaggccaaagagagggcggagagagaagcgcgcgagaaggagcagcgggaaaacgaggagcgagagcgcacgcagagagataaggcgcagaaggaaaaggagctgcgggaacgaagagctcaagaagcgagggagcgagtgctgcgggagcgactggagcacgagaagacaatccgagagaagctcgagcgcgaagccaaagagcgcgaggcagcgcggctcagagaggcccaggcatccaaggtggcagaagaagccaaagccaaggaatccgaagctcccagaaagagcacctacgctttctcctcagtcggtgagaagacgaacccctggccgaatgggaagccacccacgcaagctcctccatcgccaacgaagcctccaccttcagcagcatctacgccgacacctaacgcagcaaggcgacctccgccgcccacggctaagtcatttcgtggtacagatgaggacgcatactcctaccgcccatatgaccaacctaaagcgcattcgcgaaggagatcaggcgagacagtcttcacagagtcctcgtacgcagcgtctcagtcgacctcgaggactactccgccaccatccatgcgcgcaccatactccacaaaggatcctaacaagattgtgatcaaggctgtctatgcctttcttaaccaatactctaagacgcctgcttcgcagctcctctccggcctgcacccggtgacggacggtctgatattgcgtattacgacagagggcctgttcattgatgatgatttgcgaggagtcccacagagagaatgggacgtaaaggcctggacgctgaagactatggggatttattgtccctcgcagatctcgaatgactccaattctgggcggcagccgaacaaatcaggaggtcgcttcaagttttcggcacgtggtcaaccgaagccgctcacaggagaagaggccaaaaactacctggatgacttactagactcctgcaaggacaactgtcgtctgggacctcaccgcggcgcaaaatccactcaaggtagcgaacggaagcaacgaggcttacatgtgcttcaagcgaccctcaaagacgcagaaggcaaacgttatctgttcgttatgccagaagaagagggctggaaagttgccgttgccctccagcgccttcgagaaggaagccaagctcggcagctaggcatgggcattcagcccatgacggcggaagaagctggtggcatgatggaaaacgtcgggtggtaaggacctgttttgagtgttacgaggttatgatggatgccattggaatgcgaggtttcgtggcgccacattccacacggcgttgtactgatttgtttgttattgatgcatggcgaggcgctgcatggtggagcgaggctgtggcatgttgtgttcattctgctgcataccggcatggattaggtgattgatgcatttacagtcagctagaaatctgcagagcggcgcgcagtctactgtgcggacgtattgatgaattccagaacgaaatgaatcagaatcacagcatcatgtttgcgactgccgtcatattactcttgcttgcattcttgattggaaatcgggatattaagagtgttgctcttcgttatgaccatgatggcggcatggcctcaggacaggcgatttcgactccggcccaatctttcatacagatttccccatatcctcttcaagattgtaacgacatcttaagtcatcatcgtaaatcatgacaagcagttctgcagtccagagtcatttcatcatataataagc

SEQ ID NO: 18234 - DNA, 1845 bp, Muscodor strobelii
  misc_feature: SGI cDNA ID NO. 566108
  misc_feature: Encodes the peptide sequence at SEQ ID NO 18235
atgggtacctcaagcgaactggagcgtgtccccacgacggacgagaagtcgcacgtccctgtcgacgacactcatgccgtctacacagaccccaacccgggcgaggactacgagggcaagccgaccgaggaggagctgacgacccttcgccgtgtgccgggcaagctccccatcgtcgcctacttgatctgcatcgtcgagttttgcgagcgtgcttcctactatggcatccagcccctgatttccaactacgtcaaccgacccctgcccgttggcggaaacggttatggtgcccctccccagggtacccagcagactgccggtgccttgggtctcggacaggtcactgccaacgctgtcagccagtctttcagtctgttggcctacgccctgcccctgttcttcggctggctttccgactctaggaccggccgcttcaagctgatttgctggggtgtcggtgtcttcggtgttgcccacgttctcatggttgccgctggtgctaagtctctgcttgccgatggcagtgccaagggaccttacttcttgtccctgtacggtctgtctatcggtgctgccatgttcaagcccaacgtctcgcctctgctgctcgaccagatcgtcaccaatgtccccaaggtcatcacccttaagagcggtgagcgtgtcattgaggatcctgaagccacaaccgagcgagtcatgctttggttctacctgttgatcaacatcggtggtttcttcggtgttgccacggcttacgcggagaagtacatcggttggtggttggccttcttgctacctcttctggtctatctccctcttcccttcctcttgtggttcctgaagagccgcctgattctccacccccctgctggcagtgatcttcctgatgtcttccgcgttctcggcgtcgtcttccgacgtggtggcctcaagagaatcggtcgctccgggttctgggatttggctaagcccagcagcatcgccgctgctggtgtcgacattaaggtcaaatggaacgacgactttgtcgacgatgtgcgccgggcattccaggcttcaggcatgttctgcttcttccctatccagtatctcaatgacaatggtatcggttctgctgccagttacctgtccacggccctgacgaccaacggtgtgcctaacgacgtcatttccaacttcaactcgctcagtatcattgcctgcgcccccattctcaactacggcctttaccctctcctccgcaagtggaacgttcactttggacctgtagcacgtatcactttcggtatcttcctgtcttccgtcggtgctattggatacactgtcctgcagcacttcgcttaccagcaatctccctgcggaaacatggccacgtctaattgtgacgacggcttcggtgtagctcctatcactatttggtggatggctatcccttacggtattggtggtatttctgagttgttcatcaacgttcccgcctacggtatcgcgtactcccgcgctcccgtcaatatgagaggtgttgtgtcggccatcaacttgttcaacactgctgttgcttacatcattggtctcgcctcgtcgaccgttatcaccgatccttatttggtttgggacttcggtggcccagccatcgctggtttcgtcttgtccgtcgtcttttacttcaccttccgtcacatcgacaaagaggagtacactgtcaaccaggacggaaactaccacctggacctcactggcaccaccaaccccgtctccgagaccgaggctaacaagaccatcaacgagccccccgctatcagtgcgaatgaggagatgatgatctctcagaagcagtag

SEQ ID NO: 18235 - protein, 614 aa, Muscodor strobelii
  misc_feature: SGI Peptide ID NO. 566108
  misc_feature (63)..(527): Pfam Id: PF07690 Pfam Desc: Major Facilitator Superfamily
  misc_feature (146)..(519): Pfam Id: PF00854 Pfam Desc: POT family
  misc_feature (386)..(519): Pfam Id: PF00854 Pfam Desc: POT family
  misc_feature (146)..(206): Pfam Id: PF00854 Pfam Desc: POT family
  misc_feature (3)..(614): NCBI GI: 116200253 Blast Desc: CHGG_08282 [Chaetomium globosum CBS 148.51] gi|88179561|gb|EAQ87029.1| CHGG_08282 [Chaetomium globosum CBS 148.51]
  misc_feature (6)..(572): NCBI GI: 85110721 Blast Desc: NCU08738 [Neurospora crassa OR74A] gi|28925284|gb|EAA34363.1| conserved [Neurospora crassa OR74A] gi|38524231|emb|CAE75697.1| PEPTIDE TRANSPORTER PTR2 [Neurospora
  misc_feature (14)..(614): NCBI GI: 169772231 Blast Desc: [Aspergillus oryzae RIB40] gi|83768444|dbj|BAE58583.1| protein product [Aspergillus oryzae]
  misc_feature (7)..(614): NCBI GI: 169624369 Blast Desc: SNOG_15443 [Phaeosphaeria nodorum SN15] gi|160705156|gb|EAT77108.2| SNOG_15443 [Phaeosphaeria nodorum SN15]
  misc_feature (11)..(614): NCBI GI: 67903856 Blast Desc: AN8915.2 [Aspergillus nidulans FGSC A4] gi|40744973|gb|EAA64129.1| AN8915.2 [Aspergillus nidulans FGSC A4] gi|259486650|tpe|CBF84674.1| TPA: peptide transporter FGSC
  misc_feature (12)..(573): NCBI GI: 171683742 Blast Desc: protein product [Podospora anserina] gi|170941831|emb|CAP67484.1| protein product [Podospora anserina]
  misc_feature (14)..(547): NCBI GI: 238485142 Blast Desc: oligopeptide transporter, [Aspergillus flavus NRRL3357] gi|220698688|gb|EED55027.1| oligopeptide transporter, [Aspergillus flavus NRRL3357]
  misc_feature (35)..(594): NCBI GI: 227121712 Blast Desc: peptide transporter [Cadophora finlandica]
  misc_feature (20)..(614): NCBI GI: 145613038 Blast Desc: MGG_08258 [Magnaporthe grisea 70-15] gi|145020103|gb|EDK04331.1| MGG_08258 [Magnaporthe grisea 70-15]
  misc_feature (8)..(573): NCBI GI: 156052226 Blast Desc: SS1G_07522 [Sclerotinia sclerotiorum 1980] gi|154705298|gb|EDO05037.1| SS1G_07522 [Sclerotinia sclerotiorum 1980]
MGTSSELERVPTTDEKSHVPVDDTHAVYTDPNPGEDYEGKPTEEELTTLRRVPGKLPIVAYLICIVEFCERASYYGIQPLISNYVNRPLPVGGNGYGAPPQGTQQTAGALGLGQVTANAVSQSFSLLAYALPLFFGWLSDSRTGRFKLICWGVGVFGVAHVLMVAAGAKSLLADGSAKGPYFLSLYGLSIGAAMFKPNVSPLLLDQIVTNVPKVITLKSGERVIEDPEATTERVMLWFYLLINIGGFFGVATAYAEKYIGWWLAFLLPLLVYLPLPFLLWFLKSRLILHPPAGSDLPDVFRVLGVVFRRGGLKRIGRSGFWDLAKPSSIAAAGVDIKVKWNDDFVDDVRRAFQASGMFCFFPIQYLNDNGIGSAASYLSTALTTNGVPNDVISNFNSLSIIACAPILNYGLYPLLRKWNVHFGPVARITFGIFLSSVGAIGYTVLQHFAYQQSPCGNMATSNCDDGFGVAPITIWWMAIPYGIGGISELFINVPAYGIAYSRAPVNMRGVVSAINLFNTAVAYIIGLASSTVITDPYLVWDFGGPAIAGFVLSVVFYFTFRHIDKEEYTVNQDGNYHLDLTGTTNPVSETEANKTINEPPAISANEEMMISQKQ

SEQ ID NO: 18236 - DNA, 2371 bp, Muscodor strobelii
  misc_feature: SGI EST ID NO. CUFF.43046.0
  misc_feature: Variant of the nucleotide sequence at SEQ ID NO 18234
gaggtgacaagcgaacgcgctgcagctctctgcacgaggtggagtggatcatcgcatttgtcgccatttacccgcaaatcccctgcaccgtcgtgcgcccttgttccacataaaggcatcgcgcttcccctcgcactctcgtgaagctcttctcctctccgtgttcattgtcacactgacacccttctgctgcatccacggtcatcacacaccggccagccacgatgggtacctcaagcgaactggagcgtgtccccacgacggacgagaagtcgcacgtccctgtcgacgacactcatgccgtctacacagaccccaacccgggcgaggactacgagggcaagccgaccgaggaggagctgacgacccttcgccgtgtgccgggcaagctccccatcgtcgcctacttgatctgcatcgtcgagttttgcgagcgtgcttcctactatggcatccagcccctgatttccaactacgtcaaccgacccctgcccgttggcggaaacggttatggtgcccctccccagggtacccagcagactgccggtgccttgggtctcggacaggtcactgccaacgctgtcagccagtctttcagtctgttggcctacgccctgcccctgttcttcggctggctttccgactctaggaccggccgcttcaagctgatttgctggggtgtcggtgtcttcggtgttgcccacgttctcatggttgccgctggtgctaagtctctgcttgccgatggcagtgccaagggaccttacttcttgtccctgtacggtctgtctatcggtgctgccatgttcaagcccaacgtctcgcctctgctgctcgaccagatcgtcaccaatgtccccaaggtcatcacccttaagagcggtgagcgtgtcattgaggatcctgaagccacaaccgagcgagtcatgctttggttctacctgttgatcaacatcggtggtttcttcggtgttgccacggcttacgcggagaagtacatcggttggtggttggccttcttgctacctcttctggtctatctccctcttcccttcctcttgtggttcctgaagagccgcctgattctccacccccctgctggcagtgatcttcctgatgtcttccgcgttctcggcgtcgtcttccgacgtggtggcctcaagagaatcggtcgctccgggttctgggatttggctaagcccagcagcatcgccgctgctggtgtcgacattaaggtcaaatggaacgacgactttgtcgacgatgtgcgccgggcattccaggcttcaggcatgttctgcttcttccctatccagtatctcaatgacaatggtatcggttctgctgccagttacctgtccacggccctgacgaccaacggtgtgcctaacgacgtcatttccaacttcaactcgctcagtatcattgcctgcgcccccattctcaactacggcctttaccctctcctccgcaagtggaacgttcactttggacctgtagcacgtatcactttcggtatcttcctgtcttccgtcggtgctattggatacactgtcctgcagcacttcgcttaccagcaatctccctgcggaaacatggccacgtctaattgtgacgacggcttcggtgtagctcctatcactatttggtggatggctatcccttacggtattggtggtatttctgagttgttcatcaacgttcccgcctacggtatcgcgtactcccgcgctcccgtcaatatgagaggtgttgtgtcggccatcaacttgttcaacactgctgttgcttacatcattggtctcgcctcgtcgaccgttatcaccgatccttatttggtttgggacttcggtggcccagccatcgctggtttcgtcttgtccgtcgtcttttacttcaccttccgtcacatcgacaaagaggagtacactgtcaaccaggacggaaactaccacctggacctcactggcaccaccaaccccgtctccgagaccgaggctaacaagaccatcaacgagccccccgctatcagtgcgaatgaggagatgatgatctctcagaagcagtagactcggtgttgatacaataattgatcacctatcgatgatcctatggatgcgcgatctgtcaatatgaacggactcccatgcagcaggactgtaatactctagattaatgattccattagggattgtagttacaaaatcaataagatattctgataccccacacaaaaattgttttggtcatatttgttacaaagtattccaatctcggcttaaattgatcacgagtgcagaagtgcaggggcgaacacttttgatggtctaactaatccagtttagcgatcgcataatatagtctaccgaag

SEQ ID NO: 18237 - DNA, 1803 bp, Muscodor strobelii
  misc_feature: SGI cDNA ID NO. 566109
  misc_feature: Reduced expression when VOC is produced
  misc_feature: Encodes the peptide sequence at SEQ ID NO 18238
atgaaaatagcaagattcgccgctgcagcggctctcgcattttgtggccatgaagatccaaacatcaacgtcgccgttatcgagcctggtgaagatgtacgaaacaacgtgaacgtcaccgacccggggttgttcactgttgcatacgggacctcaatagactggcagtactccacgacacctcagcctggtgctggaaatcgtacaattgattggcatgcggggaaagctatcggtggaacgagcacaataaatggcatgacctatattcgtggtgataaatggcagtttgacggtaagtactatattcgtaatcaaatcaatgacggatggaattgggacacactattcccatattacttgaaagcagaaaacttcactgccccaaatgcagcgcagtcagccgccggcgcaacatacgaaccatcagtacacggaaattcaggtcatgtcgatacagcattcccctttgcgctggtcaacgggacatttcacgaactggctacagaatcatgggcagcgctcggatacgctaaaatcgaagatgtcaataatggaagtgtacgagggttcgatatatggccgcagactttgaacagagatttgaaccaacgctctgacgccgctcggtcatactattatgatattgaagaccgccccaacctcaaacttatcaatggcacggtaaagaaactgatcctggcggagcccacaaaggctgacgatgaaattgttgctgatggcgtcgaatacatcacaccttgtggcacgtatacacccaaggcaatccattttatcaactcgtcacctcttagaagaatatttgctaacgagtatcataagcatggcaactcggggcaactcgtcaaacttatggcttctgaagaagtgatcatatcggcaggcgccttgaggacgcctcttatcctcgagagctcgggtattggcaacccaagtctcctcaaagagctcggtatcgaaacgaaaatcaacttgccgacggttggggagaatttacaggaacaaccgaacattgcaataggttattccagtctattaaatgtttccgtctctagtagcgccccgtacgcaactttcccaacagtatacgacatgttcggtaacgatgcattcgatctcgcctcatcgactatttccaagctcgcggattgggcatccaaaattgaagaggccagcaatggtggtgttaaagctaagaatatcgagaagcttttcgccgtccaacacgatttgatcttcaacaaaaatgtgacgattggcgagactctatctgccatgtcccagggctaccttatctcggccttctggcttttgcttccattttcgtggggcagtgtgcatttgatatctgcggacgccatcaatgctcctgcaatcgatcccaagtatttcctcatagactttgatcttgatgtacaagtcgccttaggtcgcatttcccaacagttctggaacacagcccctgtatctgaaattaacggtgggaacatacttcctggagacgatactctacccttgaacgcaacggatacgcaatggaaggattacataagtgcggctttgaatccgaaccatcatcctattggaacagcagcaatgatgtcgcgcgaactgggcggtgtagtcagtcccgaactgaaagtatacggcacgaagaatgtcagagtagtcgatgcgtccatactaccattgcaattcagtggccacctcacagccacaatctatgctgtagcagaacgcgctgctgacatgatcaagcaaaactatcaggtactatcctag

SEQ ID NO: 18238 - protein, 600 aa, Muscodor strobelii
  misc_feature: SGI Peptide ID NO. 566109
  misc_feature (440)..(588): Pfam Id: PF05199 Pfam Desc: GMC oxidoreductase
  misc_feature (4)..(357): Pfam Id: PF00732 Pfam Desc: GMC oxidoreductase
  misc_feature (18)..(92): Pfam Id: PF00732 Pfam Desc: GMC oxidoreductase
  misc_feature (293)..(343): Pfam Id: PF00732 Pfam Desc: GMC oxidoreductase
  misc_feature (19)..(592): NCBI GI: 121710840 Blast Desc: GMC oxidoreductase [Aspergillus clavatus NRRL 1] gi|119401186|gb|EAW11610.1| GMC oxidoreductase [Aspergillus clavatus NRRL 1]
  misc_feature (20)..(592): NCBI GI: 70988923 Blast Desc: GMC oxidoreductase [Aspergillus fumigatus Af293] gi|66846943|gb|EAL87274.1| GMC oxidoreductase [Aspergillus fumigatus Af293]
  misc_feature (18)..(594): NCBI GI: 261360502 Blast Desc: glucose oxidase [Verticillium albo-atrum VaMs.102]
  misc_feature (20)..(592): NCBI GI: 159128726 Blast Desc: GMC oxidoreductase [Aspergillus fumigatus A1163]
  misc_feature (20)..(592): NCBI GI: 119497965 Blast Desc: GMC oxidoreductase [Neosartorya fischeri NRRL 181] gi|119413904|gb|EAW23843.1| GMC oxidoreductase [Neosartorya fischeri NRRL 181]
  misc_feature (18)..(593): NCBI GI: 156036500 Blast Desc: SS1G_12939 [Sclerotinia sclerotiorum 1980] gi|154698344|gb|EDN98082.1| SS1G_12939 [Sclerotinia sclerotiorum 1980]
  misc_feature (18)..(595): NCBI GI: 171679191 Blast Desc: protein product [Podospora anserina] gi|170937667|emb|CAP62325.1| protein product [Podospora anserina]
  misc_feature (18)..(596): NCBI GI: 145244074 Blast Desc: An11g05580 [Aspergillus niger] gi|134079232|emb|CAK40715.1| protein product [Aspergillus niger]
  misc_feature (18)..(595): NCBI GI: 238482721 Blast Desc: glucose oxidase, [Aspergillus flavus NRRL3357] gi|220700649|gb|EED56987.1| glucose oxidase, [Aspergillus flavus NRRL3357]
  misc_feature (18)..(597): NCBI GI: 169784690 Blast Desc: [Aspergillus oryzae RIB40] gi|83775553|dbj|BAE65673.1| protein product [Aspergillus oryzae]
  misc_feature (18)..(596): SWISSPROT Homolog: EC 1.1.3.4 Glucose oxidase
  misc_feature: Useful for introducing or modulating the production of volatile compounds
MKIARFAAAAALAFCGHEDPNINVAVIEPGEDVRNNVNVTDPGLFTVAYGTSIDWQYSTTPQPGAGNRTIDWHAGKAIGGTSTINGMTYIRGDKWQFDGKYYIRNQINDGWNWDTLFPYYLKAENFTAPNAAQSAAGATYEPSVHGNSGHVDTAFPFALVNGTFHELATESWAALGYAKIEDVNNGSVRGFDIWPQTLNRDLNQRSDAARSYYYDIEDRPNLKLINGTVKKLILAEPTKADDEIVADGVEYITPCGTYTPKAIHFINSSPLRRIFANEYHKHGNSGQLVKLMASEEVIISAGALRTPLILESSGIGNPSLLKELGIETKINLPTVGENLQEQPNIAIGYSSLLNVSVSSSAPYATFPTVYDMFGNDAFDLASSTISKLADWASKIEEASNGGVKAKNIEKLFAVQHDLIFNKNVTIGETLSAMSQGYLISAFWLLLPFSWGSVHLISADAINAPAIDPKYFLIDFDLDVQVALGRISQQFWNTAPVSEINGGNILPGDDTLPLNATDTQWKDYISAALNPNHHPIGTAAMMSRELGGVVSPELKVYGTKNVRVVDASILPLQFSGHLTATIYAVAERAADMIKQNYQVLS

SEQ ID NO: 18239 - DNA, 1391 bp, Muscodor strobelii
  misc_feature: SGI EST ID NO. CUFF.42966.0
  misc_feature: Variant of the nucleotide sequence at SEQ ID NO 18237
tttccctcgagggaaggattcgtcatgagttgggtgattacagagcatggcaactcggttaaacatcataccgatttcaacaaaaagaagtctaacatgttttatccaataggggcaactcgtcaaacttatggcttctgaagaagtgatcatatcggcaggcgccttgaggacgcctcttatcctcgagagctcgggtattggcaacccaagtctcctcaaagagctcggtatcgaaacgaaaatcaacttgccgacggttggggagaatttacaggaacaaccgaacattgcaataggttattccagtctattaaatgtttccgtctctagtagcgccccgtacgcaactttcccaacagtatacgacatgttcggtaacgatgcattcgatctcgcctcatcgactatttccaagctcgcggattgggcatccaaaattgaagaggccagcaatggtggtgttaaagctaagaatatcgagaagcttttcgccgtccaacacgatttgatcttcaacaaaaatgtgacgattggcgagactctatctgccatgtcccagggctaccttatctcggccttctggcttttgcttccattttcgtggggcagtgtgcatttgatatctgcggacgccatcaatgctcctgcaatcgatcccaagtatttcctcatagactttgatcttgatgtacaagtcgccttaggtcgcatttcccaacagttctggaacacagcccctgtatctgaaattaacggtgggaacatacttcctggagacgatactctacccttgaacgcaacggatacgcaatggaaggattacataagtgcggctttgaatccgaaccatcatcctattggaacagcagcaatgatgtcgcgcgaactgggcggtgtagtcagtcccgaactgaaagtatacggcacgaagaatgtcagagtagtcgatgcgtccatactaccattgcaattcagtggccacctcacagccacaatctatgctgtagcagaacgcgctgctgacatgatcaagcaaaactatcaggtactatcctagccaatttcccgttatattgaggagatgtcttcttcgtgcttgtgctgccaatcatgctttcctcaagtccaatgagactaggacgaatttcatttcatgtcaggagcctgtcaagatcaagagaaactggagacaatctgacttgtagacttggcatcatcatgtctattggattcttgaagacgagttgatgaaaatgtatctatgactactataagtacgtactacaaatcatgtatgagagcacaagacatcagaaagccattgttgccgctgctttctcttcagacctcttcgagccattcctagaagatcatgatatctgcaacag

SEQ ID NO: 18240 - DNA, 1866 bp, Muscodor strobelii
  misc_feature: SGI cDNA ID NO. 566110
  misc_feature: Encodes the peptide sequence at SEQ ID NO 18241
atgaaaatagcaagattcgccgctgcagcggctctcgcattttgtggccatgttcgttgcgaggcttttgacttcatcattgctggtgcaggtacagccgggctcgtcttggcgaatcgactaacagtcagttacgaagatccaaacatcaacgtcgccgttatcgagcctggtgaagatgtacgaaacaacgtgaacgtcaccgacccggggttgttcactgttgcatacgggacctcaatagactggcagtactccacgacacctcagcctggtgctggaaatcgtacaattgattggcatgcggggaaagctatcggtggaacgagcacaataaatggttcgttatctaccaatgtctgtctcagaatattggttgttaatgacggatggaattgggacacactattcccatattacttgaaagcagaaaacttcactgccccaaatgcagcgcagtcagccgccggcgcaacatacgaaccatcagtacacggaaattcaggtcatgtcgatacagcattcccctttgcgctggtcaacgggacatttcacgaactggctacagaatcatgggcagcgctcggatacgctaaaatcgaagatgtcaataatggaagtgtacgagggttcgatatatggccgcagactttgaacagagatttgaaccaacgctctgacgccgctcggtcatactattatgatattgaagaccgccccaacctcaaacttatcaatggcacggtaaagaaactgatcctggcggagcccacaaaggctgacgatgaaattgttgctgatggcgtcgaatacatcacaccttgtggcacgtatacacccaaggcaatccattttatcaactcgtcacctcttagaagaatatttgctaacgagtatcataagcatggcaactcggggcaactcgtcaaacttatggcttctgaagaagtgatcatatcggcaggcgccttgaggacgcctcttatcctcgagagctcgggtattggcaacccaagtctcctcaaagagctcggtatcgaaacgaaaatcaacttgccgacggttggggagaatttacaggaacaaccgaacattgcaataggttattccagtctattaaatgtttccgtctctagtagcgccccgtacgcaactttcccaacagtatacgacatgttcggtaacgatgcattcgatctcgcctcatcgactatttccaagctcgcggattgggcatccaaaattgaagaggccagcaatggtggtgttaaagctaagaatatcgagaagcttttcgccgtccaacacgatttgatcttcaacaaaaatgtgacgattggcgagactctatctgccatgtcccagggctaccttatctcggccttctggcttttgcttccattttcgtggggcagtgtgcatttgatatctgcggacgccatcaatgctcctgcaatcgatcccaagtatttcctcatagactttgatcttgatgtacaagtcgccttaggtcgcatttcccaacagttctggaacacagcccctgtatctgaaattaacggtgggaacatacttcctggagacgatactctacccttgaacgcaacggatacgcaatggaaggattacataagtgcggctttgaatccgaaccatcatcctattggaacagcagcaatgatgtcgcgcgaactgggcggtgtagtcagtcccgaactgaaagtatacggcacgaagaatgtcagagtagtcagcgatgcgtccatactaccattgcaattcagtggccacctcacagccacaatctatgctgtagcagaacgcgctgctgacatgatcaagcaaaactatcaggtactatcctag

SEQ ID NO: 18241 - protein, 621 aa, Muscodor strobelii
  misc_feature: SGI Peptide ID NO. 566110
  misc_feature (460)..(609): Pfam Id: PF05199 Pfam Desc: GMC oxidoreductase
  misc_feature (23)..(377): Pfam Id: PF00732 Pfam Desc: GMC oxidoreductase
  misc_feature (23)..(118): Pfam Id: PF00732 Pfam Desc: GMC oxidoreductase
  misc_feature (313)..(363): Pfam Id: PF00732 Pfam Desc: GMC oxidoreductase
  misc_feature (24)..(64): Pfam Id: PF05834 Pfam Desc: Lycopene cyclase protein
  misc_feature (22)..(613): NCBI GI: 121710840 Blast Desc: GMC oxidoreductase [Aspergillus clavatus NRRL 1] gi|119401186|gb|EAW11610.1| GMC oxidoreductase [Aspergillus clavatus NRRL 1]
  misc_feature (20)..(615): NCBI GI: 261360502 Blast Desc: glucose oxidase [Verticillium albo-atrum VaMs.102]
  misc_feature (24)..(613): NCBI GI: 70988923 Blast Desc: GMC oxidoreductase [Aspergillus fumigatus Af293] gi|66846943|gb|EAL87274.1| GMC oxidoreductase [Aspergillus fumigatus Af293]
  misc_feature (24)..(613): NCBI GI: 119497965 Blast Desc: GMC oxidoreductase [Neosartorya fischeri NRRL 181] gi|119413904|gb|EAW23843.1| GMC oxidoreductase [Neosartorya fischeri NRRL 181]
  misc_feature (24)..(613): NCBI GI: 159128726 Blast Desc: GMC oxidoreductase [Aspergillus fumigatus A1163]
  misc_feature (19)..(616): NCBI GI: 171679191 Blast Desc: protein product [Podospora anserina] gi|170937667|emb|CAP62325.1| protein product [Podospora anserina]
  misc_feature (17)..(614): NCBI GI: 156036500 Blast Desc: SS1G_12939 [Sclerotinia sclerotiorum 1980] gi|154698344|gb|EDN98082.1| SS1G_12939 [Sclerotinia sclerotiorum 1980]
  misc_feature (23)..(617): NCBI GI: 145244074 Blast Desc: An11g05580 [Aspergillus niger] gi|134079232|emb|CAK40715.1| protein product [Aspergillus niger]
  misc_feature (23)..(616): NCBI GI: 238482721 Blast Desc: glucose oxidase, [Aspergillus flavus NRRL3357] gi|220700649|gb|EED56987.1| glucose oxidase, [Aspergillus flavus NRRL3357]
  misc_feature (10)..(618): NCBI GI: 169784690 Blast Desc: [Aspergillus oryzae RIB40] gi|83775553|dbj|BAE65673.1| protein product [Aspergillus oryzae]
  misc_feature (18)..(617): SWISSPROT Homolog: EC 1.1.3.4 Glucose oxidase
MKIARFAAAAALAFCGHVRCEAFDFIIAGAGTAGLVLANRLTVSYEDPNINVAVIEPGEDVRNNVNVTDPGLFTVAYGTSIDWQYSTTPQPGAGNRTIDWHAGKAIGGTSTINGSLSTNVCLRILVVNDGWNWDTLFPYYLKAENFTAPNAAQSAAGATYEPSVHGNSGHVDTAFPFALVNGTFHELATESWAALGYAKIEDVNNGSVRGFDIWPQTLNRDLNQRSDAARSYYYDIEDRPNLKLINGTVKKLILAEPTKADDEIVADGVEYITPCGTYTPKAIHFINSSPLRRIFANEYHKHGNSGQLVKLMASEEVIISAGALRTPLILESSGIGNPSLLKELGIETKINLPTVGENLQEQPNIAIGYSSLLNVSVSSSAPYATFPTVYDMFGNDAFDLASSTISKLADWASKIEEASNGGVKAKNIEKLFAVQHDLIFNKNVTIGETLSAMSQGYLISAFWLLLPFSWGSVHLISADAINAPAIDPKYFLIDFDLDVQVALGRISQQFWNTAPVSEINGGNILPGDDTLPLNATDTQWKDYISAALNPNHHPIGTAAMMSRELGGVVSPELKVYGTKNVRVVSDASILPLQFSGHLTATIYAVAERAADMIKQNYQVLS

SEQ ID NO: 18242 - DNA, 1391 bp, Muscodor strobelii; identical to SEQ ID NO: 18239
  misc_feature: SGI EST ID NO. CUFF.42966.0
  misc_feature: Variant of the nucleotide sequence at SEQ ID NO 18240

SEQ ID NO: 18243 - DNA, 1884 bp, Muscodor strobelii
  misc_feature: SGI cDNA ID NO. 566111
  misc_feature: Encodes the peptide sequence at SEQ ID NO 18244
atgaaaatagcaagattcgccgctgcagcggctctcgcattttgtggccatgttcgttgcgaggcttttgacttcatcattgctggtgcaggtacagccgggctcgtcttggcgaatcgactaacagtcagttacgaagatccaaacatcaacgtcgccgttatcgagcctggtgaagatgtacgaaacaacgtgaacgtcaccgacccggggttgttcactgttgcatacgggacctcaatagactggcagtactccacgacacctcagcctggtgctggaaatcgtacaattgattggcatgcggggaaagctatcggtggaacgagcacaataaatggttcgttatctaccaatgtctgtctcagaatattggttgttaatgacggatggaattgggacacactattcccatattacttgaaagcagaaaacttcactgccccaaatgcagcgcagtcagccgccggcgcaacatacgaaccatcagtacacggaaattcaggtcatgtcgatacagcattcccctttgcgctggtcaacgggacatttcacgaactggctacagaatcatgggcagcgctcggatacgctaaaatcgaagatgtcaataatggaagtgtacgagggttcgatatatggccgcagactttgaacagagatttgaaccaacgctctgacgccgctcggtcatactattatgatattgaagaccgccccaacctcaaacttatcaatggcacggtaaagaaactgatcctggcggagcccacaaaggctgacgatgaaattgttgctgatggcgtcgaatacatcacaccttgtggcacgtatacacccaaggcaatccattttatcaactcgtcacctcttagaagaatatttgctaacgagtatcataagcatggcaactcggggcaactcgtcaaacttatggcttctgaagaagtgatcatatcggcaggcgccttgaggacgcctcttatcctcgagagctcgggtattggcaacccaagtctcctcaaagagctcggtatcgaaacgaaaatcaacttgccgacggttggggagaatttacaggaacaaccgaacattgcaataggttattccagtctattaaatgtttccgtctctagtagcgccccgtacgcaactttcccaacagtatacgacatgttcggtaacgatgcattcgatctcgcctcatcgactatttccaagctcgcggattgggcatccaaaattgaagaggccagcaatggtggtgttaaagctaagaatatcgagaagcttttcgccgtccaacacgatttgatcttcaacaaaaatgtgacgattggcgagactctatctgccatgtcccagggctaccttatctcggccttctggcttttgcttccattttcgtggggcagtgtgcatttgatatctgcggacgccatcaatgctcctgcaatcgatcccaagtatttcctcatagactttgatcttgatgtacaagtcgccttaggtcgcatttcccaacagttctggaacacagcccctgtatctgaaattaacggtgggaacatacttcctggagacgatactctacccttgaacgcaacggatacgcaatggaaggattacataagtgcggcttcaactgatttcaaatcaccagtgaatccgaaccatcatcctattggaacagcagcaatgatgtcgcgcgaactgggcggtgtagtcagtcccgaactgaaagtatacggcacgaagaatgtcagagtagtcgatgcgtccatactaccattgcaattcagtggccacctcacagccacaatctatgctgtagcagaacgcgctgctgacatgatcaagcaaaactatcaggtactatcctag

SEQ ID NO: 18244 - protein, 627 aa, Muscodor strobelii
  misc_feature: SGI Peptide ID NO. 566111
  misc_feature (460)..(615): Pfam Id: PF05199 Pfam Desc: GMC oxidoreductase
  misc_feature (23)..(377): Pfam Id: PF00732 Pfam Desc: GMC oxidoreductase
  misc_feature (555)..(615): Pfam Id: PF05199 Pfam Desc: GMC oxidoreductase
  misc_feature (23)..(118): Pfam Id: PF00732 Pfam Desc: GMC oxidoreductase
  misc_feature (313)..(363): Pfam Id: PF00732 Pfam Desc: GMC oxidoreductase
  misc_feature (24)..(64): Pfam Id: PF05834 Pfam Desc: Lycopene cyclase protein
  misc_feature (22)..(619): NCBI GI: 121710840 Blast Desc: GMC oxidoreductase [Aspergillus clavatus NRRL 1] gi|119401186|gb|EAW11610.1| GMC oxidoreductase [Aspergillus clavatus NRRL 1]
  misc_feature (20)..(621): NCBI GI: 261360502 Blast Desc: glucose oxidase [Verticillium albo-atrum VaMs.102]
  misc_feature (24)..(619): NCBI GI: 70988923 Blast Desc: GMC oxidoreductase [Aspergillus fumigatus Af293] gi|66846943|gb|EAL87274.1| GMC oxidoreductase [Aspergillus fumigatus Af293]
  misc_feature (24)..(619): NCBI GI: 119497965 Blast Desc: GMC oxidoreductase [Neosartorya fischeri NRRL 181] gi|119413904|gb|EAW23843.1| GMC oxidoreductase [Neosartorya fischeri NRRL 181]
  misc_feature (24)..(619): NCBI GI: 159128726 Blast Desc: GMC oxidoreductase [Aspergillus fumigatus A1163]
  misc_feature (19)..(622): NCBI GI: 171679191 Blast Desc: protein product [Podospora anserina] gi|170937667|emb|CAP62325.1| protein product [Podospora anserina]
  misc_feature (17)..(620): NCBI GI: 156036500 Blast Desc: SS1G_12939 [Sclerotinia sclerotiorum 1980] gi|154698344|gb|EDN98082.1| SS1G_12939 [Sclerotinia sclerotiorum 1980]
  misc_feature (23)..(623): NCBI GI: 145244074 Blast Desc: An11g05580 [Aspergillus niger] gi|134079232|emb|CAK40715.1| protein product [Aspergillus niger]
  misc_feature (23)..(622): NCBI GI: 238482721 Blast Desc: glucose oxidase, [Aspergillus flavus NRRL3357] gi|220700649|gb|EED56987.1| glucose oxidase, [Aspergillus flavus NRRL3357]
  misc_feature (10)..(624): NCBI GI: 169784690 Blast Desc: [Aspergillus oryzae RIB40] gi|83775553|dbj|BAE65673.1| protein product [Aspergillus oryzae]
  misc_feature (18)..(623): SWISSPROT Homolog: EC 1.1.3.4 Glucose oxidase
MKIARFAAAAALAFCGHVRCEAFDFIIAGAGTAGLVLANRLTVSYEDPNINVAVIEPGEDVRNNVNVTDPGLFTVAYGTSIDWQYSTTPQPGAGNRTIDWHAGKAIGGTSTINGSLSTNVCLRILVVNDGWNWDTLFPYYLKAENFTAPNAAQSAAGATYEPSVHGNSGHVDTAFPFALVNGTFHELATESWAALGYAKIEDVNNGSVRGFDIWPQTLNRDLNQRSDAARSYYYDIEDRPNLKLINGTVKKLILAEPTKADDEIVADGVEYITPCGTYTPKAIHFINSSPLRRIFANEYHKHGNSGQLVKLMASEEVIISAGALRTPLILESSGIGNPSLLKELGIETKINLPTVGENLQEQPNIAIGYSSLLNVSVSSSAPYATFPTVYDMFGNDAFDLASSTISKLADWASKIEEASNGGVKAKNIEKLFAVQHDLIFNKNVTIGETLSAMSQGYLISAFWLLLPFSWGSVHLISADAINAPAIDPKYFLIDFDLDVQVALGRISQQFWNTAPVSEINGGNILPGDDTLPLNATDTQWKDYISAASTDFKSPVNPNHHPIGTAAMMSRELGGVVSPELKVYGTKNVRVVDASILPLQFSGHLTATIYAVAERAADMIKQNYQVLS

SEQ ID NO: 18245 - DNA, 1391 bp, Muscodor strobelii; identical to SEQ ID NO: 18239
  misc_feature: SGI EST ID NO. CUFF.42966.0
  misc_feature: Variant of the nucleotide sequence at SEQ ID NO 18243

SEQ ID NO: 18246 - DNA, 1887 bp, Muscodor strobelii
  misc_feature: SGI cDNA ID NO. 566112
  misc_feature: Encodes the peptide sequence at SEQ ID NO 18247
atgaaaatagcaagattcgccgctgcagcggctctcgcattttgtggccatgttcgttgcgaggcttttgacttcatcattgctggtgcaggtacagccgggctcgtcttggcgaatcgactaacagtcagttacgaagatccaaacatcaacgtcgccgttatcgagcctggtgaagatgtacgaaacaacgtgaacgtcaccgacccggggttgttcactgttgcatacgggacctcaatagactggcagtactccacgacacctcagcctggtgctggaaatcgtacaattgattggcatgcggggaaagctatcggtggaacgagcacaataaatggttcgttatctaccaatgtctgtctcagaatattggttgttaatgacggatggaattgggacacactattcccatattacttgaaagcagaaaacttcactgccccaaatgcagcgcagtcagccgccggcgcaacatacgaaccatcagtacacggaaattcaggtcatgtcgatacagcattcccctttgcgctggtcaacgggacatttcacgaactggctacagaatcatgggcagcgctcggatacgctaaaatcgaagatgtcaataatggaagtgtacgagggttcgatatatggccgcagactttgaacagagatttgaaccaacgctctgacgccgctcggtcatactattatgatattgaagaccgccccaacctcaaacttatcaatggcacggtaaagaaactgatcctggcggagcccacaaaggctgacgatgaaattgttgctgatggcgtcgaatacatcacaccttgtggcacgtatacacccaaggcaatccattttatcaactcgtcacctcttagaagaatatttgctaacgagtatcataagcatggcaactcggggcaactcgtcaaacttatggcttctgaagaagtgatcatatcggcaggcgccttgaggacgcctcttatcctcgagagctcgggtattggcaacccaagtctcctcaaagagctcggtatcgaaacgaaaatcaacttgccgacggttggggagaatttacaggaacaaccgaacattgcaataggttattccagtctattaaatgtttccgtctctagtagcgccccgtacgcaactttcccaacagtatacgacatgttcggtaacgatgcattcgatctcgcctcatcgactatttccaagctcgcggattgggcatccaaaattgaagaggccagcaatggtggtgttaaagctaagaatatcgagaagcttttcgccgtccaacacgatttgatcttcaacaaaaatgtgacgattggcgagactctatctgccatgtcccagggctaccttatctcggccttctggcttttgcttccattttcgtggggcagtgtgcatttgatatctgcggacgccatcaatgctcctgcaatcgatcccaagtatttcctcatagactttgatcttgatgtacaagtcgccttaggtcgcatttcccaacagttctggaacacagcccctgtatctgaaattaacggtgggaacatacttcctggagacgatactctacccttgaacgcaacggatacgcaatggaaggattacataagtgcggcttcaactgatttcaaatcaccagtgaatccgaaccatcatcctattggaacagcagcaatgatgtcgcgcgaactgggcggtgtagtcagtcccgaactgaaagtatacggcacgaagaatgtcagagtagtcagcgatgcgtccatactaccattgcaattcagtggccacctcacagccacaatctatgctgtagcagaacgcgctgctgacatgatcaagcaaaactatcaggtactatcctag

SEQ ID NO: 18247 - protein, 628 aa, Muscodor strobelii
  misc_feature: SGI Peptide ID NO. 566112
  misc_feature (460)..(616): Pfam Id: PF05199 Pfam Desc: GMC oxidoreductase
  misc_feature (23)..(377): Pfam Id: PF00732 Pfam Desc: GMC oxidoreductase
  misc_feature (555)..(616): Pfam Id: PF05199 Pfam Desc: GMC oxidoreductase
  misc_feature (23)..(118): Pfam Id: PF00732 Pfam Desc: GMC oxidoreductase
  misc_feature (313)..(363): Pfam Id: PF00732 Pfam Desc: GMC oxidoreductase
  misc_feature (24)..(64): Pfam Id: PF05834 Pfam Desc: Lycopene cyclase protein
  misc_feature (22)..(620): NCBI GI: 121710840 Blast Desc: GMC oxidoreductase [Aspergillus clavatus NRRL 1] gi|119401186|gb|EAW11610.1| GMC oxidoreductase [Aspergillus clavatus NRRL 1]
  misc_feature (20)..(622): NCBI GI: 261360502 Blast Desc: glucose oxidase [Verticillium albo-atrum VaMs.102]
  misc_feature (24)..(620): NCBI GI: 70988923 Blast Desc: GMC oxidoreductase [Aspergillus fumigatus Af293] gi|66846943|gb|EAL87274.1| GMC oxidoreductase [Aspergillus fumigatus Af293]
  misc_feature (24)..(620): NCBI GI: 119497965 Blast Desc: GMC oxidoreductase [Neosartorya fischeri NRRL 181] gi|119413904|gb|EAW23843.1| GMC oxidoreductase [Neosartorya fischeri NRRL 181]
  misc_feature (24)..(620): NCBI GI: 159128726 Blast Desc: GMC oxidoreductase [Aspergillus fumigatus A1163]
  misc_feature (17)..(621): NCBI GI: 156036500 Blast Desc: SS1G_12939 [Sclerotinia sclerotiorum 1980] gi|154698344|gb|EDN98082.1| SS1G_12939 [Sclerotinia sclerotiorum 1980]
  misc_feature (19)..(623): NCBI GI: 171679191 Blast Desc: protein product [Podospora anserina] gi|170937667|emb|CAP62325.1| protein product [Podospora anserina]
  misc_feature (23)..(624): NCBI GI: 145244074 Blast Desc: An11g05580 [Aspergillus niger] gi|134079232|emb|CAK40715.1| protein product [Aspergillus niger]
  misc_feature (21)..(547): NCBI GI: 115401098 Blast Desc: [Aspergillus terreus NIH2624] gi|114190078|gb|EAU31778.1| [Aspergillus terreus NIH2624]
  misc_feature (23)..(623): NCBI GI: 238482721 Blast Desc: glucose oxidase, [Aspergillus flavus NRRL3357] gi|220700649|gb|EED56987.1| glucose oxidase, [Aspergillus flavus NRRL3357]
  misc_feature (18)..(624): SWISSPROT Homolog: EC 1.1.3.4 Glucose oxidase
MKIARFAAAAALAFCGHVRCEAFDFIIAGAGTAGLVLANRLTVSYEDPNINVAVIEPGEDVRNNVNVTDPGLFTVAYGTSIDWQYSTTPQPGAGNRTIDWHAGKAIGGTSTINGSLSTNVCLRILVVNDGWNWDTLFPYYLKAENFTAPNAAQSAAGATYEPSVHGNSGHVDTAFPFALVNGTFHELATESWAALGYAKIEDVNNGSVRGFDIWPQTLNRDLNQRSDAARSYYYDIEDRPNLKLINGTVKKLILAEPTKADDEIVADGVEYITPCGTYTPKAIHFINSSPLRRIFANEYHKHGNSGQLVKLMASEEVIISAGALRTPLILESSGIGNPSLLKELGIETKINLPTVGENLQEQPNIAIGYSSLLNVSVSSSAPYATFPTVYDMFGNDAFDLASSTISKLADWASKIEEASNGGVKAKNIEKLFAVQHDLIFNKNVTIGETLSAMSQGYLISAFWLLLPFSWGSVHLISADAINAPAIDPKYFLIDFDLDVQVALGRISQQFWNTAPVSEINGGNILPGDDTLPLNATDTQWKDYISAASTDFKSPVNPNHHPIGTAAMMSRELGGVVSPELKVYGTKNVRVVSDASILPLQFSGHLTATIYAVAERAADMIKQNYQVLS

SEQ ID NO: 18248 - DNA, 1391 bp, Muscodor strobelii; identical to SEQ ID NO: 18239
  misc_feature: SGI EST ID NO. CUFF.42966.0
  misc_feature: Variant of the nucleotide sequence at SEQ ID NO 18246

SEQ ID NO: 18249 - DNA, 717 bp, Muscodor strobelii
  misc_feature: SGI cDNA ID NO. 566113
  misc_feature: Encodes the peptide sequence at SEQ ID NO 18250
atgagtgttcttctctgcgctgggaaagccaagctgggcaagctgcctcctgttgccaagatccccatctcgcgagcaatttcatggatggcatttgaacagcctaatccagcacagtatgcaaatcttgggccgaagagtctcgctgggtccaccacagacactgctgcagccaccgcgaccaccaccgataccaagccagccgtatctgtagaatgcaagactagacttgcaagcagcgcccctaagattaggagtccagggcaagtcgttgcgccggccgtcacaaccagcacaccatccccattctcagatccgcaaaagcgcactatccactcaagcaagacgccgcaagagtaccaaaccctcaacgtcaatcttcagctgaagcttcacgatcaccctgcaacatggcccgtccagcagcccgaagtcgccgacgtcggacctcgtcccagaattcgtcaccaggacctgggaaattatcccctctcagcggtctggggatgggaagaatggcatcgcgagagcccgtggaagaatggcgatcccgcgcaagggcctgcaaaccacatggttcaagaaacagacacgcccacagtggaggaagacgaaaccacgcccttgcgcactctggagaggaaaccacggaacaacgaaagccctaagcctggcaatagattcccaccagacgagcacgatgcggctgcagagtag

SEQ ID NO: 18250 - protein, 238 aa, Muscodor strobelii
  misc_feature: SGI Peptide ID NO. 566113
MSVLLCAGKAKLGKLPPVAKIPISRAISWMAFEQPNPAQYANLGPKSLAGSTTDTAAATATTTDTKPAVSVECKTRLASSAPKIRSPGQVVAPAVTTSTPSPFSDPQKRTIHSSKTPQEYQTLNVNLQLKLHDHPATWPVQQPEVADVGPRPRIRHQDLGNYPLSAVWGWEEWHRESPWKNGDPAQGPANHMVQETDTPTVEEDETTPLRTLERKPRNNESPKPGNRFPPDEHDAAAE

SEQ ID NO: 18251 - DNA, 6753 bp, Muscodor strobelii
  misc_feature: SGI cDNA ID NO. 566114
  misc_feature: Encodes the peptide sequence at SEQ ID NO 18252
atgaagctcctggagaacatgcccatgccctgggagtccgccagagacgtcaaggtcctctaccacgtcaatggatgcctcaccctagtcaacgagatcccgcgcgttatccccccggtctaccacgcgcaatgggccaccatgtgggtgacgatgcgcaaagagaagagcgaccggagactgttcaggagaatgagattcccgccgtttgacgacgaggagccgcccctgtcgtggtccgagaacttggaggacgtagagccgccccagcctatccagatggagctgctcgaagacgatgatgccgctgtgtacgaatggttctacgaccaccgtccgctgtccgacacagaccatgtgaatggaccaagttacaagaagtggaatctctcactgcagcagatggccaccctgcatcggatgagtcaggccctactgagtgacagaatcgaccggaatgatctttatctgtttgacctcaagagcttgctcacggcgaaagctctcaacgtcgctctgcccggcggtcctcgatttgagcccctgtataaggatattgatccgaatgacgaagagtttggagagttcaatgccatcgatcgcattatcttccgctcgcccatcaagaccgaagcgcgagttgcgtacccatacctgtacaactccctacctcgcagcgttcactcgcactggtattcgtaccccctcaacgtgtgcctcaaaagccatgatcctagtatgcctgcctactattgggactcacaagtcaaccccatttcttcccgatctgttgcccccaagaacatcacaaccagccatgaagatgagatctttggtgacaacactgaggagcctgaagaggaagctttcaagctaccgggcaatgttgagcctttcctcgccgacgaggagctctacactgaagacaccgtttcggcaattggtctatggtgggcaccatttccatttgaccgccgatctggccaaatgattagggctcaggacatccctttggtcaaacattggtaccttgaacatgccccgaagaaggtagctgtcaaagtccgggtatcttatcagaaactactgaaaacattcgtcctcaacgagctgcacacaaataagccaaaggctctcaaccgccaagacttgctgagaactctgaagcagaccaaattcttccaacagacgacgattgattgggttgaagctggccttcaagtatgccggcaaggcttcaacatgctaaacctgctgattcaccgcaaaaatctgacatatcttcacctagattacaacttcaatcttaagcctgtcaagacgttgactacgaaagaacgcaagaagtcaagatttggtaatgcatttcatctcatgcgcgagatccttcgcttgacaaaactcattgtcgacgcccaggttcaatatcgacttgggaacatcgatgctttccaactggctgatggcatcctttatgctttcaaccatgttggtcagctgacgggcatgtaccgatacaaatataagttgatgcaccagatccgtacatgcaaagacttaaagcatctcatatactatcggttcaacagtgggcccgtgggcaagcgtcctggctgtggtttttgggcaccggcctggagagtgtggctgttcttcatgagaggtatcatccctcttctagaacgatggcttggcaatttgctctcccgccagtttgaaggtcgtcacagtaaaggcgtcgccaaaactgtcaccaagcagcgtgtcgagtcgcatttcgatttggagctacgcgcctcagtcatggctgacctcatggacatgatgccggaaggcattaagcagaataaggtaaatgttgttctcgctcacctctctgaagcatggcgttgctggaagagcaatattccctggaaagtacctggattgccggcccccattgagaatatcatcctccgatacgtcaaatcaaaggcagattggtgggtctcggtcgcacactacaatcgggaacgtattcgaaggggagctactgtcgacaagactgtcgcgaaaaaaaacgtcggacgtcttacgcgtctatggctaaaggctgagcaagaacgtcaacacaactacatgaaggatgggccatatgtttcgtccgaagaggccgttgctatttacactacgacagtacattggcttgagtctcggaagttcacaccaattccgttccctagcgtttcttacaagcatgacacaaaaattttgatattggcccttgaacgactgcgtgaagcatactctgtaaagggtcgtcttaaccagagccagcgtgaagaactcgctctgattgagcaggcgtacgatagcccgggtactaccttggagagaatcaaacgatttcttctaacgcagcgtgctttcaaagaagttcaaatcgacatgaacgacaattacagctccatcaaccccgtatacgacatcgagccgattgaaaagattagtgacgcctatctcgatcaatatctatggtatcaggccgaccagcggcatctcttccctgcatggatcaagccctccgattccgaagtccctcccctcctagtatacaaatgggcgcagggtatcaacaacctcgagaaggtatgggcgactgccgacggagagtgcaatgtcatgatcgaaaccgagctttccaaagtctacgagaaaattgacctcaccctcctgaaccgccttttgagactcatcatggatcacaatttggcagattatatcagctctaagaacaatgttcagctgacatacaaagacatgaatcacgtgaacagctacggtatgatacgcggcctgcagttctctggcttcgtgtttcaatactacggccttgttcttgatctcctccttctcggcttgaatcgtgcgagcgagatcgccgggcctccatcaggcccaaatgatttcctgcagtttcgcgatcgcgaaacagaaagcaaacacccgatccgcttgtacacgagatatatcgacaaaatttgggtattcctccgattcaccgctgaagaatctcgtgatctcatccagcgtttcctgaccgaacaacccgacccaaatttcgagaatgtcattgggtacaagagtaagaaatgctggcccagagattcacgtatgcgcctcatgcgacacgacgtgaaccttgggcgggcagtgttttgggatctcaaaaatcggcttcctcgttctgtcacaaccattgagtgggacgatacatttgctagtgtttacagtcgcgataacccgaatcttcttttctcgatgtgtgggttcgaggttcgcattcttcctaagatcaggaatcagaatgacgagttccctgtcaaggacagcgtttggtctctcgtcgacaatacgaccaaggaaagaacagctcatgctttcctacaagtgacggaagaagacatacaaaagttcaacaatcgcattcgccagattctgatgtcttctggatcaactacgttcaccaagattgccaacaaatggaatacagctctgattgcgttgttcacatattatcgtgaggctgcagtctcgactgtaaatctcctcgacacaatcgttaaatgcgaaactaagatccagactcgagtgaaaattggtctcaactcgaaaatgccttcgcgttttcctcctgcagtattttatacaccaaaagaactgggaggtcttggtatgatttcaggatcacacatcctcatacctgccagtgacaaacgttggtcgaagcagacagatacgggcgtaacccattaccgtgctggtatgactcacgacgaggagaccttgattcccaatatcttccgctacatcattccttgggaagctgagttcatcgattctcagagagtgtggaccgaatactcgcaaaagcgtctcgaagccaaccagcaaaaccggcgacttaccttggaagatctagaagacagctgggatcgaggattacctcgcatcaatacccttttccagaaagaccgaagcacactaagctttgataaaggtttccgagcgaggagcgagttcaagatctatcagttgatgaagagcaatcccttctggtggacaagtcaacgtcatgatggaaagctgtggaacttgaatgcctaccgtactgatgtgattcaagctcttggtggtgttgaaacaatccttgaacacacgctgtttaaggctacagggtttccctcatgggagggcctcttttgggagcgtgcctcgggtttcgaggagtccatgaaattcaaaaagctgaccaatgcccagagatctggtttgaaccagattccgaaccgtcgtttcacactctggtggtcaccaactatcaatagagccaatgtttacgtcggtttccaggtccaacttgatctcactggtatcttcttgcacggcaagataccgacattaaagatctctctaattcagattttccgtgctcatttgtggcagaagattcacgagtcggttgtcatggatttctgtcaagtctttgaccaggagctcgaagttcttggaatcgagacagttcagaaggaaacgattcatcctcgaaaatcatacaaaatgaacagctcctgtgccgacatcctcctctttgcaaacagcaaatggaacgttaccagaccatcactcttatatgacaacaaggatgtcatcgagtcgacaacgaccaacaaattctggttggacattcagctgcgatatggtgactacgattctcacgacattgagcgctatactcgtgctaaatatcttgattacacaagtgataacatgagtatttatccttcagccactggtcttatgatcggcattgatctagcatataacctgtactcggcttatggtcaatactttcccggtctcaaggctctcgtccaacaggctatggctaagatcatgaaggcaaaccctgcgctttatgtccttcgcgagcgcattcgaaagggattgcagttgtatgcttccgagagtaaccaagagtttctgaactcgcagaattactctgaattattcagcaatcagacgaagctgttcatcgacgatacaaatgtctatcgtgtcacaatccacaagacctttgaaggaaatttgaccacaaagccaatcaatggtgcaattttcatattcaaccctcgcactggtcaactgttcttgaagattattcacaccagcgtttgggctggccagaaacgtctcggccaactggccaaatggaagactgcagaagaagtggcagctcttatacgatccttgcccatcgaagaacagccgaaggagctcattgtaacacgaaagggtcttctcgatcctcttgaggtccatcttcttgatttcccgaatatttccattcgcgcatcagaacttcagcttcctttccaggccgcgatgaaagtggaaaagcttggcgacatgatccttcgtgctaccgaaccacagatggtgcttttcaacctatatgacgagtggctcaagagcatctcttcatatactgcattctcacgtctcgtcttgattctacgtgccctccacgtcaatcctgacaagaccaagttgatccttcgccctgacaagactgttatcacgcaaatgcatcatatctggccaacactatctgacgaggattggatcaaagttgagacacaacttcgtgatctcattctacatgattacggaaaaaagaacaacgtcaacgtttcgagtctgacaagcagtgaagttcgtgacattatcttgggtatggaaatttcagcaccatcaatgcaacgacagcaagccgccgagattgagaaacagcagcaggagcagcagcagctcacagctgtgacgacgaaaactcaaaatgtccacggtgaggagatcattgtcacaacaacgtcccagtttgagcagcagacatttgcttccaagactgagtggcgtacccgagcaatcgcgacatctaacctcagaactcggtccaataatgtctatgtctcctctgtcgacaatgatatggatgatattacatacgtcatgccgaacaacatcttaaagaagttcattaccattgcagatcttcgcgtgcaagtagcaggttatctatatggtgtttcggcgcccgataacgaccaggtcaaggagattcgttgtattgtcatggtcccacagataggaggattacgcagcgtccaactccctcagcaactaccccaacacgagtatctcaaagacctcgtacctttgggtgttatacacaccatggccggaaacgaactcccatatatgtctgctgccgatgttacggagcatgctcgtctcctcgatgcacatccaaagtggtccaaggacaaggaggatattattacagttgacgtagcctttactcctggctcggtgtctctgtcggcgtgggcattgacccccggtggttacaaatggggcgtcgagaataaagatattggtagcgatcagccccaaggtttcacaacgtcaatgggcataaagcggaagctcctcctcagtccacgctttaagggctacttcctcgtcccagagaatggaaagtggaattatagtttcctgggcagcagtttcgccggcctcgaaaagaaaccagtgcatgtgaaactagacacgccaatgcagttttacagcgaccagcaccgaccgctacatttccaaaacttcgccgagctggaagatattggtgtggaccgaaccgacaattttgcctaa

SEQ ID NO: 18252 - protein, 2250 aa, Muscodor strobelii
  misc_feature: SGI Peptide ID NO. 566114
  misc_feature (1)..(110): Pfam Id: PF08082 Pfam Desc: PRO8NT (NUC069) domain
  misc_feature (305)..(713): Pfam Id: PF08083 Pfam Desc: PROCN (NUC071) domain
  misc_feature (2126)..(2249): Pfam Id: PF08084 Pfam Desc: PROCT (NUC072) domain
  misc_feature (2)..(110): Pfam Id: PF08082 Pfam Desc: PRO8NT (NUC069) domain
  misc_feature (1)..(2250): NCBI GI: 46111309 Blast Desc: FG02536.1 [Gibberella zeae PH-1]
  misc_feature (1)..(2250): NCBI GI: 85109512 Blast Desc: pre-mRNA processing splicing factor 8 [Neurospora crassa OR74A] gi|28924598|gb|EAA33717.1| pre-mRNA processing splicing factor 8 [Neurospora crassa OR74A]
  misc_feature (1)..(2250): NCBI GI: 171687162 Blast Desc: protein product [Podospora anserina] gi|170943542|emb|CAP69195.1| protein product [Podospora anserina]
  misc_feature (1)..(2250): NCBI GI: 242801725 Blast Desc: pre-mRNA splicing factor (Prp8), [Talaromyces stipitatus ATCC 10500] gi|218717171|gb|EED16592.1| pre-mRNA splicing factor (Prp8), [Talaromyces stipitatus ATCC 10500]
  misc_feature (1)..(2250): NCBI GI: 116191635 Blast Desc: CHGG_05535 [Chaetomium globosum CBS 148.51] gi|88181448|gb|EAQ88916.1| CHGG_05535 [Chaetomium globosum CBS 148.51]
  misc_feature (1)..(2250): NCBI GI: 212540454 Blast Desc: pre-mRNA splicing factor (Prp8), [Penicillium marneffei ATCC 18224] gi|210067681|gb|EEA21773.1| pre-mRNA splicing factor (Prp8), [Penicillium marneffei ATCC 18224]
  misc_feature (1)..(2250): NCBI GI: 240111383 Blast Desc: Pre-mRNA splicing factor, [Coccidioides posadasii C735 delta SOWgp]
  misc_feature (1)..(2250): NCBI GI: 145238338 Blast Desc: An07g07420 [Aspergillus niger] gi|134076301|emb|CAK39557.1| protein product [Aspergillus niger]
  misc_feature (1)..(2250): NCBI GI: 121710586 Blast Desc: pre-mRNA splicing factor (Prp8), [Aspergillus clavatus NRRL 1] gi|119401059|gb|EAW11483.1| pre-mRNA splicing factor (Prp8), [Aspergillus clavatus NRRL 1]
  misc_feature (1)..(2250): NCBI GI: 115442812 Blast Desc: pre-mRNA processing splicing factor 8 [Aspergillus terreus NIH2624] gi|114188082|gb|EAU29782.1| pre-mRNA processing splicing factor 8 [Aspergillus terreus NIH2624]
MKLLENMPMPWESARDVKVLYHVNGCLTLVNEIPRVIPPVYHAQWATMWVTMRKEKSDRRLFRRMRFPPFDDEEPPLSWSENLEDVEPPQPIQMELLEDDDAAVYEWFYDHRPLSDTDHVNGPSYKKWNLSLQQMATLHRMSQALLSDRIDRNDLYLFDLKSLLTAKALNVALPGGPRFEPLYKDIDPNDEEFGEFNAIDRIIFRSPIKTEARVAYPYLYNSLPRSVHSHWYSYPLNVCLKSHDPSMPAYYWDSQVNPISSRSVAPKNITTSHEDEIFGDNTEEPEEEAFKLPGNVEPFLADEELYTEDTVSAIGLWWAPFPFDRRSGQMIRAQDIPLVKHWYLEHAPKKVAVKVRVSYQKLLKTFVLNELHTNKPKALNRQDLLRTLKQTKFFQQTTIDWVEAGLQVCRQGFNMLNLLIHRKNLTYLHLDYNFNLKPVKTLTTKERKKSRFGNAFHLMREILRLTKLIVDAQVQYRLGNIDAFQLADGILYAFNHVGQLTGMYRYKYKLMHQIRTCKDLKHLIYYRFNSGPVGKRPGCGFWAPAWRVWLFFMRGIIPLLERWLGNLLSRQFEGRHSKGVAKTVTKQRVESHFDLELRASVMADLMDMMPEGIKQNKVNVVLAHLSEAWRCWKSNIPWKVPGLPAPIENIILRYVKSKADWWVSVAHYNRERIRRGATVDKTVAKKNVGRLTRLWLKAEQERQHNYMKDGPYVSSEEAVAIYTTTVHWLESRKFTPIPFPSVSYKHDTKILILALERLREAYSVKGRLNQSQREELALIEQAYDSPGTTLERIKRFLLTQRAFKEVQIDMNDNYSSINPVYDIEPIEKISDAYLDQYLWYQADQRHLFPAWIKPSDSEVPPLLVYKWAQGINNLEKVWATADGECNVMIETELSKVYEKIDLTLLNRLLRLIMDHNLADYISSKNNVQLTYKDMNHVNSYGMIRGLQFSGFVFQYYGLVLDLLLLGLNRASEIAGPPSGPNDFLQFRDRETESKHPIRLYTRYIDKIWVFLRFTAEESRDLIQRFLTEQPDPNFENVIGYKSKKCWPRDSRMRLMRHDVNLGRAVFWDLKNRLPRSVTTIEWDDTFASVYSRDNPNLLFSMCGFEVRILPKIRNQNDEFPVKDSVWSLVDNTTKERTAHAFLQVTEEDIQKFNNRIRQILMSSGSTTFTKIANKWNTALIALFTYYREAAVSTVNLLDTIVKCETKIQTRVKIGLNSKMPSRFPPAVFYTPKELGGLGMISGSHILIPASDKRWSKQTDTGVTHYRAGMTHDEETLIPNIFRYIIPWEAEFIDSQRVWTEYSQKRLEANQQNRRLTLEDLEDSWDRGLPRINTLFQKDRSTLSFDKGFRARSEFKIYQLMKSNPFWWTSQRHDGKLWNLNAYRTDVIQALGGVETILEHTLFKATGFPSWEGLFWERASGFEESMKFKKLTNAQRSGLNQIPNRRFTLWWSPTINRANVYVGFQVQLDLTGIFLHGKIPTLKISLIQIFRAHLWQKIHESVVMDFCQVFDQELEVLGIETVQKETIHPRKSYKMNSSCADILLFANSKWNVTRPSLLYDNKDVIESTTTNKFWLDIQLRYGDYDSHDIERYTRAKYLDYTSDNMSIYPSATGLMIGIDLAYNLYSAYGQYFPGLKALVQQAMAKIMKANPALYVLRERIRKGLQLYASESNQEFLNSQNYSELFSNQTKLFIDDTNVYRVTIHKTFEGNLTTKPINGAIFIFNPRTGQLFLKIIHTSVWAGQKRLGQLAKWKTAEEVAALIRSLPIEEQPKELIVTRKGLLDPLEVHLLDFPNISIRASELQLPFQAAMKVEKLGDMILRATEPQMVLFNLYDEWLKSISSYTAFSRLVLILRALHVNPDKTKLILRPDKTVITQMHHIWPTLSDEDWIKVETQLRDLILHDYGKKNNVNVSSLTSSEVRDIILGMEISAPSMQRQQAAEIEKQQQEQQQLTAVTTKTQNVHGEEIIVTTTSQFEQQTFASKTEWRTRAIATSNLRTRSNNVYVSSVDNDMDDITYVMPNNILKKFITIADLRVQVAGYLYGVSAPDNDQVKEIRCIVMVPQIGGLRSVQLPQQLPQHEYLKDLVPLGVIHTMAGNELPYMSAADVTEHARLLDAHPKWSKDKEDIITVDVAFTPGSVSLSAWALTPGGYKWGVENKDIGSDQPQGFTTSMGIKRKLLLSPRFKGYFLVPENGKWNYSFLGSSFAGLEKKPVHVKLDTPMQFYSDQHRPLHFQNFAELEDIGVDRTDNFA

SEQ ID NO: 18253 - DNA, 7205 bp, Muscodor strobelii
  misc_feature: SGI EST ID NO. CUFF.42988.0
  misc_feature: Variant of the nucleotide sequence at SEQ ID NO 18251
cggcgatgtgtcgcagaagaaatacaccagcgacaagcgcagctacctcggtgccctcaagttcatgccacacgcggtcatgaagctcctggagaacatgcccatgccctgggagtccgccagagacgtcaaggtcctctaccacgtcaatggatgcctcaccctagtcaacgagatcccgcgcgttatccccccggtctaccacgcgcaatgggccaccatgtgggtgacgatgcgcaaagagaagagcgaccggagactgttcaggagaatgagattcccgccgtttgacgacgaggagccgcccctgtcgtggtccgagaacttggaggacgtagagccgccccagcctatccagatggagctgctcgaagacgatgatgccgctgtgtacgaatggttctacgaccaccgtccgctgtccgacacagaccatgtgaatggaccaagttacaagaagtggaatctctcactgcagcagatggccaccctgcatcggatgagtcaggccctactgagtgacagaatcgaccggaatgatctttatctgtttgacctcaagagcttgctcacggcgaaagctctcaacgtcgctctgcccggcggtcctcgatttgagcccctgtataaggatattgatccgaatgacgaagagtttggagagttcaatgccatcgatcgcattatcttccgctcgcccatcaagaccgaagcgcgagttgcgtacccatacctgtacaactccctacctcgcagcgttcactcgcactggtattcgtaccccctcaacgtgtgcctcaaaagccatgatcctagtatgcctgcctactattgggactcacaagtcaaccccatttcttcccgatctgttgcccccaagaacatcacaaccagccatgaagatgagatctttggtgacaacactgaggagcctgaagaggaagctttcaagctaccgggcaatgttgagcctttcctcgccgacgaggagctctacactgaagacaccgtttcggcaattggtctatggtgggcaccatttccatttgaccgccgatctggccaaatgattagggctcaggacatccctttggtcaaacattggtaccttgaacatgccccgaagaaggtagctgtcaaagtccgggtatcttatcagaaactactgaaaacattcgtcctcaacgagctgcacacaaataagccaaaggctctcaaccgccaagacttgctgagaactctgaagcagaccaaattcttccaacagacgacgattgattgggttgaagctggccttcaagtatgccggcaaggcttcaacatgctaaacctgctgattcaccgcaaaaatctgacatatcttcacctagattacaacttcaatcttaagcctgtcaagacgttgactacgaaagaacgcaagaagtcaagatttggtaatgcatttcatctcatgcgcgagatccttcgcttgacaaaactcattgtcgacgcccaggttcaatatcgacttgggaacatcgatgctttccaactggctgatggcatcctttatgctttcaaccatgttggtcagctgacgggcatgtaccgatacaaatataagttgatgcaccagatccgtacatgcaaagacttaaagcatctcatatactatcggttcaacagtgggcccgtgggcaagcgtcctggctgtggtttttgggcaccggcctggagagtgtggctgttcttcatgagaggtatcatccctcttctagaacgatggcttggcaatttgctctcccgccagtttgaaggtcgtcacagtaaaggcgtcgccaaaactgtcaccaagcagcgtgtcgagtcgcatttcgatttggagctacgcgcctcagtcatggctgacctcatggacatgatgccggaaggcattaagcagaataaggtaaatgttgttctcgctcacctctctgaagcatggcgttgctggaagagcaatattccctggaaagtacctggattgccggcccccattgagaatatcatcctccgatacgtcaaatcaaaggcagattggtgggtctcggtcgcacactacaatcgggaacgtattcgaaggggagctactgtcgacaagactgtcgcgaaaaaaaacgtcggacgtcttacgcgtctatggctaaaggctgagcaagaacgtcaacacaactacatgaaggatgggccatatgtttcgtccgaagaggccgttgctatttacactacgacagtacattggcttgagtctcggaagttcacaccaattccgttccctagcgtttcttacaagcatgacacaaaaattttgatattggcccttgaacgactgcgtgaagcatactctgtaaagggtcgtcttaaccagagccagcgtgaagaactcgctctgattgagcaggcgtacgatagcccgggtactaccttggagagaatcaaacgatttcttctaacgcagcgtgctttcaaagaagttcaaatcgacatgaacgacaattacagctccatcaaccccgtatacgacatcgagccgattgaaaagattagtgacgcctatctcgatcaatatctatggtatcaggccgaccagcggcatctcttccctgcatggatcaagccctccgattccgaagtccctcccctcctagtatacaaatgggcgcagggtatcaacaacctcgagaaggtatgggcgactgccgacggagagtgcaatgtcatgatcgaaaccgagctttccaaagtctacgagaaaattgacctcaccctcctgaaccgccttttgagactcatcatggatcacaatttggcagattatatcagctctaagaacaatgttcagctgacatacaaagacatgaatcacgtgaacagctacggtatgatacgcggcctgcagttctctggcttcgtgtttcaatactacggccttgttcttgatctcctccttctcggcttgaatcgtgcgagcgagatcgccgggcctccatcaggcccaaatgatttcctgcagtttcgcgatcgcgaaacagaaagcaaacacccgatccgcttgtacacgagatatatcgacaaaatttgggtattcctccgattcaccgctgaagaatctcgtgatctcatccagcgtttcctgaccgaacaacccgacccaaatttcgagaatgtcattgggtacaagagtaagaaatgctggcccagagattcacgtatgcgcctcatgcgacacgacgtgaaccttgggcgggcagtgttttgggatctcaaaaatcggcttcctcgttctgtcacaaccattgagtgggacgatacatttgctagtgtttacagtcgcgataacccgaatcttcttttctcgatgtgtgggttcgaggttcgcattcttcctaagatcaggaatcagaatgacgagttccctgtcaaggacagcgtttggtctctcgtcgacaatacgaccaaggaaagaacagctcatgctttcctacaagtgacggaagaagacatacaaaagttcaacaatcgcattcgccagattctgatgtcttctggatcaactacgttcaccaagattgccaacaaatggaatacagctctgattgcgttgttcacatattatcgtgaggctgcagtctcgactgtaaatctcctcgacacaatcgttaaatgcgaaactaagatccagactcgagtgaaaattggtctcaactcgaaaatgccttcgcgttttcctcctgcagtattttatacaccaaaagaactgggaggtcttggtatgatttcaggatcacacatcctcatacctgccagtgacaaacgttggtcgaagcagacagatacgggcgtaacccattaccgtgctggtatgactcacgacgaggagaccttgattcccaatatcttccgctacatcattccttgggaagctgagttcatcgattctcagagagtgtggaccgaatactcgcaaaagcgtctcgaagccaaccagcaaaaccggcgacttaccttggaagatctagaagacagctgggatcgaggattacctcgcatcaatacccttttccagaaagaccgaagcacactaagctttgataaaggtttccgagcgaggagcgagttcaagatctatcagttgatgaagagcaatcccttctggtggacaagtcaacgtcatgatggaaagctgtggaacttgaatgcctaccgtactgatgtgattcaagctcttggtggtgttgaaacaatccttgaacacacgctgtttaaggctacagggtttccctcatgggagggcctcttttgggagcgtgcctcgggtttcgaggagtccatgaaattcaaaaagctgaccaatgcccagagatctggtttgaaccagattccgaaccgtcgtttcacactctggtggtcaccaactatcaatagagccaatgtttacgtcggtttccaggtccaacttgatctcactggtatcttcttgcacggcaagataccgacattaaagatctctctaattcagattttccgtgctcatttgtggcagaagattcacgagtcggttgtcatggatttctgtcaagtctttgaccaggagctcgaagttcttggaatcgagacagttcagaaggaaacgattcatcctcgaaaatcatacaaaatgaacagctcctgtgccgacatcctcctctttgcaaacagcaaatggaacgttaccagaccatcactcttatatgacaacaaggatgtcatcgagtcgacaacgaccaacaaattctggttggacattcagctgcgatatggtgactacgattctcacgacattgagcgctatactcgtgctaaatatcttgattacacaagtgataacatgagtatttatccttcagccactggtcttatgatcggcattgatctagcatataacctgtactcggcttatggtcaatactttcccggtctcaaggctctcgtccaacaggctatggctaagatcatgaaggcaaaccctgcgctttatgtccttcgcgagcgcattcgaaagggattgcagttgtatgcttccgagagtaaccaagagtttctgaactcgcagaattactctgaattattcagcaatcagacgaagctgttcatcgacgatacaaatgtctatcgtgtcacaatccacaagacctttgaaggaaatttgaccacaaagccaatcaatggtgcaattttcatattcaaccctcgcactggtcaactgttcttgaagattattcacaccagcgtttgggctggccagaaacgtctcggccaactggccaaatggaagactgcagaagaagtggcagctcttatacgatccttgcccatcgaagaacagccgaaggagctcattgtaacacgaaagggtcttctcgatcctcttgaggtccatcttcttgatttcccgaatatttccattcgcgcatcagaacttcagcttcctttccaggccgcgatgaaagtggaaaagcttggcgacatgatccttcgtgctaccgaaccacagatggtgcttttcaacctatatgacgagtggctcaagagcatctcttcatatactgcattctcacgtctcgtcttgattctacgtgccctccacgtcaatcctgacaagaccaagttgatccttcgccctgacaagactgttatcacgcaaatgcatcatatctggccaacactatctgacgaggattggatcaaagttgagacacaacttcgtgatctcattctacatgattacggaaaaaagaacaacgtcaacgtttcgagtctgacaagcagtgaagttcgtgacattatcttgggtatggaaatttcagcaccatcaatgcaacgacagcaagccgccgagattgagaaacagcagcaggagcagcagcagctcacagctgtgacgacgaaaactcaaaatgtccacggtgaggagatcattgtcacaacaacgtcccagtttgagcagcagacatttgcttccaagactgagtggcgtacccgagcaatcgcgacatctaacctcagaactcggtccaataatgtctatgtctcctctgtcgacaatgatatggatgatattacatacgtcatgccgaacaacatcttaaagaagttcattaccattgcagatcttcgcgtgcaagtagcaggttatctatatggtgtttcggcgcccgataacgaccaggtcaaggagattcgttgtattgtcatggtcccacagataggaggattacgcagcgtccaactccctcagcaactaccccaacacgagtatctcaaagacctcgtacctttgggtgttatacacaccatggccggaaacgaactcccatatatgtctgctgccgatgttacggagcatgctcgtctcctcgatgcacatccaaagtggtccaaggacaaggaggatattattacagttgacgtagcctttactcctggctcggtgtctctgtcggcgtgggcattgacccccggtggttacaaatggggcgtcgagaataaagatattggtagcgatcagccccaaggtttcacaacgtcaatgggcataaagcggaagctcctcctcagtccacgctttaagggctacttcctcgtcccagagaatggaaagtggaattatagtttcctgggcagcagtttcgccggcctcgaaaagaaaccagtgcatgtgaaactagacacgccaatgcagttttacagcgaccagcaccgaccgctacatttccaaaacttcgccgagctggaagatattggtgtggaccgaaccgacaattttgcctaagcctgcaaaatcgaacaaaagacgatggtggcgctctaagaaagtttgatacggtttcacgtggtacagaattcatttgggctggttgattgcccggcgttaggatggccttgaaattcgtggtaaggcggggacgtctcaatgtgattgtgcagacaagtgctcattggtaaatttgtaacatagtcgtatagagggaggatatacaagcctatcataatgccaacctatcatttcgaatatgaccaacgatcttagaatgtttcgtatccagatttatcctagcccgttcgtattagaatttcatagctgtctcggtctcgtggcaacgatcaatccgagtccttaattaactcgcagcagaagcttcgac

SEQ ID NO: 18254 - DNA, 831 bp, Muscodor strobelii
  misc_feature: SGI cDNA ID NO. 566115
  misc_feature: Reduced expression when VOC is produced
  misc_feature: Encodes the peptide sequence at SEQ ID NO 18255
atgccttccaaacaacagtgggacgacgagtccagcagcgaggccagcagcgccgagtcctcccccgccctccagcccacccgccgaagcaagttcgccgacgaagaagaggacagcgatgttctcgaggcttgggatgacgccgaggactctgaagtagagcgtgagaaggcaaagaaggccgaagaggctaaggccaaagctgaagccgaagccgccgccaacaagaagagcaaggcccaacgtatcaaggagcaccaggcccgccgccaggctgccgacgatgaagagtccagcgacgaggaggagtccgaggccgagcgtcgccagcgcctgagacgcaccgagaaagaagccgatcttgcccatgccgaatcactcttcggtgacgcgggattgagcctcagcaacgggcgcaagggaaccaccgcaggtgctgccgttgccatcgactcaagcgacccgaccaagaccgtcgatctcgggtctctgccgctcttcaagccagccacgaaactacagttcgagcaactgcgcaacaccctggtcccgattctcggcgcgaaccacaagaaagcccactacagcttgttcctccaggagctcgctaagcagctgtccaaggatctgcccagcgaccaaatcaagaagattgccagcagtctcaccgcgttgggcaatgagaagatgaaggaggagaaggctgccgacaagggcggaaagaagaccaaggcccagaagaccaagacagtgttggtcgccgccagggccaacacgacagataccgccgactacggtgatgatgccttcggcgatgatgactttatgtga

SEQ ID NO: 18255 - protein, 276 aa, Muscodor strobelii
  misc_feature: SGI Peptide ID NO. 566115
  misc_feature (1)..(276): Pfam Id: PF08597 Pfam Desc: Translation initiation factor eIF3 subunit
  misc_feature (100)..(275): NCBI GI: 261357513 Blast Desc: conserved [Verticillium albo-atrum VaMs.102]
  misc_feature (1)..(265): NCBI GI: 154323904 Blast Desc: BC1G_00351 [Botryotinia fuckeliana B05.10] gi|150842580|gb|EDN17773.1| BC1G_00351 [Botryotinia fuckeliana B05.10]
  misc_feature (1)..(276): NCBI GI: 39940212 Blast Desc: MGG_05134 [Magnaporthe grisea 70-15] gi|224494937|sp|A4QTA3.1|EIF3J_MAGGR RecName: Full=Eukaryotic translation initiation factor 3 subunit J; Short=eIF3j; AltName:
  misc_feature (1)..(256): NCBI GI: 156056685 Blast Desc: SS1G_04073 [Sclerotinia sclerotiorum 1980] gi|154701859|gb|EDO01598.1| SS1G_04073 [Sclerotinia sclerotiorum 1980]
  misc_feature (2)..(268): NCBI GI: 67539150 Blast Desc: AN5745.2 [Aspergillus nidulans FGSC A4] gi|74594908|sp|Q5B136.1|EIF3J_EMENI RecName: Full=Eukaryotic translation initiation factor 3 subunit J; Short=eIF3j; AltName:
  misc_feature (1)..(237): NCBI GI: 171676976 Blast Desc: protein product [Podospora anserina] gi|170936555|emb|CAP61215.1| protein product [Podospora anserina]
  misc_feature (2)..(276): NCBI GI: 259484778 Blast Desc: TPA: Eukaryotic translation initiation factor 3 subunit J (eIF3j)(Eukaryotic translation initiation factor 3 30 kDa subunit)(eIF-3 30 kDa) [Aspergillus nidulans FGSC A4]
  misc_feature (6)..(276): NCBI GI: 169602066 Blast Desc: SNOG_03910 [Phaeosphaeria nodorum SN15] gi|160706070|gb|EAT89115.2| SNOG_03910 [Phaeosphaeria nodorum SN15]
  misc_feature (29)..(273): NCBI GI: 46108922 Blast Desc: FG01343.1 [Gibberella zeae PH-1]
  misc_feature (6)..(237): NCBI GI: 189193939 Blast Desc: conserved [Pyrenophora tritici-repentis Pt-1C-BFP] gi|187978872|gb|EDU45498.1| conserved [Pyrenophora tritici-repentis Pt-1C-BFP]
  misc_feature: Useful for introducing or modulating the production of volatile compounds
MPSKQQWDDESSSEASSAESSPALQPTRRSKFADEEEDSDVLEAWDDAEDSEVEREKAKKAEEAKAKAEAEAAANKKSKAQRIKEHQARRQAADDEESSDEEESEAERRQRLRRTEKEADLAHAESLFGDAGLSLSNGRKGTTAGAAVAIDSSDPTKTVDLGSLPLFKPATKLQFEQLRNTLVPILGANHKKAHYSLFLQELAKQLSKDLPSDQIKKIASSLTALGNEKMKEEKAADKGGKKTKAQKTKTVLVAARANTTDTADYGDDAFGDDDFM

SEQ ID NO: 18256 - DNA, 1952 bp, Muscodor strobelii
  misc_feature: SGI EST ID NO. CUFF.43163.1
  misc_feature: Variant of the nucleotide sequence at SEQ ID NO 18254
gtagtttctggagacgcagaaccatagcctcttgtggcccaaatgcaagcaacaaacatagatattgttggaagctgaaagcacaagaggtgaacctggcgcatagcgatgcccctccaatggaagtcctcgctccgacgcacatggcgatgcccacaccacccacaaatatttttttcgatcgcatggatgacggttgtatccattgtgcctgtgactcagggaggtaacaaggaaatagagaataaggcaatctgaataagccttttatgcccaactctggagtctcctggcgtaggcttgttactgccactctgctccgacccgactcataagatattattagcttatttagcaggagcgtcccgcgcgcccgcccaccatccctcctctcccctctgactcccaccttgcgtcgattttcttctcttacacacacgtacacacccatcattagaaattttcgacatcgtcgccgcccaccactagtattgacctttggtccatcaccaacagcatcgcgcaagccagccctgtcccgtagacaacatcacatccaccatgccttccaaacaacagtgggacgacgagtccagcagcgaggccagcagcgccgagtcctcccccgccctccagcccacccgccgaagcaagttcgccgacgaagaagaggacagcgatgttctcgaggcttgggatgacgccgaggactctgaagtagagcgtgagaaggcaaagaaggccgaagaggctaaggccaaagctgaagccgaagccgccgccaacaagaagagcaaggcccaacgtatcaaggagcaccaggcccgccgccaggctgccgacgatgaagagtccagcgacgaggaggagtccgaggccgagcgtcgccagcgcctgagacgcaccgagaaagaagccgatcttgcccatgccgaatcactcttcggtgacgcgggattgagcctcagcaacgggcgcaagggaaccaccgcaggtgctgccgttgccatcgactcaagcgacccgaccaagaccgtcgatctcgggtctctgccgctcttcaagccagccacgaaactacagttcgagcaactgcgcaacaccctggtcccgattctcggcgcgaaccacaagaaagcccactacagcttgttcctccaggagctcgctaagcagctgtccaaggatctgcccagcgaccaaatcaagaagattgccagcagtctcaccgcgttgggcaatgagaagatgaaggaggagaaggctgccgacaagggcggaaagaagaccaaggcccagaagaccaagacagtgttggtcgccgccagggccaacacgacagataccgccgactacggtgatgatgccttcggcgatgatgactttatgtgaagagcctctcaagagaatttttattacgcgcggcgcctgtcggcacaacgccccaagattgagctcttcgatgtcgtctccccccagatcctcagcaacggcaggaactcggcatcgaaactacgcaaatatgaccaagtcgtcgtggtaacaatcggctacggtcatcctcaaggatatagtaatgatggatgagaacaatcgaggtcgaatccggagctttctggttgcatgttcattgagcgacaacgagcatcactattgcatagcgccatggcactaggggaaaggaaccccagcccttaaaagaaacggcctttgtaggctaaactgggggttctgaaatcgcattgctggcgatcaagaaaagagatgagtaaaaggcggctgtgagtcattgtagacagatagcagacaggaggtgggcatctccacctacttagaatacgcgcattttagattgctttatgctttcaaatacatctacgtgactgttgtggtattcctctgttctataacagcgattctcaatctcatctattacaccagctcacttgttg

SEQ ID NO: 18257 - DNA, 957 bp, Muscodor strobelii
  misc_feature: SGI cDNA ID NO. 566116
  misc_feature: Reduced expression when VOC is produced
  misc_feature: Encodes the peptide sequence at SEQ ID NO 18258
atgccttccaaacaacagtgggggctcggtggggctgcatcgcccgtcattgggacgcgccgcgatgcagtctgcagctgcccaacccggctccatgaccctgcatccgtcatccgccgctctggtccgctcccgactgaccgctcctttgcccaaacagacgacgagtccagcagcgaggccagcagcgccgagtcctcccccgccctccagcccacccgccgaagcaagttcgccgacgaagaagaggacagcgatgttctcgaggcttgggatgacgccgaggactctgaagtagagcgtgagaaggcaaagaaggccgaagaggctaaggccaaagctgaagccgaagccgccgccaacaagaagagcaaggcccaacgtatcaaggagcaccaggcccgccgccaggctgccgacgatgaagagtccagcgacgaggaggagtccgaggccgagcgtcgccagcgcctgagacgcaccgagaaagaagccgatcttgcccatgccgaatcactcttcggtgacgcgggattgagcctcagcaacgggcgcaagggaaccaccgcaggtgctgccgttgccatcgactcaagcgacccgaccaagaccgtcgatctcgggtctctgccgctcttcaagccagccacgaaactacagttcgagcaactgcgcaacaccctggtcccgattctcggcgcgaaccacaagaaagcccactacagcttgttcctccaggagctcgctaagcagctgtccaaggatctgcccagcgaccaaatcaagaagattgccagcagtctcaccgcgttgggcaatgagaagatgaaggaggagaaggctgccgacaagggcggaaagaagaccaaggcccagaagaccaagacagtgttggtcgccgccagggccaacacgacagataccgccgactacggtgatgatgccttcggcgagtaa

SEQ ID NO: 18258 - protein, 318 aa, Muscodor strobelii
  misc_feature: SGI Peptide ID NO. 566116
  misc_feature (54)..(317): Pfam Id: PF08597 Pfam Desc: Translation initiation factor eIF3 subunit
  misc_feature (54)..(314): Pfam Id: PF08597 Pfam Desc: Translation initiation factor eIF3 subunit
  misc_feature (146)..(318): NCBI GI: 261357513 Blast Desc: conserved [Verticillium albo-atrum VaMs.102]
  misc_feature (73)..(311): NCBI GI: 154323904 Blast Desc: BC1G_00351 [Botryotinia fuckeliana B05.10] gi|150842580|gb|EDN17773.1| BC1G_00351 [Botryotinia fuckeliana B05.10]
  misc_feature (73)..(302): NCBI GI: 156056685 Blast Desc: SS1G_04073 [Sclerotinia sclerotiorum 1980] gi|154701859|gb|EDO01598.1| SS1G_04073 [Sclerotinia sclerotiorum 1980]
  misc_feature (75)..(314): NCBI GI: 67539150 Blast Desc: AN5745.2 [Aspergillus nidulans FGSC A4] gi|74594908|sp|Q5B136.1|EIF3J_EMENI RecName: Full=Eukaryotic translation initiation factor 3 subunit J; Short=eIF3j; AltName:
  misc_feature (75)..(311): NCBI GI: 259484778 Blast Desc: TPA: Eukaryotic translation initiation factor 3 subunit J (eIF3j)(Eukaryotic translation initiation factor 3 30 kDa subunit)(eIF-3 30 kDa) [Aspergillus nidulans FGSC A4]
  misc_feature (75)..(318): NCBI GI: 39940212 Blast Desc: MGG_05134 [Magnaporthe grisea 70-15] gi|224494937|sp|A4QTA3.1|EIF3J_MAGGR RecName: Full=Eukaryotic translation initiation factor 3 subunit J; Short=eIF3j; AltName:
  misc_feature (54)..(283): NCBI GI: 171676976 Blast Desc: protein product [Podospora anserina] gi|170936555|emb|CAP61215.1| protein product [Podospora anserina]
  misc_feature (75)..(305): NCBI GI: 46108922 Blast Desc: FG01343.1 [Gibberella zeae PH-1]
  misc_feature (125)..(311): NCBI GI: 256735014 Blast Desc: NECHADRAFT_98639 [Nectria haematococca mpVI 77-13-4]
  misc_feature (54)..(316): NCBI GI: 169602066 Blast Desc: SNOG_03910 [Phaeosphaeria nodorum SN15] gi|160706070|gb|EAT89115.2| SNOG_03910 [Phaeosphaeria nodorum SN15]
  misc_feature: Useful for introducing or modulating the production of volatile compounds
MPSKQQWGLGGAASPVIGTRRDAVCSCPTRLHDPASVIRRSGPLPTDRSFAQTDDESSSEASSAESSPALQPTRRSKFADEEEDSDVLEAWDDAEDSEVEREKAKKAEEAKAKAEAEAAANKKSKAQRIKEHQARRQAADDEESSDEEESEAERRQRLRRTEKEADLAHAESLFGDAGLSLSNGRKGTTAGAAVAIDSSDPTKTVDLGSLPLFKPATKLQFEQLRNTLVPILGANHKKAHYSLFLQELAKQLSKDLPSDQIKKIASSLTALGNEKMKEEKAADKGGKKTKAQKTKTVLVAARANTTDTADYGDDAFGE

SEQ ID NO: 18259 - DNA, 1952 bp, Muscodor strobelii; identical to SEQ ID NO: 18256
  misc_feature: SGI EST ID NO. CUFF.43163.1
  misc_feature: Variant of the nucleotide sequence at SEQ ID NO 18257

SEQ ID NO: 18260 - DNA, 1218 bp, Muscodor strobelii
  misc_feature: SGI cDNA ID NO. 566117
  misc_feature: Encodes the peptide sequence at SEQ ID NO 18261
atggaagagggacagtataaatgcgctcgtgcgcacgagcgggctcaatgtctcctggatcaagtctggacatcgccgttgtgttgccgccgtgcgccgtcatcaatgtcatatccaccaatatcgagtattccgacgacgtctcccgaaaggttggcgctcgcatgtgctgaaaacccttctacttccgcctcaaccatcttgtatcttgcctatggctccaatctcgcagctgagacatttcttggccgccgaggcatcaggcctattagccagatcaatgtttcggcgcccgcatttgatctgaccttcgatcttcccggaattgcgtatagcgaaccctgctttgccaacacaaggccgaggaaactaccgaagcctcctattccaggagaaccgccgaagtttcctccgcctcagaactcatcacaacctcagcatggcaaaagtctccttccggcgcttccgggtcgcggtcccacctggtcaaaaggtctgtacggcgttgtctatgaggtcacgaccgaagactatgcgaccattatcaaaactgagggcggcgggggaggataccatgatgttttaacaccatgtatcgcttttccaccagacgttcgcgtaccagagaaaccaccaatcccggatctgcccaagccgtttctagcccataccctgtatgcaccggctttgagcgatctgcctggagccgagcccggggatggagacggagacaaagatcctaggaaactcccatggtacaaacgcctcttgcttcctactcatcgcccagacggatcacaaccgtctgcgcgatacttgaagctgatacgtgacggtgctgctgagcatgcgctgcccgaggactaccaacaatatctggcatcgttgcagccctacaccatcacgaccatgcagcaaaccgtgggcaaattcatgttcttgttgctagcattcccagttcttgtgtgcatgttgggcttaggtcgtctgctcgccgatgaaaacgggcgatatcctcgctggctaatgcttgcaacaactgtcggtattaactcgctttggaagatgtatgatgtgttcctcaagcctgtattcggggatggagagcggacaatgggggaggatgggaatgcgatcaggcagaagagagaaaggcagaaattcgcgaaagcaagcaaagtactggatgaaaaatctagacttttagttgactggtag

SEQ ID NO: 18261 - protein, 405 aa, Muscodor strobelii
  misc_feature: SGI Peptide ID NO. 566117
  misc_feature (28)..(404): NCBI GI: 116181070 Blast Desc: CHGG_01163 [Chaetomium globosum CBS 148.51] gi|88185460|gb|EAQ92928.1| CHGG_01163 [Chaetomium globosum CBS 148.51]
  misc_feature (37)..(402): NCBI GI: 261356521 Blast Desc: conserved [Verticillium albo-atrum VaMs.102]
  misc_feature (38)..(380): NCBI GI: 39975571 Blast Desc: MGG_00068 [Magnaporthe grisea 70-15] gi|145019098|gb|EDK03377.1| MGG_00068 [Magnaporthe grisea 70-15]
  misc_feature (38)..(371): NCBI GI: 256726787 Blast Desc: NECHADRAFT_66139 [Nectria haematococca mpVI 77-13-4]
  misc_feature (57)..(403): NCBI GI: 171695822 Blast Desc: protein product [Podospora anserina] gi|170948153|emb|CAP60317.1| protein product [Podospora anserina]
  misc_feature (33)..(382): NCBI GI: 46121291 Blast Desc: FG05024.1 [Gibberella zeae PH-1]
  misc_feature (34)..(372): NCBI GI: 85112709 Blast Desc: NCU00741 [Neurospora crassa OR74A] gi|28926174|gb|EAA35158.1| [Neurospora crassa OR74A]
  misc_feature (66)..(374): NCBI GI: 70990218 Blast Desc: conserved [Aspergillus fumigatus Af293] gi|66847590|gb|EAL87920.1| conserved [Aspergillus fumigatus Af293]
  misc_feature (66)..(374): NCBI GI: 159130438 Blast Desc: conserved [Aspergillus fumigatus A1163]
  misc_feature (64)..(402): NCBI GI: 189205587 Blast Desc: gliotoxin biosynthesis protein GliK [Pyrenophora tritici-repentis Pt-1C-BFP] gi|187975221|gb|EDU41847.1| gliotoxin biosynthesis protein GliK [Pyrenophora tritici-repentis
MEEGQYKCARAHERAQCLLDQVWTSPLCCRRAPSSMSYPPISSIPTTSPERLALACAENPSTSASTILYLAYGSNLAAETFLGRRGIRPISQINVSAPAFDLTFDLPGIAYSEPCFANTRPRKLPKPPIPGEPPKFPPPQNSSQPQHGKSLLPALPGRGPTWSKGLYGVVYEVTTEDYATIIKTEGGGGGYHDVLTPCIAFPPDVRVPEKPPIPDLPKPFLAHTLYAPALSDLPGAEPGDGDGDKDPRKLPWYKRLLLPTHRPDGSQPSARYLKLIRDGAAEHALPEDYQQYLASLQPYTITTMQQTVGKFMFLLLAFPVLVCMLGLGRLLADENGRYPRWLMLATTVGINSLWKMYDVFLKPVFGDGERTMGEDGNAIRQKRERQKFAKASKVLDEKSRLLVDW

SEQ ID NO: 18262 - DNA, 1816 bp, Muscodor strobelii
  misc_feature: SGI EST ID NO. CUFF.43013.0
  misc_feature: Variant of the nucleotide sequence at SEQ ID NO 18260
cgtatgatgagtatgttgagctgtgtaatttggtaataaaatcgaattccgaactccaatttcaaaacaaaacgtgccgagttgaatgctaactgtgcagtctttcgactcttctaagccaagccaatcgccaatgacttagtctagaccgcacggtgtggacacatccaatgaaaccccagcaccgccgccccgtcggaatcccgatgatgattcaagagtgagcctcgaaatgtctccggcctgtcgaagtcgtccgtatttcgtccggaaacttttgctctttctgtattaaagtcctgtgatgacaaacctgtgagagctttgatctccctgaagccccaagccaacatagcgaactgtaaactgagcaacgtgcgagtctggtgtattcatcaggcttccatcgtcgttgtcatcgtacactaagtcaaacgcttgcctaaaacggcgtgtcgtgtttcgtttcctgccccagatagccacattacagcatggaagagggacagtataaatgcgctcgtgcgcacgagcgggctcaatgtctcctggatcaagtctggacatcgccgttgtgttgccgccgtgcgccgtcatcaatgtcatatccaccaatatcgagtattccgacgacgtctcccgaaaggttggcgctcgcatgtgctgaaaacccttctacttccgcctcaaccatcttgtatcttgcctatggctccaatctcgcagctgagacatttcttggccgccgaggcatcaggcctattagccagatcaatgtttcggcgcccgcatttgatctgaccttcgatcttcccggaattgcgtatagcgaaccctgctttgccaacacaaggccgaggaaactaccgaagcctcctattccaggagaaccgccgaagtttcctccgcctcagaactcatcacaacctcagcatggcaaaagtctccttccggcgcttccgggtcgcggtcccacctggtcaaaaggtctgtacggcgttgtctatgaggtcacgaccgaagactatgcgaccattatcaaaactgagggcggcgggggaggataccatgatgttttaacaccatgtatcgcttttccaccagacgttcgcgtaccagagaaaccaccaatcccggatctgcccaagccgtttctagcccataccctgtatgcaccggctttgagcgatctgcctggagccgagcccggggatggagacggagacaaagatcctaggaaactcccatggtacaaacgcctcttgcttcctactcatcgcccagacggatcacaaccgtctgcgcgatacttgaagctgatacgtgacggtgctgctgagcatgcgctgcccgaggactaccaacaatatctggcatcgttgcagccctacaccatcacgaccatgcagcaaaccgtgggcaaattcatgttcttgttgctagcattcccagttcttgtgtgcatgttgggcttaggtcgtctgctcgccgatgaaaacgggcgatatcctcgctggctaatgcttgcaacaactgtcggtattaactcgctttggaagatgtatgatgtgttcctcaagcctgtattcggggatggagagcggacaatgggggaggatgggaatgcgatcaggcagaagagagaaaggcagaaattcgcgaaagcaagcaaagtactggatgaaaaatctagacttttagttgactggtagttattttgattacgaaatacacgaagttgatccataggttcgggaatattacgtgattgtggtgaaagatggcgaagactcgctcccttgcatgatctgcccgg

SEQ ID NO: 18263 - DNA, 1281 bp, Muscodor strobelii
  misc_feature: SGI cDNA ID NO. 566118
  misc_feature: Reduced expression when VOC is produced
  misc_feature: Encodes the peptide sequence at SEQ ID NO 18264
atggcacccggtctgctgaacgtcagcgacgttggcgagaatgggaagagacacaaggtaacggtcgttggctcgggcaactggggctcgaccatcgccaagatcgtcgccgagaacactaaagcccaccccgaactattcgtggaggacgtccagatgtgggtatacgaggaggatgtcacataccagggcaaacccgagaagcttacgaacgtaatcaatgcctaccacgagaatatcaaatacctaccaaacatcgccctcccagcaaacctcatcgcaaacccttctctcgaagacgccgtccaggattcgtccattcttatcttcaacctaccccaccaattcatccacagagtctgctcccagcttaagggcaagattgtgccctacgcgcgtgctatatcctgcatcaaaggtgtcgatgtgaccgacgatggtgtatctctattctcagaatggattggtgatggcctaggcatctactgcggtgctctctcaggagctaatctggcatctgagatcgcggcagagaagctgtctgaaactacaattgcatacgatccgccaccgatggacaactcgcgcaccccttcgcggattaatactccgcggtcttctacgcctgttcgccaggggtttgctaatgagttgagcataacacccttggccgatatgcagcacagggatgcacggggtaggatcagcaagacacgactaactcctgtgccgcccgagtatccaccactcgatcacgatactttcaaaacacttttccagcgaccatacttcctcgtcagtatggtctctgacgtggctggaacatctcttagtggtgccctcaagaacatcgttgctttggccgctggttttgtaatcggaaagggctggggaaataacgctaaatctgccgtcatgcgcgttggcttactcgagatgattaagtttggcaagaacttctttggcgagacagtatcgacggctactttcacggaggagagtgcgggtgttgccgatcttatcacgagttgctcagacggaagaaacttcaatggggcaagaatggctatggagcgaggcgtctccgtccaagagatagagcagaaagagctcaatggccagaaacttcaaggaacaagtaccgcagctgaagtcaattcgtttttgaaacagcagggcgtagagggtgactacccattgtttacggcggtacatgacattttggagggcaagaagactgtagacgacataccgtccatattggcaatggctcagagatga

SEQ ID NO: 18264 - protein, 426 aa, Muscodor strobelii
  misc_feature: SGI Peptide ID NO. 566118
  misc_feature (270)..(421): Pfam Id: PF07479 Pfam Desc: NAD-dependent glycerol-3-phosphate dehydrogenase C-terminus
  misc_feature (18)..(196): Pfam Id: PF01210 Pfam Desc: NAD-dependent glycerol-3-phosphate dehydrogenase N-terminus
  misc_feature (16)..(422): NCBI GI: 74696870 Blast Desc: GPD_COLGL RecName: Full=Glycerol-3-phosphate dehydrogenase [NAD+] gi|33114699|gb|AAP94992.1| glycerol-3-phosphate dehydrogenase [Colletotrichum
  misc_feature (16)..(426): NCBI GI: 74691413 Blast Desc: GPD_TRIAT RecName: Full=Glycerol-3-phosphate dehydrogenase [NAD+] gi|38230291|gb|AAR14209.1| glycerol-3-phosphate dehydrogenase (NAD+) [Trichoderma
  misc_feature (8)..(422): NCBI GI: 154314367 Blast Desc: BC1G_05277 [Botryotinia fuckeliana B05.10] gi|150848922|gb|EDN24115.1| BC1G_05277 [Botryotinia fuckeliana B05.10]
  misc_feature (8)..(421): NCBI GI: 46121289 Blast Desc: FG05023.1 [Gibberella zeae PH-1]
  misc_feature (8)..(421): NCBI GI: 256726788 Blast Desc: [Nectria haematococca mpVI 77-13-4]
  misc_feature (8)..(424): NCBI GI: 156036212 Blast Desc: SS1G_12794 [Sclerotinia sclerotiorum 1980] gi|154698200|gb|EDN97938.1| SS1G_12794 [Sclerotinia sclerotiorum 1980]
  misc_feature (8)..(421): NCBI GI: 58257379 Blast Desc: succinate dehydrogenase ubiquinone iron-sulfur protein-like protein [Magnaporthe grisea]
  misc_feature (8)..(421): NCBI GI: 39975573 Blast Desc: conserved [Magnaporthe grisea 70-15] gi|148887377|sp|Q5G5B9.2|GPD_MAGGR RecName: Full=Glycerol-3-phosphate dehydrogenase [NAD+] conserved grisea
  misc_feature (16)..(421): NCBI GI: 119172833 Blast Desc: CIMG_09984 [Coccidioides immitis RS]
  misc_feature (16)..(421): NCBI GI: 261199696 Blast Desc: glycerol-3-phosphate dehydrogenase [Ajellomyces dermatitidis SLH14081] gi|239594457|gb|EEQ77038.1| glycerol-3-phosphate dehydrogenase [Ajellomyces dermatitidis
  misc_feature (16)..(422): SWISSPROT Homolog: EC 1.1.1.8 Glycerol-3-phosphate dehydrogenase (NAD(+))
  misc_feature: Useful for introducing or modulating the production of volatile compounds
MAPGLLNVSDVGENGKRHKVTVVGSGNWGSTIAKIVAENTKAHPELFVEDVQMWVYEEDVTYQGKPEKLTNVINAYHENIKYLPNIALPANLIANPSLEDAVQDSSILIFNLPHQFIHRVCSQLKGKIVPYARAISCIKGVDVTDDGVSLFSEWIGDGLGIYCGALSGANLASEIAAEKLSETTIAYDPPPMDNSRTPSRINTPRSSTPVRQGFANELSITPLADMQHRDARGRISKTRLTPVPPEYPPLDHDTFKTLFQRPYFLVSMVSDVAGTSLSGALKNIVALAAGFVIGKGWGNNAKSAVMRVGLLEMIKFGKNFFGETVSTATFTEESAGVADLITSCSDGRNFNGARMAMERGVSVQEIEQKELNGQKLQGTSTAAEVNSFLKQQGVEGDYPLFTAVHDILEGKKTVDDIPSILAMAQR

SEQ ID NO: 18265 - DNA, 1819 bp, Muscodor strobelii
  misc_feature: SGI EST ID NO. CUFF.43076.1
  misc_feature: Variant of the nucleotide sequence at SEQ ID NO 18263
caggcggtctagggcctattgtgcgtctagcccagtgcgtcattggcgttctgcaagttcctcggcctctgctgtcacatgaatttcaaactaaagaaaggtgcaccaaatgctggcaacacgttgggcaaacaggtacctgcaattgcacgccggaaccaatgagacgatcttcagcttagaatgcaatccgaactatttttcatccccgacggccaaagagattgcctagaattagatagacatccttgagtgacacagctcccttagaacatatatgttgatgctcctccattgctctacatgagagtcttcctccgcctgtctcataactttgctaaacattcgcctcttccttcgttcgcggttcccttacgccctctgcgctatcatcgcgtcagatctttctccgctgagatacccaaaatggcacccggtctgctgaacgtcagcgacgttggcgagaatgggaagagacacaaggtaacggtcgttggctcgggcaactggggctcgaccatcgccaagatcgtcgccgagaacactaaagcccaccccgaactattcgtggaggacgtccagatgtgggtatacgaggaggatgtcacataccagggcaaacccgagaagcttacgaacgtaatcaatgcctaccacgagaatatcaaatacctaccaaacatcgccctcccagcaaacctcatcgcaaacccttctctcgaagacgccgtccaggattcgtccattcttatcttcaacctaccccaccaattcatccacagagtctgctcccagcttaagggcaagattgtgccctacgcgcgtgctatatcctgcatcaaaggtgtcgatgtgaccgacgatggtgtatctctattctcagaatggattggtgatggcctaggcatctactgcggtgctctctcaggagctaatctggcatctgagatcgcggcagagaagctgtctgaaactacaattgcatacgatccgccaccgatggacaactcgcgcaccccttcgcggattaatactccgcggtcttctacgcctgttcgccaggggtttgctaatgagttgagcataacacccttggccgatatgcagcacagggatgcacggggtaggatcagcaagacacgactaactcctgtgccgcccgagtatccaccactcgatcacgatactttcaaaacacttttccagcgaccatacttcctcgtcagtatggtctctgacgtggctggaacatctcttagtggtgccctcaagaacatcgttgctttggccgctggttttgtaatcggaaagggctggggaaataacgctaaatctgccgtcatgcgcgttggcttactcgagatgattaagtttggcaagaacttctttggcgagacagtatcgacggctactttcacggaggagagtgcgggtgttgccgatcttatcacgagttgctcagacggaagaaacttcaatggggcaagaatggctatggagcgaggcgtctccgtccaagagatagagcagaaagagctcaatggccagaaacttcaaggaacaagtaccgcagctgaagtcaattcgtttttgaaacagcagggcgtagagggtgactacccattgtttacggcggtacatgacattttggagggcaagaagactgtagacgacataccgtccatattggcaatggctcagagatgagttagatatctgattacgtgtgtacgaagaatcaagactagaggcagatggctagacggtttataattatcggaataatttgaaagcaatttcacacagtagtgtatcagtg

SEQ ID NO: 18266 - DNA, 4635 bp, Muscodor strobelii
  misc_feature: SGI cDNA ID NO. 566119
  misc_feature: Reduced expression when VOC is produced
  misc_feature: Encodes the peptide sequence at SEQ ID NO 18267
atggctcctcgaacagtgatctctagcgaggtctatatcttacctctaaaagacaacggagctccagacgtgcccggagagtacatctacttagcaccgcgatccgagagtcctattacaatcagatttaccatcgagggaacttcttcgatatgtaggaatggcagtctttgggtcaatatccctcagcagggctctgattttcatagaaataagttcacagaatacaagctggtccccgacttcaatcggaacatcgagatatccataccaatatacggcgcaggcgcgttcgccttctatacaacttactcagagcttccccagctgtcagaaactattccttcaggcgaacctacttcctcaacgaaacagactcctgtatactatatcgatgtggctccacggttgtctcttgacgggaggccactacccctcccggcactctctatcttctcggtcatcagcaaattcatggggaaatatccatctgattgggagaatcatttgcgtggaataagcggccgagggtacaatatgatacactttacgcctctccaaattcgaggtgcgtcgaattcgccttacagtctgtatgatcagctggggtgggatccgcaatgttttccggccggggaagacgatgtacagcaaatggttgatagcttggaacgcaatcactctttgctcagcttgactgatatcgttctcaatcacactgctcataacagcgaatggctctacgaacacccggaagcaggctacaatctcaccaccgcgccctggctggaatccgcctatctacttgacacaaagctcttgcaatttgggttccagttacaagaacttggctatccggccgagttgaagtccgtggaggacctcgtcaagatcatggacggcataaaagaacatgtgattgctaagattcgactctgggaatattacgcacttgatgtagacaagaacgcagatgccgcggttgaatcctgggccggaggttcggtcgagactgacaaggatctcggtcatctccaagatgccagtcttaaggaccaagcaacattccttctcgaacatgggttgctcggaaacgataggctcggagagcgcttccgtcgccagatcgaccccaaggtcctggcttcattgataaccgtcctctttggaaagtacaggggcgaggccgacgaatccaccattcgatccaaggttgtccagatcctcgacgctgctaatgtggccttctacgatgagtatgacaaagagatagcagatatcctgcagcagttgttcaacaggatcaaatatgtacgactagatgaacatggtccaaagttgggccctatcaaccaagagaatccgctaatcgaaagctacttcactcgccttgacaagtcgaaggcctcggattcattcaagaccgaagatcttgttctcgtgaacaatggctgggtctgggctggcaatgctctggttgataatgctggtccacaatcacgagtctacctgcgaagagaagtgattgtatggggtgactgtgttaaacttcgatatggagatgcgcctgaggatagtccttggctctgggaatatatgactaaatatgcccgaatgctggctaagttctttgctggcttcagaatcgacaactgtcactcaaccccgctgcatgttgcagagcatattttggatgaggctcgacgagttcggccgaatctttatgttgttgcagagcttttcactggttccgaggagatggactatgtattcgtgaaaagacttggtctttcctctttgatccgagaagcgatgcaagcatggagtacagcagaaatgagtcgactggtccatcgtcatggcggtcgccctattggtagttttgatctcgacgagacaccaaagggcagtcccagtagtgcacctacaagtcccgatgcccataataaaggcatgtccatgcgggaaaaggtcagtctcatcaagccggcgcctattcaagcactgttcatggattgcacacacgataatgaagttccagcgcaaaagagagattcaagagacacattacccaacgccgcgttggtctgcatgtgtgccagtgcttcaggcagtgtcatgggttatgacgaggtttatcctaagcttgtcgacttggtaaatgaaaccagactttacacatctgaatcatccgtagccaaggaaatcaaagttggcggcggcaagggcggcatcggtggtgtgaagaagctattcaaccagatccataccttaatgggcaaggacggatatgatgaaacgcacattcatcatgaagaccaatacattactgtccatagagtgcatccagaatcacggaaaggatacttcctaattgctcacaccgcctatcctggttacggaaatggtaatggtgcgtttagctccgttcgtctgggcggtacgaaagctcgtcacctaggcagctggatgcttgaagtagacgccagcgatgaagcaaagaaagaggccgaaaatgacaagaaacacctgagaggactcccaagccgggttatcgacgtgccgggtatccgtatggaagttaagggtgatgagaccattatcactgtccgagacaaattcccgcctggcagtattgccctgtttgagacttggataccagctgcagaacattcagctggtctcgacaactacgtcacatcaggggcaaaggcagctatggccgatctggacttggtcgatttgaattttctgctctatcgatgcgaagcagaggagcgggctggtagcgatggaaaagatggagtatatgagattccaggctacggaaagactgtctacgctggtctacagggttggtggagtcttttgaagaatatcatcaaggaaaataaccttgcacaccccctatgtcagaatcttcgcgatggacagtgggctatggactacactgtagggcgtttggaaagaatcagccaacaaccagaatttgctgggttggcgaagccagcagagtggttcaaagaacgtttcaatgctttacgcggtatcccaagtttcctgctgcccaggtacttcgctatggtcatacgaaccgcatacacgactgcttgggaaaggggcttggagctgatgagcgacaatgtgcgcaacgggcaacagtttcttcaaagccttgggatggtcagcatacaacagacgggcatcgtaaagtctgcatctctgtggccgaagaaattagtcccttctcttgctgccggacttcctcatttcgccgtcgaatgggctcggtgttggggtcgtgatgtctttatctcgctacgcggtctctatcttgggactggtcgctttgatgaagctgcagagcatatttttgcttttgccagcgtcttgaagcacggcatgataccaaatctactcagcagcggcaatctgccgcgctataatagccgagactccgtatggttcttcttgcaatgcatccaagactatactcgattggcaccgaacggcgagacctttctaacgaagaaggtgaaaagaagatttctgccttacgatgatacttggttcgagtctgatgatgccagagcatattccaaagaaagcactattcaagacgtcattcaggaagctctgcaaagacacgcatctgggatgaagttccgtgaagcaaatgctggccctagtattgatatgcagatgagcgatgaagggttcaacatcgaaatcactgtcgactggtcgaacggcatcattttcggaggcaatcaacacaactgtggcacctggatggataagatgggcgagagcgaacgtgcaagttccaaaggcgtgcctggtacacctcgcgatggcgctgcgatcgagattaccggcctactctacagcacattgacttggcttgcgcgactacactctgagggcaagtacccatacaatagcgtcaagaagtctgatgacactgaaatcactttctctgcctgggctgaattgttgaaatcgaacttcgagcacagttactatgtgcccaagaatgcatcagatgataatcagtatgccgtcaactcgagcatagtcaatcgacgcggcatatacaaagatcttttccgctctggcaaggaatacgaggactaccagctgcggccgaactttgccattgctatgacagtagcaccggatcttttcaatccggagcacgctatgggcgctttagttctcgccgacgaggttctacgaggaccaacaggaatggccacgcttgaccctgcggaccttaactataggccgtactacatcaacagcgaagactcaactgacttcgcgacatccaagggccggaactaccaccagggtccggagtggctgtggcccacgggtttcttcttgcgggctcttctcaaatttgatcttcagagacgtaagactaaagaaggacgcgtggaggcgttccaacaggtcacgaggcggcttagtggctgcaaggagatgatagagagcagtccttgggctggcctgacggagcttacgcagaaggatggccaggagtgtggcgattctagccccacacaagcatggagctcaggttgtctgatagacctctatatggatgccgccgagtatgccatggaataa

SEQ ID NO: 18267 - protein, 1544 aa, Muscodor strobelii
  misc_feature: SGI Peptide ID NO. 566119
  misc_feature (1056)..(1533): Pfam Id: PF06202 Pfam Desc: Amylo-alpha-1,6-glucosidase
  misc_feature (6)..(1540): NCBI GI: 164428567 Blast Desc: glycogen debranching enzyme [Neurospora crassa OR74A] gi|157072195|gb|EAA35160.2| glycogen debranching enzyme [Neurospora crassa OR74A]
  misc_feature (1)..(1540): NCBI GI: 171695826 Blast Desc: protein product [Podospora anserina] gi|170948155|emb|CAP60319.1| protein product [Podospora anserina]
  misc_feature (3)..(1540): NCBI GI: 256726790 Blast Desc: glycoside hydrolase family 13 [Nectria haematococca mpVI 77-13-4]
  misc_feature (6)..(1540): NCBI GI: 116181066 Blast Desc: conserved [Chaetomium globosum CBS 148.51] gi|88185458|gb|EAQ92926.1| conserved [Chaetomium globosum CBS 148.51]
  misc_feature (3)..(1540): NCBI GI: 46136377 Blast Desc: FG09704.1 [Gibberella zeae PH-1]
  misc_feature (6)..(1540): NCBI GI: 145611872 Blast Desc: MGG_00063 [Magnaporthe grisea 70-15] gi|145019103|gb|EDK03382.1| MGG_00063 [Magnaporthe grisea 70-15]
  misc_feature (6)..(1541): NCBI GI: 154314369 Blast Desc: BC1G_05278 [Botryotinia fuckeliana B05.10] gi|150848923|gb|EDN24116.1| BC1G_05278 [Botryotinia fuckeliana B05.10]
  misc_feature (8)..(1542): NCBI GI: 212536588 Blast Desc: glycogen debranching enzyme Gdb1, [Penicillium marneffei ATCC 18224] gi|210070849|gb|EEA24939.1| glycogen debranching enzyme Gdb1, [Penicillium marneffei ATCC 18224]
  misc_feature (10)..(1542): NCBI GI: 119497357 Blast Desc: amylo-alpha-1,6-glucosidase, [Neosartorya fischeri NRRL 181] gi|119413599|gb|EAW23540.1| amylo-alpha-1,6-glucosidase, [Neosartorya fischeri NRRL 181]
  misc_feature (8)..(1538): NCBI GI: 242796129 Blast Desc: glycogen debranching enzyme Gdb1, [Talaromyces stipitatus ATCC 10500] gi|218719323|gb|EED18743.1| glycogen debranching enzyme Gdb1, [Talaromyces stipitatus ATCC 10500]
  misc_feature (32)..(1537): SWISSPROT Homolog: EC 3.2.1.33 Amylo-alpha-1,6-glucosidase
  misc_feature (32)..(1537): SWISSPROT Homolog: EC 2.4.1.25 4-alpha-glucanotransferase
  misc_feature: Useful for introducing or modulating the production of volatile compounds
MAPRTVISSEVYILPLKDNGAPDVPGEYIYLAPRSESPITIRFTIEGTSSICRNGSLWVNIPQQGSDFHRNKFTEYKLVPDFNRNIEISIPIYGAGAFAFYTTYSELPQLSETIPSGEPTSSTKQTPVYYIDVAPRLSLDGRPLPLPALSIFSVISKFMGKYPSDWENHLRGISGRGYNMIHFTPLQIRGASNSPYSLYDQLGWDPQCFPAGEDDVQQMVDSLERNHSLLSLTDIVLNHTAHNSEWLYEHPEAGYNLTTAPWLESAYLLDTKLLQFGFQLQELGYPAELKSVEDLVKIMDGIKEHVIAKIRLWEYYALDVDKNADAAVESWAGGSVETDKDLGHLQDASLKDQATFLLEHGLLGNDRLGERFRRQIDPKVLASLITVLFGKYRGEADESTIRSKVVQILDAANVAFYDEYDKEIADILQQLFNRIKYVRLDEHGPKLGPINQENPLIESYFTRLDKSKASDSFKTEDLVLVNNGWVWAGNALVDNAGPQSRVYLRREVIVWGDCVKLRYGDAPEDSPWLWEYMTKYARMLAKFFAGFRIDNCHSTPLHVAEHILDEARRVRPNLYVVAELFTGSEEMDYVFVKRLGLSSLIREAMQAWSTAEMSRLVHRHGGRPIGSFDLDETPKGSPSSAPTSPDAHNKGMSMREKVSLIKPAPIQALFMDCTHDNEVPAQKRDSRDTLPNAALVCMCASASGSVMGYDEVYPKLVDLVNETRLYTSESSVAKEIKVGGGKGGIGGVKKLFNQIHTLMGKDGYDETHIHHEDQYITVHRVHPESRKGYFLIAHTAYPGYGNGNGAFSSVRLGGTKARHLGSWMLEVDASDEAKKEAENDKKHLRGLPSRVIDVPGIRMEVKGDETIITVRDKFPPGSIALFETWIPAAEHSAGLDNYVTSGAKAAMADLDLVDLNFLLYRCEAEERAGSDGKDGVYEIPGYGKTVYAGLQGWWSLLKNIIKENNLAHPLCQNLRDGQWAMDYTVGRLERISQQPEFAGLAKPAEWFKERFNALRGIPSFLLPRYFAMVIRTAYTTAWERGLELMSDNVRNGQQFLQSLGMVSIQQTGIVKSASLWPKKLVPSLAAGLPHFAVEWARCWGRDVFISLRGLYLGTGRFDEAAEHIFAFASVLKHGMIPNLLSSGNLPRYNSRDSVWFFLQCIQDYTRLAPNGETFLTKKVKRRFLPYDDTWFESDDARAYSKESTIQDVIQEALQRHASGMKFREANAGPSIDMQMSDEGFNIEITVDWSNGIIFGGNQHNCGTWMDKMGESERASSKGVPGTPRDGAAIEITGLLYSTLTWLARLHSEGKYPYNSVKKSDDTEITFSAWAELLKSNFEHSYYVPKNASDDNQYAVNSSIVNRRGIYKDLFRSGKEYEDYQLRPNFAIAMTVAPDLFNPEHAMGALVLADEVLRGPTGMATLDPADLNYRPYYINSEDSTDFATSKGRNYHQGPEWLWPTGFFLRALLKFDLQRRKTKEGRVEAFQQVTRRLSGCKEMIESSPWAGLTELTQKDGQECGDSSPTQAWSSGCLIDLYMDAAEYAME

SEQ ID NO: 18268 - DNA, 6250 bp, Muscodor strobelii
  misc_feature: SGI EST ID NO. CUFF.43022.0
  misc_feature: Variant of the nucleotide sequence at SEQ ID NO 18266
cgcttcgtgccgcccaggtgctcgatcatcattggctgcatcgtaaccacgaagctgacatggcccatggatttcgtgacttctcgattaccagctagcctcgcgacttgtctgctaaaaagcactggctttcacctccactttgtatgtaagtagaacttgtgcaagtcatcatccgatccacgcgctattgatcgcgctttctctagagtcgaagtgatacttgcatagccaagggtgctgccaaggtcctgaaactggccgcagtctcaccagcttgctctctcccaaaatatataccatcagtctctttcacaccgcctggggaggaagaaaaagtattgtaccttttccccaactctcgcagaaatacgctgcagataacaatccatcactcgttgcattctcccttgacacctgtgtcagttcttcgtccaccaatctctcttcttgcccgtccttaagatctgccaaccagtctgcgagacagtttttttttctcgtcgtctcagcacacgatcagctcaccaatgattgagagcgcgaacgagaaataaatcatatcctggtttaggtggcgtcacttcaaaatggctcctcgaacagtgatctctagcgaggtctatatcttacctctaaaagacaacggagctccagacgtgcccggagagtacatctacttagcaccgcgatccgagagtcctattacaatcagatttaccatcgagggaacttcttcgatatgtaggaatggcagtctttgggtcaatatccctcagcagggctctgattttcatagaaataagttcacagaatacaagctggtccccgacttcaatcggaacatcgagatatccataccaatatacggcgcaggcgcgttcgccttctatacaacttactcagagcttccccagctgtcagaaactattccttcaggcgaacctacttcctcaacgaaacagactcctgtatactatatcgatgtggctccacggttgtctcttgacgggaggccactacccctcccggcactctctatcttctcggtcatcagcaaattcatggggaaatatccatctgattgggagaatcatttgcgtggaataagcggccgagggtacaatatgatacactttacgcctctccaaattcgaggtgcgtcgaattcgccttacagtctgtatgatcagctggggtgggatccgcaatgttttccggccggggaagacgatgtacagcaaatggttgatagcttggaacgcaatcactctttgctcagcttgactgatatcgttctcaatcacactgctcataacagcgaatggctctacgaacacccggaagcaggctacaatctcaccaccgcgccctggctggaatccgcctatctacttgacacaaagctcttgcaatttgggttccagttacaagaacttggctatccggccgagttgaagtccgtggaggacctcgtcaagatcatggacggcataaaagaacatgtgattgctaagattcgactctgggaatattacgcacttgatgtagacaagaacgcagatgccgcggttgaatcctgggccggaggttcggtcgagactgacaaggatctcggtcatctccaagatgccagtcttaaggaccaagcaacattccttctcgaacatgggttgctcggaaacgataggctcggagagcgcttccgtcgccagatcgaccccaaggtcctggcttcattgataaccgtcctctttggaaagtacaggggcgaggccgacgaatccaccattcgatccaaggttgtccagatcctcgacgctgctaatgtggccttctacgatgagtatgacaaagagatagcagatatcctgcagcagttgttcaacaggatcaaatatgtacgactagatgaacatggtccaaagttgggccctatcaaccaagagaatccgctaatcgaaagctacttcactcgccttgacaagtcgaaggcctcggattcattcaagaccgaagatcttgttctcgtgaacaatggctgggtctgggctggcaatgctctggttgataatgctggtccacaatcacgagtctacctgcgaagagaagtgattgtatggggtgactgtgttaaacttcgatatggagatgcgcctgaggatagtccttggctctgggaatatatgactaaatatgcccgaatgctggctaagttctttgctggcttcagaatcgacaactgtcactcaaccccgctgcatgttgcagagcatattttggatgaggctcgacgagttcggccgaatctttatgttgttgcagagcttttcactggttccgaggagatggactatgtattcgtgaaaagacttggtctttcctctttgatccgagaagcgatgcaagcatggagtacagcagaaatgagtcgactggtccatcgtcatggcggtcgccctattggtagttttgatctcgacgagacaccaaagggcagtcccagtagtgcacctacaagtcccgatgcccataataaaggcatgtccatgcgggaaaaggtcagtctcatcaagccggcgcctattcaagcactgttcatggattgcacacacgataatgaagttccagcgcaaaagagagattcaagagacacattacccaacgccgcgttggtctgcatgtgtgccagtgcttcaggcagtgtcatgggttatgacgaggtttatcctaagcttgtcgacttggtaaatgaaaccagactttacacatctgaatcatccgtagccaaggaaatcaaagttggcggcggcaagggcggcatcggtggtgtgaagaagctattcaaccagatccataccttaatgggcaaggacggatatgatgaaacgcacattcatcatgaagaccaatacattactgtccatagagtgcatccagaatcacggaaaggatacttcctaattgctcacaccgcctatcctggttacggaaatggtaatggtgcgtttagctccgttcgtctgggcggtacgaaagctcgtcacctaggcagctggatgcttgaagtagacgccagcgatgaagcaaagaaagaggccgaaaatgacaagaaacacctgagaggactcccaagccgggttatcgacgtgccgggtatccgtatggaagttaagggtgatgagaccattatcactgtccgagacaaattcccgcctggcagtattgccctgtttgagacttggataccagctgcagaacattcagctggtctcgacaactacgtcacatcaggggcaaaggcagctatggccgatctggacttggtcgatttgaattttctgctctatcgatgcgaagcagaggagcgggctggtagcgatggaaaagatggagtatatgagattccaggctacggaaagactgtctacgctggtctacagggttggtggagtcttttgaagaatatcatcaaggaaaataaccttgcacaccccctatgtcagaatcttcgcgatggacagtgggctatggactacactgtagggcgtttggaaagaatcagccaacaaccagaatttgctgggttggcgaagccagcagagtggttcaaagaacgtttcaatgctttacgcggtatcccaagtttcctgctgcccaggtacttcgctatggtcatacgaaccgcatacacgactgcttgggaaaggggcttggagctgatgagcgacaatgtgcgcaacgggcaacagtttcttcaaagccttgggatggtcagcatacaacagacgggcatcgtaaagtctgcatctctgtggccgaagaaattagtcccttctcttgctgccggacttcctcatttcgccgtcgaatgggctcggtgttggggtcgtgatgtctttatctcgctacgcggtctctatcttgggactggtcgctttgatgaagctgcagagcatatttttgcttttgccagcgtcttgaagcacggcatgataccaaatctactcagcagcggcaatctgccgcgctataatagccgagactccgtatggttcttcttgcaatgcatccaagactatactcgattggcaccgaacggcgagacctttctaacgaagaaggtgaaaagaagatttctgccttacgatgatacttggttcgagtctgatgatgccagagcatattccaaagaaagcactattcaagacgtcattcaggaagctctgcaaagacacgcatctgggatgaagttccgtgaagcaaatgctggccctagtattgatatgcagatgagcgatgaagggttcaacatcgaaatcactgtcgactggtcgaacggcatcattttcggaggcaatcaacacaactgtggcacctggatggataagatgggcgagagcgaacgtgcaagttccaaaggcgtgcctggtacacctcgcgatggcgctgcgatcgagattaccggcctactctacagcacattgacttggcttgcgcgactacactctgagggcaagtacccatacaatagcgtcaagaagtctgatgacactgaaatcactttctctgcctgggctgaattgttgaaatcgaacttcgagcacagttactatgtgcccaagaatgcatcagatgataatcagtatgccgtcaactcgagcatagtcaatcgacgcggcatatacaaagatcttttccgctctggcaaggaatacgaggactaccagctgcggccgaactttgccattgctatgacagtagcaccggatcttttcaatccggagcacgctatgggcgctttagttctcgccgacgaggttctacgaggaccaacaggaatggccacgcttgaccctgcggaccttaactataggccgtactacatcaacagcgaagactcaactgacttcgcgacatccaagggccggaactaccaccagggtccggagtggctgtggcccacgggtttcttcttgcgggctcttctcaaatttgatcttcagagacgtaagactaaagaaggacgcgtggaggcgttccaacaggtcacgaggcggcttagtggctgcaaggagatgatagagagcagtccttgggctggcctgacggagcttacgcagaaggatggccaggagtgtggcgattctagccccacacaagcatggagctcaggttgtctgatagacctctatatggatgccgccgagtatgccatggaataaaagcttgggtcgaagatattttgatggggatagcatgttttgtggacgttgatattaaaattaagagggataaaacattacacgggaattagaagacaaagactttggcgattgaatcgaggtttaaggtgttcttaaagaagcttacatattttaaatggtcacataacccttttacagctgttttacctacaatattatcaataaagagcttatagcattaatactatacatatctgcctagatcaagaatgaacttctccacgatccttgggtgatcagaagaccccactgcaaattcgtagtatagtaatacttgagcaactttggtccctaaatacttaaaatacattattgacgcatataaatgattgacgcctaagctttctcccggattctagtacaaaaggtaatgatcagtaaaatcttccttcactaagtatttcgcttcaccgtcgcgaaatggtaaacttatttggtgtccagaacaacactgattatacatggcccttgaatgctttggatcgcgaatcattcgatatacagtatgatataatcttcgccgtttctgatttacatgcaccatggatggacgatgcttacatttctcataccgtagcccgctaaagcgcagctcaacgacatgatcgcaactattgcaaataagcaagtatgtctcggaacaagcgttgcactagcttgtatatacacacatctaagcctctgtgtcatgctccagcgagtgtatcgtattacctcatgtggtgacttgttaagcattgatgcatatcagattgacccttctgcctgcgcctaccggaagggttgaatacgtgcaaagcatcttccagtcttatatcacaacgaagccaccctcgtgtgacacagcatttggcactaggaacgcaacccaattatgtcgtaccttagaagaccctgatcctgtgtttaagtggtgatgacagcgcactgcaaagccggtggagtagttgcgaccgcaatattgcacgtcatttgcgtattcg

SEQ ID NO: 18269 - DNA, 1089 bp, Muscodor strobelii
  misc_feature: SGI cDNA ID NO. 566120
  misc_feature: Reduced expression when VOC is produced
  misc_feature: Encodes the peptide sequence at SEQ ID NO 18270
atgttatcaactaaagcacacccgaagctctgctcacccacgcatgtggctaagctctccaggggtatcatacaaaacggtatgatacccttcatgactagttcttcagcagggcttcgtctgacattcatccctacaatctcgcagcagcagaattacaagcatggcagtacacgagccttctcgacgacacccatagcccggatgcgagacttcttcccagccaaggagactgagcatattcgacagactccgcctgcatgggctcatcatggatataccgaagaagagatgttggccgtagtgccatcgcaccgtaagccggtgacatggggcgattacggtgcttggaaattcatgcgcttctgcagatggggtatggatttctgtacgggcatgcagggcgagcagaaagtcgacaagaagaatcctactaccgctgttcattccgtaaaacccctgaccgaagcacaatggatgattcgctttatcttcctcgagtcgatcgctggcgtacctggtatggtggccggaatgctgagacatctgcacagcattcgccgcctcaagcgtgataatggttggatcgaaacgctgctcgaggagagttataatgagagaatgcatctcttgacattcatgaagatgtgcgagcctggctggtttatgaagctcatgattttgggtgcgcaaggagtttatttcaacgcactcttcctaacgtacctcatctctcccaagattatgcatcggtttgttggctaccttgaagaggaagcggttcacacgtatacgatggcgataaagcaaatcgacgatgggcatcttccaaaatggacgagcgacaatttcgtggtacctgatatcgccgtcaagtactggcatatgccagagggcaatcgcacgatgcgagatctaatactgtacatccgtgccgacgaagcatgtcatcggggagtcaatcacacgctcagcaatctcgaccagaaggaagaccctaatcccttcgtcagcgagtataagagtggccgccagccgcctaggccagcgcttaagggcgagggctatgaaagagacgaggtcatctga

SEQ ID NO: 18270 - protein, 362 aa, Muscodor strobelii
  misc_feature: SGI Peptide ID NO. 566120
  misc_feature (41)..(355): Pfam Id: PF01786 Pfam Desc: Alternative oxidase
  misc_feature (42)..(355): Pfam Id: PF01786 Pfam Desc: Alternative oxidase
  misc_feature (10)..(362): NCBI GI: 51701284 Blast Desc: AOX_GELSS RecName: Full=Alternative oxidase, mitochondrial; Flags: Precursor gi|24061746|gb|AAN39884.1| alternative oxidase [Gelasinospora sp. S23]
  misc_feature (10)..(362): NCBI GI: 3023302 Blast Desc: AOX_NEUCR RecName: Full=Alternative oxidase, mitochondrial; Short=ALTOX; Flags: Precursor gi|1161144|gb|AAC37481.1| alternative oxidase [Neurospora crassa]
  misc_feature (1)..(362): NCBI GI: 171676978 Blast Desc: protein product [Podospora anserina] gi|51701291|sp|Q9C206.1|AOX_PODAN RecName: Full=Alternative oxidase, mitochondrial; Flags: Precursor alternate oxidase
  misc_feature (10)..(362): NCBI GI: 85106053 Blast Desc: alternative oxidase, mitochondrial precursor [Neurospora crassa OR74A] gi|28923681|gb|EAA32850.1| alternative oxidase, mitochondrial precursor [Neurospora crassa OR74A]
  misc_feature (1)..(362): NCBI GI: 260268365 Blast Desc: alternative oxidase [Microdochium nivale]
  misc_feature (1)..(362): NCBI GI: 116196868 Blast Desc: CHGG_05032 [Chaetomium globosum CBS 148.51] gi|88180945|gb|EAQ88413.1| CHGG_05032 [Chaetomium globosum CBS 148.51]
  misc_feature (59)..(362): NCBI GI: 256734304 Blast Desc: NECHADRAFT_98640 [Nectria haematococca mpVI 77-13-4]
  misc_feature (1)..(362): NCBI GI: 145602177 Blast Desc: alternative oxidase, mitochondrial precursor [Magnaporthe grisea 70-15] gi|51701271|sp|O93788.1|AOX_MAGGR RecName: Full=Alternative oxidase, mitochondrial; AltName: Flags:
  misc_feature (27)..(341): NCBI GI: 46108920 Blast Desc: FG01342.1 [Gibberella zeae PH-1]
  misc_feature (1)..(362): NCBI GI: 261357512 Blast Desc: alternative oxidase [Verticillium albo-atrum VaMs.102]
  misc_feature: Useful for introducing or modulating the production of volatile compounds
MLSTKAHPKLCSPTHVAKLSRGIIQNGMIPFMTSSSAGLRLTFIPTISQQQNYKHGSTRAFSTTPIARMRDFFPAKETEHIRQTPPAWAHHGYTEEEMLAVVPSHRKPVTWGDYGAWKFMRFCRWGMDFCTGMQGEQKVDKKNPTTAVHSVKPLTEAQWMIRFIFLESIAGVPGMVAGMLRHLHSIRRLKRDNGWIETLLEESYNERMHLLTFMKMCEPGWFMKLMILGAQGVYFNALFLTYLISPKIMHRFVGYLEEEAVHTYTMAIKQIDDGHLPKWTSDNFVVPDIAVKYWHMPEGNRTMRDLILYIRADEACHRGVNHTLSNLDQKEDPNPFVSEYKSGRQPPRPALKGEGYERDEVI

SEQ ID NO: 18271 - DNA, 1968 bp, Muscodor strobelii
  misc_feature: SGI EST ID NO. CUFF.43028.0
  misc_feature: Variant of the nucleotide sequence at SEQ ID NO 18269
cgtaaagtgagtcagaatataataaggctttgtactctccctacctaggtattcctcgcctccttttgttgtccagactataacacaacactttaaacactcttaccattaaataaaccgaattatcatatttcctatcattactctattcgacatagaaacaaacccttccgatacccatgttatcaactaaagcacacccgaagctctgctcacccacgcatgtggctaagctctccaggggtatcatacaaaacggtatgatacccttcatgactagttcttcagcagggcttcgtctgacattcatccctacaatctcgcagcagcagaattacaagcatggcagtacacgagccttctcgacgacacccatagcccggatgcgagacttcttcccagccaaggagactgagcatattcgacagactccgcctgcatgggctcatcatggatataccgaagaagagatgttggccgtagtgccatcgcaccgtaagccggtgacatggggcgattacggtgcttggaaattcatgcgcttctgcagatggggtatggatttctgtacgggcatgcagggcgagcagaaagtcgacaagaagaatcctactaccgctgttcattccgtaaaacccctgaccgaagcacaatggatgattcgctttatcttcctcgagtcgatcgctggcgtacctggtatggtggccggaatgctgagacatctgcacagcattcgccgcctcaagcgtgataatggttggatcgaaacgctgctcgaggagagttataatgagagaatgcatctcttgacattcatgaagatgtgcgagcctggctggtttatgaagctcatgattttgggtgcgcaaggagtttatttcaacgcactcttcctaacgtacctcatctctcccaagattatgcatcggtttgttggctaccttgaagaggaagcggttcacacgtatacgatggcgataaagcaaatcgacgatgggcatcttccaaaatggacgagcgacaatttcgtggtacctgatatcgccgtcaagtactggcatatgccagagggcaatcgcacgatgcgagatctaatactgtacatccgtgccgacgaagcatgtcatcggggagtcaatcacacgctcagcaatctcgaccagaaggaagaccctaatcccttcgtcagcgagtataagagtggccgccagccgcctaggccagcgcttaagggcgagggctatgaaagagacgaggtcatctgagttcgcgttccatataattgaagaatgtggatcgaacgagataatttgccttcgcccacttaagttcgcgacagccctcttgctttatagagcgtgctccctagaatcacatcgcaagaccaaagaatatcaccattcgaaattgggatatacaaaagcgttacaatactcatacgcttaatcaaacttttttttaaacatttagaaggtcgaaaaaatacccttatagattatagatggatgtaggatagagatagatagcagtccacgagacctattctttgtggttagatggatcccagtttcagatccaggtatagacacatcgccacactcaagctttttagaaccgattgtctactggcggagttgtgagccattaacattagatcatggcatctcagtgcaagtgctaaatccctatatacaaagcagcctctgactatcagggaccgtcaagataagacggcgctcagttgttcctatcattaagctgatatccaattatctcctttcctcatgttcatcgtgatgaccctggctgattcgacgagctagctctctgatctgcgctgctgctgctgctcgcccaccaccgacagccgttctatggatctcacttatttctcttacaagagaagacattgacgaggtcgcgtgacttgtcgtagcggcgattccttcttgggctgtcttttcg

SEQ ID NO: 18272 - DNA, 1416 bp, Muscodor strobelii
  misc_feature: SGI cDNA ID NO. 566121
  misc_feature: Encodes the peptide sequence at SEQ ID NO 18273
atggcatccttcatcgacgcagttgttcgcctggctctcaggcgtaagcccaaggagggtctgatgaccgagaatcacgcgcagcatgttcttgcaggagctccagaacagcaagagcccgttccaatgccttcaatagctggagctggccttggacgtcatggaatccaatcttcaccatatcttggattcacgatctcgagcccactgggcacgcgaccggctgcaaatataggattatacgcacgcatcatacattcggaacagacatcgaaagatagtttcaaagtgttctccattgtgataaatgcgtgctatttcttacagattgtcgtggctgctgcgctaacggcgctaggtgcagccggcgcaagctcaggagctgttactgcatttggagctatcaacactgtcattgccggatttttgacattccttaagggaagcggtctgcctggtcgtctaaaatactatggcaacgagtggaaaaagatcagagaattcatcgaacagcgcgaacgagacttcatgagaccaggacatggcctcaacgtttacgatgtcgtagacactatcgagaagatgtataacaacctcaaacaagacatcgaattaaatacacccgatagttacacatcagttacgaatgcgcgacgtgttggcgacaaagaagacgcgaagatcggtggcatcgagacttctaagctagaaaaggacaagctcagcacagaagtaaagggcatgaacggcaaactgggaggcctggtctccggcatcttgcagaaggctgaggcagtaacacaaggcatacacgaccacgagaagcaaattggcgaggatgtcaacaagctcaaggagtctgtagcgcatgatgtgaaagagaagcaggcgcagtttgatcgagagacaagcgagcgaaaggcgcaagcccaagcgactctagaaagcggaaaacaagctgctagggatcaaattgactctcgcactaccgcaatcagcaatgcagccaacgaacgtgctcgcgcagtagatgctgtcgattcacaaacagaggcattgaccgatgccactaatgcgcagcgagcccgcgcagtgcaagcagtagacgatattgacaacgcggccagcgagcagcatactcgcgctatacaagcgatggacgacgtgagcaatgccgccaatgagcagcacgcccgagcactgcaagctgtcgacaacgtcgaaaagacagcccaagaaggaatcgccgctacgacaagtcacgcgacctcgtcaatgtcttctcttgtaagagaaataagtgagatccatagaacggctgtcggtggtgggcgagcagcagcagcagcgcagatcagagagctagctcgtcgaatcagccagggtcatcacgatgaacatgaggaaaggagataa

SEQ ID NO: 18273 - protein, 471 aa, Muscodor strobelii
  misc_feature: SGI Peptide ID NO. 566121
  misc_feature (1)..(326): NCBI GI: 116196344 Blast Desc: CHGG_04770 [Chaetomium globosum CBS 148.51] gi|88180683|gb|EAQ88151.1| CHGG_04770 [Chaetomium globosum CBS 148.51]
  misc_feature (55)..(218): NCBI GI: 258568332 Blast Desc: conserved [Uncinocarpus reesii 1704] gi|237906356|gb|EEP80757.1| conserved [Uncinocarpus reesii 1704]
  misc_feature (73)..(204): NCBI GI: 238483005 Blast Desc: conserved [Aspergillus flavus NRRL3357] gi|220700791|gb|EED57129.1| conserved [Aspergillus flavus NRRL3357]
  misc_feature (73)..(204): NCBI GI: 169766296 Blast Desc: [Aspergillus oryzae RIB40] gi|83765474|dbj|BAE55617.1| protein product [Aspergillus oryzae]
  misc_feature (73)..(204): NCBI GI: 121719956 Blast Desc: conserved [Aspergillus clavatus NRRL 1] gi|119404888|gb|EAW15250.1| conserved [Aspergillus clavatus NRRL 1]
  misc_feature (55)..(204): NCBI GI: 119484946 Blast Desc: NFIA_098480 [Neosartorya fischeri NRRL 181] gi|119410271|gb|EAW20218.1| conserved [Neosartorya fischeri NRRL 181]
  misc_feature (55)..(204): NCBI GI: 159123624 Blast Desc: conserved [Aspergillus fumigatus A1163]
  misc_feature (55)..(204): NCBI GI: 70983688 Blast Desc: conserved [Aspergillus fumigatus Af293] gi|66844997|gb|EAL85333.1| conserved [Aspergillus fumigatus Af293]
  misc_feature (73)..(267): NCBI GI: 238838748 Blast Desc: conserved [Microsporum canis CBS 113480]
  misc_feature (73)..(204): NCBI GI: 115401596 Blast Desc: conserved [Aspergillus terreus NIH2624] gi|114190327|gb|EAU32027.1| conserved [Aspergillus terreus NIH2624]
MASFIDAVVRLALRRKPKEGLMTENHAQHVLAGAPEQQEPVPMPSIAGAGLGRHGIQSSPYLGFTISSPLGTRPAANIGLYARIIHSEQTSKDSFKVFSIVINACYFLQIVVAAALTALGAAGASSGAVTAFGAINTVIAGFLTFLKGSGLPGRLKYYGNEWKKIREFIEQRERDFMRPGHGLNVYDVVDTIEKMYNNLKQDIELNTPDSYTSVTNARRVGDKEDAKIGGIETSKLEKDKLSTEVKGMNGKLGGLVSGILQKAEAVTQGIHDHEKQIGEDVNKLKESVAHDVKEKQAQFDRETSERKAQAQATLESGKQAARDQIDSRTTAISNAANERARAVDAVDSQTEALTDATNAQRARAVQAVDDIDNAASEQHTRAIQAMDDVSNAANEQHARALQAVDNVEKTAQEGIAATTSHATSSMSSLVREISEIHRTAVGGGRAAAAAQIRELARRISQGHHDEHEERR

SEQ ID NO: 18274 - DNA, 663 bp, Muscodor strobelii
  misc_feature: SGI cDNA ID NO. 566122
  misc_feature: Encodes the peptide sequence at SEQ ID NO 18275
atgccgtcgacaaccatagtaccttttgcctcgctgccatcgtgcgctgccagttgcggccctctgtacgatgcgaacggtgcctgtgtgcctcctgtcaacccctccaacgacgagaacagctgggatatgtgtttctgcgcctacgacacactccaacccttcaagtcgggaacatctggtgtctgtaacgacgcctgtgtcggcgctgacgccgcagggatcaccagcgtccaaagttggttcaccagtttgtgcaacaaagctgccgctgtcaccagctctgcgacctctagtggcgcggggagctccggtaccagtggcagcaactcgggaaagaattcctctggcggaggcaactgggcttcgacgcatgtcaactggataatattcatcgtaatcgttgtcgtagccattgccggtatctggacaggggcatgcatctggcgtcgcaagtatctgaaaaagaaggaccgcttatacgagctcggaaagggactacccagctctgtcgcggttaacacccaaggcaatctagttggtcccggcgcgcgagacagcactatctcaaacggtaatgggcaaggcatgttcatgtctggtccaggcgctgcccctgtcgaggacccggcggagaaacgcagcagatggggtcggcgatga

SEQ ID NO: 18275 - protein, 220 aa, Muscodor strobelii
  misc_feature: SGI Peptide ID NO. 566122
  misc_feature (5)..(217): NCBI GI: 171695828 Blast Desc: protein product [Podospora anserina] gi|170948156|emb|CAP60320.1| protein product [Podospora anserina]
  misc_feature (2)..(217): NCBI GI: 46136375 Blast Desc: FG09703.1 [Gibberella zeae PH-1]
  misc_feature (2)..(207): NCBI GI: 256727351 Blast Desc: NECHADRAFT_57915 [Nectria haematococca mpVI 77-13-4]
  misc_feature (5)..(167): NCBI GI: 39975583 Blast Desc: MGG_00062 [Magnaporthe grisea 70-15] gi|145019104|gb|EDK03383.1| MGG_00062 [Magnaporthe grisea 70-15]
  misc_feature (2)..(167): NCBI GI: 164428569 Blast Desc: NCU00744 [Neurospora crassa OR74A] gi|157072196|gb|EAA35161.2| [Neurospora crassa OR74A]
  misc_feature (10)..(157): NCBI GI: 240273397 Blast Desc: integral membrane protein [Ajellomyces capsulatus H143]
  misc_feature (6)..(146): NCBI GI: 156036170 Blast Desc: SS1G_12771 [Sclerotinia sclerotiorum 1980] gi|154698179|gb|EDN97917.1| SS1G_12771 [Sclerotinia sclerotiorum 1980]
  misc_feature (10)..(157): NCBI GI: 225558155 Blast Desc: integral membrane protein [Ajellomyces capsulatus G186AR]
  misc_feature (2)..(89): NCBI GI: 261356519 Blast Desc: [Verticillium albo-atrum VaMs.102]
  misc_feature (4)..(162): NCBI GI: 238483699 Blast Desc: integral membrane protein [Aspergillus flavus NRRL3357] gi|220701138|gb|EED57476.1| integral membrane protein [Aspergillus flavus NRRL3357]
MPSTTIVPFASLPSCAASCGPLYDANGACVPPVNPSNDENSWDMCFCAYDTLQPFKSGTSGVCNDACVGADAAGITSVQSWFTSLCNKAAAVTSSATSSGAGSSGTSGSNSGKNSSGGGNWASTHVNWIIFIVIVVVAIAGIWTGACIWRRKYLKKKDRLYELGKGLPSSVAVNTQGNLVGPGARDSTISNGNGQGMFMSGPGAAPVEDPAEKRSRWGRR

SEQ ID NO: 18276 - DNA, 1984 bp, Muscodor strobelii
  misc_feature: SGI EST ID NO. CUFF.43249.1
  misc_feature: Variant of the nucleotide sequence at SEQ ID NO 18274
gctacagcggcctcagcaggcttccacatttcctgccgacgctgggatgggtgtgcttccaccactcagcgccgtctctagcccactgatccgccctcctctctctttcctgcaacgctcacgacgacaatccattccccatctctaccatttagcatccggccttagcattccactaattcccatcccatcccatcacatccaccgcggccggcgacgctcacgctctttatccataccatcacatcggacgactcgacattttgcacgctctcgttgccgcccgtccgccattgaattgaattgaattgaattgccaggatcgactcacggctcaccgaccagagccagtcagggacagcaagggacagcacagcacagcacagcacacggaaccgggcccacggcttcgggagactcgtgcaccacgattccctcgcgatcatctcgtgcttgccgcaaaccatcgatcgtcactcccgtacacgacgccagcagatacccgcggcaaatcctctcgaagacaacggaccgcttgcttgagtttgggctacccgccgttgtgccaccgccagtgtgaatctgtccatcgacaacccgttcgtctgtgcgactacggtcatcatcgcacccttttcctattcgccttcatcaaacgcctaccgtcaaaatgccgtcgacaaccatagtaccttttgcctcgctgccatcgtgcgctgccagttgcggccctctgtacgatgcgaacggtgcctgtgtgcctcctgtcaacccctccaacgacgagaacagctgggatatgtgtttctgcgcctacgacacactccaacccttcaagtcgggaacatctggtgtctgtaacgacgcctgtgtcggcgctgacgccgcagggatcaccagcgtccaaagttggttcaccagtttgtgcaacaaagctgccgctgtcaccagctctgcgacctctagtggcgcggggagctccggtaccagtggcagcaactcgggaaagaattcctctggcggaggcaactgggcttcgacgcatgtcaactggataatattcatcgtaatcgttgtcgtagccattgccggtatctggacaggggcatgcatctggcgtcgcaagtatctgaaaaagaaggaccgcttatacgagctcggaaagggactacccagctctgtcgcggttaacacccaaggcaatctagttggtcccggcgcgcgagacagcactatctcaaacggtaatgggcaaggcatgttcatgtctggtccaggcgctgcccctgtcgaggacccggcggagaaacgcagcagatggggtcggcgatgattgaccgcaactcgataagctatagctaaagccatggccgtgtctactcgtcgcttatgttctgtacctaatcatactgttggcgacacaagtccttttattatgtcgaattagtcatatacggcgtttctggagggaagctggttcttttctgatgattcagggcacgggagttattttggtcgcatatgctctcttgtgctcctttttgccctaagccggctattgcttgggtctccggctacctactatcaagaccagcggcttccgtcttgcgcgctcaagcgatggctttcgagactaatggtatgtagttggaagaaaaagcaggcggtagctccaggatacgatatcctggagcagctggaggtggtcgggaggcttattggtcatgaactataggtatgacacagttaccctttagcggagtgagtcgtattgctcgcttgtagatatctatgatcacttgaactcttatatctgtaaatgtcccttccctgcgagtacgcgagacttcacttcagtctgcgaatacatgcttcgtgccaagcctcgttgaggaatagacggggaatcagtctaggacggccaaatcttccaaattctatccttttgcaactcatagcattaatatataaggtaataaggcaa

SEQ ID NO: 18277 - DNA, 2766 bp, Muscodor strobelii
  misc_feature: SGI cDNA ID NO. 566123
  misc_feature: Encodes the peptide sequence at SEQ ID NO 18278
atggagtatcatcagaaaggggtcctccacaaggctgcccccactactatcgagtctttcacttttcaacagaaggaatctaagcagactaaagcagcacttggcacgaaaagatcgcattcagctacagatcctgaattgtatcgcccagagccgaaaaaaacgttcagttttcagagagccagtagcgtgagccgagacacgccgaggcttacagctagcgaaatcattgctgttgatacaactgctgcgtccgtttccgagtactcacaacgcaaagtattgtccgcaacacccacttcgaatattgatcgatcgctctctttggctttcccgcgatataatttaccgccatctttgatcaataatctaagtgaaataggtatcaaggagatatatccatggcagaaacagtgtcttttaggccctggcctgctcgatggcaccaaaaatatcgtgtacactgcgcctactggtggtggtaagagccttgttgccgacatactgatgctgaagagagtcctggatgatagaagtgccaaggccctattggttctcccatacgtggctttagttcaagagaaggtcaggtggctccgtaatgtcgtgcaagggatcaaaaaaagacctgttgacacgactgatgacaaaccacggctctggcagaaacgtcctgatgaagataacattagggttatcgggttcttcggaggcggcaaagtcagagtcacatggcaagatttcgatataggggtctgtacattcgagaaggcaaatatgctcatcaatggagctatagatgaatgtactattacaacgctcaaggcagtcgtgcttgacgagctccacatggtcgacgacgaccataggggctacttgatagagctcatcgccacaaagctcataacccttgaccacagcgtacagataattggaatgagtgccaccctttcgaatatcgacattttgtccaaatggctcgacgcacatacctactcgacattttaccggccagtaccgattgaggaacacctggtccatgaaggcaagatatacgcgtcaagtgctctcaggacaacgcccacacagatgttgaattctggcaatggcgtcataacagacgaaccagtgaggacagtccagccaagtatacacaaagaatttcaagacgccgttttgaatgccgtcgtcgcactagcagatgagacggcgagggcaggatacggtgctcttgtcttctgtagtagtcgaccaggttgcgaatcagatgctcgcaatattagcaaagtcctcccctcggctaacgaattagattccaccactcttgaaaggagattagatctcttgggtgatcttcgtagcttaacaacgggtttggatcagacattaggagagactatccccgcaggtgttggctttcaccatgccgggatgacaatcgaagaacgagaactcattgccaccgcttacgacagcggtgtactcaaagtaatcgttgccacttgtagtctcgctgcgggcatcaatctaccagctcgcagggttattcttcacaacgcacgaatgggccgtgacctcgtgggcccctctatgctccgtcaaatgcgtggtcgagcaggcaggaaaggcaaagatgaggttggtgaaacatatctctgttgccgtaaaggtgatttagatgatgtggtcaatttaatgcatgcagaaatcccgcagatttccagtggcctgacgacggacaagcatcgtatccagagagcgctacttgaagttatctgtatacgactagtaaactcacgagaatctatggacgagtatatggcaaagacgctgctgaatctttctaacaacggggatgccattcaagatcacgttaactctagtcttgctgaacttgtgcagatggggttcattcgggacgagagcgggggcatgcttgattcgtacgcccctacccagctgggaaaagcagttgtcgcgtcgtctcttgatcctgaggatggcgcattcgtctaccgtgagatgcaacgtgcgctcagaggcttcgtcatggatggcgagatgcatgtgctctacacttttacgcccgttcatgatatgtccgttatcgtgaattggcagatcttcaggtctgaaatggaagcactcgatgacagtggtcttcgcgttatgaccttcctgggcctgaagcctaccatagtgaatcggatggcacaaggcggaaacatgaagacatcgacaccagcagaaaaggaagccgcgcgcgtctatactcggttctatcttgctttacagctgcgcgatctctgcaatgagatgcctgttcacgtggtggcaaagaaatatgacatgccgcgagggactgttcaaacattagagcaaacttgtcaagggtttgctgcaggcatgatcaagttctgcgagcacatgggttggggagctatggcagcgatattggatcatttctctgatcgacttaaagcgggcgctaaagctgatcttcttgcgctcgccaaaatcacctttgtaaagagccgcacagcccgtgttttctatgacaatggttttacgagcgttgcctcgatcgcaaacgctgacccgaaggaactactccctgtcctcttacaggcacaaccgacgaagctacgactcaaatctaaagatgaggagaaatacgaagagaaacttcttgccaaagcacaggtcatagcggactctgcgaaccgcatttggcaggctgagatgcaacgagatctggacgagtga

SEQ ID NO: 18278 - protein, 921 aa, Muscodor strobelii
  misc_feature: SGI Peptide ID NO. 566123
  misc_feature (135)..(323): Pfam Id: PF00270 Pfam Desc: DEAD/DEAH box helicase
  misc_feature (463)..(543): Pfam Id: PF00271 Pfam Desc: Helicase conserved C-terminal domain
  misc_feature (5)..(921): NCBI GI: 240111166 Blast Desc: DNA polymerase theta, [Coccidioides posadasii C735 delta SOWgp]
  misc_feature (63)..(921): NCBI GI: 238486540 Blast Desc: DNA-directed DNA polymerase theta, [Aspergillus flavus NRRL3357] gi|220699387|gb|EED55726.1| DNA-directed DNA polymerase theta, [Aspergillus flavus NRRL3357]
  misc_feature (70)..(921): NCBI GI: 121702745 Blast Desc: DNA-directed DNA polymerase theta, [Aspergillus clavatus NRRL 1] gi|119397780|gb|EAW08211.1| DNA-directed DNA polymerase theta, [Aspergillus clavatus NRRL 1]
  misc_feature (36)..(921): NCBI GI: 169770973 Blast Desc: [Aspergillus oryzae RIB40] gi|83767815|dbj|BAE57954.1| protein product [Aspergillus oryzae]
  misc_feature (54)..(911): NCBI GI: 70990852 Blast Desc: DNA-directed DNA polymerase theta [Aspergillus fumigatus Af293] gi|66847907|gb|EAL88237.1| DNA-directed DNA polymerase theta, [Aspergillus fumigatus Af293] DNA-directed DNA
  misc_feature (63)..(911): NCBI GI: 119496737 Blast Desc: DNA-directed DNA polymerase theta, [Neosartorya fischeri NRRL 181] gi|119413304|gb|EAW23245.1| DNA-directed DNA polymerase theta, [Neosartorya fischeri NRRL 181]
  misc_feature (107)..(921): NCBI GI: 212540008 Blast Desc: DNA-directed DNA polymerase theta, [Penicillium marneffei ATCC 18224] gi|210067458|gb|EEA21550.1| DNA-directed DNA polymerase theta, [Penicillium marneffei ATCC 18224]
  misc_feature (10)..(921): NCBI GI: 239609367 Blast Desc: DNA-directed DNA polymerase theta [Ajellomyces dermatitidis ER-3]
  misc_feature (50)..(921): NCBI GI: 242803099 Blast Desc: DNA-directed DNA polymerase theta, [Talaromyces stipitatus ATCC 10500] gi|218717450|gb|EED16871.1| DNA-directed DNA polymerase theta, [Talaromyces stipitatus ATCC 10500]
  misc_feature (70)..(911): NCBI GI: 145229143 Blast Desc: An01g04520 [Aspergillus niger] gi|134054980|emb|CAK36988.1| protein product [Aspergillus niger]
MEYHQKGVLHKAAPTTIESFTFQQKESKQTKAALGTKRSHSATDPELYRPEPKKTFSFQRASSVSRDTPRLTASEIIAVDTTAASVSEYSQRKVLSATPTSNIDRSLSLAFPRYNLPPSLINNLSEIGIKEIYPWQKQCLLGPGLLDGTKNIVYTAPTGGGKSLVADILMLKRVLDDRSAKALLVLPYVALVQEKVRWLRNVVQGIKKRPVDTTDDKPRLWQKRPDEDNIRVIGFFGGGKVRVTWQDFDIGVCTFEKANMLINGAIDECTITTLKAVVLDELHMVDDDHRGYLIELIATKLITLDHSVQIIGMSATLSNIDILSKWLDAHTYSTFYRPVPIEEHLVHEGKIYASSALRTTPTQMLNSGNGVITDEPVRTVQPSIHKEFQDAVLNAVVALADETARAGYGALVFCSSRPGCESDARNISKVLPSANELDSTTLERRLDLLGDLRSLTTGLDQTLGETIPAGVGFHHAGMTIEERELIATAYDSGVLKVIVATCSLAAGINLPARRVILHNARMGRDLVGPSMLRQMRGRAGRKGKDEVGETYLCCRKGDLDDVVNLMHAEIPQISSGLTTDKHRIQRALLEVICIRLVNSRESMDEYMAKTLLNLSNNGDAIQDHVNSSLAELVQMGFIRDESGGMLDSYAPTQLGKAVVASSLDPEDGAFVYREMQRALRGFVMDGEMHVLYTFTPVHDMSVIVNWQIFRSEMEALDDSGLRVMTFLGLKPTIVNRMAQGGNMKTSTPAEKEAARVYTRFYLALQLRDLCNEMPVHVVAKKYDMPRGTVQTLEQTCQGFAAGMIKFCEHMGWGAMAAILDHFSDRLKAGAKADLLALAKITFVKSRTARVFYDNGFTSVASIANADPKELLPVLLQAQPTKLRLKSKDEEKYEEKLLAKAQVIADSANRIWQAEMQRDLDE

SEQ ID NO: 18279 - DNA, 2762 bp, Muscodor strobelii
  misc_feature: SGI EST ID NO. CUFF.43050.0
  misc_feature: Variant of the nucleotide sequence at SEQ ID NO 18277
tgcgcctactggtggtggtaagagccttgttgccgacatactgatgctgaagagagtcctggatgatagaagtgccaaggccctattggttctcccatacgtggctttagttcaagagaaggtcaggtggctccgtaatgtcgtgcaagggatcaaaaaaagacctgttgacacgactgatgacaaaccacggctctggcagaaacgtcctgatgaagataacattagggttatcgggttcttcggaggcggcaaagtcagagtcacatggcaagatttcgatataggggtctgtacattcgagaaggcaaatatgctcatcaatggagctatagatgaatgtactattacaacgctcaaggcagtcgtgcttgacgagctccacatggtcgacgacgaccataggggctacttgatagagctcatcgccacaaagctcataacccttgaccacagcgtacagataattggaatgagtgccaccctttcgaatatcgacattttgtccaaatggctcgacgcacatacctactcgacattttaccggccagtaccgattgaggaacacctggtccatgaaggcaagatatacgcgtcaagtgctctcaggacaacgcccacacagatgttgaattctggcaatggcgtcataacagacgaaccagtgaggacagtccagccaagtatacacaaagaatttcaagacgccgttttgaatgccgtcgtcgcactagcagatgagacggcgagggcaggatacggtgctcttgtcttctgtagtagtcgaccaggttgcgaatcagatgctcgcaatattagcaaagtcctcccctcggctaacgaattagattccaccactcttgaaaggagattagatctcttgggtgatcttcgtagcttaacaacgggtttggatcagacattaggagagactatccccgcaggtgttggctttcaccatgccgggatgacaatcgaagaacgagaactcattgccaccgcttacgacagcggtgtactcaaagtaatcgttgccacttgtagtctcgctgcgggcatcaatctaccagctcgcagggttattcttcacaacgcacgaatgggccgtgacctcgtgggcccctctatgctccgtcaaatgcgtggtcgagcaggcaggaaaggcaaagatgaggttggtgaaacatatctctgttgccgtaaaggtgatttagatgatgtggtcaatttaatgcatgcagaaatcccgcagatttccagtggcctgacgacggacaagcatcgtatccagagagcgctacttgaagttatctgtatacgactagtaaactcacgagaatctatggacgagtatatggcaaagacgctgctgaatctttctaacaacggggatgccattcaagatcacgttaactctagtcttgctgaacttgtgcagatggggttcattcgggacgagagcgggggcatgcttgattcgtacgcccctacccagctgggaaaagcagttgtcgcgtcgtctcttgatcctgaggatggcgcattcgtctaccgtgagatgcaacgtgcgctcagaggcttcgtcatggatggcgagatgcatgtgctctacacttttacgcccgttcatgatatgtccgttatcgtgaattggcagatcttcaggtctgaaatggaagcactcgatgacagtggtcttcgcgttatgaccttcctgggcctgaagcctaccatagtgaatcggatggcacaaggcggaaacatgaagacatcgacaccagcagaaaaggaagccgcgcgcgtctatactcggttctatcttgctttacagctgcgcgatctctgcaatgagatgcctgttcacgtggtggcaaagaaatatgacatgccgcgagggactgttcaaacattagagcaaacttgtcaagggtttgctgcaggcatgatcaagttctgcgagcacatgggttggggagctatggcagcgatattggatcatttctctgatcgacttaaagcgggcgctaaagctgatcttcttgcgctcgccaaaatcacctttgtaaagagccgcacagcccgtgttttctatgacaatggttttacgagcgttgcctcgatcgcaaacgctgacccgaaggaactactccctgtcctcttacaggcacaaccgacgaagctacgactcaaatctaaagatgaggagaaatacgaagagaaacttcttgccaaagcacaggtcatagcggactctgcgaaccgcatttggcaggctgagatgcaacgagatctggacgagtgaacaggcaatgctgatataggcagccgttccgtaaactgcagcatgatttacctagatttgtaagaattcaaaatcgagtttggagatcaggaataccagtggcacgccacaaagctggcagtaagagagcacgagttattactagaggaatgccaaatgggttgcagcacgcgtcctggttcgcggacaagcaaatgtcatatatactacaatttctatatcatgatgatgtagaagctgcatcgttaagtttttttacgttgcaaatatgatgtgtgcaggatacactaccttgatgtaacgtgcaacgagttagaggactgagagtccacatgaggtacctgcaaacacttgcgtttcaattgggcgcatgctccatctttaccattttcacgatcaactttagagctattgaactcgggcgttgtgatatacatatatctatcgtaagcgaagctga

SEQ ID NO: 18280 - DNA, 5106 bp, Muscodor strobelii
  misc_feature: SGI cDNA ID NO. 566124
  misc_feature: Reduced expression when VOC is produced
  misc_feature: Encodes the peptide sequence at SEQ ID NO 18281
atggcgcagaagacaagcgactctgatgatcagccaaatcctccgtcatcctcgaccaaggagcacccagggcccgcagcccaaaaacagtcaacgtctcacacatcaagccctgcacctgcaccttcatctgcacctccatcttcaccacccacaccaccgccccagccaaccacggccaaacacaccaactccaagcaatctggagaaaatgccgccaacgcccagtccataaataagtccacctcggcggcatcgaatgcagcgcttaaagacgccatggccggaccttcgccgtatggcacgcgctcaaggaaccgtggtcagacgcggcctaactatgcggaggacaaagatctggatgtcgatatggaggatgcatttcccgagaggaaagaggaagaacctaagaagggactgcggcaatctaacgcgactacgaacggcactaccgatgcgacgagggcgaccgcaacgatcccgcgcaagggcaatggaaccgacgacagcaaagccgccagctctcagccatcctccaaagagtctcagccagcagcctcctcgagtgcgaacgcaaatgggacatcagcggcttctggcccgtccaaaaagcgcaaagccccgacacagtcgactacgaacaatgcgcaaagccagtccagcacaccgatcccgaccgcgacagttgctgtgggtacacgacgaggcgctgctcaggcagcagcacaggctagcttgggatacagagagaccaatatgctcagctttgagaaatataatgcaacaccaaaagatggcaagatgatcgccgacgacggcactacgttgcaggcaaatgaccacgtatacctggtgtgcgaaccacctggagagccatactatctggggcgcatcatggaatttctacacgtgcaaaatgacgaacaaaaacccgtggatgcattacgcatcaattggtactacagacccaaggacattggcaagaaaatcaacgacacgagacagttgttcgctacgatgcactccgacatcagcccgctgacagcgctgcgtggtaagtgccaaatccgccacaaggccgagatcgagagcatggacgcataccggaagacgcccgattgcttttggtacgaaaaactctacgatcgctatattcagaagcagtacgatgtcatcccctgttttcagatcatcaacgtgccggacaatgtgaagaaggtgctggacgagcggtggaaatacattctggtcgagcaaggtcgtgccaaggagtttaccagtgctgtcaagctatgcaagcgttgtaacgcgtactgtgccagtaacgactctgttgattgtgctgtttgtgaacaaacgtatcacatgtactgtgtccgtccacctctgctgaaaaaaccttcgcgtggttttggctgggcttgtgcagtctgcagtcgggcccgagagcggaagctggaaggcaggcataacgcaggtcaacttgacccacatctagaagccgaggaagaagagatctgggatgaggaagaggatgcgattgacacaagtcggacaagccctaccgatggtattgacgactcgcatttgcctgccacggctgaacagacgtatcaaaataatctgtggccatatcgttatcttggtcaacattgcaagcctcaagatgctcttgattatgatgatcgcatatatcctcgagctggctcacgcttgggccccaagcatcaagcaaccgtgtccccctggtatgggcgcccggtgaaactggtcaagccaatcgaaaccaaaaagggtagtaagaaggatccaaaatctgcaaaggagaactcagcggcaatagaagccgacaggcttgcccgtgagaagaaaccatggattcaggatgaaccgccaggttactgtgctcgaggagaggacttcgaaagcgacgatcccagaaacacagctcaattgctgtggaaaccttacgatccccctgatgaagcggccccctctagagacggtgccaatattgcgtcgacggatgcgcgcctcgaaaactacatttcaagtgcgaaagcaaaggtcattccagtgcttggactgccgaaggaatccacaaactttctagacgtcgcaatcaacactctgttttcgaacgacttcaagaccgatttagcattcaaagcccttgacagaactgagaaatcggcgtttaaagagccagatctgagtcctgcggagatcaagaagttcgaggaaggagtcacgaaatttggctccgaactccatctcgtgacgaggcacgttaaatctgtgaagcatggccgtatcgttcgtttttactatacttggaagaagtctgagcgtggcaaacagatatggggcaattacactggtagaaaggggaagaaagaagcgaaaaaggcagaagcaaatgcagcgaaactgcaagacgatgttgctgatgatcacgatgactccgcattcgatgcagataaggcactgcaacgaacacggggtttcatgtgcaagttttgcggcaccaaaaattcgcggcaatggcggcgagcaccaaacttggggacaaacataatcagcgaaggaggaggtaaaggcgccaacaaagataagagtgtccaatacataagtgcactgtgtcgacgctgcgccgagctttggcggcgatacggtattcaatgggaagacattgaagacttggccaagaaggtcgccgttgcagggtcccggggctggaagcggaaggttgatgaagagcttttgaaagagttgatgactgcaaatgaaatgatgaaccagactgtctacaacaccccgaccagagcaagtccagcagcacaaccgcccgtctcagcaccaccaactcaaccctcgagttcggatccaccgccacgcaagaagctaaagactattgctgataaggaggcagagcgtgaacagagcgggttggaacagggaaccgttgcaacagctgctcccaaaaagaaagagaagcctatcgaaaaggccacccctttgcctcctccacctcctgcagctccggaattgcccaagctacggacactaccctgcttcgtttgcgatcaaggaagccctatcggcgaacagactctgctctgctgtcgggagtgtcgattgacagttcatcgagcatgctatggcatatttgataatcggcatccggctaaatggacttgcgaccaatgtatcaatgacaagaaccctcaagtttctattgaatatagatgtgtattatgtcctgttgaaaaaacagagcacgacttcctggagccccccaaaaacacgcacaagaagaagactgagaaagaccgagagaaggaacggaatgaccgggagttggctgtgaaggctgtagagttgtatcggaagcgacagcttgagctgaacagacccatcaaccctcgcgaacctctgaagcgaacagctgctaacaactgggtccatgtcacatgtgcagtgtggcacaatgagatcaaatttggcaacgcaaaagctcttggtctatcggagggcatacaatccatccctagagcaaaatatgatgatgtgtgcaaggtgtgcagtcaacaagccggtgcttgcgtgcattgccatacttgtcgcgctccagttcatgtggaatgtgcacataagaatgggtatatgctcgggtttgaaatcaccccggtcaaaggctcccgtcgagaccagcacaacattgtaactatcggcggggagacaggatccatgtctgctgctgtttggtgcaaagagcacattccgcaacgaaccgtagtccaccgcatgaatgacccagtgacggcacaagatggcgtaccagctgagcctaatgccctgcagctgtatgtacgcaacttcaagcaggctgaccttgctctcacggggactgtccgcaaagccaatttggccaatctttctggaagggctgccgtggtaccacagcctggcaatcagaacagaagacagtcatccactactgtaccgaaccctcctacacctgcactcaaagcatcaggaaccaatgaattccagcctttcggtggtgtgatgattccacagagcggcgaaaaggtctgcatcacgtgtggtgtggatgtgagcccaagatggtactcaatcagtgaatcgcaggaaaaggtccttgccaacggccataagggtatcattggcgacgaagctcagaggttcattgcacaacgaagtgtgcagtgtcataagtgtcatagagacaagcgcgagccggtcccgcacattattcctcctcctgctgaggtcgcgccagcattgcgaccaccggccatgatcagcccgaatcctgatccaggatctcctcgacacttatcgcaaggtattggccggattggtgaaagcgcctggggcccgcgcgcgcctataactcaaccggttccgccttcaggaccgccgaccatgaacgggccacctagcggaccgcctgcctcgcttccattgacagcatcaagaccaggaccgagtccaattgctgcacccggacctcctccggggccatcgcatcactatccagcccctgctaactcatacaacgactggcaacgtactgcgccgacacagggtccagtcatgactcatgtaatgaatgggaattccaccggaccgagtgcgctccatcacaatcatttgcgtgacctcagacctccgcccatcacggcaatgccacaccatccagtcggtcctatacagcatggattgggacaacctgctgtcaatggagtaccatcatcccctccacgaagagggcaacctaacatgccaaacggtggttcctcatttgtgactacattccatcacccgccacctcaacccttgcatgctctcacgaacggtggtccaccaacacggactgcagatcactcattctcccaagggctgctgggacaacgatcatccttctcggctcctcataccagccccccagtctctcgagacggtgtcgtgttgaggagcgaaccaaatcctaccgcgagcaatcctccccccaggccaactgatcggcctaccagcggtgctagtgccagtccatctttacggaatcttctgtcatga

SEQ ID NO: 18281 - protein, 1701 aa, Muscodor strobelii
  misc_feature: SGI Peptide ID NO. 566124
  misc_feature (431)..(481): Pfam Id: PF00628 Pfam Desc: PHD-finger
  misc_feature (1024)..(1073): Pfam Id: PF00628 Pfam Desc: PHD-finger
  misc_feature (274)..(393): Pfam Id: PF01426 Pfam Desc: BAH domain
  misc_feature (570)..(690): Pfam Id: PF01448 Pfam Desc: ELM2 domain
  misc_feature (735)..(780): Pfam Id: PF00249 Pfam Desc: Myb-like DNA-binding domain
  misc_feature (81)..(1425): NCBI GI: 256733098 Blast Desc: NECHADRAFT_68385 [Nectria haematococca mpVI 77-13-4]
  misc_feature (91)..(1701): NCBI GI: 171687519 Blast Desc: protein product [Podospora anserina] gi|170943721|emb|CAP69373.1| protein product [Podospora anserina]
  misc_feature (59)..(1568): NCBI GI: 261356200 Blast Desc: SANT domain-containing protein [Verticillium albo-atrum VaMs.102]
  misc_feature (113)..(1701): NCBI GI: 46124911 Blast Desc: FG06833.1 [Gibberella zeae PH-1]
  misc_feature (1)..(1426): NCBI GI: 145603121 Blast Desc: MGG_04421 [Magnaporthe grisea 70-15] gi|145011435|gb|EDJ96091.1| MGG_04421 [Magnaporthe grisea 70-15]
  misc_feature (91)..(1425): NCBI GI: 164424268 Blast Desc: NCU07412 [Neurospora crassa OR74A] gi|157070444|gb|EAA29177.2| conserved [Neurospora crassa OR74A]
  misc_feature (75)..(1384): NCBI GI: 154297654 Blast Desc: BC1G_12672 [Botryotinia fuckeliana B05.10] gi|150858495|gb|EDN33687.1| BC1G_12672 [Botryotinia fuckeliana B05.10]
  misc_feature (102)..(1384): NCBI GI: 156031011 Blast Desc: SS1G_14286 [Sclerotinia sclerotiorum 1980] gi|154700677|gb|EDO00416.1| SS1G_14286 [Sclerotinia sclerotiorum 1980]
  misc_feature (54)..(1391): NCBI GI: 121702747 Blast Desc: PHD finger and BAH domain protein (Snt2), [Aspergillus clavatus NRRL 1] gi|119397781|gb|EAW08212.1| PHD finger and BAH domain protein (Snt2), [Aspergillus clavatus NRRL 1]
  misc_feature (71)..(1701): NCBI GI: 238486542 Blast Desc: PHD finger and BAH domain protein (Snt2), [Aspergillus flavus NRRL3357] gi|220699388|gb|EED55727.1| PHD finger and BAH domain protein (Snt2), [Aspergillus flavus NRRL3357]
  misc_feature: Useful for introducing or modulating the production of volatile compounds
MAQKTSDSDDQPNPPSSSTKEHPGPAAQKQSTSHTSSPAPAPSSAPPSSPPTPPPQPTTAKHTNSKQSGENAANAQSINKSTSAASNAALKDAMAGPSPYGTRSRNRGQTRPNYAEDKDLDVDMEDAFPERKEEEPKKGLRQSNATTNGTTDATRATATIPRKGNGTDDSKAASSQPSSKESQPAASSSANANGTSAASGPSKKRKAPTQSTTNNAQSQSSTPIPTATVAVGTRRGAAQAAAQASLGYRETNMLSFEKYNATPKDGKMIADDGTTLQANDHVYLVCEPPGEPYYLGRIMEFLHVQNDEQKPVDALRINWYYRPKDIGKKINDTRQLFATMHSDISPLTALRGKCQIRHKAEIESMDAYRKTPDCFWYEKLYDRYIQKQYDVIPCFQIINVPDNVKKVLDERWKYILVEQGRAKEFTSAVKLCKRCNAYCASNDSVDCAVCEQTYHMYCVRPPLLKKPSRGFGWACAVCSRARERKLEGRHNAGQLDPHLEAEEEEIWDEEEDAIDTSRTSPTDGIDDSHLPATAEQTYQNNLWPYRYLGQHCKPQDALDYDDRIYPRAGSRLGPKHQATVSPWYGRPVKLVKPIETKKGSKKDPKSAKENSAAIEADRLAREKKPWIQDEPPGYCARGEDFESDDPRNTAQLLWKPYDPPDEAAPSRDGANIASTDARLENYISSAKAKVIPVLGLPKESTNFLDVAINTLFSNDFKTDLAFKALDRTEKSAFKEPDLSPAEIKKFEEGVTKFGSELHLVTRHVKSVKHGRIVRFYYTWKKSERGKQIWGNYTGRKGKKEAKKAEANAAKLQDDVADDHDDSAFDADKALQRTRGFMCKFCGTKNSRQWRRAPNLGTNIISEGGGKGANKDKSVQYISALCRRCAELWRRYGIQWEDIEDLAKKVAVAGSRGWKRKVDEELLKELMTANEMMNQTVYNTPTRASPAAQPPVSAPPTQPSSSDPPPRKKLKTIADKEAEREQSGLEQGTVATAAPKKKEKPIEKATPLPPPPPAAPELPKLRTLPCFVCDQGSPIGEQTLLCCRECRLTVHRACYGIFDNRHPAKWTCDQCINDKNPQVSIEYRCVLCPVEKTEHDFLEPPKNTHKKKTEKDREKERNDRELAVKAVELYRKRQLELNRPINPREPLKRTAANNWVHVTCAVWHNEIKFGNAKALGLSEGIQSIPRAKYDDVCKVCSQQAGACVHCHTCRAPVHVECAHKNGYMLGFEITPVKGSRRDQHNIVTIGGETGSMSAAVWCKEHIPQRTVVHRMNDPVTAQDGVPAEPNALQLYVRNFKQADLALTGTVRKANLANLSGRAAVVPQPGNQNRRQSSTTVPNPPTPALKASGTNEFQPFGGVMIPQSGEKVCITCGVDVSPRWYSISESQEKVLANGHKGIIGDEAQRFIAQRSVQCHKCHRDKREPVPHIIPPPAEVAPALRPPAMISPNPDPGSPRHLSQGIGRIGESAWGPRAPITQPVPPSGPPTMNGPPSGPPASLPLTASRPGPSPIAAPGPPPGPSHHYPAPANSYNDWQRTAPTQGPVMTHVMNGNSTGPSALHHNHLRDLRPPPITAMPHHPVGPIQHGLGQPAVNGVPSSPPRRGQPNMPNGGSSFVTTFHHPPPQPLHALTNGGPPTRTADHSFSQGLLGQRSSFSAPHTSPPVSRDGVVLRSEPNPTASNPPPRPTDRPTSGASASPSLRNLLS

SEQ ID NO: 18282 - DNA, 6892 bp, Muscodor strobelii
  misc_feature: SGI EST ID NO. CUFF.43158.1
  misc_feature: Variant of the nucleotide sequence at SEQ ID NO 18280
caataagtagggtgaataaaaagatcatctatcagatggtagaatacctaagtcatggatgcagatggtgggcgaaatcgccgcagtatcaaatcagcttagattgaagtttctttccactcgccgccctcccaacttcgcttagtctgcgcgtgtgcgtttccctcgttcccgtcagctcccccagctgctcgtccatgatatccccaattgcaaagtcatatatcgccctcctccggaaacaattcatatgcagtgttcactacccctggtcgttttctgatgctgcagccacctcttaatcccatttcggtcttcaacagagcctggcacccatcgatatcaaaactgccctcctgcaagacacatgagaggtctggagctatatattaggatccaccacgattgctagtccgtatattcaacgaatcttctcctaccctatccctcgtccgatccgtccctgtcaggctaccgattctccctcttcctgttattagacacctcttgtcttctccctacctttccaacaaggcgctcgattacacggtctgtccgtctctccgtgcacaacattcaccacgtacttgtttcgtctaccaggaggcttcttctcgagtcgtatcctctctttgtggtttgccctgtgcatgggatgttgatgacgccgatttgaagggtggtttgtcccgtggccttgcctcccctggtcgactttgatgctcccgcataataaagttactgaactacttgtaccttcttctcgccgtcccacatcacgcctcccacttcttttctctctctcacctcacccacgccgtacatttcgcgattttctattctatgcacccatcccaagatatccggcctgccgagctcgtgctatcgggatttcgccctttcgccctctttttctcgcctctcactcttaccccatccctgtcgtctacttttggcagtgcattgtgtctgctggtcgacttgatttgtcttgaaccgcacagtacgtgggacgtagaagaagagagggcttagatattctagttggctattgtgccaccggcgaaacgcccagcttggccgtcaatacgtattctgctggtccagagcccttcacccacaattgctgcaccttatgtatggatgtaaatatctactgtcttcccccgtcgccacgccgtaatttttcggcgctcccctgtgttacactggatgcgccgcctttgttcgcccgccatggcgcagaagacaagcgactctgatgatcagccaaatcctccgtcatcctcgaccaaggagcacccagggcccgcagcccaaaaacagtcaacgtctcacacatcaagccctgcacctgcaccttcatctgcacctccatcttcaccacccacaccaccgccccagccaaccacggccaaacacaccaactccaagcaatctggagaaaatgccgccaacgcccagtccataaataagtccacctcggcggcatcgaatgcagcgcttaaagacgccatggccggaccttcgccgtatggcacgcgctcaaggaaccgtggtcagacgcggcctaactatgcggaggacaaagatctggatgtcgatatggaggatgcatttcccgagaggaaagaggaagaacctaagaagggactgcggcaatctaacgcgactacgaacggcactaccgatgcgacgagggcgaccgcaacgatcccgcgcaagggcaatggaaccgacgacagcaaagccgccagctctcagccatcctccaaagagtctcagccagcagcctcctcgagtgcgaacgcaaatgggacatcagcggcttctggcccgtccaaaaagcgcaaagccccgacacagtcgactacgaacaatgcgcaaagccagtccagcacaccgatcccgaccgcgacagttgctgtgggtacacgacgaggcgctgctcaggcagcagcacaggctagcttgggatacagagagaccaatatgctcagctttgagaaatataatgcaacaccaaaagatggcaagatgatcgccgacgacggcactacgttgcaggcaaatgaccacgtatacctggtgtgcgaaccacctggagagccatactatctggggcgcatcatggaatttctacacgtgcaaaatgacgaacaaaaacccgtggatgcattacgcatcaattggtactacagacccaaggacattggcaagaaaatcaacgacacgagacagttgttcgctacgatgcactccgacatcagcccgctgacagcgctgcgtggtaagtgccaaatccgccacaaggccgagatcgagagcatggacgcataccggaagacgcccgattgcttttggtacgaaaaactctacgatcgctatattcagaagcagtacgatgtcatcccctgttttcagatcatcaacgtgccggacaatgtgaagaaggtgctggacgagcggtggaaatacattctggtcgagcaaggtcgtgccaaggagtttaccagtgctgtcaagctatgcaagcgttgtaacgcgtactgtgccagtaacgactctgttgattgtgctgtttgtgaacaaacgtatcacatgtactgtgtccgtccacctctgctgaaaaaaccttcgcgtggttttggctgggcttgtgcagtctgcagtcgggcccgagagcggaagctggaaggcaggcataacgcaggtcaacttgacccacatctagaagccgaggaagaagagatctgggatgaggaagaggatgcgattgacacaagtcggacaagccctaccgatggtattgacgactcgcatttgcctgccacggctgaacagacgtatcaaaataatctgtggccatatcgttatcttggtcaacattgcaagcctcaagatgctcttgattatgatgatcgcatatatcctcgagctggctcacgcttgggccccaagcatcaagcaaccgtgtccccctggtatgggcgcccggtgaaactggtcaagccaatcgaaaccaaaaagggtagtaagaaggatccaaaatctgcaaaggagaactcagcggcaatagaagccgacaggcttgcccgtgagaagaaaccatggattcaggatgaaccgccaggttactgtgctcgaggagaggacttcgaaagcgacgatcccagaaacacagctcaattgctgtggaaaccttacgatccccctgatgaagcggccccctctagagacggtgccaatattgcgtcgacggatgcgcgcctcgaaaactacatttcaagtgcgaaagcaaaggtcattccagtgcttggactgccgaaggaatccacaaactttctagacgtcgcaatcaacactctgttttcgaacgacttcaagaccgatttagcattcaaagcccttgacagaactgagaaatcggcgtttaaagagccagatctgagtcctgcggagatcaagaagttcgaggaaggagtcacgaaatttggctccgaactccatctcgtgacgaggcacgttaaatctgtgaagcatggccgtatcgttcgtttttactatacttggaagaagtctgagcgtggcaaacagatatggggcaattacactggtagaaaggggaagaaagaagcgaaaaaggcagaagcaaatgcagcgaaactgcaagacgatgttgctgatgatcacgatgactccgcattcgatgcagataaggcactgcaacgaacacggggtttcatgtgcaagttttgcggcaccaaaaattcgcggcaatggcggcgagcaccaaacttggggacaaacataatcagcgaaggaggaggtaaaggcgccaacaaagataagagtgtccaatacataagtgcactgtgtcgacgctgcgccgagctttggcggcgatacggtattcaatgggaagacattgaagacttggccaagaaggtcgccgttgcagggtcccggggctggaagcggaaggttgatgaagagcttttgaaagagttgatgactgcaaatgaaatgatgaaccagactgtctacaacaccccgaccagagcaagtccagcagcacaaccgcccgtctcagcaccaccaactcaaccctcgagttcggatccaccgccacgcaagaagctaaagactattgctgataaggaggcagagcgtgaacagagcgggttggaacagggaaccgttgcaacagctgctcccaaaaagaaagagaagcctatcgaaaaggccacccctttgcctcctccacctcctgcagctccggaattgcccaagctacggacactaccctgcttcgtttgcgatcaaggaagccctatcggcgaacagactctgctctgctgtcgggagtgtcgattgacagttcatcgagcatgctatggcatatttgataatcggcatccggctaaatggacttgcgaccaatgtatcaatgacaagaaccctcaagtttctattgaatatagatgtgtattatgtcctgttgaaaaaacagagcacgacttcctggagccccccaaaaacacgcacaagaagaagactgagaaagaccgagagaaggaacggaatgaccgggagttggctgtgaaggctgtagagttgtatcggaagcgacagcttgagctgaacagacccatcaaccctcgcgaacctctgaagcgaacagctgctaacaactgggtccatgtcacatgtgcagtgtggcacaatgagatcaaatttggcaacgcaaaagctcttggtctatcggagggcatacaatccatccctagagcaaaatatgatgatgtgtgcaaggtgtgcagtcaacaagccggtgcttgcgtgcattgccatacttgtcgcgctccagttcatgtggaatgtgcacataagaatgggtatatgctcgggtttgaaatcaccccggtcaaaggctcccgtcgagaccagcacaacattgtaactatcggcggggagacaggatccatgtctgctgctgtttggtgcaaagagcacattccgcaacgaaccgtagtccaccgcatgaatgacccagtgacggcacaagatggcgtaccagctgagcctaatgccctgcagctgtatgtacgcaacttcaagcaggctgaccttgctctcacggggactgtccgcaaagccaatttggccaatctttctggaagggctgccgtggtaccacagcctggcaatcagaacagaagacagtcatccactactgtaccgaaccctcctacacctgcactcaaagcatcaggaaccaatgaattccagcctttcggtggtgtgatgattccacagagcggcgaaaaggtctgcatcacgtgtggtgtggatgtgagcccaagatggtactcaatcagtgaatcgcaggaaaaggtccttgccaacggccataagggtatcattggcgacgaagctcagaggttcattgcacaacgaagtgtgcagtgtcataagtgtcatagagacaagcgcgagccggtcccgcacattattcctcctcctgctgaggtcgcgccagcattgcgaccaccggccatgatcagcccgaatcctgatccaggatctcctcgacacttatcgcaaggtattggccggattggtgaaagcgcctggggcccgcgcgcgcctataactcaaccggttccgccttcaggaccgccgaccatgaacgggccacctagcggaccgcctgcctcgcttccattgacagcatcaagaccaggaccgagtccaattgctgcacccggacctcctccggggccatcgcatcactatccagcccctgctaactcatacaacgactggcaacgtactgcgccgacacagggtccagtcatgactcatgtaatgaatgggaattccaccggaccgagtgcgctccatcacaatcatttgcgtgacctcagacctccgcccatcacggcaatgccacaccatccagtcggtcctatacagcatggattgggacaacctgctgtcaatggagtaccatcatcccctccacgaagagggcaacctaacatgccaaacggtggttcctcatttgtgactacattccatcacccgccacctcaacccttgcatgctctcacgaacggtggtccaccaacacggactgcagatcactcattctcccaagggctgctgggacaacgatcatccttctcggctcctcataccagccccccagtctctcgagacggtgtcgtgttgaggagcgaaccaaatcctaccgcgagcaatcctccccccaggccaactgatcggcctaccagcggtgctagtgccagtccatctttacggaatcttctgtcatgatgcgccaggtgctgcacccttattcacatggtcaacatttttacagtttatctttttcgggtttggcgttagcaaggcttgtataagtagagggatataccacaaaggctacaggttccaaaggcgttcttgtaggagaggtctccaagcttcattgcattgtacaaaagacagggtaaaatggtaatgtagaacccagcgtaggtgtttgctacatattgttgacggctaaggtggcgtacttgacggaagcgtttcgtgatcgtgtgggacgacacgatcataacctgctacactatggaaagatttcgctagaccgatttgtttggaactgttgtagttaaataagcaagggcaaggccgtaagtggcgtcccgccatgccaccgataagcttattgtagaacactagctcgatggttaagacgcccctgaatttcctctcgggtaactatgatcgtagcaataacaaactaagggcttaaattctgtattgttctactagggagtgacaaccaacacaggctgttaacaagataattgatacatcc

SEQ ID NO: 18283 - DNA, 1299 bp, Muscodor strobelii
  misc_feature: SGI cDNA ID NO. 566125
  misc_feature: Reduced expression when VOC is produced
  misc_feature: Encodes the peptide sequence at SEQ ID NO 18284
atgaatgacccagtgacggcacaagatggcgtaccagctgagcctaatgccctgcagctgtatgtacgcaacttcaagcaggctgaccttgctctcacggggactgtccgcaaagccaatttggccaatctttctggaagggctgccgtggtaccacagcctggcaatcagaacagaagacagtcatccactactgtaccgaaccctcctacacctgcactcaaagcatcaggaaccaatgaattccagcctttcggtggtgtgatgattccacagagcggcgaaaaggtctgcatcacgtgtggtgtggatgtgagcccaagatggtactcaatcagtgaatcgcaggaaaaggtccttgccaacggccataagggtatcattggcgacgaagctcagaggttcattgcacaacgaagtgtgcagtgtcataagtgtcatagagacaagcgcgagccggtcccgcacattattcctcctcctgctgaggtcgcgccagcattgcgaccaccggccatgatcagcccgaatcctgatccaggatctcctcgacacttatcgcaaggtattggccggattggtgaaagcgcctggggcccgcgcgcgcctataactcaaccggttccgccttcaggaccgccgaccatgaacgggccacctagcggaccgcctgcctcgcttccattgacagcatcaagaccaggaccgagtccaattgctgcacccggacctcctccggggccatcgcatcactatccagcccctgctaactcatacaacgactggcaacgtactgcgccgacacagggtccagtcatgactcatgtaatgaatgggaattccaccggaccgagtgcgctccatcacaatcatttgcgtgacctcagacctccgcccatcacggcaatgccacaccatccagtcggtcctatacagcatggattgggacaacctgctgtcaatggagtaccatcatcccctccacgaagagggcaacctaacatgccaaacggtggttcctcatttgtgactacattccatcacccgccacctcaacccttgcatgctctcacgaacggtggtccaccaacacggactgcagatcactcattctcccaagggctgctgggacaacgatcatccttctcggctcctcataccagccccccagtctctcgagacggtgtcgtgttgaggagcgaaccaaatcctaccgcgagcaatcctccccccaggccaactgatcggcctaccagcggtgctagtgccagtccatctttacggaatcttctgtcatga

SEQ ID NO: 18284 - protein, 432 aa, Muscodor strobelii
  misc_feature: SGI Peptide ID NO. 566125
  misc_feature (16)..(156): NCBI GI: 256733098 Blast Desc: NECHADRAFT_68385 [Nectria haematococca mpVI 77-13-4]
  misc_feature (16)..(161): NCBI GI: 46124911 Blast Desc: FG06833.1 [Gibberella zeae PH-1]
  misc_feature (16)..(157): NCBI GI: 145603121 Blast Desc: MGG_04421 [Magnaporthe grisea 70-15] gi|145011435|gb|EDJ96091.1| MGG_04421 [Magnaporthe grisea 70-15]
  misc_feature (16)..(145): NCBI GI: 116180688 Blast Desc: CHGG_00972 [Chaetomium globosum CBS 148.51] gi|88185269|gb|EAQ92737.1| CHGG_00972 [Chaetomium globosum CBS 148.51]
  misc_feature (1)..(185): NCBI GI: 171687519 Blast Desc: protein product [Podospora anserina] gi|170943721|emb|CAP69373.1| protein product [Podospora anserina]
  misc_feature (17)..(156): NCBI GI: 164424268 Blast Desc: NCU07412 [Neurospora crassa OR74A] gi|157070444|gb|EAA29177.2| conserved [Neurospora crassa OR74A]
  misc_feature (90)..(156): NCBI GI: 261356200 Blast Desc: SANT domain-containing protein [Verticillium albo-atrum VaMs.102]
  misc_feature (16)..(115): NCBI GI: 154297654 Blast Desc: BC1G_12672 [Botryotinia fuckeliana B05.10] gi|150858495|gb|EDN33687.1| BC1G_12672 [Botryotinia fuckeliana B05.10]
  misc_feature (16)..(115): NCBI GI: 156031011 Blast Desc: SS1G_14286 [Sclerotinia sclerotiorum 1980] gi|154700677|gb|EDO00416.1| SS1G_14286 [Sclerotinia sclerotiorum 1980]
  misc_feature (16)..(152): NCBI GI: 258565949 Blast Desc: [Uncinocarpus reesii 1704] gi|237907420|gb|EEP81821.1| [Uncinocarpus reesii 1704]
  misc_feature: Useful for introducing or modulating the production of volatile compounds
MNDPVTAQDGVPAEPNALQLYVRNFKQADLALTGTVRKANLANLSGRAAVVPQPGNQNRRQSSTTVPNPPTPALKASGTNEFQPFGGVMIPQSGEKVCITCGVDVSPRWYSISESQEKVLANGHKGIIGDEAQRFIAQRSVQCHKCHRDKREPVPHIIPPPAEVAPALRPPAMISPNPDPGSPRHLSQGIGRIGESAWGPRAPITQPVPPSGPPTMNGPPSGPPASLPLTASRPGPSPIAAPGPPPGPSHHYPAPANSYNDWQRTAPTQGPVMTHVMNGNSTGPSALHHNHLRDLRPPPITAMPHHPVGPIQHGLGQPAVNGVPSSPPRRGQPNMPNGGSSFVTTFHHPPPQPLHALTNGGPPTRTADHSFSQGLLGQRSSFSAPHTSPPVSRDGVVLRSEPNPTASNPPPRPTDRPTSGASASPSLRNLLS

SEQ ID NO: 18285 - DNA, 6892 bp, Muscodor strobelii; identical to SEQ ID NO: 18282
  misc_feature: SGI EST ID NO. CUFF.43158.1
  misc_feature: Variant of the nucleotide sequence at SEQ ID NO 18283

SEQ ID NO: 18286 - DNA, 429 bp, Muscodor strobelii
  misc_feature: SGI cDNA ID NO. 566126
  misc_feature: Encodes the peptide sequence at SEQ ID NO 18287
atggatgatgaaaagggtctcagaatcgcgctcgaagaggcaagaaaaggctatagagaaggcggcgtccctattggcgctgccctgatagcagccgacggcacgatactaggtgtcggtcgtaatatgcgggttcagagcgacaatccaattctccacggtgagacatcgtgtcttcagaatgctggccggttgccctcatctgcattcaagggtagtacgatgtacacgaccctttcgccatgtgacatgtgcacgggcgcttgcctcttatatgatattccacgcgttgtcatcggcgagaacaaaacttttctgggcggcgaagcatatctcaagcaacgtggcgtcgaggtagttgttttggactctgcagagtgcagagaactcatggagaaattcatcactgagaagccagagatttggtga

SEQ ID NO: 18287 - protein, 142 aa, Muscodor strobelii
  misc_feature: SGI Peptide ID NO. 566126
  misc_feature (1)..(101): Pfam Id: PF00383 Pfam Desc: Cytidine and deoxycytidylate deaminase zinc-binding region
  misc_feature (1)..(142): NCBI GI: 145229091 Blast Desc: An01g04260 [Aspergillus niger] gi|134054953|emb|CAK36962.1| protein product [Aspergillus niger]
  misc_feature (1)..(142): NCBI GI: 238486578 Blast Desc: cytosine deaminase, [Aspergillus flavus NRRL3357] gi|220699406|gb|EED55745.1| cytosine deaminase, [Aspergillus flavus NRRL3357]
  misc_feature (1)..(142): NCBI GI: 169770937 Blast Desc: [Aspergillus oryzae RIB40] gi|83767797|dbj|BAE57936.1| protein product [Aspergillus oryzae]
  misc_feature (1)..(142): NCBI GI: 70990810 Blast Desc: cytosine deaminase [Aspergillus fumigatus Af293] gi|119496775|ref|XP_001265161.1| cytosine deaminase, [Neosartorya fischeri NRRL 181] gi|66847886|gb|EAL88216.1| cytosine deaminase,
  misc_feature (1)..(142): NCBI GI: 255941100 Blast Desc: Pc16g10090 [Penicillium chrysogenum Wisconsin 54-1255] gi|211585942|emb|CAP93679.1| Pc16g10090 [Penicillium chrysogenum Wisconsin 54-1255]
  misc_feature (1)..(142): NCBI GI: 115388491 Blast Desc: cytosine deaminase [Aspergillus terreus NIH2624] gi|114195835|gb|EAU37535.1| cytosine deaminase [Aspergillus terreus NIH2624]
  misc_feature (1)..(142): NCBI GI: 85090433 Blast Desc: cytosine deaminase [Neurospora crassa OR74A] gi|28919775|gb|EAA29178.1| cytosine deaminase [Neurospora crassa OR74A]
  misc_feature (1)..(142): NCBI GI: 212540050 Blast Desc: cytosine deaminase, [Penicillium marneffei ATCC 18224] gi|210067479|gb|EEA21571.1| cytosine deaminase, [Penicillium marneffei ATCC 18224]
  misc_feature (1)..(142): NCBI GI: 156030997 Blast Desc: SS1G_14279 [Sclerotinia sclerotiorum 1980] gi|154700670|gb|EDO00409.1| SS1G_14279 [Sclerotinia sclerotiorum 1980]
  misc_feature (1)..(142): NCBI GI: 121702783 Blast Desc: cytosine deaminase, [Aspergillus clavatus NRRL 1] gi|119397799|gb|EAW08230.1| cytosine deaminase, [Aspergillus clavatus NRRL 1]
  misc_feature (1)..(142): SWISSPROT Homolog: EC 3.5.4.1 Cytosine deaminase
MDDEKGLRIALEEARKGYREGGVPIGAALIAADGTILGVGRNMRVQSDNPILHGETSCLQNAGRLPSSAFKGSTMYTTLSPCDMCTGACLLYDIPRVVIGENKTFLGGEAYLKQRGVEVVVLDSAECRELMEKFITEKPEIW

SEQ ID NO: 18288 - DNA, 2034 bp, Muscodor strobelii
  misc_feature: SGI EST ID NO. CUFF.43071.0
  misc_feature: Variant of the nucleotide sequence at SEQ ID NO 18286
gggcaccctagcgacgttgtggtgagtctagatcggcaaatgccgatgcgggacagctgcaaatttgaccacggcttagagatgctacgcattttgaggcgtactagcagtcattagaagagagattcggctatctgcaacagactagaataagcttttattagaaagataatttcaaaagagaacgtgccaggataaggagaccgttatatgttgctggtagtcacttttacacattgagtttcagcacaatggatgatgaaaagggtctcagaatcgcgctcgaagaggcaagaaaaggctatagagaaggcggcgtccctattggcgctgccctgatagcagccgacggcacgatactaggtgtcggtcgtaatatgcgggttcagagcgacaatccaattctccacggtgagacatcgtgtcttcagaatgctggccggttgccctcatctgcattcaagggtagtacgatgtacacgaccctttcgccatgtgacatgtgcacgggcgcttgcctcttatatgatattccacgcgttgtcatcggcgagaacaaaacttttctgggcggcgaagcatatctcaagcaacgtggcgtcgaggtagttgttttggactctgcagagtgcagagaactcatggagaaattcatcactgagaagccagagatttggaacgaggatattggtgtcgaagagagggtctactccaaggagagttctaagtaaatttgttaagcactcaacctaaagaacacttttagaagtatatagcgatatcgaagttgcgaacaagacacacatctatatggctaattaatgcattcgtccaccatattcaaaggtgtgatgattgattgattgattgacacaaaatatacatgcagtagtaggtatgtgtactgttatccatattgcttgccgcgacgtgctaatcgtggtcctcttctgtaagtcccgggcatccttccatcgtgtcatcctggtactcaaatttgcaccagaagcaataatgatactcgtcgcgaagatgttgtaccagccgccgcaacctttcatcgggctcaagagcattgaattcgtcaagttcgggatcttcttcatccagatcctcgaccattgagtacgtatcctgcgtcttacccatagctttcctattatcctcgtcctcggaatagtcctcatacgtgggaagtcgcgtggcgccttgctgtacatcgtgtttcattcttctgtcgcgttcgtcttcctctcgcttgcgaataaggccccgccaaacgacaggtatgaatttgagtggtcttgtagaaaccgctcgcttcttcttaggagcttgatcctcagaatcctcactcttcacggtagcttgctctttctcttcatccatacggtcgcaaactttcatagccgcatagacctgatgttctagtcgtgcaaattcgcgttctttccgaacacgatctcgaaactcatcctggtctatcttaaccttcttctgtgcctcaccaacggcttccatgaatttccgttttttgtccgtgtctaagccaatgccgcctcggtcgtccctcatctccggacggagaggctcagtgatggcgtctttattctctttgctgccgagggcaccgcctttgaatcccatctttgccatcatcgccaggcctttgcttttcttagcctgcgcgccttccagcatcgaagtcgttagcgctgcctcgcgggtttcgcgctcttctaccgcgagctccgcttttgatttcacgcggcctttgatctcgccctcgcgcttgagacgctgtcttcgctggagtgaagtttccacggcaggttgttgctcctcgctgaacgtcatgttcatgtagtcgtcttcctcgtctgacgccattttcgacccttgttttccgatattgactgtataggaatagaaattcagagttgataccgaaaactggagttcttgcttctcagatcgtacttgtttgaatatcgttgcgtagatttcttgtgcacttgcatatacaaggcgaaa

SEQ ID NO: 18289 - DNA, 480 bp, Muscodor strobelii
  misc_feature: SGI cDNA ID NO. 566127
  misc_feature: Encodes the peptide sequence at SEQ ID NO 18290
atggatgatgaaaagggtctcagaatcgcgctcgaagaggcaagaaaaggctatagagaaggcggcgtccctattggcgctgccctgatagcagccgacggcacgatactaggtgtcggtcgtaatatgcgggttcagagcgacaatccaattctccacggtgagacatcgtgtcttcagaatgctggccggttgccctcatctgcattcaagggtagtacgatgtacacgaccctttcgccatgtgacatgtgcacgggcgcttgcctcttatatgatattccacgcgttgtcatcggcgagaacaaaacttttctgggcggcgaagcatatctcaagcaacgtggcgtcgaggtagttgttttggactctgcagagtgcagagaactcatggagaaattcatcactgagaagccagagatttggaacgaggatattggtgtcgaagagagggtctactccaaggagagttctaagtaa

SEQ ID NO: 18290 - protein, 159 aa, Muscodor strobelii
  misc_feature: SGI Peptide ID NO. 566127
  misc_feature (1)..(101): Pfam Id: PF00383 Pfam Desc: Cytidine and deoxycytidylate deaminase zinc-binding region
  misc_feature (1)..(156): NCBI GI: 156030997 Blast Desc: SS1G_14279 [Sclerotinia sclerotiorum 1980] gi|154700670|gb|EDO00409.1| SS1G_14279 [Sclerotinia sclerotiorum 1980]
  misc_feature (1)..(148): NCBI GI: 145229091 Blast Desc: An01g04260 [Aspergillus niger] gi|134054953|emb|CAK36962.1| protein product [Aspergillus niger]
  misc_feature (1)..(148): NCBI GI: 238486578 Blast Desc: cytosine deaminase, [Aspergillus flavus NRRL3357] gi|220699406|gb|EED55745.1| cytosine deaminase, [Aspergillus flavus NRRL3357]
  misc_feature (1)..(148): NCBI GI: 70990810 Blast Desc: cytosine deaminase [Aspergillus fumigatus Af293] gi|119496775|ref|XP_001265161.1| cytosine deaminase, [Neosartorya fischeri NRRL 181] gi|66847886|gb|EAL88216.1| cytosine deaminase,
  misc_feature (1)..(148): NCBI GI: 255941100 Blast Desc: Pc16g10090 [Penicillium chrysogenum Wisconsin 54-1255] gi|211585942|emb|CAP93679.1| Pc16g10090 [Penicillium chrysogenum Wisconsin 54-1255]
  misc_feature (1)..(148): NCBI GI: 115388491 Blast Desc: cytosine deaminase [Aspergillus terreus NIH2624] gi|114195835|gb|EAU37535.1| cytosine deaminase [Aspergillus terreus NIH2624]
  misc_feature (1)..(142): NCBI GI: 169770937 Blast Desc: [Aspergillus oryzae RIB40] gi|83767797|dbj|BAE57936.1| protein product [Aspergillus oryzae]
  misc_feature (1)..(148): NCBI GI: 212540050 Blast Desc: cytosine deaminase, [Penicillium marneffei ATCC 18224] gi|210067479|gb|EEA21571.1| cytosine deaminase, [Penicillium marneffei ATCC 18224]
  misc_feature (1)..(148): NCBI GI: 85090433 Blast Desc: cytosine deaminase [Neurospora crassa OR74A] gi|28919775|gb|EAA29178.1| cytosine deaminase [Neurospora crassa OR74A]
  misc_feature (1)..(148): NCBI GI: 190347436 Blast Desc: conserved [Pichia guilliermondii ATCC 6260]
  misc_feature (1)..(147): SWISSPROT Homolog: EC 3.5.4.1 Cytosine deaminase
MDDEKGLRIALEEARKGYREGGVPIGAALIAADGTILGVGRNMRVQSDNPILHGETSCLQNAGRLPSSAFKGSTMYTTLSPCDMCTGACLLYDIPRVVIGENKTFLGGEAYLKQRGVEVVVLDSAECRELMEKFITEKPEIWNEDIGVEERVYSKESSK

SEQ ID NO: 18291 - DNA, 2034 bp, Muscodor strobelii; identical to SEQ ID NO: 18288
  misc_feature: SGI EST ID NO. CUFF.43071.0
  misc_feature: Variant of the nucleotide sequence at SEQ ID NO 18289

SEQ ID NO: 18292 - DNA, 957 bp, Muscodor strobelii
  misc_feature: SGI cDNA ID NO. 566128
  misc_feature: Reduced expression when VOC is produced
  misc_feature: Encodes the peptide sequence at SEQ ID NO 18293
atggcgtcagacgaggaagacgactacatgaacatgacgttcagcgaggagcaacaacctgccgtggaaacttcactccagcgaagacagcgtctcaagcgcgagggcgagatcaaaggccgcgtgaaatcaaaagcggagctcgcggtagaagagcgcgaaacccgcgaggcagcgctaacgacttcgatgctggaaggcgcgcaggctaagaaaagcaaaggcctggcgatgatggcaaagatgggattcaaaggcggtgccctcggcagcaaagagaataaagacgccatcactgagcctctccgtccggagatgagggacgaccgaggcggcattggcttagacacggacaaaaaacggaaattcatggaagccgttggtgaggcacagaagaaggttaagatagaccaggatgagtttcgagatcgtgttcggaaagaacgcgaatttgcacgactagaacatcaggtctatgcggctatgaaagtttgcgaccgtatggatgaagagaaagagcaagctaccgtgaagagtgaggattctgaggatcaagctcctaagaagaagcgagcggtttctacaagaccactcaaattcatacctgtcgtttggcggggccttattcgcaagcgagaggaagacgaacgcgacagaagaatgaaacacgatgtacagcaaggcgccacgcgacttcccacgtatgaggactattccgaggacgaggataataggaaagctatgggtaagacgcaggatacgtactcaatggtcgaggatctggatgaagaagatcccgaacttgacgaattcaatgctcttgagcccgatgaaaggttgcggcggctggtacaacatcttcgcgacgagtatcattattgcttctggtgcaaatttgagtaccaggatgacacgatggaaggatgcccgggacttacagaagaggaccacgattag

SEQ ID NO: 18293 - protein, 318 aa, Muscodor strobelii
  misc_feature: SGI Peptide ID NO. 566128
  misc_feature (71)..(116): Pfam Id: PF01585 Pfam Desc: G-patch domain
  misc_feature (2)..(318): NCBI GI: 46125215 Blast Desc: FG06985.1 [Gibberella zeae PH-1]
  misc_feature (9)..(318): NCBI GI: 154324166 Blast Desc: BC1G_00482 [Botryotinia fuckeliana B05.10] gi|150842711|gb|EDN17904.1| BC1G_00482 [Botryotinia fuckeliana B05.10]
  misc_feature (4)..(318): NCBI GI: 39944864 Blast Desc: MGG_04414 [Magnaporthe grisea 70-15] gi|145021560|gb|EDK05689.1| MGG_04414 [Magnaporthe grisea 70-15]
  misc_feature (1)..(318): NCBI GI: 169784382 Blast Desc: [Aspergillus oryzae RIB40] gi|238508489|ref|XP_002385437.1| G-patch domain protein, [Aspergillus flavus NRRL3357] gi|83775399|dbj|BAE65519.1| protein
  misc_feature (4)..(318): NCBI GI: 156057421 Blast Desc: SS1G_04441 [Sclerotinia sclerotiorum 1980] gi|154702227|gb|EDO01966.1| SS1G_04441 [Sclerotinia sclerotiorum 1980]
  misc_feature (3)..(318): NCBI GI: 85118473 Blast Desc: NCU02678 [Neurospora crassa OR74A] gi|28927260|gb|EAA36215.1| [Neurospora crassa OR74A] gi|38567194|emb|CAE76487.1| conserved [Neurospora crassa]
  misc_feature (1)..(318): NCBI GI: 67521950 Blast Desc: AN1432.2 [Aspergillus nidulans FGSC A4] gi|40745406|gb|EAA64562.1| AN1432.2 [Aspergillus nidulans FGSC A4] gi|259486742|tpe|CBF84845.1| TPA: G-patch domain protein, A4]
  misc_feature (4)..(318): NCBI GI: 171680139 Blast Desc: protein product [Podospora anserina] gi|170939696|emb|CAP64922.1| protein product [Podospora anserina]
  misc_feature (4)..(318): NCBI GI: 119484130 Blast Desc: G-patch domain protein, [Neosartorya fischeri NRRL 181] gi|119410124|gb|EAW20071.1| G-patch domain protein, [Neosartorya fischeri NRRL 181]
  misc_feature (4)..(318): NCBI GI: 121719653 Blast Desc: G-patch domain protein, [Aspergillus clavatus NRRL 1] gi|119404737|gb|EAW15099.1| G-patch domain protein, [Aspergillus clavatus NRRL 1]
  misc_feature: Useful for introducing or modulating the production of volatile compounds
MASDEEDDYMNMTFSEEQQPAVETSLQRRQRLKREGEIKGRVKSKAELAVEERETREAALTTSMLEGAQAKKSKGLAMMAKMGFKGGALGSKENKDAITEPLRPEMRDDRGGIGLDTDKKRKFMEAVGEAQKKVKIDQDEFRDRVRKEREFARLEHQVYAAMKVCDRMDEEKEQATVKSEDSEDQAPKKKRAVSTRPLKFIPVVWRGLIRKREEDERDRRMKHDVQQGATRLPTYEDYSEDEDNRKAMGKTQDTYSMVEDLDEEDPELDEFNALEPDERLRRLVQHLRDEYHYCFWCKFEYQDDTMEGCPGLTEEDHD

SEQ ID NO: 18294 - DNA, 1209 bp, Muscodor strobelii
  misc_feature: SGI cDNA ID NO. 566129
  misc_feature: Encodes the peptide sequence at SEQ ID NO 18295
atggcgcaattgctacaagacctaatatactcgtttggcaattgcctcaactgttttcccggctcgccgacacttaaaatcaacagccggtctttcaagattttacgactactgggagagggtggtttcagctatgtctaccttgtccaggataccgcaaccgcagagctattcgcgctcaagaagatacgatgtccctttgggcaagaatcagtccaacaagccatgcgcgaagtcgaagcatacaagacctttgctcactctccttccataattcacagtgtcgactactcgatcgctagcgagcggaacgacgcggattcgaagactgtctatgtccttctaccctactacaggaggggaaatctccaagatatcataaacgcgaatctggtcaaccacacaacttttcccgagaaggagctcatgcatctgttcctcggtgtctgtaaggccatgacatacatgcacaaataccgcgccccagctggcggagagcgcatggagatgggtaatgcgaaggctggtgaagacggtcaagatgagcgggacaggagaggaaatctcgcagtggctgccgcggacgccgatgatgagacggagcaagcaaggcctttgatggtagaggaggaggttgtacccgctggacaacgccggtcatatgcgcatagagatattaagccaggcaacatcatgattgatgactctggttcgcaacccatcatcatggatctgggatcggtggcagactcaccactcgccatcacctcgaggtctctagccattgccacccaagacacagcggccgagcacagcactatgccatatcgagcacctgagctctttgacgtcaagactggaacggttattgataccaaggtcgatatatggtcgctgggatgcaccttatacgcttgtcttgtcggcaaatcgcctttcgagatgcgaagtgatgagactggtggtagcttaagtatgtgtgtcttgggtggcgactggcgattcccagacgaaggcattcagaggcggaatacggggaagaacgcggttggtgcaaatacacctgctccggctgggacgataagtgaaccgattaaggaggtagtaagaaagtgtttgatggtggagccaagcgaacggccggatattgacgaactgataacgatggtagagcatgtcattgatgaattaccggatgatgaggcttag

SEQ ID NO: 18295 - protein, 402 aa, Muscodor strobelii
  misc_feature: SGI Peptide ID NO. 566129
  misc_feature (32)..(390): Pfam Id: PF00069 Pfam Desc: Protein kinase domain
  misc_feature (32)..(158): Pfam Id: PF00069 Pfam Desc: Protein kinase domain
  misc_feature (273)..(390): Pfam Id: PF00069 Pfam Desc: Protein kinase domain
  misc_feature (1)..(402): NCBI GI: 85090576 Blast Desc: NCU07399 [Neurospora crassa OR74A] gi|28919849|gb|EAA29247.1| NCU07399 [Neurospora crassa OR74A]
  misc_feature (1)..(400): NCBI GI: 256733097 Blast Desc: [Nectria haematococca mpVI 77-13-4]
  misc_feature (1)..(400): NCBI GI: 46124909 Blast Desc: FG06832.1 [Gibberella zeae PH-1]
  misc_feature (1)..(400): NCBI GI: 154324130 Blast Desc: BC1G_00464 [Botryotinia fuckeliana B05.10] gi|150842693|gb|EDN17886.1| BC1G_00464 [Botryotinia fuckeliana B05.10]
  misc_feature (14)..(402): NCBI GI: 171687497 Blast Desc: protein product [Podospora anserina] gi|170943710|emb|CAP69362.1| protein product [Podospora anserina]
  misc_feature (1)..(400): NCBI GI: 156057459 Blast Desc: SS1G_04461 [Sclerotinia sclerotiorum 1980] gi|154702246|gb|EDO01985.1| SS1G_04461 [Sclerotinia sclerotiorum 1980]
  misc_feature (1)..(402): NCBI GI: 238845174 Blast Desc: serine/threonine-protein kinase [Microsporum canis CBS 113480]
  misc_feature (1)..(401): NCBI GI: 242799422 Blast Desc: serine/threonine protein kinase, [Talaromyces stipitatus ATCC 10500] gi|242799427|ref|XP_002483376.1| serine/threonine protein kinase, [Talaromyces stipitatus ATCC
  misc_feature (7)..(400): NCBI GI: 189203749 Blast Desc: serine/threonine kinase 16 [Pyrenophora tritici-repentis Pt-1C-BFP] gi|187985309|gb|EDU50797.1| serine/threonine kinase 16 [Pyrenophora tritici-repentis
  misc_feature (1)..(402): NCBI GI: 119484224 Blast Desc: serine/threonine protein kinase, [Neosartorya fischeri NRRL 181] gi|119410171|gb|EAW20118.1| serine/threonine protein kinase, [Neosartorya fischeri NRRL 181]
  misc_feature (24)..(381): SWISSPROT Homolog: EC 2.7.11.1 Non-specific serine/threonine protein kinase
MAQLLQDLIYSFGNCLNCFPGSPTLKINSRSFKILRLLGEGGFSYVYLVQDTATAELFALKKIRCPFGQESVQQAMREVEAYKTFAHSPSIIHSVDYSIASERNDADSKTVYVLLPYYRRGNLQDIINANLVNHTTFPEKELMHLFLGVCKAMTYMHKYRAPAGGERMEMGNAKAGEDGQDERDRRGNLAVAAADADDETEQARPLMVEEEVVPAGQRRSYAHRDIKPGNIMIDDSGSQPIIMDLGSVADSPLAITSRSLAIATQDTAAEHSTMPYRAPELFDVKTGTVIDTKVDIWSLGCTLYACLVGKSPFEMRSDETGGSLSMCVLGGDWRFPDEGIQRRNTGKNAVGANTPAPAGTISEPIKEVVRKCLMVEPSERPDIDELITMVEHVIDELPDDEA

SEQ ID NO: 18296 - DNA, 2671 bp, Muscodor strobelii
  misc_feature: SGI EST ID NO. CUFF.43102.1
  misc_feature: Variant of the nucleotide sequence at SEQ ID NO 18294
ctgagcttctttagtgagccttttccatcatgctcaagaacccagagtgttttatcttgtcctgtcacggctacgacgtgacttccgtctcttgtagccgtaagaagaacgacatacggagcttctgaattctggagtgcccaatttgcccttttgttctttttcttctttcccccgtcgacagccatgtcctgtgattccaacacgatgtctacctcactaggggtggctgtatcctctccttccactttacgcctcttagacggaggttcatctcctgtttccctggccgtcggcattgctcttcacgactgatttctcaccgatgccggccaattttgaggacggatggctccaggaagataggaactgaggatctgcgctgagatcgaatgtgtgaattgatgttcctcttgaagcggcaaaaattgtgcccggtcccaatgggctgagacactggtgcgggaagctcatgatggcctgcttatgcaaaccacgagcgtttagaaatggctagagctgggatgagatggacttggtgagggtataaaattctgtcaacatctgagaagttcgacgacgagttaacccgacgggttgagaaaatgttgagtcgggtaccttacagccagcaggaatattccacgtattcagatactcgacgccatccagattttcgaataaatcttcggatatcaatattgaccacttcccaatctgtgcctctagctctactacccagtacggaaggcctgggtttcgtcaattcttggcagaggtaatagcagaatagtagcagcactaggaccatcgtccctacggcgctctgtacaggccacgcccgctaataatagcacgtacgagtgtggcgcagcttcctatccgccccctgtcgccgtacagctcagctttatcaacttgtcgcgatgccaacgtcagaaaatcaattccatatttcatccatcagcctgacccagaaaaacattgcattgttgacaattgaatcaccgctgaatagttacttgtaattgatactacgtcaacttcacattccgcacaacgaaccgcattgctgtcctcgcatccgaattcaagaagcttgaagagcttctagcggcatccgcataagcagtctacgttgcttgtgctgtacaattactgccgaactccccaacacaacaccatctgctcatcatggcgcaattgctacaagacctaatatactcgtttggcaattgcctcaactgttttcccggctcgccgacacttaaaatcaacagccggtctttcaagattttacgactactgggagagggtggtttcagctatgtctaccttgtccaggataccgcaaccgcagagctattcgcgctcaagaagatacgatgtccctttgggcaagaatcagtccaacaagccatgcgcgaagtcgaagcatacaagacctttgctcactctccttccataattcacagtgtcgactactcgatcgctagcgagcggaacgacgcggattcgaagactgtctatgtccttctaccctactacaggaggggaaatctccaagatatcataaacgcgaatctggtcaaccacacaacttttcccgagaaggagctcatgcatctgttcctcggtgtctgtaaggccatgacatacatgcacaaataccgcgccccagctggcggagagcgcatggagatgggtaatgcgaaggctggtgaagacggtcaagatgagcgggacaggagaggaaatctcgcagtggctgccgcggacgccgatgatgagacggagcaagcaaggcctttgatggtagaggaggaggttgtacccgctggacaacgccggtcatatgcgcatagagatattaagccaggcaacatcatgattgatgactctggttcgcaacccatcatcatggatctgggatcggtggcagactcaccactcgccatcacctcgaggtctctagccattgccacccaagacacagcggccgagcacagcactatgccatatcgagcacctgagctctttgacgtcaagactggaacggttattgataccaaggtcgatatatggtcgctgggatgcaccttatacgcttgtcttgtcggcaaatcgcctttcgagatgcgaagtgatgagactggtggtagcttaagtatgtgtgtcttgggtggcgactggcgattcccagacgaaggcattcagaggcggaatacggggaagaacgcggttggtgcaaatacacctgctccggctgggacgataagtgaaccgattaaggaggtagtaagaaagtgtttgatggtggagccaagcgaacggccggatattgacgaactgataacgatggtagagcatgtcattgatgaattaccggatgatgaggcttagatgaggacgcacgatacaggtttcgcacccggtgtacaatcggatttctgttgaggagtgatgtaggctccattcttcataccccatttacatcttgtatgttaatgaacggcgttcggcgtgtattacagtccgtatttccgtaaagatttaagcatcatgccatcgcagatgcgtcattatcttgatttgtgttaagacttcccaacgttgataatcaagttattggttgtttgcccatcacatcctgaattctgtcgaagaccca

SEQ ID NO: 18297 - DNA, 1221 bp, Muscodor strobelii
  misc_feature: SGI cDNA ID NO. 566130
  misc_feature: Encodes the peptide sequence at SEQ ID NO 18298
atggctgtcgacgggggaaagaagaaaaagaacaaaagggcaaattgggcactccagaattcagaagctccgtatgtcgttcttcttacggctacaagagacggaagtcacgtcgtagccgtgacaggacaagataaaacactctgggttcttgagcatgatggaaaaggctcactaaagaagctcagccaaagggcaatgcctaaacgtccctgctctctcgcattcacagcagacggtcagacgattatcagcgccgacaagttcggggatgtctatgcgcttcctctcatcacatctcccgaacaggaagatgccatattaacgtcaggctcaactccagcacccagcacggtttcgcaaccactacacggagcgaatagcttcacagtccactcacagcgcaatctccgcgccctcgaacaccagaagcgacagcgagaagcaaacaaaggccaagacacaccgaaagagggcctctcattcgcccacgagttgctcctaggccacgtctcactactaacatgcgtcgtaagcgcgaaagacactcaaggtagaccgtatatcataaccggcgacagggacgaacatatccgcgtgtcacggggcatgcctcaagcccacgtcatcgagacatattgtctaggacacagttcatttgtcaacgcactctgtctcccacagcctgagatcctcgtttcaggaggcggcgacaatgagctcttcgtttgggattggctcgcggggaaactcctcagcaaagtcgacttacttgcgcgtgtgcaggaggtcgttcccgacgcctccaaaatcgccgttgtgaagctctgcgtatatgaagctgaaggcgagcgctatatcatcgcgatatgcgagaaagttcccgcattgttctcattcagactccaagacaataagctcttgcccgtccaaaccttccaaaccgcaggaaacgcactggatactatggtcctcaatactaaaatcctagtgaccatggacagtaacgactcacttcttatcctcacacaaaccaacggggttcttgccccggaggacactacattacaagctaccactactgtagaagcctcatccatttccagagaagatctagacaaggcgctatacaccgttgagaatttgcgcaaggggcgtgatgacaccggtgaggaagatgaaccgatcgcacaggccacacctgataccagtcaggtgtaa

SEQ ID NO: 18298 - protein, 406 aa, Muscodor strobelii
  misc_feature: SGI Peptide ID NO. 566130
  misc_feature (208)..(245): Pfam Id: PF00400 Pfam Desc: WD domain, G-beta repeat
  misc_feature (10)..(384): NCBI GI: 256733095 Blast Desc: NECHADRAFT_79056 [Nectria haematococca mpVI 77-13-4]
  misc_feature (7)..(388): NCBI GI: 85089946 Blast Desc: NCU07409 [Neurospora crassa OR74A] gi|28919518|gb|EAA28948.1| [Neurospora crassa OR74A]
  misc_feature (24)..(384): NCBI GI: 46124897 Blast Desc: FG06826.1 [Gibberella zeae PH-1]
  misc_feature (6)..(293): NCBI GI: 39944972 Blast Desc: MGG_04468 [Magnaporthe grisea 70-15] gi|145011428|gb|EDJ96084.1| MGG_04468 [Magnaporthe grisea 70-15]
  misc_feature (7)..(326): NCBI GI: 156031003 Blast Desc: SS1G_14282 [Sclerotinia sclerotiorum 1980] gi|229891686|sp|A7F9K1.1|TRM82_SCLS1 RecName: Full=tRNA (guanine-N(7)-)-methyltransferase subunit trm82; AltName: RNA 82
  misc_feature (2)..(299): NCBI GI: 171687507 Blast Desc: protein product [Podospora anserina] gi|170943715|emb|CAP69367.1| protein product [Podospora anserina]
  misc_feature (4)..(334): NCBI GI: 67524555 Blast Desc: AN2735.2 [Aspergillus nidulans FGSC A4] gi|40743847|gb|EAA63033.1| AN2735.2 [Aspergillus nidulans FGSC A4] gi|259486352|tpe|CBF84121.1| TPA: tRNA methyltransferase, A4]
  misc_feature (26)..(335): NCBI GI: 121702779 Blast Desc: tRNA methyltransferase, [Aspergillus clavatus NRRL 1] gi|229891684|sp|A1CRF7.1|TRM82_ASPCL RecName: Full=tRNA (guanine-N(7)-)-methyltransferase subunit trm82; AltName: RNA 82
  misc_feature (26)..(335): NCBI GI: 258565905 Blast Desc: [Uncinocarpus reesii 1704] gi|237907398|gb|EEP81799.1| [Uncinocarpus reesii 1704]
  misc_feature (8)..(384): NCBI GI: 240111151 Blast Desc: WD domain, G-beta repeat containing protein [Coccidioides posadasii C735 delta SOWgp]
MAVDGGKKKKNKRANWALQNSEAPYVVLLTATRDGSHVVAVTGQDKTLWVLEHDGKGSLKKLSQRAMPKRPCSLAFTADGQTIISADKFGDVYALPLITSPEQEDAILTSGSTPAPSTVSQPLHGANSFTVHSQRNLRALEHQKRQREANKGQDTPKEGLSFAHELLLGHVSLLTCVVSAKDTQGRPYIITGDRDEHIRVSRGMPQAHVIETYCLGHSSFVNALCLPQPEILVSGGGDNELFVWDWLAGKLLSKVDLLARVQEVVPDASKIAVVKLCVYEAEGERYIIAICEKVPALFSFRLQDNKLLPVQTFQTAGNALDTMVLNTKILVTMDSNDSLLILTQTNGVLAPEDTTLQATTTVEASSISREDLDKALYTVENLRKGRDDTGEEDEPIAQATPDTSQV

SEQ ID NO: 18299 - DNA, 3843 bp, Muscodor strobelii
  misc_feature: SGI EST ID NO. CUFF.43101.0
  misc_feature: Variant of the nucleotide sequence at SEQ ID NO 18297
tgggtcttcgacagaattcaggatgtgatgggcaaacaaccaataacttgattatcaacgttgggaagtcttaacacaaatcaagataatgacgcatctgcgatggcatgatgcttaaatctttacggaaatacggactgtaatacacgccgaacgccgttcattaacatacaagatgtaaatggggtatgaagaatggagcctacatcactcctcaacagaaatccgattgtacaccgggtgcgaaacctgtatcgtgcgtcctcatctaagcctcatcatccggtaattcatcaatgacatgctctaccatcgttatcagttcgtcaatatccggccgttcgcttggctccaccatcaaacactttcttactacctccttaatcggttcacttatcgtcccagccggagcaggtgtatttgcaccaaccgcgttcttccccgtattccgcctctgaatgccttcgtctgggaatcgccagtcgccacccaagacacacatacttaagctaccaccagtctcatcacttcgcatctcgaaaggcgatttgccgacaagacaagcgtataaggtgcatcccagcgaccatatatcgaccttggtatcaataaccgttccagtcttgacgtcaaagagctcaggtgctcgatatggcatagtgctgtgctcggccgctgtgtcttgggtggcaatggctagagacctcgaggtgatggcgagtggtgagtctgccaccgatcccagatccatgatgatgggttgcgaaccagagtcatcaatcatgatgttgcctttgcaaaagtcagcttagcgagttctgagatacgtatcatctcggaattgggacagaaacacttacctggcttaatatctctatgcgcatatgaccggcgttgtccagcgggtacaacctcctcctctaccatcaaaggccttgcttgctccgtctcatcatcggcgtccgcggcagccactgcgagatttcctctcctgtcccgctcatcttgaccgtcttcaccagccttcgcattacccatctccatgcgctctccgccagctggggcgcggtatttgtgcatgtatgtcatggccttacagacaccgaggaacagatgcatgagctccttctcgggaaaagttgtgtggttgaccagattcgcgtttatgatatcttggagatttcccctcctgtagtagggtagaaggacatagacagtcttcgaatccgcgtcgttccgctcgctagcgatcgagtagtcgacactgtgaattatggaaggagagtgagcaaaggtcttgtatgcttcgacttcgcgcatggcttgttggactgattcttgcccaaagggacatcgtatcttcttgagcgcgaatagctctgcggttgcggtatcctggacaaggtagacatagctgaaaccaccctctcccagtagtcgtaaaatcttgaaagaccggctgttgattttaagtgtcggcgagccgggaaaacagttgaggcaattgccaaacgagtatattaggtcttgtagcaattgcgccatgatgagcagatggtgttgtgttggggagttcggcagtaattgtacagcacaagcaacgtagactgcttatgcggatgccgctagaagctcttcaagcttcttgaattcggatgcgaggacagcaatgcggttcgttgtgcggaatgtgaagttgacgtagtatcaattacaagtaactattcagcggtgattcaattgtcaacaatgcaatgtttttctgggtcaggctgatggatgaaatatggaattgattttctgacgttggcatcgcgacaagttgataaagctgagctgtacggcgacagggggcggataggaagctgcgccacactcgtacgtgctattattagcgggcgtggcctgtacagagcgccgtagggacgatggtcctagtgctgctactattctgctattacctctgccaagaattgacgaaacccaggccttccgtactgggtagtagagctagaggcacagattgggaagtggtcaatattgatatccgaagatttattcgaaaatctggatggcgtcgagtatctgaatacgtggaatattcctgctggctatgttgacagaattttataccctcaccaagtccatctcatcccagctctagccatttctaaacgctcgtggtttgcataagcaggccatcatgagcttcccgcaccagtgtctcagcccattgggaccgggcacaatttttgccgcttcaagaggaacatcaattcacacattcgatctcagcgcagatcctcagttcctatcttcctggagccatccgtcctcaaaattggccggcatcggtgagaaatcagtcgtgaagagcaatgccgacggccagggaaacaggagatgaacctccgtctaagaggcgtaaagtggaaggagaggatacagccacccctagtgaggtagacatcgtgttggaatcacaggacatggctgtcgacgggggaaagaagaaaaagaacaaaagggcaaattgggcactccagaattcagaagctccgtatgtcgttcttcttacggctacaagagacggaagtcacgtcgtagccgtgacaggacaagataaaacactctgggttcttgagcatgatggaaaaggctcactaaagaagctcagccaaagggcaatgcctaaacgtccctgctctctcgcattcacagcagacggtcagacgattatcagcgccgacaagttcggggatgtctatgcgcttcctctcatcacatctcccgaacaggaagatgccatattaacgtcaggctcaactccagcacccagcacggtttcgcaaccactacacggagcgaatagcttcacagtccactcacagcgcaatctccgcgccctcgaacaccagaagcgacagcgagaagcaaacaaaggccaagacacaccgaaagagggcctctcattcgcccacgagttgctcctaggccacgtctcactactaacatgcgtcgtaagcgcgaaagacactcaaggtagaccgtatatcataaccggcgacagggacgaacatatccgcgtgtcacggggcatgcctcaagcccacgtcatcgagacatattgtctaggacacagttcatttgtcaacgcactctgtctcccacagcctgagatcctcgtttcaggaggcggcgacaatgagctcttcgtttgggattggctcgcggggaaactcctcagcaaagtcgacttacttgcgcgtgtgcaggaggtcgttcccgacgcctccaaaatcgccgttgtgaagctctgcgtatatgaagctgaaggcgagcgctatatcatcgcgatatgcgagaaagttcccgcattgttctcattcagactccaagacaataagctcttgcccgtccaaaccttccaaaccgcaggaaacgcactggatactatggtcctcaatactaaaatcctagtgaccatggacagtaacgactcacttcttatcctcacacaaaccaacggggttcttgccccggaggacactacattacaagctaccactactgtagaagcctcatccatttccagagaagatctagacaaggcgctatacaccgttgagaatttgcgcaaggggcgtgatgacaccggtgaggaagatgaaccgatcgcacaggccacacctgataccagtcaggtgtaagtatatcctgattgagtctgcagataacggcttcaggacaggattcctttgagtaattcttgttctgtcgcatcttgcttggtgaagataaatagaaactcaatttctaactaaaagacaactatgtcctcac

SEQ ID NO: 18300 - DNA, 1257 bp, Muscodor strobelii
  misc_feature: SGI cDNA ID NO. 566131
  misc_feature: Reduced expression when VOC is produced
  misc_feature: Encodes the peptide sequence at SEQ ID NO 18301
atggttaaagaaacaaaattctacgatgtgctcggcgtcacccccactgccacggatgccgagctgaagaaggcctacaagatgggcgctctcaagtaccaccctgacaagaatgcccacaatcctgccgccgaggagaagttcaaggaggtatcccacgcttacgagattctctctgacgcccagaagcgctctctctacgatcaatatggcgaggccggcttggagggcggtgctggtggcggcatggctgccgaagacctcttcgctcagttcttcggaggcggttctttcggaggcggcctgggtggcatgttcagcggcatgggcggcggacagcagcggggacctcccaaggcgcgaactattcaccacacacacaaggtttccctcgaggatgtctaccgcggaaaggtttctaagcttgccctgcagcgttccatcatctgccccaagtgtgaaggtcgtggtggaaaggaaggtgctgtgcgccgttgcccaggctgtgatggtcatggtatgaagaccatgatgcgtcaaatgggtcccatgatccagcgcttccagaccgtctgtcccgactgcagcggtgagggtgagatcatcaaggagaaggaccgatgcaagggctgtaacggaaagaagacgatcgttgacaggaaggttctgcacgttcacgtcgacaagggtgttcgaagcggaaccaaggtagagtacagaggcgaaggtgatcaagctcctggtgtacaagctggcgatgtcgtcttcgagatcgagcagaagcctcataatcgctttacccggagagaggatgacctactctaccgttgcgagattgagcttgtcaccgctctcgcaggaggtaccatccacatcgagcatctggacgagaggtggttgaatgtcgagatcatgcctggtgaggctattgcacccgatgctatcaagatggtacgcggacaaggtatgccgtcgccacgacaccacgactttggcaatctctatatccagtttgccgtcaagtttcccgaacgtggctggacagatgacgccgatgccttcgagcaactccgaaagatccttcccgctccggctttgcaagctatacctccaacggacgcaatgactgatgttgccgatctcgaggatcctgacaaccaaggccaagccagaggcttcggtggtgctggtggtatggacgaagacgatgaggatggccacccgcatgccgaacgcgtacagtgcgcatctcaataa

SEQ ID NO: 18301 - protein, 418 aa, Muscodor strobelii
  misc_feature: SGI Peptide ID NO. 566131
  misc_feature (6)..(68): Pfam Id: PF00226 Pfam Desc: DnaJ domain
  misc_feature (235)..(358): Pfam Id: PF01556 Pfam Desc: DnaJ C terminal region
  misc_feature (137)..(222): Pfam Id: PF00684 Pfam Desc: DnaJ central domain (4 repeats)
  misc_feature (235)..(345): Pfam Id: PF01556 Pfam Desc: DnaJ C terminal region
  misc_feature (1)..(418): NCBI GI: 46124895 Blast Desc: FG06825.1 [Gibberella zeae PH-1]
  misc_feature (1)..(418): NCBI GI: 171687517 Blast Desc: protein product [Podospora anserina] gi|170943720|emb|CAP69372.1| protein product [Podospora anserina]
  misc_feature (1)..(418): NCBI GI: 85090435 Blast Desc: NCU07414 [Neurospora crassa OR74A] gi|28919776|gb|EAA29179.1| NCU07414 [Neurospora crassa OR74A]
  misc_feature (1)..(418): NCBI GI: 116180692 Blast Desc: CHGG_00974 [Chaetomium globosum CBS 148.51] gi|88185271|gb|EAQ92739.1| CHGG_00974 [Chaetomium globosum CBS 148.51]
  misc_feature (1)..(418): NCBI GI: 156030995 Blast Desc: SS1G_14278 [Sclerotinia sclerotiorum 1980] gi|154700669|gb|EDO00408.1| SS1G_14278 [Sclerotinia sclerotiorum 1980]
  misc_feature (1)..(416): NCBI GI: 154297634 Blast Desc: BC1G_12662 [Botryotinia fuckeliana B05.10] gi|150858485|gb|EDN33677.1| BC1G_12662 [Botryotinia fuckeliana B05.10]
  misc_feature (1)..(418): NCBI GI: 169770935 Blast Desc: [Aspergillus oryzae RIB40] gi|238486580|ref|XP_002374528.1| protein mitochondrial targeting protein (Mas1), [Aspergillus flavus NRRL3357] protein product
  misc_feature (1)..(418): NCBI GI: 119189679 Blast Desc: CIMG_04887 [Coccidioides immitis RS] gi|240111149|gb|EER29302.1| Mitochondrial protein import protein MAS5 , [Coccidioides posadasii C735 delta SOWgp]
  misc_feature (1)..(418): NCBI GI: 258565901 Blast Desc: UREG_06662 [Uncinocarpus reesii 1704] gi|237907396|gb|EEP81797.1| UREG_06662 [Uncinocarpus reesii 1704]
  misc_feature (1)..(418): NCBI GI: 145229095 Blast Desc: An01g04280 [Aspergillus niger] gi|134054955|emb|CAK36964.1| protein product [Aspergillus niger]
  misc_feature: Useful for introducing or modulating the production of volatile compounds
MVKETKFYDVLGVTPTATDAELKKAYKMGALKYHPDKNAHNPAAEEKFKEVSHAYEILSDAQKRSLYDQYGEAGLEGGAGGGMAAEDLFAQFFGGGSFGGGLGGMFSGMGGGQQRGPPKARTIHHTHKVSLEDVYRGKVSKLALQRSIICPKCEGRGGKEGAVRRCPGCDGHGMKTMMRQMGPMIQRFQTVCPDCSGEGEIIKEKDRCKGCNGKKTIVDRKVLHVHVDKGVRSGTKVEYRGEGDQAPGVQAGDVVFEIEQKPHNRFTRREDDLLYRCEIELVTALAGGTIHIEHLDERWLNVEIMPGEAIAPDAIKMVRGQGMPSPRHHDFGNLYIQFAVKFPERGWTDDADAFEQLRKILPAPALQAIPPTDAMTDVADLEDPDNQGQARGFGGAGGMDEDDEDGHPHAERVQCASQ

SEQ ID NO: 18302 - DNA, 2314 bp, Muscodor strobelii
  misc_feature: SGI EST ID NO. CUFF.43731.2
  misc_feature: Variant of the nucleotide sequence at SEQ ID NO 18300
gtccaaagccacgattctatcggattcgatgggcaaacttggtggcgcatggttgccagcctcgaaaagtcactgttggttcacgaatgggctttccattgaatactgagaacacccgtccaatcttcaagatattttacatcttggccttgagcaaaaatctcccttctgcgctcgggataactgtagcgtcctaccggtgtcgtctcgtgttccgctccaaggcctgtttgcctgcttttatccccccagattcttctgaaattccgactttcccggccctcaacagaacctttcacaagtttggcaactaccgtcgtcttctgaccggaatacctcttgtagccgctatcaaccttcgaaaacgacctgcacctaacaattcgataatcttttgacactacgacgaaagcatcctcccccgtagccgtttcgcgacaatagccctgcaagaagaagtcagtctgcatccgctcagatatagatagacaccgtctatatcggtcctccgacagcaccacaccacccgactttgtctagacccagccttgcgtaacaataggcaagatggttaaagaaacaaaattctacgatgtgctcggcgtcacccccactgccacggatgccgagctgaagaaggcctacaagatgggcgctctcaagtaccaccctgacaagaatgcccacaatcctgccgccgaggagaagttcaaggaggtatcccacgcttacgagattctctctgacgcccagaagcgctctctctacgatcaatatggcgaggccggcttggagggcggtgctggtggcggcatggctgccgaagacctcttcgctcagttcttcggaggcggttctttcggaggcggcctgggtggcatgttcagcggcatgggcggcggacagcagcggggacctcccaaggcgcgaactattcaccacacacacaaggtttccctcgaggatgtctaccgcggaaaggtttctaagcttgccctgcagcgttccatcatctgccccaagtgtgaaggtcgtggtggaaaggaaggtgctgtgcgccgttgcccaggctgtgatggtcatggtatgaagaccatgatgcgtcaaatgggtcccatgatccagcgcttccagaccgtctgtcccgactgcagcggtgagggtgagatcatcaaggagaaggaccgatgcaagggctgtaacggaaagaagacgatcgttgacaggaaggttctgcacgttcacgtcgacaagggtgttcgaagcggaaccaaggtagagtacagaggcgaaggtgatcaagctcctggtgtacaagctggcgatgtcgtcttcgagatcgagcagaagcctcataatcgctttacccggagagaggatgacctactctaccgttgcgagattgagcttgtcaccgctctcgcaggaggtaccatccacatcgagcatctggacgagaggtggttgaatgtcgagatcatgcctggtgaggctattgcacccgatgctatcaagatggtacgcggacaaggtatgccgtcgccacgacaccacgactttggcaatctctatatccagtttgccgtcaagtttcccgaacgtggctggacagatgacgccgatgccttcgagcaactccgaaagatccttcccgctccggctttgcaagctatacctccaacggacgcaatgactgatgttgccgatctcgaggatcctgacaaccaaggccaagccagaggcttcggtggtgctggtggtatggacgaagacgatgaggatggccacccgcatgccgaacgcgtacagtgcgcatctcaataaacggtgtctcgttgatgacacgataagataatgaggtctgttcttcaacacggagaaatggtgatctcgacggatggagataatagttacggtgggacgtttgacggtcgggggtgatgtcgggcgaatactcgcggaatatgactaaagcttattgtggacatcccacaagaaatctttataccccattgttctgtgccggtggtgaaatttcggagaaggcatggtacttggctctttgcatcatcttataccagccatattgcttatgttatgaagcttttttccaagcaggcgtttagataggacatagagggctgggatagcttcggttgttcaatggatcacgaattcggaaacatgcctgccaatggattcatattcttcagctcagtgaaggtgacgatctaaatacataactgtcacaaagtggcccacctattcgggataaccacctgatgtaatgtggtacgcttaagggagcattata

SEQ ID NO: 18303 - DNA, 2688 bp, Muscodor strobelii
  misc_feature: SGI cDNA ID NO. 566132
  misc_feature: Reduced expression when VOC is produced
  misc_feature: Encodes the peptide sequence at SEQ ID NO 18304
atgccaggctcacagctgaagcggctcaaagcctcgctgagagaacagggcgtcattggtcctcagcagagcaaaaagcagaagcgaaaagttgcccaagatggaaaggcgaacgccaacaaacgagccgttgctctcgaatccctccgcgaccaattcaatcccttcgacttcaagcacaacgctcgcgggcccaagttccaggtgaccagcaaccgccaggccacaggcgatgctgcgaagggcattaccggacggccaggcgacgccaaggccgctggggaggagaggcgccggcagacccttcttgtcgagatgaatcgccgcaacaaaagtggcggtattcgagaccagcggttcggcgaaaacgatgcgtccatgacttacgaggagaagatgttgcaacgttttgtaagagagaagcaaccccacaaaggctctgtctttgatctagaggacgacgagccagtcggtggcttaacgcacatgggcaaagctctgccattcatgggcaacgacgacttcgaagaaaccgacatcttagatctcgaggataacgaatcgggcagcgagtcgaaagatactctgcgtagcttgaaacgcgctcgagacaccgacaacgccgacagcgaggacggcgacgagacggagcctgaacctgagagaaaaaagacgcggcaagagatatactctgaaatcatctccaaatccaagttccacaaggcggagcggcaagcccagaaagatgacgatgaggagatgagagaagagcttgaccaagagcttcctcatctacgtgaattattctttgcgaaacccaaaacacagaataatattgggagcacggctgcgttagaactatcaggcaaagaaaagatggaacgggattacgatatgcggcttagacaacttgctatggacgatagagcgaaacccgcggacaaaacattgacagaagaggagatcatcaagcgagacaccgaaaaactgaaagagcttgaggacaagagacaaaagcggatgcgcggggaagaatcaagcgacagcgaggttgacgacaaggcagaggatgccagtagtagaaaagttgacgtgttcgacgtagaggaggaagtagatgactttcagcttggttctggaatacgaacgcgtccaaccgcaacagagcttggttttgatgatgaagatgattttgtcgtcgaagacgatctattagcgagtggatctgatttagagccaatagaatcggacgatgaagattcgtccgcagaagaggatggagaccaagaggatgacgaagatgatgagttcactcgaggcctactcagtgaggtggaggcacgagacacggcctttagcagaaaggacggcgttacagatgatggcacaggcggtatctctaattgcccagaatcactacaggagcttctggatatttctaacggcctgccatctgagcgcctatcgacagttgttcagcaaattcgacttcagtaccatccgaaattagccagcgaaaacaaagctaaagtagcgaatttcgcgcgtgctttagtacagtttctcttccacttgtccgacatacaaaatccgccaccatctgctgccgtggagagtatcataaggcatatacattcactagcgaaatcatacccggtcgaaattgctgaagagttccgtgcccggatccaggatctaagtggcagatatctctctccaactgcgggtgattttgtggcattgatagccattgggtccatattcccaccaagtgatgcctttcatccagtcattacaccagccatgttactaatttcgcgattcttgggtcagaagatcccgaagcatcatacggattatgtgcaaggacttttcatggcgtcattagccctgcagtatttgcaggtatcgcagcggttttgtccagaattgatgaacttttgccttcttacgcttgcgtctctcgcgcctagcaaggcggaaggcaaattaggaaacattcccctccatgaaccctctcggggcatacggattacatgcgccagcaaaatagcgactagaaaactgaagctcacggattgcatcgccgagaagaattcagaagccgagattgcaatagccaaggtcgctacgttggatacagcgctccagttacttgacgcggcatcgaagatatataccggcaagccggcgttccttgaatctttcaatccggtagtactggcgctgaatcatttgcgtgagcagccctgcagatctcaacttccatctactctcaacgatcgtgtcctcaaattgagaacgaaactacaaacaatgctttccgtggccaagctcgagcggcgaccactcgagttgcatcatcacaaaccattggcgatcaagcaagcattccccaagttcgaggataaattcgatccaaacaggcactatgatgtagataaggaccgcgccgaattagccaagctcaaggctgagcacaagaaagagcggaagggtgctatgcgcgagttacggaaggacgccaatttcgtggcgcgcgagaagttacgagtcaagaagcagaaggatgctgcttatgagaagaaatacaagagacttgtggctgagatacaaggcgaagaagggcacgaggccaaggagtacgagaaggagaagcaagctcggaaacgcgcagccaagagataa

SEQ ID NO: 18304 - protein, 895 aa, Muscodor strobelii
  misc_feature: SGI Peptide ID NO. 566132
  misc_feature (34)..(878): Pfam Id: PF04147 Pfam Desc: Nop14-like family
  misc_feature (715)..(878): Pfam Id: PF04147 Pfam Desc: Nop14-like family
  misc_feature (34)..(437): Pfam Id: PF04147 Pfam Desc: Nop14-like family
  misc_feature (469)..(647): Pfam Id: PF04147 Pfam Desc: Nop14-like family
  misc_feature (1)..(895): NCBI GI: 256732640 Blast Desc: NECHADRAFT_37909 [Nectria haematococca mpVI 77-13-4]
  misc_feature (1)..(895): NCBI GI: 116180704 Blast Desc: CHGG_00980 [Chaetomium globosum CBS 148.51] gi|88185277|gb|EAQ92745.1| CHGG_00980 [Chaetomium globosum CBS 148.51]
  misc_feature (1)..(894): NCBI GI: 154301059 Blast Desc: BC1G_10502 [Botryotinia fuckeliana B05.10] gi|150856250|gb|EDN31442.1| BC1G_10502 [Botryotinia fuckeliana B05.10]
  misc_feature (1)..(894): NCBI GI: 156056817 Blast Desc: SS1G_04139 [Sclerotinia sclerotiorum 1980] gi|154701925|gb|EDO01664.1| SS1G_04139 [Sclerotinia sclerotiorum 1980]
  misc_feature (1)..(891): NCBI GI: 171687505 Blast Desc: protein product [Podospora anserina] gi|170943714|emb|CAP69366.1| protein product [Podospora anserina]
  misc_feature (1)..(894): NCBI GI: 145603109 Blast Desc: MGG_04470 [Magnaporthe grisea 70-15] gi|145011425|gb|EDJ96081.1| MGG_04470 [Magnaporthe grisea 70-15]
  misc_feature (3)..(892): NCBI GI: 261356226 Blast Desc: nucleolar complex protein [Verticillium albo-atrum VaMs.102]
  misc_feature (1)..(890): NCBI GI: 240277261 Blast Desc: nucleolar complex protein [Ajellomyces capsulatus H143]
  misc_feature (1)..(890): NCBI GI: 154285976 Blast Desc: conserved [Ajellomyces capsulatus NAm1] gi|150407424|gb|EDN02965.1| conserved [Ajellomyces capsulatus NAm1]
  misc_feature (1)..(890): NCBI GI: 115490987 Blast Desc: conserved [Aspergillus terreus NIH2624] gi|114196981|gb|EAU38681.1| conserved [Aspergillus terreus NIH2624]
  misc_feature: Useful for introducing or modulating the production of volatile compounds
MPGSQLKRLKASLREQGVIGPQQSKKQKRKVAQDGKANANKRAVALESLRDQFNPFDFKHNARGPKFQVTSNRQATGDAAKGITGRPGDAKAAGEERRRQTLLVEMNRRNKSGGIRDQRFGENDASMTYEEKMLQRFVREKQPHKGSVFDLEDDEPVGGLTHMGKALPFMGNDDFEETDILDLEDNESGSESKDTLRSLKRARDTDNADSEDGDETEPEPERKKTRQEIYSEIISKSKFHKAERQAQKDDDEEMREELDQELPHLRELFFAKPKTQNNIGSTAALELSGKEKMERDYDMRLRQLAMDDRAKPADKTLTEEEIIKRDTEKLKELEDKRQKRMRGEESSDSEVDDKAEDASSRKVDVFDVEEEVDDFQLGSGIRTRPTATELGFDDEDDFVVEDDLLASGSDLEPIESDDEDSSAEEDGDQEDDEDDEFTRGLLSEVEARDTAFSRKDGVTDDGTGGISNCPESLQELLDISNGLPSERLSTVVQQIRLQYHPKLASENKAKVANFARALVQFLFHLSDIQNPPPSAAVESIIRHIHSLAKSYPVEIAEEFRARIQDLSGRYLSPTAGDFVALIAIGSIFPPSDAFHPVITPAMLLISRFLGQKIPKHHTDYVQGLFMASLALQYLQVSQRFCPELMNFCLLTLASLAPSKAEGKLGNIPLHEPSRGIRITCASKIATRKLKLTDCIAEKNSEAEIAIAKVATLDTALQLLDAASKIYTGKPAFLESFNPVVLALNHLREQPCRSQLPSTLNDRVLKLRTKLQTMLSVAKLERRPLELHHHKPLAIKQAFPKFEDKFDPNRHYDVDKDRAELAKLKAEHKKERKGAMRELRKDANFVAREKLRVKKQKDAAYEKKYKRLVAEIQGEEGHEAKEYEKEKQARKRAAKR

SEQ ID NO: 18305 - DNA, 3030 bp, Muscodor strobelii
  misc_feature: SGI EST ID NO. CUFF.43089.0
  misc_feature: Variant of the nucleotide sequence at SEQ ID NO 18303
ctgctaagtgagctagctgccttggatggcgataagaaaataatgtggggtgaccacgctacacgataagaaacttccatggccgcagcagcttggccgccagaaaaaaagttgtaggacggagagagcctgcaacaattgccacggcggaattgacccctccaggcgcaacgaagcgcaccagcctctacaaactccccttttaccaccacaatatgccaggctcacagctgaagcggctcaaagcctcgctgagagaacagggcgtcattggtcctcagcagagcaaaaagcagaagcgaaaagttgcccaagatggaaaggcgaacgccaacaaacgagccgttgctctcgaatccctccgcgaccaattcaatcccttcgacttcaagcacaacgctcgcgggcccaagttccaggtgaccagcaaccgccaggccacaggcgatgctgcgaagggcattaccggacggccaggcgacgccaaggccgctggggaggagaggcgccggcagacccttcttgtcgagatgaatcgccgcaacaaaagtggcggtattcgagaccagcggttcggcgaaaacgatgcgtccatgacttacgaggagaagatgttgcaacgttttgtaagagagaagcaaccccacaaaggctctgtctttgatctagaggacgacgagccagtcggtggcttaacgcacatgggcaaagctctgccattcatgggcaacgacgacttcgaagaaaccgacatcttagatctcgaggataacgaatcgggcagcgagtcgaaagatactctgcgtagcttgaaacgcgctcgagacaccgacaacgccgacagcgaggacggcgacgagacggagcctgaacctgagagaaaaaagacgcggcaagagatatactctgaaatcatctccaaatccaagttccacaaggcggagcggcaagcccagaaagatgacgatgaggagatgagagaagagcttgaccaagagcttcctcatctacgtgaattattctttgcgaaacccaaaacacagaataatattgggagcacggctgcgttagaactatcaggcaaagaaaagatggaacgggattacgatatgcggcttagacaacttgctatggacgatagagcgaaacccgcggacaaaacattgacagaagaggagatcatcaagcgagacaccgaaaaactgaaagagcttgaggacaagagacaaaagcggatgcgcggggaagaatcaagcgacagcgaggttgacgacaaggcagaggatgccagtagtagaaaagttgacgtgttcgacgtagaggaggaagtagatgactttcagcttggttctggaatacgaacgcgtccaaccgcaacagagcttggttttgatgatgaagatgattttgtcgtcgaagacgatctattagcgagtggatctgatttagagccaatagaatcggacgatgaagattcgtccgcagaagaggatggagaccaagaggatgacgaagatgatgagttcactcgaggcctactcagtgaggtggaggcacgagacacggcctttagcagaaaggacggcgttacagatgatggcacaggcggtatctctaattgcccagaatcactacaggagcttctggatatttctaacggcctgccatctgagcgcctatcgacagttgttcagcaaattcgacttcagtaccatccgaaattagccagcgaaaacaaagctaaagtagcgaatttcgcgcgtgctttagtacagtttctcttccacttgtccgacatacaaaatccgccaccatctgctgccgtggagagtatcataaggcatatacattcactagcgaaatcatacccggtcgaaattgctgaagagttccgtgcccggatccaggatctaagtggcagatatctctctccaactgcgggtgattttgtggcattgatagccattgggtccatattcccaccaagtgatgcctttcatccagtcattacaccagccatgttactaatttcgcgattcttgggtcagaagatcccgaagcatcatacggattatgtgcaaggacttttcatggcgtcattagccctgcagtatttgcaggtatcgcagcggttttgtccagaattgatgaacttttgccttcttacgcttgcgtctctcgcgcctagcaaggcggaaggcaaattaggaaacattcccctccatgaaccctctcggggcatacggattacatgcgccagcaaaatagcgactagaaaactgaagctcacggattgcatcgccgagaagaattcagaagccgagattgcaatagccaaggtcgctacgttggatacagcgctccagttacttgacgcggcatcgaagatatataccggcaagccggcgttccttgaatctttcaatccggtagtactggcgctgaatcatttgcgtgagcagccctgcagatctcaacttccatctactctcaacgatcgtgtcctcaaattgagaacgaaactacaaacaatgctttccgtggccaagctcgagcggcgaccactcgagttgcatcatcacaaaccattggcgatcaagcaagcattccccaagttcgaggataaattcgatccaaacaggcactatgatgtagataaggaccgcgccgaattagccaagctcaaggctgagcacaagaaagagcggaagggtgctatgcgcgagttacggaaggacgccaatttcgtggcgcgcgagaagttacgagtcaagaagcagaaggatgctgcttatgagaagaaatacaagagacttgtggctgagatacaaggcgaagaagggcacgaggccaaggagtacgagaaggagaagcaagctcggaaacgcgcagccaagagataaaagtagatatactacgaatgcctacattacgatcatcattcaggacattttcctacgacgttcatgctgtttctattaattaacttcaagcatcaccgatgaagcacgtcgtcaaatagtaacaaaa

SEQ ID NO: 18306 - DNA, 258 bp, Muscodor strobelii
  misc_feature: SGI cDNA ID NO. 566133
  misc_feature: Encodes the peptide sequence at SEQ ID NO 18307
atgcagaaattgaggaagccaaaatcacatcgatccaagaacatcaaggtcgttcttgaaattagtatggcaaacgatagcgatggcgacgcggtcctgctggagacttcgactgatctggtacctcgagtgaacgaccagagtgccgaagagcagcgtttgcgaagacggcatagagaggcaatggttctcaacgacggcacccactctctagggcggggagacatcatcgaacgagaacacgactctaatagctga

SEQ ID NO: 18307 - protein, 85 aa, Muscodor strobelii
  misc_feature: SGI Peptide ID NO. 566133
  misc_feature (10)..(82): NCBI GI: 39944978 Blast Desc: MGG_04471 [Magnaporthe grisea 70-15] gi|145011424|gb|EDJ96080.1| MGG_04471 [Magnaporthe grisea 70-15]
  misc_feature (41)..(85): NCBI GI: 256733088 Blast Desc: NECHADRAFT_68365 [Nectria haematococca mpVI 77-13-4]
  misc_feature (41)..(79): NCBI GI: 261356225 Blast Desc: conserved [Verticillium albo-atrum VaMs.102]
  misc_feature (43)..(85): NCBI GI: 46125213 Blast Desc: FG06984.1 [Gibberella zeae PH-1]
  misc_feature (32)..(80): NCBI GI: 85090566 Blast Desc: NCU07394 [Neurospora crassa OR74A] gi|28919844|gb|EAA29242.1| conserved [Neurospora crassa OR74A]
  misc_feature (43)..(78): NCBI GI: 156056823 Blast Desc: SS1G_04142 [Sclerotinia sclerotiorum 1980] gi|154701928|gb|EDO01667.1| SS1G_04142 [Sclerotinia sclerotiorum 1980]
  misc_feature (43)..(78): NCBI GI: 154301069 Blast Desc: BC1G_10507 [Botryotinia fuckeliana B05.10] gi|150856255|gb|EDN31447.1| BC1G_10507 [Botryotinia fuckeliana B05.10]
MQKLRKPKSHRSKNIKVVLEISMANDSDGDAVLLETSTDLVPRVNDQSAEEQRLRRRHREAMVLNDGTHSLGRGDIIEREHDSNS

SEQ ID NO: 18308 - DNA, 2047 bp, Muscodor strobelii
  misc_feature: SGI EST ID NO. CUFF.43091.0
  misc_feature: Variant of the nucleotide sequence at SEQ ID NO 18306
ttaatatgaacattgaagtgagcaatgagtcggtctaatgcttgacatctcgcttcttaataaatttagcgtaatgaggccacccggcacatagtacgttgtatctcgcatcgagtactgcatcccgataagctcgagttaaccgaaccatcctcatccatttcggccatccactttaccgatcgagtggtatctttgcgacgactcgacaggggtcggcaaagcctggaaatgcaatggggtatctatcctttttgcgagatgagcgcgttgctgcggttggtctcggactcgctgcggtaggctgcatcgcagctatgcgcgccatcctcgagcattgtcgagacgaagcagaggtcaaaccaacccagccagcaactcggtatatcacacaggacaccgaagattcgctaaagctcagcactctacgaagcctgttgaggcatccaagctacgcgatacgcgataccgccgtcaggattgttaccggacgagctctcagcgatgacgctgctgtacacgatctcctctggggaatcacccgagagcaatatgacgaaagagtagaaaacttgagagcgctcatatatgctctcgaagacaaagatttatccgggacatatcaagagtctttaatcgtagccttgaacacgccaaaggcctatagtgcaatcgtcagatccctagagctatgtcttggcgatgttgaacatgagaagctcgacgacgcattttacgatgagtactactttcgagatatcggagaacgacaatgtctcgctttagtctcacaattggcacacaaatatggcgttgaaaagttcgtggaagcgaaatttgtggagagatggcttgtaaaacagccatggggcgaaactgaacttgagcggcgtgacaatttccaacaatacgtcgagcgtaggaagaacaggctggccgacatctgtcgtgatttaatatcatgtaaagtcggccgcaaggccctcaaccgggccaagctgatgcagaaattgaggaagccaaaatcacatcgatccaagaacatcaaggtcgttcttgaaattagtatggcaaacgatagcgatggcgacgcggtcctgctggagacttcgactgatctggtacctcgagtgaacgaccagagtgccgaagagcagcgtttgcgaagacggcatagagaggcaatggttctcaacgacggcacccactctctagggcggggagacatcatcgaacgagaacacgactctaatagctgaacgtgaacgttcttatgccttttttgtgatgagtcttgatgtacatcagagacctggagaccaccggcaacattacgattgtggcttatcattttctcatggttcttcaagcgtcagctatgaaattgtctcatgccatgacaacgagaataagcagcattaaggagtactgccctgagttgtgaactctatgccgcagcgaccctcctcccttttacctctcaaggtcacaaagaaaaagctcgaacttatgcaatcactcttcgcggcgtcctgggcagcgaggaccgtctatatcatatgtcggcatatttgccggtttaaactgttgtgtagaataatagggcaaacgcttgcgatcatctgatacacaaaggatagtctatgaagtcaacactcattactgtagtgtcgtattcccaactcacctcgctttattcgttcacttgccttaaagatgaaagaatgatttcacacacatatttagagaattgtatcattcgtctgaaccccttctacttccttcgacccacgttgctatattcgtcaagcccggaagaccaagacctgattaggactggttgcggtagccatgcacctccagggatgcaggggatgacaataatcaaatgtccactaccaatcattggtaaaatggggcctccaccggctgaccgctaccgaatacaacctggcgggtaacgtccgtcactgacgcaaattctccaagcaaattctcatgtcacattgttgtcagcaaatgtatagtagattttggtatagctgat

SEQ ID NO: 18309 - DNA, 1023 bp, Muscodor strobelii
  misc_feature: SGI cDNA ID NO. 566134
  misc_feature: Encodes the peptide sequence at SEQ ID NO 18310
atggggtatctatcctttttgcgagatgagcgcgttgctgcggttggtctcggactcgctgcggtaggctgcatcgcagctatgcgcgccatcctcgagcattgtcgagacgaagcagaggtcaaaccaacccagccagcaactcggtatatcacacaggacaccgaagattcgctaaagctcagcactctacgaagcctgttgaggcatccaagctacgcgatacgcgataccgccgtcaggattgttaccggacgagctctcagcgatgacgctgctgtacacgatctcctctggggaatcacccgagagcaatatgacgaaagagtagaaaacttgagagcgctcatatatgctctcgaagacaaagatttatccgggacatatcaagagtctttaatcgtagccttgaacacgccaaaggcctatagtgcaatcgtcagatccctagagctatgtcttggcgatgttgaacatgagaagctcgacgacgcattttacgatgagtactactttcgagatatcggagaacgacaatgtctcgctttagtctcacaattggcacacaaatatggcgttgaaaagttcgtggaagcgaaatttgtggagagatggcttgtaaaacagccatggggcgaaactgaacttgagcggcgtgacaatttccaacaatacgtcgagcgtaggaagaacaggctggccgacatctgtcgtgatttaatatcatgtaaagtcggccgcaaggccctcaaccgggccaagctgatgcagaaattgaggaagccaaaatcacatcgatccaagaacatcaaggtcgttcttgaaattagtatggcaaacgatagcgatggcgacgcggtcctgctggagacttcgactgatctggtacctcgagtgaacgaccagagtgccgaagagcagcgtttgcgaagacggcatagagaggcaatggttctcaacgacggcacccactctctagggcggggagacatcatcgaacgagaacacgactctaatagctga

SEQ ID NO: 18310 - protein, 340 aa, Muscodor strobelii
  misc_feature: SGI Peptide ID NO. 566134
  misc_feature (6)..(337): NCBI GI: 39944978 Blast Desc: MGG_04471 [Magnaporthe grisea 70-15] gi|145011424|gb|EDJ96080.1| MGG_04471 [Magnaporthe grisea 70-15]
  misc_feature (1)..(340): NCBI GI: 256733088 Blast Desc: NECHADRAFT_68365 [Nectria haematococca mpVI 77-13-4]
  misc_feature (1)..(340): NCBI GI: 46125213 Blast Desc: FG06984.1 [Gibberella zeae PH-1]
  misc_feature (4)..(338): NCBI GI: 261356225 Blast Desc: conserved [Verticillium albo-atrum VaMs.102]
  misc_feature (1)..(335): NCBI GI: 85090566 Blast Desc: NCU07394 [Neurospora crassa OR74A] gi|28919844|gb|EAA29242.1| conserved [Neurospora crassa OR74A]
  misc_feature (1)..(335): NCBI GI: 156056823 Blast Desc: SS1G_04142 [Sclerotinia sclerotiorum 1980] gi|154701928|gb|EDO01667.1| SS1G_04142 [Sclerotinia sclerotiorum 1980]
  misc_feature (1)..(338): NCBI GI: 171687503 Blast Desc: protein product [Podospora anserina] gi|170943713|emb|CAP69365.1| protein product [Podospora anserina]
  misc_feature (1)..(336): NCBI GI: 154301069 Blast Desc: BC1G_10507 [Botryotinia fuckeliana B05.10] gi|150856255|gb|EDN31447.1| BC1G_10507 [Botryotinia fuckeliana B05.10]
  misc_feature (2)..(334): NCBI GI: 116180706 Blast Desc: CHGG_00981 [Chaetomium globosum CBS 148.51] gi|88185278|gb|EAQ92746.1| CHGG_00981 [Chaetomium globosum CBS 148.51]
  misc_feature (12)..(116): NCBI GI: 83306173 Blast Desc: [Sordaria macrospora]
MGYLSFLRDERVAAVGLGLAAVGCIAAMRAILEHCRDEAEVKPTQPATRYITQDTEDSLKLSTLRSLLRHPSYAIRDTAVRIVTGRALSDDAAVHDLLWGITREQYDERVENLRALIYALEDKDLSGTYQESLIVALNTPKAYSAIVRSLELCLGDVEHEKLDDAFYDEYYFRDIGERQCLALVSQLAHKYGVEKFVEAKFVERWLVKQPWGETELERRDNFQQYVERRKNRLADICRDLISCKVGRKALNRAKLMQKLRKPKSHRSKNIKVVLEISMANDSDGDAVLLETSTDLVPRVNDQSAEEQRLRRRHREAMVLNDGTHSLGRGDIIEREHDSNS

SEQ ID NO: 18311 - DNA, 2047 bp, Muscodor strobelii; identical to SEQ ID NO: 18308
  misc_feature: SGI EST ID NO. CUFF.43091.0
  misc_feature: Variant of the nucleotide sequence at SEQ ID NO 18309

SEQ ID NO: 18312 - DNA, 3231 bp, Muscodor strobelii
  misc_feature: SGI cDNA ID NO. 566137
  misc_feature: Encodes the peptide sequence at SEQ ID NO 18313
atgggaggcgagacgacaaagccggtggccaccacggccgactacccggtccgagctgcacatcctgtgggaaagcgaattccccagatctacaaggatcgcattgagcagttctactcaacagggcaatgggagaaacgaaatctcctagctatgatgtacgagggcgtcgcctcgggatctcccaacgtcgaattgtcgacctgggctgcacctggtctatcccgccctagcttcgaggatgctatggacggtgactttacgcctgcaaaagtcggtgatgcttttggtccatcttggtccacccattggttcaagcttgtcatccgtgtacctcaagacatgctcaaggcaaaccatcttgagttgcagtgggactccaacagcgagggtatggtctggacagaagacggcaaaccgctacagggtctgaccggcaataatgagcgtatcgagtggattcttcctgactatttccgagatggcaaggagcataccatctacattgagatggcctgcaatgccatgtttggcaaccctcctggcggtgatgtaatccagccacctgatccaaacaagtactttcagcttgccaaagctgacatcgtggccgtcaacatggatgcccgtcaactttggattgatgcgtggatcattggagatgccgctcgagaattccccgatgattcgtgggaacagcacactgcgctgaacgttgtgactgacatgatcgaggcctttgtccttggtgatcctgcttccatcaaggcaagccgtgagattgcacaccaattcatcggatccaacatcgactccgtcaaggtctacgagagtagtcagacgcctcaagtcttcggtattggtcattgccacattgacacctgttggttgtggccttgggccgagacgaagcgcaaggtggctaggtcttggtcaagtcagtgtgatttgatggaccgctaccccgagcacaactttgcttgctcgcaggctcagcagtacaaatggctcaaggattactacccatctgctttcgatcgtgtcaaggagaaggtgaaggagggtcgcttccatcccatcggtggcagttgggtagagcacgacaccaacatgcccagtggcgagtcccttatccggcagttcctctacggacagcgattttttgagaacaactttggggaacgatgcaagaccttttggctccccgatacctttggctactccagtcaactacctcagctttgtcgcttggccggtatggaccgctttctcacccagaagctcagctggaacaacatcaacaacttccctcacacaaccttcaactgggtctccttagatggaagccaagtgatatgtcacatgcctccgtctgagacatacactgcagaagcgcactttggcgatgtcaagcgcagtatctcacaacacaagtcaatggatcaagaccacacctcgcttttggtattcggcaaaggcgatggcggtggtggccctacatggcaacatctcgagaagttgcgccgctgccgtggtatcagcgataagatcggccgattgccaagagttcacatgggcaataccgtggatgacttcttcgacaagctgcaggagaaagctagcactcttgtgacctggtatggcgagctgtatttcgagctccatcgtggtacctatacgacgcagtccaagaacaaactcaacaatcgccgatcagagacgattcttcgtgatctggagcttcttgctacgattgcatctattaagtttagctcttacaagtatcctaaacgacagattgacttcatgtgggaagctgttctgctctgtcaattccatgattgtcttccgggaagcgccatcgagatgtgctacgatgactccgacgagctctacgatgcggtttttagtgaaagcaaaaagcttttcaaagagctgttcaaattgctcggtttgtcggaagcgcaacctctaactgtagaggaagcagcagtagtgaacacccttccttgggaccgcaaagaagttgtcgatctcgcagatggtggatctggtgtggccagtggcttgggtcccttcctcactgtgacgcccatagagacccagaccaaagctgttaccatcaacgagatacgcgagggtgtcttcgtcatggagaatgatcaactcaccgttgtcgtcgaaaaaggatgcatcacttctcttcgagatcgcaagctggaccgcgagattatccctaaggggggtaaggccaatcaacttgtcatctttgacgacaaacctctttattggcaagcttgggacgtagaggtctatcacctggagacacgtgctgaactggcctacgaagagactaagattttcgaggacaaggagcatcgagtcagtcttatctccacggcccggatcagcgaagacagctcaattaagacaatcttgagcctcagtgccgcatttgatggctacccgtcatatgtcgagtgtactgcccatgtcgaatggcatgagacgatgaagtttctcaaggtcgagtttcctgttgacgttgttaacaacgaggcttcgtatgaaacccagtatggtcttgtcaaacgacctacccactacaacacatcctgggacatggccaaattcgaggtctgctgccacaaatttgctgacttgtctgagaatggttatggtgtatcaattctaaacgactgcaagtatggctttgccacttgtggcaatctaatgcgtctttccctcttacggtcgcccaaggcaccggatgctcatgccgatatgggccaacataccatccgctggggaatcttcccccatgaaggttcgcttggcgccgacaccgttcgggccgggtataacttcaacaacccattgtccgttctctcagcacctgagccagccgcgctttcgagcaattctacccgccccattcagttggatggtgacaagtccttgatcctcgattgtgtcaagcgtgccgaagatgacgcagatgtcgctcatgatagcgcattgccactgcgtaagggtcagagcgtcatcattcgtatctacgacagccttggcggccgtagcacgggtactgtctcgaccacctgggatgtcaagaaagtattcaagaccaatgcccttgaggatgatggagatgagattgacatcaagaatggcaaattctctgttacgctgcggccattcgaggttgcaacttaccggttgcaattgtag

SEQ ID NO: 18313 - protein, 1076 aa, Muscodor strobelii
  misc_feature: SGI Peptide ID NO. 566137
  misc_feature (553)..(632): Pfam Id: PF09261 Pfam Desc: Alpha mannosidase, middle domain
  misc_feature (283)..(548): Pfam Id: PF01074 Pfam Desc: Glycosyl hydrolases family 38 N-terminal domain
  misc_feature (661)..(1073): Pfam Id: PF07748 Pfam Desc: Glycosyl hydrolases family 38 C-terminal domain
  misc_feature (1)..(1076): NCBI GI: 156056835 Blast Desc: SS1G_04148 [Sclerotinia sclerotiorum 1980] gi|154701934|gb|EDO01673.1| SS1G_04148 [Sclerotinia sclerotiorum 1980]
  misc_feature (1)..(1076): NCBI GI: 39944964 Blast Desc: MGG_04464 [Magnaporthe grisea 70-15] gi|145011432|gb|EDJ96088.1| MGG_04464 [Magnaporthe grisea 70-15]
  misc_feature (1)..(1076): NCBI GI: 116180702 Blast Desc: CHGG_00979 [Chaetomium globosum CBS 148.51] gi|88185276|gb|EAQ92744.1| CHGG_00979 [Chaetomium globosum CBS 148.51]
  misc_feature (1)..(1076): NCBI GI: 85090586 Blast Desc: NCU07404 [Neurospora crassa OR74A] gi|28919854|gb|EAA29252.1| NCU07404 [Neurospora crassa OR74A]
  misc_feature (1)..(1076): NCBI GI: 154301101 Blast Desc: BC1G_10523 [Botryotinia fuckeliana B05.10] gi|150856271|gb|EDN31463.1| BC1G_10523 [Botryotinia fuckeliana B05.10]
  misc_feature (13)..(1076): NCBI GI: 256732655 Blast Desc: glycoside hydrolase family 38 [Nectria haematococca mpVI 77-13-4]
  misc_feature (1)..(1076): NCBI GI: 46124907 Blast Desc: FG06831.1 [Gibberella zeae PH-1]
  misc_feature (1)..(1076): NCBI GI: 145233855 Blast Desc: An02g11720 [Aspergillus niger] gi|134057237|emb|CAK37873.1| protein product [Aspergillus niger]
  misc_feature (1)..(1076): NCBI GI: 121705152 Blast Desc: alpha-mannosidase [Aspergillus clavatus NRRL 1] gi|119398985|gb|EAW09413.1| alpha-mannosidase [Aspergillus clavatus NRRL 1]
  misc_feature (1)..(1076): NCBI GI: 171687515 Blast Desc: protein product [Podospora anserina] gi|170943719|emb|CAP69371.1| protein product [Podospora anserina]
  misc_feature (15)..(1076): SWISSPROT Homolog: EC 3.2.1.24 Alpha-mannosidase
MGGETTKPVATTADYPVRAAHPVGKRIPQIYKDRIEQFYSTGQWEKRNLLAMMYEGVASGSPNVELSTWAAPGLSRPSFEDAMDGDFTPAKVGDAFGPSWSTHWFKLVIRVPQDMLKANHLELQWDSNSEGMVWTEDGKPLQGLTGNNERIEWILPDYFRDGKEHTIYIEMACNAMFGNPPGGDVIQPPDPNKYFQLAKADIVAVNMDARQLWIDAWIIGDAAREFPDDSWEQHTALNVVTDMIEAFVLGDPASIKASREIAHQFIGSNIDSVKVYESSQTPQVFGIGHCHIDTCWLWPWAETKRKVARSWSSQCDLMDRYPEHNFACSQAQQYKWLKDYYPSAFDRVKEKVKEGRFHPIGGSWVEHDTNMPSGESLIRQFLYGQRFFENNFGERCKTFWLPDTFGYSSQLPQLCRLAGMDRFLTQKLSWNNINNFPHTTFNWVSLDGSQVICHMPPSETYTAEAHFGDVKRSISQHKSMDQDHTSLLVFGKGDGGGGPTWQHLEKLRRCRGISDKIGRLPRVHMGNTVDDFFDKLQEKASTLVTWYGELYFELHRGTYTTQSKNKLNNRRSETILRDLELLATIASIKFSSYKYPKRQIDFMWEAVLLCQFHDCLPGSAIEMCYDDSDELYDAVFSESKKLFKELFKLLGLSEAQPLTVEEAAVVNTLPWDRKEVVDLADGGSGVASGLGPFLTVTPIETQTKAVTINEIREGVFVMENDQLTVVVEKGCITSLRDRKLDREIIPKGGKANQLVIFDDKPLYWQAWDVEVYHLETRAELAYEETKIFEDKEHRVSLISTARISEDSSIKTILSLSAAFDGYPSYVECTAHVEWHETMKFLKVEFPVDVVNNEASYETQYGLVKRPTHYNTSWDMAKFEVCCHKFADLSENGYGVSILNDCKYGFATCGNLMRLSLLRSPKAPDAHADMGQHTIRWGIFPHEGSLGADTVRAGYNFNNPLSVLSAPEPAALSSNSTRPIQLDGDKSLILDCVKRAEDDADVAHDSALPLRKGQSVIIRIYDSLGGRSTGTVSTTWDVKKVFKTNALEDDGDEIDIKNGKFSVTLRPFEVATYRLQL

SEQ ID NO: 18314 - DNA, 4109 bp, Muscodor strobelii
  misc_feature: SGI EST ID NO. CUFF.43271.0
  misc_feature: Variant of the nucleotide sequence at SEQ ID NO 18312
cccagtcccaatccgccctggcaggccctggtttcaaatcccagcaagtcacacccacctaccttcaatcttggcaatgagcttcgggtgcaactgcaactccaaggtggccagcccagtaggagctgacacctagcctggcccgcgtgcgtcacgagttcccctccaatccagccttcccgttgttcacagcacaagctctagctgggtctgccatctcaattcccccccaccatccatcatccatcatcgtcaacatacacccgttttttctttggcttgcggttcttgggcggccaattgtctcttacatcagcatcgtcatcatcatttgttcgtgttttgagcctttgggggcgaatgcttagtttgtagcacttctagtgacaactccgctaccgacctgagccggcagcagctcgtccatctcataatgggaggcgagacgacaaagccggtggccaccacggccgactacccggtccgagctgcacatcctgtgggaaagcgaattccccagatctacaaggatcgcattgagcagttctactcaacagggcaatgggagaaacgaaatctcctagctatgatgtacgagggcgtcgcctcgggatctcccaacgtcgaattgtcgacctgggctgcacctggtctatcccgccctagcttcgaggatgctatggacggtgactttacgcctgcaaaagtcggtgatgcttttggtccatcttggtccacccattggttcaagcttgtcatccgtgtacctcaagacatgctcaaggcaaaccatcttgagttgcagtgggactccaacagcgagggtatggtctggacagaagacggcaaaccgctacagggtctgaccggcaataatgagcgtatcgagtggattcttcctgactatttccgagatggcaaggagcataccatctacattgagatggcctgcaatgccatgtttggcaaccctcctggcggtgatgtaatccagccacctgatccaaacaagtactttcagcttgccaaagctgacatcgtggccgtcaacatggatgcccgtcaactttggattgatgcgtggatcattggagatgccgctcgagaattccccgatgattcgtgggaacagcacactgcgctgaacgttgtgactgacatgatcgaggcctttgtccttggtgatcctgcttccatcaaggcaagccgtgagattgcacaccaattcatcggatccaacatcgactccgtcaaggtctacgagagtagtcagacgcctcaagtcttcggtattggtcattgccacattgacacctgttggttgtggccttgggccgagacgaagcgcaaggtggctaggtcttggtcaagtcagtgtgatttgatggaccgctaccccgagcacaactttgcttgctcgcaggctcagcagtacaaatggctcaaggattactacccatctgctttcgatcgtgtcaaggagaaggtgaaggagggtcgcttccatcccatcggtggcagttgggtagagcacgacaccaacatgcccagtggcgagtcccttatccggcagttcctctacggacagcgattttttgagaacaactttggggaacgatgcaagaccttttggctccccgatacctttggctactccagtcaactacctcagctttgtcgcttggccggtatggaccgctttctcacccagaagctcagctggaacaacatcaacaacttccctcacacaaccttcaactgggtctccttagatggaagccaagtgatatgtcacatgcctccgtctgagacatacactgcagaagcgcactttggcgatgtcaagcgcagtatctcacaacacaagtcaatggatcaagaccacacctcgcttttggtattcggcaaaggcgatggcggtggtggccctacatggcaacatctcgagaagttgcgccgctgccgtggtatcagcgataagatcggccgattgccaagagttcacatgggcaataccgtggatgacttcttcgacaagctgcaggagaaagctagcactcttgtgacctggtatggcgagctgtatttcgagctccatcgtggtacctatacgacgcagtccaagaacaaactcaacaatcgccgatcagagacgattcttcgtgatctggagcttcttgctacgattgcatctattaagtttagctcttacaagtatcctaaacgacagattgacttcatgtgggaagctgttctgctctgtcaattccatgattgtcttccgggaagcgccatcgagatgtgctacgatgactccgacgagctctacgatgcggtttttagtgaaagcaaaaagcttttcaaagagctgttcaaattgctcggtttgtcggaagcgcaacctctaactgtagaggaagcagcagtagtgaacacccttccttgggaccgcaaagaagttgtcgatctcgcagatggtggatctggtgtggccagtggcttgggtcccttcctcactgtgacgcccatagagacccagaccaaagctgttaccatcaacgagatacgcgagggtgtcttcgtcatggagaatgatcaactcaccgttgtcgtcgaaaaaggatgcatcacttctcttcgagatcgcaagctggaccgcgagattatccctaaggggggtaaggccaatcaacttgtcatctttgacgacaaacctctttattggcaagcttgggacgtagaggtctatcacctggagacacgtgctgaactggcctacgaagagactaagattttcgaggacaaggagcatcgagtcagtcttatctccacggcccggatcagcgaagacagctcaattaagacaatcttgagcctcagtgccgcatttgatggctacccgtcatatgtcgagtgtactgcccatgtcgaatggcatgagacgatgaagtttctcaaggtcgagtttcctgttgacgttgttaacaacgaggcttcgtatgaaacccagtatggtcttgtcaaacgacctacccactacaacacatcctgggacatggccaaattcgaggtctgctgccacaaatttgctgacttgtctgagaatggttatggtgtatcaattctaaacgactgcaagtatggctttgccacttgtggcaatctaatgcgtctttccctcttacggtcgcccaaggcaccggatgctcatgccgatatgggccaacataccatccgctggggaatcttcccccatgaaggttcgcttggcgccgacaccgttcgggccgggtataacttcaacaacccattgtccgttctctcagcacctgagccagccgcgctttcgagcaattctacccgccccattcagttggatggtgacaagtccttgatcctcgattgtgtcaagcgtgccgaagatgacgcagatgtcgctcatgatagcgcattgccactgcgtaagggtcagagcgtcatcattcgtatctacgacagccttggcggccgtagcacgggtactgtctcgaccacctgggatgtcaagaaagtattcaagaccaatgcccttgaggatgatggagatgagattgacatcaagaatggcaaattctctgttacgctgcggccattcgaggttgcaacttaccggttgcaattgtaggactgccccgtgaactctgagtgatgtcgagtcacgagtacattcatatcagtcacgagtgatacagaatgccgtgcatttataggtttcaattaacaagcgtgagagggaaatgaaaactttgagcatggaagcgaaattgcagtttttttttcacaggaaaacaaaaagcatcacgatcggatctggttcgttgcatgagagtagtgttggggaggcatgtctgcactggtcgctgttgtcaaaaacatgcgccgacggtatgagagatacatgttgtacaatagcggaggtggatgctcactgggaactctcgatctctcttgagatacgaagtcacgatgacatcggagccggggatggatgatagaggtttcactgtaggcaattacagccgaagtagatagataaaccaagagacaatccttctctatggtaacgcgcc

SEQ ID NO: 18315 - DNA, 906 bp, Muscodor strobelii
  misc_feature: SGI cDNA ID NO. 566138
  misc_feature: Elevated expression when VOC is produced
  misc_feature: Encodes the peptide sequence at SEQ ID NO 18316
atgtcgaacaccgcagcaccgggtcggcaagcaatggtggcttcgcaccacgctcctccggctggacgacaagcccgaccgaggcgaaaatctcttgagcaactcgaggccaagtataaggctttgatgaggaacatgctcatgtatcagactatgcggtctcggaatatgggcacagactcgaggggtcagggcaacggcataaatcaaaaacctcaacaacatcccgtctatcaggttcagcagactgtcacgccagaatcgtctgtttcaccggctggaagcgcaacgagtttggagaatatggccaagcagaaccaccatgcacatcaacatcacgtgcaaaatcagaacaatcacactttgacacctgcccagcgtcaacatcagcaacagcagcatgagcgtcagcaggcgccacagaagaggcttcacaatgggaaccatggtccaaagccactatatgacaggcgggagatgggtggaaggacacagcaacaacgacggggacctgtagcggccgcaatgcagctcgcgttggacgaacttgcaaaccagcaggatcaaagccaccctccgccaccaccacaacctcaacaacaacaacatcatcaatactctcagcatcaacatcaccaacccagcgctccaatccccataccgcgtcctgtgagcacgcaaatgcctcaccacgttcaacaacagtacatgcatcatcaaacccttcccaccccaccactcgatccatccgcctatcgtcctcatcatgccatgccgacgataacagcaccatacgcgccatacgacgcaatggggcaggcttaccacaaccacatgccgggctatgatccaaacgccactgtagacgggaacctggtacttgacggcttcgtaccaaacatttaa

SEQ ID NO: 18316 - protein, 301 aa, Muscodor strobelii
  misc_feature: SGI Peptide ID NO. 566138
  misc_feature: Useful for introducing or modulating the production of volatile compounds
MSNTAAPGRQAMVASHHAPPAGRQARPRRKSLEQLEAKYKALMRNMLMYQTMRSRNMGTDSRGQGNGINQKPQQHPVYQVQQTVTPESSVSPAGSATSLENMAKQNHHAHQHHVQNQNNHTLTPAQRQHQQQQHERQQAPQKRLHNGNHGPKPLYDRREMGGRTQQQRRGPVAAAMQLALDELANQQDQSHPPPPPQPQQQQHHQYSQHQHHQPSAPIPIPRPVSTQMPHHVQQQYMHHQTLPTPPLDPSAYRPHHAMPTITAPYAPYDAMGQAYHNHMPGYDPNATVDGNLVLDGFVPNI

SEQ ID NO: 18317 - DNA, 3126 bp, Muscodor strobelii
  misc_feature: SGI cDNA ID NO. 566139
  misc_feature: Encodes the peptide sequence at SEQ ID NO 18318
atgacctcctatccgtcatatgctcggcttcttccgtcttgtcgcaatcgcctgagacctgcaatacgatctgcatcagctggcggctgtcgtctgctcagccaggcacgtgatgcgagtctacggccgagcctgttacggctcacgttccatcacggcttgacagacaggtcgcggtcgtcgcctctgaccgctagatcacagacgcggggaaagaagacgaagtcgtctgtcaagctagatgaacttccccaaggcctcatcatcgccgatccactgcctgacatccaagatgatgctggacctgcgtatcccaccgtcgtgttgcaggctcgacgcaacatgcagaagtttgaaaattgcgtgctcttgacccgtgtgggcggtttctatgagctgtatttccaacatgccgaagagtatggtcctcttctgaatctgaaggtggcacagaagaagaccaatgccggccccgttccaatggctggctttccattctttcagctagaacggttcctaaagactctagtcatagacttgaattgttacgtggccgtcgctgaagagtttcccaacgatccaggtgataaagtgaaatctggcgggctcatgcatgaccgccgtgtcacccgcgttatcaccccgggcactttgatagacgagaactttattgatccatacgccaacaattatgtgctagctatccatgttaatcatgattcacacattggccctacaaacggccttgctgagcatgagcatggtgtgagcgacgtgagctgtaagggatcggacacagcctccacccccataggacttgcctggttagatgtttctactgggcagttctatactcaagcaacatctgtcgattcactgtcgtctattctttcccgagtgggacctcgtgagatcgttgtggatgaactgctagagacccgtaaagatcatcaagttttctccgttctggctgaggataaacacttaattacgtttgcgtcggaagaaatgcagctacctatatcagaatggggtcccatgctggagtctgagatacctgtgcaaactatcgcagaatttactcctgaagagtctcgagcaggtagtctgctgttgcaatatgtcaaaagccggcttcaaaatgtgaacatgaaattgcaacctccacaacgccacgagaacctgtcagtcctaggtatagataaaaacactatgcgagcgcttgagatcaagcagactatcaaggatggtacttttcgaggaagtctactgcacgctgtgcgcagaacggtcacgaaaggtggcgctcgattgctaaatgcatggctcagcgcaccttcgacagacttggacactattcaaggtcgccaggatctggttgagtatttcatacaacacgaagacgttcgcgatgatttgatattattattgagaaggagccacgactcacaacgcttagtgcaaaaatttgctttcggccgaggagatgcagacgatcttgtaggtctggcgaacacgatccgggctgttcaagacattgttgatctcctcgccagagcatcaaaagagctaacaccggaaaaccaacttagttcttgcttccagcccctcttgtcacggataagacttgaagagcccattcagctagctgaccgcatctggatgtcaatcgatgaggaagggatcactcaacagcagcaaaacgtggatagcgagacgaatcaaattctagccatggcggaagatgtcgttgccgccgaaggaacacaggtggatgcggactccttgcctaaaggcaagaggaagaaagtcacgtctatcaaagaagtgtacgccgaggacaacttagctttcatcatgaaacctcaagctagtgatggactgcaagagcttcataccaaattgtccacccttctcaaagaaaaggacgagcttacggaatcccttcgtgaagagcttggcgcgtcgactctgacactgcgatggacgccaaacctgggacatatctgccatgtcaaaggtaaagacgtccgcgccgcaggggtcacaagccaagcagcagtaagctcaagccggagcacgcgagcgttccacacagcagagtggacagcgcttggccgacgtatacaccaaacacggttcgaaataggaacagaagaaacccgcatcttcgccgaattacgggcgagcgtagtcgtcaacttagttaaactgcgccgcaacgcctccgtgctcgatgagctggacgtaacaacatcatttgctcgcctagccgtcgaagaaggtctgacacgtccgattttgaactcttctacagcacatacaatcatcggcgggcgccacccaacagtcgaaggcggaatccgcgaacaaggacggaacttcacgcgaaatgactgtctcgttggccatactgccgcgcaaacagatggcgaaaatagaacctcgccatcatcagagggcaaactatggttgatcaccgggccaaacatggcaggtaaatcaacatatctccgacaaaacgcactgatcacgattctcgcacaagcaggatgttacgtaccggcgtcccacgcgacgctcggcatcgtcgacgctgtattctcacgcgtcggctcagcagacaatctctacagaaaccaaagcacattcatggtcgagatgctagagacagccgccatcttacagtccgcaacaccttgctcgttcgtcatcatggacgagatcggtcgtggtacgacgccggaagatggcgaggcagtggcatttgcttgtctacatcacctggcaaccatcaaccgctgtcgtgcactcttcgcgacgcatttccatggtttagcggaccgtgtgcgagagcgagggttacatgtaagcgcgagctcgcccggacccgttgagatgtactgcacagatgttgaggaggatggaaaaggggggtttgtctacgtccataaactacggaagggtgtcaaccgacagagtcatgcactcaaagtcgcgagtcttgcgggtttgccaactgcagctattacagtggcgaaagaaatcatggaccgtcggaaacaggatcgtgtagagggagaaaagatattgagcataacaccggctggacttgtggaggcataa

SEQ ID NO: 18318 - protein, 1041 aa, Muscodor strobelii
  misc_feature: SGI Peptide ID NO. 566139
  misc_feature (105)..(222): Pfam Id: PF01624 Pfam Desc: MutS domain I
  misc_feature (230)..(387): Pfam Id: PF05188 Pfam Desc: MutS domain II
  misc_feature (395)..(760): Pfam Id: PF05192 Pfam Desc: MutS domain III
  misc_feature (763)..(1023): Pfam Id: PF00488 Pfam Desc: MutS domain V
  misc_feature (116)..(222): Pfam Id: PF01624 Pfam Desc: MutS domain I
  misc_feature (230)..(309): Pfam Id: PF05188 Pfam Desc: MutS domain II
  misc_feature (395)..(560): Pfam Id: PF05192 Pfam Desc: MutS domain III
  misc_feature (720)..(760): Pfam Id: PF05192 Pfam Desc: MutS domain III
  misc_feature (92)..(1017): NCBI GI: 46124901 Blast Desc: FG06828.1 [Gibberella zeae PH-1]
  misc_feature (67)..(1017): NCBI GI: 39944968 Blast Desc: MGG_04466 [Magnaporthe grisea 70-15] gi|145011430|gb|EDJ96086.1| MGG_04466 [Magnaporthe grisea 70-15]
  misc_feature (55)..(1019): NCBI GI: 171687511 Blast Desc: protein product [Podospora anserina] gi|170943717|emb|CAP69369.1| protein product [Podospora anserina]
  misc_feature (58)..(1019): NCBI GI: 154297650 Blast Desc: MutS2 protein [Botryotinia fuckeliana B05.10] gi|150858493|gb|EDN33685.1| MutS2 protein [Botryotinia fuckeliana B05.10]
  misc_feature (72)..(1019): NCBI GI: 156031007 Blast Desc: SS1G_14284 [Sclerotinia sclerotiorum 1980] gi|154700675|gb|EDO00414.1| SS1G_14284 [Sclerotinia sclerotiorum 1980]
  misc_feature (70)..(1017): NCBI GI: 242799531 Blast Desc: DNA mismatch repair protein Msh1, [Talaromyces stipitatus ATCC 10500] gi|218716745|gb|EED16166.1| DNA mismatch repair protein Msh1, [Talaromyces stipitatus ATCC 10500]
  misc_feature (61)..(1018): NCBI GI: 169766520 Blast Desc: [Aspergillus oryzae RIB40] gi|83765586|dbj|BAE55729.1| protein product [Aspergillus oryzae]
  misc_feature (61)..(1018): NCBI GI: 238483249 Blast Desc: DNA mismatch repair protein Msh1, [Aspergillus flavus NRRL3357] gi|220700913|gb|EED57251.1| DNA mismatch repair protein Msh1, [Aspergillus flavus NRRL3357]
  misc_feature (70)..(1017): NCBI GI: 212541162 Blast Desc: DNA mismatch repair protein Msh1, [Penicillium marneffei ATCC 18224] gi|210068035|gb|EEA22127.1| DNA mismatch repair protein Msh1, [Penicillium marneffei ATCC 18224]
  misc_feature (69)..(1019): NCBI GI: 225561909 Blast Desc: MutS2 protein [Ajellomyces capsulatus G186AR]
MTSYPSYARLLPSCRNRLRPAIRSASAGGCRLLSQARDASLRPSLLRLTFHHGLTDRSRSSPLTARSQTRGKKTKSSVKLDELPQGLIIADPLPDIQDDAGPAYPTVVLQARRNMQKFENCVLLTRVGGFYELYFQHAEEYGPLLNLKVAQKKTNAGPVPMAGFPFFQLERFLKTLVIDLNCYVAVAEEFPNDPGDKVKSGGLMHDRRVTRVITPGTLIDENFIDPYANNYVLAIHVNHDSHIGPTNGLAEHEHGVSDVSCKGSDTASTPIGLAWLDVSTGQFYTQATSVDSLSSILSRVGPREIVVDELLETRKDHQVFSVLAEDKHLITFASEEMQLPISEWGPMLESEIPVQTIAEFTPEESRAGSLLLQYVKSRLQNVNMKLQPPQRHENLSVLGIDKNTMRALEIKQTIKDGTFRGSLLHAVRRTVTKGGARLLNAWLSAPSTDLDTIQGRQDLVEYFIQHEDVRDDLILLLRRSHDSQRLVQKFAFGRGDADDLVGLANTIRAVQDIVDLLARASKELTPENQLSSCFQPLLSRIRLEEPIQLADRIWMSIDEEGITQQQQNVDSETNQILAMAEDVVAAEGTQVDADSLPKGKRKKVTSIKEVYAEDNLAFIMKPQASDGLQELHTKLSTLLKEKDELTESLREELGASTLTLRWTPNLGHICHVKGKDVRAAGVTSQAAVSSSRSTRAFHTAEWTALGRRIHQTRFEIGTEETRIFAELRASVVVNLVKLRRNASVLDELDVTTSFARLAVEEGLTRPILNSSTAHTIIGGRHPTVEGGIREQGRNFTRNDCLVGHTAAQTDGENRTSPSSEGKLWLITGPNMAGKSTYLRQNALITILAQAGCYVPASHATLGIVDAVFSRVGSADNLYRNQSTFMVEMLETAAILQSATPCSFVIMDEIGRGTTPEDGEAVAFACLHHLATINRCRALFATHFHGLADRVRERGLHVSASSPGPVEMYCTDVEEDGKGGFVYVHKLRKGVNRQSHALKVASLAGLPTAAITVAKEIMDRRKQDRVEGEKILSITPAGLVEA

SEQ ID NO: 18319 - DNA, 5722 bp, Muscodor strobelii
  misc_feature: SGI EST ID NO. CUFF.43105.0
  misc_feature: Variant of the nucleotide sequence at SEQ ID NO 18317
caggtaggcagctaaaaggaacattgtgataagtataggtcgaaatcaagttatttcgattccatagcgcagtaagctaaactgcggtacaatacgtaaggtattctgtctgacatttgccttcatcaacattccatcatgtcttatccgtcaatccattcaccactggtctcctatccagcctgataaacgccccgcttgcgtgtcaattaccatcatgttgtagaatatgtacattgtcttcctctaacttgctcagcaatcctgctgctgagaagagatcttctctagtttaatttagtggataaatagtaagagaattaaatgtttggtacgaagccgtcaagtaccaggttcccgtctacagtggcgtttggatcatagcccggcatgtggttgtggtaagcctgccccattgcgtcgtatggcgcgtatggtgctgttatcgtcggcatggcatgatgaggacgataggcggatggatcgagtggtggggtgggaagggtttgatgatgcatgtactgttgttgaacgtggtgaggcatttgcgtgctcacaggacgcggtatggggattggagcgctgggttggtgatgttgatgctgagagtattgatgatgttgttgttgttgaggttgtggtggtggcggagggtggctttgatcctgctggtttgcaagttcgtccaacgcgagctgcattgcggccgctacaggtccccgtcgttgttgctgtgtccttccacccatctcccgcctgtcatatagtggctttggaccatggttcccattgtgaagcctcttctgtggcgcctgctgacgctcatgctgctgttgctgatgttgacgctgggcaggtgtcaaagtgtgattgttctgattttgcacgtgatgttgatgtgcatggtggttctgcttggccatattctccaaactcgttgcgcttccagccggtgaaacagacgattctggcgtgacagtctgctgaacctgatagacgggatgttgttgaggtttttgatttatgccgttgccctgacccctcgagtctgtgcccatattccgagaccgcatagtctgatacatgagcatgttcctcatcaaagccttatacttggcctcgagttgctcaagagattttcgcctcggtcgggcttgtcgtccagccggaggagcgtggtgcgaagccaccattgcttgccgacccggtgctgcggtgttcgacatgcttaaagccccagtgtccattgggaatacaaagggcatcacaagacgattatatcgatgatttatgccggtttcgaaccttaatatcttgagactcggtgacgcagttagttgtttcaaaacccctcttcactttcggttcctagacgtatgcggagacgacacgcgtcgaaaggatggggaagagcttgaatgtatatactcaataatgcccaaataccaaagacaaataaggttgattagagaatgctcggtacttagtcacctagaagcaagctggggcggcgggacatttattaatagcttggttagatggatgttgccgtcaggcctcaggcgcctcttttgtcacacaactggaaagcgaaagtcacacgtaaagggccgagtcgatcgaggaattacagcagacataagagtggaatttgagataggctaggggcacatttgataattcagatcgatcgtctcctgggatagagactcacagagggtagaatttggcatcgggcatattcatgagccgtttgtcaaacgagtcaaacgagtcaaacgggagccgtgccgggaattgaaatgacagctagcctgcgaacaagcacatcccggttctggcttgccatgatttgccatgatttgagcattagaaggggcattacgctcagtgaggaagagtctgggacagttccaacagccgggcgtcgagcattccaaatgtcgagacggtgcccactcgctgtccgggggtcgttggagcgttgatggagcatctcgggcagactgccatgttttgtgggcaccgagcactgggcagcggcagaagaagcaacagcgctgctgtcagtcgtcggatcgatgatgaagctggattgggtgcgtggtgcgagtggatgggaattggtactgcgattccaaatatcgagcgaatgaggaacccagacagtcagcacaggggtatatactgtgtgtgtcagatgtgattgatactgtaacataacaccaaaatcaccacactcaatactgtgcgatctggtctgcatggcctctcccgctcaccctggccgatcgacagccttccaaatcttttttaaacgtaaattctcccctccacgattcttccacggactaccaccgctgcacgcatcactgcagctggacaaacaagatacatctcaaatgatacgcaaggcaactgaataggatgcgtatttcgtgtctcttgaccttccagcttccaatttgcccacatcttggtcttttcacctgtcttcctattcgtcccagatgacctcctatccgtcatatgctcggcttcttccgtcttgtcgcaatcgcctgagacctgcaatacgatctgcatcagctggcggctgtcgtctgctcagccaggcacgtgatgcgagtctacggccgagcctgttacggctcacgttccatcacggcttgacagacaggtcgcggtcgtcgcctctgaccgctagatcacagacgcggggaaagaagacgaagtcgtctgtcaagctagatgaacttccccaaggcctcatcatcgccgatccactgcctgacatccaagatgatgctggacctgcgtatcccaccgtcgtgttgcaggctcgacgcaacatgcagaagtttgaaaattgcgtgctcttgacccgtgtgggcggtttctatgagctgtatttccaacatgccgaagagtatggtcctcttctgaatctgaaggtggcacagaagaagaccaatgccggccccgttccaatggctggctttccattctttcagctagaacggttcctaaagactctagtcatagacttgaattgttacgtggccgtcgctgaagagtttcccaacgatccaggtgataaagtgaaatctggcgggctcatgcatgaccgccgtgtcacccgcgttatcaccccgggcactttgatagacgagaactttattgatccatacgccaacaattatgtgctagctatccatgttaatcatgattcacacattggccctacaaacggccttgctgagcatgagcatggtgtgagcgacgtgagctgtaagggatcggacacagcctccacccccataggacttgcctggttagatgtttctactgggcagttctatactcaagcaacatctgtcgattcactgtcgtctattctttcccgagtgggacctcgtgagatcgttgtggatgaactgctagagacccgtaaagatcatcaagttttctccgttctggctgaggataaacacttaattacgtttgcgtcggaagaaatgcagctacctatatcagaatggggtcccatgctggagtctgagatacctgtgcaaactatcgcagaatttactcctgaagagtctcgagcaggtagtctgctgttgcaatatgtcaaaagccggcttcaaaatgtgaacatgaaattgcaacctccacaacgccacgagaacctgtcagtcctaggtatagataaaaacactatgcgagcgcttgagatcaagcagactatcaaggatggtacttttcgaggaagtctactgcacgctgtgcgcagaacggtcacgaaaggtggcgctcgattgctaaatgcatggctcagcgcaccttcgacagacttggacactattcaaggtcgccaggatctggttgagtatttcatacaacacgaagacgttcgcgatgatttgatattattattgagaaggagccacgactcacaacgcttagtgcaaaaatttgctttcggccgaggagatgcagacgatcttgtaggtctggcgaacacgatccgggctgttcaagacattgttgatctcctcgccagagcatcaaaagagctaacaccggaaaaccaacttagttcttgcttccagcccctcttgtcacggataagacttgaagagcccattcagctagctgaccgcatctggatgtcaatcgatgaggaagggatcactcaacagcagcaaaacgtggatagcgagacgaatcaaattctagccatggcggaagatgtcgttgccgccgaaggaacacaggtggatgcggactccttgcctaaaggcaagaggaagaaagtcacgtctatcaaagaagtgtacgccgaggacaacttagctttcatcatgaaacctcaagctagtgatggactgcaagagcttcataccaaattgtccacccttctcaaagaaaaggacgagcttacggaatcccttcgtgaagagcttggcgcgtcgactctgacactgcgatggacgccaaacctgggacatatctgccatgtcaaaggtaaagacgtccgcgccgcaggggtcacaagccaagcagcagtaagctcaagccggagcacgcgagcgttccacacagcagagtggacagcgcttggccgacgtatacaccaaacacggttcgaaataggaacagaagaaacccgcatcttcgccgaattacgggcgagcgtagtcgtcaacttagttaaactgcgccgcaacgcctccgtgctcgatgagctggacgtaacaacatcatttgctcgcctagccgtcgaagaaggtctgacacgtccgattttgaactcttctacagcacatacaatcatcggcgggcgccacccaacagtcgaaggcggaatccgcgaacaaggacggaacttcacgcgaaatgactgtctcgttggccatactgccgcgcaaacagatggcgaaaatagaacctcgccatcatcagagggcaaactatggttgatcaccgggccaaacatggcaggtaaatcaacatatctccgacaaaacgcactgatcacgattctcgcacaagcaggatgttacgtaccggcgtcccacgcgacgctcggcatcgtcgacgctgtattctcacgcgtcggctcagcagacaatctctacagaaaccaaagcacattcatggtcgagatgctagagacagccgccatcttacagtccgcaacaccttgctcgttcgtcatcatggacgagatcggtcgtggtacgacgccggaagatggcgaggcagtggcatttgcttgtctacatcacctggcaaccatcaaccgctgtcgtgcactcttcgcgacgcatttccatggtttagcggaccgtgtgcgagagcgagggttacatgtaagcgcgagctcgcccggacccgttgagatgtactgcacagatgttgaggaggatggaaaaggggggtttgtctacgtccataaactacggaagggtgtcaaccgacagagtcatgcactcaaagtcgcgagtcttgcgggtttgccaactgcagctattacagtggcgaaagaaatcatggaccgtcggaaacaggatcgtgtagagggagaaaagatattgagcataacaccggctggacttgtggaggcataaggggtgtcacaaaatgacccacctattcgggataaccacctgaggtgatgtggtacgctcaggggagcattatacaggagtctaag

SEQ ID NO: 18320 - DNA, 939 bp, Muscodor strobelii
  misc_feature: SGI cDNA ID NO. 566140
  misc_feature: Reduced expression when VOC is produced
  misc_feature: Encodes the peptide sequence at SEQ ID NO 18321
atgggagccagcaagcaaaagaaggcggaatacttccccaagctccagggcttgctggaggagtacaagtccgtcttcatcgtcaacgtcgacaatgtcagctctcagcagatgcacgaggtccgacaggtcctccgtagcgaggccgtcgtcctgatgggcaaaaacaccatggttcgccgtgccctcaagaccttcgtcgccgacacccccgagtacgagaagctactgccccacgtccgtggcaacgttggtttcatcttcaccaacggcgagctcaaggaggtccgcgacaagattctcgccaacaaggttgccgcccccgcccgtgctggtgccgtcgcacccgacgacgtctgggtccccgctggcaacaccggtatggagcccggcaagacctctttcttccaggctctcggtgtccccaccaagatcgcccgtggtaccattgagatcaccaccgacctcaagctcatcgaggccggcaacaaggtcggtccctccgaggccaccctgctcaacttgctcaacatctctcccttcacctacggtctgggcatctcccaggtctacgatgagggcaacatcttcccccccagcgttctcgacatcggcgaggagcagctcctcaagaccttctccagcgccattgtcaccattgctgccgtctccttggccatcaacttccccacccttccttccgtcgtccactctctcgtgaacggctacaagaaggtcctggccgttgccattgagaccgagttcagctggcccgagattgaggagctcaaggaccgcatcgccaatcctgatgcctacgcctccgccgctcctgccgccagtggaggcgacgcccctgctgctgccgccaaagaggaggagaaggaagaagaggaggaggagtccggtgatgagggcttcggtggtcttttcgactaa

SEQ ID NO: 18321 - protein, 312 aa, Muscodor strobelii
  misc_feature: SGI Peptide ID NO. 566140
  misc_feature (222)..(311): Pfam Id: PF00428 Pfam Desc: 60s Acidic ribosomal protein
  misc_feature (3)..(105): Pfam Id: PF00466 Pfam Desc: Ribosomal protein L10
  misc_feature (1)..(269): NCBI GI: 39944970 Blast Desc: MGG_04467 [Magnaporthe grisea 70-15] gi|59803168|gb|AAX07734.1| 60S acidic ribosomal protein-like protein [Magnaporthe grisea] gi|145011429|gb|EDJ96085.1| grisea
  misc_feature (1)..(269): NCBI GI: 85089944 Blast Desc: 60S acidic ribosomal protein P0 [Neurospora crassa OR74A] gi|30316271|sp|Q96TJ5.1|RLA0_NEUCR RecName: Full=60S acidic ribosomal protein P0 gi|13899020|gb|AAK48941.1|AF361225_1
  misc_feature (1)..(312): NCBI GI: 46124899 Blast Desc: RLA0_NEUCR 60S acidic ribosomal protein P0 [Gibberella zeae PH-1]
  misc_feature (1)..(312): NCBI GI: 156031005 Blast Desc: 60S acidic ribosomal protein P0 [Sclerotinia sclerotiorum 1980] gi|154700674|gb|EDO00413.1| 60S acidic ribosomal protein P0 [Sclerotinia sclerotiorum 1980]
  misc_feature (1)..(267): NCBI GI: 171687509 Blast Desc: protein product [Podospora anserina] gi|41688720|sp|Q9C3Z6.1|RLA0_PODAN RecName: Full=60S acidic ribosomal protein P0 gi|12963430|gb|AAK11262.1|AF331714_1 protein
  misc_feature (1)..(312): NCBI GI: 258565907 Blast Desc: 60S acidic ribosomal protein P0 [Uncinocarpus reesii 1704] gi|237907399|gb|EEP81800.1| 60S acidic ribosomal protein P0 [Uncinocarpus reesii 1704]
  misc_feature (5)..(312): NCBI GI: 256732653 Blast Desc: [Nectria haematococca mpVI 77-13-4]
  misc_feature (1)..(312): NCBI GI: 119189673 Blast Desc: CIMG_04884 [Coccidioides immitis RS] gi|240111152|gb|EER29305.1| 60S acidic ribosomal protein P0, [Coccidioides posadasii C735 delta SOWgp]
  misc_feature (1)..(312): NCBI GI: 154297648 Blast Desc: 60S ribosomal protein P0 [Botryotinia fuckeliana B05.10] gi|150858492|gb|EDN33684.1| 60S ribosomal protein P0 [Botryotinia fuckeliana B05.10]
  misc_feature (1)..(312): NCBI GI: 116180696 Blast Desc: 60S acidic ribosomal protein P0 [Chaetomium globosum CBS 148.51] gi|88185273|gb|EAQ92741.1| 60S acidic ribosomal protein P0 [Chaetomium globosum CBS 148.51]
  misc_feature (8)..(273): SWISSPROT Homolog: EC 4.2.99.18 DNA-(apurinic or apyrimidinic site) lyase
  misc_feature: Useful for introducing or modulating the production of volatile compounds
MGASKQKKAEYFPKLQGLLEEYKSVFIVNVDNVSSQQMHEVRQVLRSEAVVLMGKNTMVRRALKTFVADTPEYEKLLPHVRGNVGFIFTNGELKEVRDKILANKVAAPARAGAVAPDDVWVPAGNTGMEPGKTSFFQALGVPTKIARGTIEITTDLKLIEAGNKVGPSEATLLNLLNISPFTYGLGISQVYDEGNIFPPSVLDIGEEQLLKTFSSAIVTIAAVSLAINFPTLPSVVHSLVNGYKKVLAVAIETEFSWPEIEELKDRIANPDAYASAAPAASGGDAPAAAAKEEEKEEEEEESGDEGFGGLFD

SEQ ID NO: 18322 - DNA, 1301 bp, Muscodor strobelii
  misc_feature: SGI EST ID NO. CUFF.43142.0
  misc_feature: Variant of the nucleotide sequence at SEQ ID NO 18320
cgaggacgaaagtggaagcaattcctacagcatcatccctcacacctctccccccaacactaaacaccacagacctgctcggctttaaatatcctaacttcacgaataagaagatatgggagccagcaagcaaaagaaggcggaatacttccccaagctccagggcttgctggaggagtacaagtccgtcttcatcgtcaacgtcgacaatgtcagctctcagcagatgcacgaggtccgacaggtcctccgtagcgaggccgtcgtcctgatgggcaaaaacaccatggttcgccgtgccctcaagaccttcgtcgccgacacccccgagtacgagaagctactgccccacgtccgtggcaacgttggtttcatcttcaccaacggcgagctcaaggaggtccgcgacaagattctcgccaacaaggttgccgcccccgcccgtgctggtgccgtcgcacccgacgacgtctgggtccccgctggcaacaccggtatggagcccggcaagacctctttcttccaggctctcggtgtccccaccaagatcgcccgtggtaccattgagatcaccaccgacctcaagctcatcgaggccggcaacaaggtcggtccctccgaggccaccctgctcaacttgctcaacatctctcccttcacctacggtctgggcatctcccaggtctacgatgagggcaacatcttcccccccagcgttctcgacatcggcgaggagcagctcctcaagaccttctccagcgccattgtcaccattgctgccgtctccttggccatcaacttccccacccttccttccgtcgtccactctctcgtgaacggctacaagaaggtcctggccgttgccattgagaccgagttcagctggcccgagattgaggagctcaaggaccgcatcgccaatcctgatgcctacgcctccgccgctcctgccgccagtggaggcgacgcccctgctgctgccgccaaagaggaggagaaggaagaagaggaggaggagtccggtgatgagggcttcggtggtcttttcgactaaatgtcatagcatatcaaaggtgttaaaggactggcataaaactgggcttcggttaggttcacgaaatcttgatgtgcaacgatggatggtacataggtttcaggctggtcaattaagacttgttacgtgtgacgaatccaaacgaatccaatcgctctatcaatgtgagatgcgtatcttcaatatgagatcaagcgtcactataggaaaaggttagtcgaaactctctcttacttacgtacacccc

SEQ ID NO: 18323 - DNA, 2388 bp, Muscodor strobelii
  misc_feature: SGI cDNA ID NO. 566141
  misc_feature: Reduced expression when VOC is produced
  misc_feature: Encodes the peptide sequence at SEQ ID NO 18324
atgcctccaaggccaccggtatttgagttcggcacacgcagctttgtttgtaattcgtgcctatccactttgcgcaagcgatcggcggtcgcgccatggtccatccgacaatcgtcacgagttgccgaagctctgtccgtctcgccaacgaagcaccggcgaccgcccgaacaagaggccgaccgtctcaaagccctcgaggctcttggcttactagaggacagcaacgaagtcaagatcaactttttcgaacaaaacaaggatggatcaatgcgcccgctcgagacccaagaagaattcggtcaggcttttagcgacccgggtggccagatgaaagcccagctcgacgagatcgattcccagctcggaagcttcaaggagttctccaagttcatgaaaacattggggagaatgaagaagccggacgacctacagatcgaccagattcgtgacagtgacgacgtcccagacgtaaaagagcccagctccatatccgacctggctatacccataagtggcttgaatggcaaccgacaagatcgaatccatcggctgaacaattggatcaggcgctgtagtaagctgtcggcgaaggacaatatcttgccaaaagatattcagggtctctggaaagcgtacgcggctgtccgcacgactatgactggacggtggcaaactgtgcccttaccgacctgggaggtcttatggcaggttctttccgcagaccatgcattcaacacaagccgaatgtcccacatctacgcccttaccaaagacatgcagcagtccggcgttccactgtctccccaacagcagctcctggcgctggaggctatgtttgctgatggctgggaagatgaggcaattgagaatcatcggcgacatgtttcgacacttggtgcgaatcccgaaacatttgtgcagttctggcaacttgggctgcagatgtattgtcgaactggtgatatcgaacgagcagagcgtgtagctgagacgatataccaatctccttacgaaaaggacccaagattcgtcctcccactcataaaactgtgtgcgggagctgcagagactgttgagaagggtttcaaacaatatcggaacttacgcgatgcgcttggtgattcaatgacaatcgaagactacgactcagtgatatcctatttcttaacttctaacaataccgaatatgctcttttcgtctttgtcgatatgatgaaatctggatctatcgatctggttggtgtccaaaactaccctccgagtgttgccaacccctttttcttcggcaagtggctcaagcggttgattggtgctggagactacgccggagcacacaacgtcctccgcttcatgagaggccaaggaattataccccgggctatccaggtcaatgggctcattggagcatggttacgatccggagctgccgacgatgtacaaaaggccgaggaggttgcttgggcaatgattaatgcacggactcattttgtggaactcaggagacgaagatcggatttccctggagtgaacttctaccccacgggcgaagcctggccgcgggcaaacttagagacattcagtcttctcgctgagaacttcagagagcgtggcctcgggcccaagatgagacgtctgtggcaagccttccagacagccgagattgcgcctgattccttcatggcaaatcagcttcttatgctccatctccaggaaggcaagggcgagttagttgcggatctccacaaggagatggccaaacgtttcaacgtcaagccagacccgcacacgttcacggccctttggcaaggccttgccgtcaatcgtctagtcaaagtgtcaccgggagacttggatgaggaagtatcgaagacccgtgcactgttctctgagatggttcactctatcgcggtattcaggacgacaaatggcctagagatcgaccgatatctggcaagaaacattttgcattcattccgcaagcttgatgaccgtgctgggcttcttctatcgtacagagcgcttcgacgtgctttcagctacaatccccaggacgcggtggtgtttgaactgatgattggaacactggatctagacagactggcaaaacgcaaggatggcgcaaaactaatcaatgtgcgcagagctttggactactatctcgcacaccgagagcaggaactcattaaatcgggcgaacttcgagacggcaaaagcatgtcagcagaacttcgggcagacgagacgggtaactttttaggtcaccatcttgaagctccattctccgagatggaagaagagcaggctcaagagatggtacgaggggctgctgaagagatgggtctacagaaacggcctgcgcaaggcgtccagagtgaaagcagatag

SEQ ID NO: 18324 - protein, 795 aa, Muscodor strobelii
  misc_feature: SGI Peptide ID NO. 566141
  misc_feature (1)..(782): NCBI GI: 116207082 Blast Desc: CHGG_02834 [Chaetomium globosum CBS 148.51] gi|88183431|gb|EAQ90899.1| CHGG_02834 [Chaetomium globosum CBS 148.51]
  misc_feature (1)..(789): NCBI GI: 256734420 Blast Desc: NECHADRAFT_90016 [Nectria haematococca mpVI 77-13-4]
  misc_feature (1)..(722): NCBI GI: 46108438 Blast Desc: FG01101.1 [Gibberella zeae PH-1]
  misc_feature (1)..(782): NCBI GI: 85118457 Blast Desc: NCU02674 [Neurospora crassa OR74A] gi|28927256|gb|EAA36211.1| [Neurospora crassa OR74A] gi|38567190|emb|CAE76483.1| [Neurospora crassa]
  misc_feature (1)..(791): NCBI GI: 171680147 Blast Desc: protein product [Podospora anserina] gi|170939700|emb|CAP64926.1| protein product [Podospora anserina]
  misc_feature (301)..(698): NCBI GI: 145614644 Blast Desc: MGG_04415 [Magnaporthe grisea 70-15] gi|145021559|gb|EDK05688.1| MGG_04415 [Magnaporthe grisea 70-15]
  misc_feature (206)..(685): NCBI GI: 154324164 Blast Desc: BC1G_00481 [Botryotinia fuckeliana B05.10] gi|150842710|gb|EDN17903.1| BC1G_00481 [Botryotinia fuckeliana B05.10]
  misc_feature (35)..(702): NCBI GI: 119484140 Blast Desc: pentatricopeptide repeat protein [Neosartorya fischeri NRRL 181] gi|119410129|gb|EAW20076.1| pentatricopeptide repeat protein [Neosartorya fischeri NRRL 181]
  misc_feature (35)..(702): NCBI GI: 70983410 Blast Desc: pentatricopeptide repeat protein [Aspergillus fumigatus Af293] gi|66844858|gb|EAL85194.1| pentatricopeptide repeat protein [Aspergillus fumigatus Af293] pentatricopeptide
  misc_feature (99)..(685): NCBI GI: 242798850 Blast Desc: pentatricopeptide repeat protein [Talaromyces stipitatus ATCC 10500] gi|218716598|gb|EED16019.1| pentatricopeptide repeat protein [Talaromyces stipitatus ATCC
  misc_feature: Useful for introducing or modulating the production of volatile compounds
MPPRPPVFEFGTRSFVCNSCLSTLRKRSAVAPWSIRQSSRVAEALSVSPTKHRRPPEQEADRLKALEALGLLEDSNEVKINFFEQNKDGSMRPLETQEEFGQAFSDPGGQMKAQLDEIDSQLGSFKEFSKFMKTLGRMKKPDDLQIDQIRDSDDVPDVKEPSSISDLAIPISGLNGNRQDRIHRLNNWIRRCSKLSAKDNILPKDIQGLWKAYAAVRTTMTGRWQTVPLPTWEVLWQVLSADHAFNTSRMSHIYALTKDMQQSGVPLSPQQQLLALEAMFADGWEDEAIENHRRHVSTLGANPETFVQFWQLGLQMYCRTGDIERAERVAETIYQSPYEKDPRFVLPLIKLCAGAAETVEKGFKQYRNLRDALGDSMTIEDYDSVISYFLTSNNTEYALFVFVDMMKSGSIDLVGVQNYPPSVANPFFFGKWLKRLIGAGDYAGAHNVLRFMRGQGIIPRAIQVNGLIGAWLRSGAADDVQKAEEVAWAMINARTHFVELRRRRSDFPGVNFYPTGEAWPRANLETFSLLAENFRERGLGPKMRRLWQAFQTAEIAPDSFMANQLLMLHLQEGKGELVADLHKEMAKRFNVKPDPHTFTALWQGLAVNRLVKVSPGDLDEEVSKTRALFSEMVHSIAVFRTTNGLEIDRYLARNILHSFRKLDDRAGLLLSYRALRRAFSYNPQDAVVFELMIGTLDLDRLAKRKDGAKLINVRRALDYYLAHREQELIKSGELRDGKSMSAELRADETGNFLGHHLEAPFSEMEEEQAQEMVRGAAEEMGLQKRPAQGVQSESR

SEQ ID NO: 18325 - DNA, 2792 bp, Muscodor strobelii
  misc_feature: SGI EST ID NO. CUFF.43111.0
  misc_feature: Variant of the nucleotide sequence at SEQ ID NO 18323
atggcatcaaaaaatttgaattcattgttgctcttggaaacattggcaaatttcaacaacggagcacagcagataagcctgaaggcaccagctctattctaattctctgcactcttttcacttttacgacttgagatcaaaaaataacctgagcgcagcgatcctccgccgtatatactatgtattagccgtatgatcaacccttccgttcacgacatctcggtgccatgcctccaaggccaccggtatttgagttcggcacacgcagctttgtttgtaattcgtgcctatccactttgcgcaagcgatcggcggtcgcgccatggtccatccgacaatcgtcacgagttgccgaagctctgtccgtctcgccaacgaagcaccggcgaccgcccgaacaagaggccgaccgtctcaaagccctcgaggctcttggcttactagaggacagcaacgaagtcaagatcaactttttcgaacaaaacaaggatggatcaatgcgcccgctcgagacccaagaagaattcggtcaggcttttagcgacccgggtggccagatgaaagcccagctcgacgagatcgattcccagctcggaagcttcaaggagttctccaagttcatgaaaacattggggagaatgaagaagccggacgacctacagatcgaccagattcgtgacagtgacgacgtcccagacgtaaaagagcccagctccatatccgacctggctatacccataagtggcttgaatggcaaccgacaagatcgaatccatcggctgaacaattggatcaggcgctgtagtaagctgtcggcgaaggacaatatcttgccaaaagatattcagggtctctggaaagcgtacgcggctgtccgcacgactatgactggacggtggcaaactgtgcccttaccgacctgggaggtcttatggcaggttctttccgcagaccatgcattcaacacaagccgaatgtcccacatctacgcccttaccaaagacatgcagcagtccggcgttccactgtctccccaacagcagctcctggcgctggaggctatgtttgctgatggctgggaagatgaggcaattgagaatcatcggcgacatgtttcgacacttggtgcgaatcccgaaacatttgtgcagttctggcaacttgggctgcagatgtattgtcgaactggtgatatcgaacgagcagagcgtgtagctgagacgatataccaatctccttacgaaaaggacccaagattcgtcctcccactcataaaactgtgtgcgggagctgcagagactgttgagaagggtttcaaacaatatcggaacttacgcgatgcgcttggtgattcaatgacaatcgaagactacgactcagtgatatcctatttcttaacttctaacaataccgaatatgctcttttcgtctttgtcgatatgatgaaatctggatctatcgatctggttggtgtccaaaactaccctccgagtgttgccaacccctttttcttcggcaagtggctcaagcggttgattggtgctggagactacgccggagcacacaacgtcctccgcttcatgagaggccaaggaattataccccgggctatccaggtcaatgggctcattggagcatggttacgatccggagctgccgacgatgtacaaaaggccgaggaggttgcttgggcaatgattaatgcacggactcattttgtggaactcaggagacgaagatcggatttccctggagtgaacttctaccccacgggcgaagcctggccgcgggcaaacttagagacattcagtcttctcgctgagaacttcagagagcgtggcctcgggcccaagatgagacgtctgtggcaagccttccagacagccgagattgcgcctgattccttcatggcaaatcagcttcttatgctccatctccaggaaggcaagggcgagttagttgcggatctccacaaggagatggccaaacgtttcaacgtcaagccagacccgcacacgttcacggccctttggcaaggccttgccgtcaatcgtctagtcaaagtgtcaccgggagacttggatgaggaagtatcgaagacccgtgcactgttctctgagatggttcactctatcgcggtattcaggacgacaaatggcctagagatcgaccgatatctggcaagaaacattttgcattcattccgcaagcttgatgaccgtgctgggcttcttctatcgtacagagcgcttcgacgtgctttcagctacaatccccaggacgcggtggtgtttgaactgatgattggaacactggatctagacagactggcaaaacgcaaggatggcgcaaaactaatcaatgtgcgcagagctttggactactatctcgcacaccgagagcaggaactcattaaatcgggcgaacttcgagacggcaaaagcatgtcagcagaacttcgggcagacgagacgggtaactttttaggtcaccatcttgaagctccattctccgagatggaagaagagcaggctcaagagatggtacgaggggctgctgaagagatgggtctacagaaacggcctgcgcaaggcgtccagagtgaaagcagatagctgcagcgccacatgcagacctccaccagtgtacgaatcttgtaagaaaatactcatgcttgaagtacgacctgtataaaaccccactgtggtgtatagtatatgaaatgtctcacagaggtgagactggtgatcgtaaaagcttacggaagtgctgtagacgcttatgtagcaaaa

SEQ ID NO: 18326 - DNA, 495 bp, Muscodor strobelii
  misc_feature: SGI cDNA ID NO. 566142
  misc_feature: Reduced expression when VOC is produced
  misc_feature: Encodes the peptide sequence at SEQ ID NO 18327
atggttcactctatcgcggtattcaggacgacaaatggcctagagatcgaccgatatctggcaagaaacattttgcattcattccgcaagcttgatgaccgtgctgggcttcttctatcgtacagagcgcttcgacgtgctttcagctacaatccccaggacgcggtggtgtttgaactgatgattggaacactggatctagacagactggcaaaacgcaaggatggcgcaaaactaatcaatgtgcgcagagctttggactactatctcgcacaccgagagcaggaactcattaaatcgggcgaacttcgagacggcaaaagcatgtcagcagaacttcgggcagacgagacgggtaactttttaggtcaccatcttgaagctccattctccgagatggaagaagagcaggctcaagagatggtacgaggggctgctgaagagatgggtctacagaaacggcctgcgcaaggcgtccagagtgaaagcagatag

SEQ ID NO: 18327 - protein, 164 aa, Muscodor strobelii
  misc_feature: SGI Peptide ID NO. 566142
  misc_feature (12)..(122): NCBI GI: 261356097 Blast Desc: conserved [Verticillium albo-atrum VaMs.102]
  misc_feature (7)..(158): NCBI GI: 256734420 Blast Desc: NECHADRAFT_90016 [Nectria haematococca mpVI 77-13-4]
  misc_feature (10)..(151): NCBI GI: 116207082 Blast Desc: CHGG_02834 [Chaetomium globosum CBS 148.51] gi|88183431|gb|EAQ90899.1| CHGG_02834 [Chaetomium globosum CBS 148.51]
  misc_feature (16)..(91): NCBI GI: 46108438 Blast Desc: FG01101.1 [Gibberella zeae PH-1]
  misc_feature (1)..(67): NCBI GI: 145614644 Blast Desc: MGG_04415 [Magnaporthe grisea 70-15] gi|145021559|gb|EDK05688.1| MGG_04415 [Magnaporthe grisea 70-15]
  misc_feature (20)..(160): NCBI GI: 171680147 Blast Desc: protein product [Podospora anserina] gi|170939700|emb|CAP64926.1| protein product [Podospora anserina]
  misc_feature: Useful for introducing or modulating the production of volatile compounds
MVHSIAVFRTTNGLEIDRYLARNILHSFRKLDDRAGLLLSYRALRRAFSYNPQDAVVFELMIGTLDLDRLAKRKDGAKLINVRRALDYYLAHREQELIKSGELRDGKSMSAELRADETGNFLGHHLEAPFSEMEEEQAQEMVRGAAEEMGLQKRPAQGVQSESR

SEQ ID NO: 18328 - DNA, 2792 bp, Muscodor strobelii; identical to SEQ ID NO: 18325
  misc_feature: SGI EST ID NO. CUFF.43111.0
  misc_feature: Variant of the nucleotide sequence at SEQ ID NO 18326

SEQ ID NO: 18329 - DNA, 2127 bp, Muscodor strobelii
  misc_feature: SGI cDNA ID NO. 566143
  misc_feature: Encodes the peptide sequence at SEQ ID NO 18330
atggcgtcatcggaacacttttgggaggcatatgaagaaaaagaacaccaacccgcttatgtctttgatccgacaggagaagcggaaaataacgcccgccctacgaagcggaggagagtgaccaagaaagtccaaaaacttgataatcatagcactcgtgatgctcctggtgtccaacgtctttttcggggagcagaaagcgaggaggctgctggactgaggctgcagctgttcgaggagtcatgggcccaggtagactctcgggtccaaagcatcctgagggatacaaatcaatctacactacaccaggtcacctcttttttacaggatgccccgagtcacacgcctatcggaaaagtgccctccgctttcattatcacgggaccaagcctagcctcacaagatctcctatttgagcagctgtcggacacgttacaggaaaaagcaagctcagctgtagtgcgcctgcgttcaagcgatgcttctaaccttaggactgtactgaaaaagatcattcgtgttatattgtcaagagattctggcgatgacgatgaggagctctcggtgagcaaagaaggccgcggatttttgaattatgacctcgaagcgcttcatgctcacttcgcaacaaatccgcaacgacagcttgcagtaattgcatttcaagacagcgaggcgttcgactctgggctattatcggatctgatatcgctcctcagctcatggcttggtcgaataccgtttgcctttcttttcggagttgccacatcaattgaattatttgaggcccggcttctcaagtcaacttgccagagcctttatggtgaccagttcgatgttgaacaggcagcatctattgtagacaagatcttcaaagcggccgtagctcactcccaagctccgattcgccttgggccgtctcttgttggtggcctcttggagcgtcaacgggagcaagtagcgagtatacctgacttcgtcaagtctctcaaatacgcatacatgtgtcacttttacgcaaatcccttaactattctactatcagataagcgttccaccaatatgaatgctcctgagcatatggagatgatacgctacctaccttcgtttcgcttcgaagttaccaacgcaatcaaaagaggcgataccaaaatggcacaactgcttctagaagatgatgactatctattagtccatttacagggatgtcttggaaagcagcatgagtggaccaccagcctgttacgggcattgaaggttctgatggcaagcaatgttctccagcttgggtttgctgatctttatatcgatgcttgcaccaacggcattgctctatcggagcaatacacgcagctgagcgattcgatcaaacgcatgcaaccatccgaaatagaagcatatttgatccgattaacagcagtaatggagaatagtgacccagctcttggtctcgactcctgggacgatgagatacctgagacagtcgcatcgctctcagaattgctggccaaccttcagaagctacgcagcgacgcggatgaaggtgggcatgtactccgtagtaaatacagcggtcaaagcaagatattgcgcaccactgttgtggctcagaaagtacagcttagtcaagatactgcagctttgactgacgaggacgatgcgtacactaggatcattcaccaactacttgatcacttggaggcattatcgcgccttgatagggtctacgccgtgccattcaatgagatatggctgcatgactcaaagacggcatataaagatgtttttgtcccacgtccaaggactacggctgaaagagcattgacacgatcacacgactatctagggtgttcctgctgcaagtccgaagatcagattgtgccgaatctacccacaaccgccattttatatcagctctaccttgagactggctcactgatcaacacggctgatctctggtcggcatactatgcaattgtaggcgaagacgctaaagacggactagatgagcgcgcagcgctggtattgttttaccgcgcattagctgaattgaaggcgatgggctttgtcaagcagagcaggaagaaagctgaccatatggccaaaatcgcttggagggggctttga

SEQ ID NO: 18330 - protein, 708 aa, Muscodor strobelii
  misc_feature: SGI Peptide ID NO. 566143
  misc_feature (12)..(705): NCBI GI: 85118496 Blast Desc: NCU02683 [Neurospora crassa OR74A] gi|28927265|gb|EAA36220.1| NCU02683 [Neurospora crassa OR74A] gi|38567199|emb|CAE76492.1| related to origin recognition complex
  misc_feature (1)..(705): NCBI GI: 116207070 Blast Desc: CHGG_02828 [Chaetomium globosum CBS 148.51] gi|88183425|gb|EAQ90893.1| CHGG_02828 [Chaetomium globosum CBS 148.51]
  misc_feature (1)..(705): NCBI GI: 46108660 Blast Desc: FG01212.1 [Gibberella zeae PH-1]
  misc_feature (9)..(705): NCBI GI: 256735083 Blast Desc: NECHADRAFT_30596 [Nectria haematococca mpVI 77-13-4]
  misc_feature (11)..(705): NCBI GI: 261356108 Blast Desc: origin recognition complex subunit [Verticillium albo-atrum VaMs.102]
  misc_feature (33)..(705): NCBI GI: 145614652 Blast Desc: MGG_04410 [Magnaporthe grisea 70-15] gi|145021564|gb|EDK05693.1| MGG_04410 [Magnaporthe grisea 70-15]
  misc_feature (10)..(708): NCBI GI: 156057427 Blast Desc: SS1G_04444 [Sclerotinia sclerotiorum 1980] gi|154702230|gb|EDO01969.1| SS1G_04444 [Sclerotinia sclerotiorum 1980]
  misc_feature (9)..(708): NCBI GI: 261201760 Blast Desc: origin recognition complex subunit 3 [Ajellomyces dermatitidis SLH14081] gi|239590191|gb|EEQ72772.1| origin recognition complex subunit 3 [Ajellomyces dermatitidis SLH14081]
  misc_feature (15)..(708): NCBI GI: 225679196 Blast Desc: conserved [Paracoccidioides brasiliensis Pb03]
  misc_feature (30)..(708): NCBI GI: 225558303 Blast Desc: origin recognition complex subunit [Ajellomyces capsulatus G186AR]
MASSEHFWEAYEEKEHQPAYVFDPTGEAENNARPTKRRRVTKKVQKLDNHSTRDAPGVQRLFRGAESEEAAGLRLQLFEESWAQVDSRVQSILRDTNQSTLHQVTSFLQDAPSHTPIGKVPSAFIITGPSLASQDLLFEQLSDTLQEKASSAVVRLRSSDASNLRTVLKKIIRVILSRDSGDDDEELSVSKEGRGFLNYDLEALHAHFATNPQRQLAVIAFQDSEAFDSGLLSDLISLLSSWLGRIPFAFLFGVATSIELFEARLLKSTCQSLYGDQFDVEQAASIVDKIFKAAVAHSQAPIRLGPSLVGGLLERQREQVASIPDFVKSLKYAYMCHFYANPLTILLSDKRSTNMNAPEHMEMIRYLPSFRFEVTNAIKRGDTKMAQLLLEDDDYLLVHLQGCLGKQHEWTTSLLRALKVLMASNVLQLGFADLYIDACTNGIALSEQYTQLSDSIKRMQPSEIEAYLIRLTAVMENSDPALGLDSWDDEIPETVASLSELLANLQKLRSDADEGGHVLRSKYSGQSKILRTTVVAQKVQLSQDTAALTDEDDAYTRIIHQLLDHLEALSRLDRVYAVPFNEIWLHDSKTAYKDVFVPRPRTTAERALTRSHDYLGCSCCKSEDQIVPNLPTTAILYQLYLETGSLINTADLWSAYYAIVGEDAKDGLDERAALVLFYRALAELKAMGFVKQSRKKADHMAKIAWRGL

SEQ ID NO: 18331 - DNA, 1542 bp, Muscodor strobelii
  misc_feature: SGI EST ID NO. CUFF.43117.0
  misc_feature: Variant of the nucleotide sequence at SEQ ID NO 18329
ttttcggagttgccacatcaattgaattatttgaggcccggcttctcaagtcaacttgccagagcctttatggtgaccagttcgatgttgaacaggcagcatctattgtagacaagatcttcaaagcggccgtagctcactcccaagctccgattcgccttgggccgtctcttgttggtggcctcttggagcgtcaacgggagcaagtagcgagtatacctgacttcgtcaagtctctcaaatacgcatacatgtgtcacttttacgcaaatcccttaactattctactatcagataagcgttccaccaatatgaatgctcctgagcatatggagatgatacgctacctaccttcgtttcgcttcgaagttaccaacgcaatcaaaagaggcgataccaaaatggcacaactgcttctagaagatgatgactatctattagtccatttacagggatgtcttggaaagcagcatgagtggaccaccagcctgttacgggcattgaaggttctgatggcaagcaatgttctccagcttgggtttgctgatctttatatcgatgcttgcaccaacggcattgctctatcggagcaatacacgcagctgagcgattcgatcaaacgcatgcaaccatccgaaatagaagcatatttgatccgattaacagcagtaatggagaatagtgacccagctcttggtctcgactcctgggacgatgagatacctgagacagtcgcatcgctctcagaattgctggccaaccttcagaagctacgcagcgacgcggatgaaggtgggcatgtactccgtagtaaatacagcggtcaaagcaagatattgcgcaccactgttgtggctcagaaagtacagcttagtcaagatactgcagctttgactgacgaggacgatgcgtacactaggatcattcaccaactacttgatcacttggaggcattatcgcgccttgatagggtctacgccgtgccattcaatgagatatggctgcatgactcaaagacggcatataaagatgtttttgtcccacgtccaaggactacggctgaaagagcattgacacgatcacacgactatctagggtgttcctgctgcaagtccgaagatcagattgtgccgaatctacccacaaccgccattttatatcagctctaccttgagactggctcactgatcaacacggctgatctctggtcggcatactatgcaattgtaggcgaagacgctaaagacggactagatgagcgcgcagcgctggtattgttttaccgcgcattagctgaattgaaggcgatgggctttgtcaagcagagcaggaagaaagctgaccatatggccaaaatcgcttggagggggctttgagcgagcaagattgcgtcacgataacacactctgaagattttatatggcagctggttgtacaggttgtgcagaaaatgagcaagcaaaggacacaccatgacacgactagactcttgtacgattcttgaagactccgattgtcgcgtctagagaaatgtatatattc

SEQ ID NO: 18332 - DNA, 411 bp, Muscodor strobelii
  misc_feature: SGI cDNA ID NO. 566144
  misc_feature: Encodes the peptide sequence at SEQ ID NO 18333
atgctgggcgagcgacgcgccgccagcaacgccgccttccgtcagaaactcaaccagatggctctaccactggctcctctggtccagctcacaaccggagaggtccatcccgcattcccaaacaccctcctcaacttctggttgttgaccgattcacaactggaggatctagcttctcactacgaccagaggacgccaaatcgctacacacagcactatccttgccctatcaattggtcctcagacatgtcccttgaggaaaagcgcaggaaaattggccgattcatcggcctccgaggctgcgaatcaccaatccgcgtccgtaccgaggcagagattctagaggacgcaagaagggcgcgtgcagcggaagaggatgagatgtggaagaggaagcttcggtggtactga

SEQ ID NO: 18333 - protein, 136 aa, Muscodor strobelii
  misc_feature: SGI Peptide ID NO. 566144
  misc_feature (2)..(136): NCBI GI: 145614650 Blast Desc: MGG_04411 [Magnaporthe grisea 70-15] gi|145021563|gb|EDK05692.1| MGG_04411 [Magnaporthe grisea 70-15]
  misc_feature (2)..(121): NCBI GI: 116207070 Blast Desc: CHGG_02828 [Chaetomium globosum CBS 148.51] gi|88183425|gb|EAQ90893.1| CHGG_02828 [Chaetomium globosum CBS 148.51]
  misc_feature (2)..(113): NCBI GI: 46108662 Blast Desc: FG01213.1 [Gibberella zeae PH-1]
  misc_feature (2)..(119): NCBI GI: 85118492 Blast Desc: NCU02682 [Neurospora crassa OR74A] gi|28927264|gb|EAA36219.1| NCU02682 [Neurospora crassa OR74A] gi|38567198|emb|CAE76491.1| [Neurospora crassa]
  misc_feature (10)..(105): NCBI GI: 171680159 Blast Desc: protein product [Podospora anserina] gi|170939706|emb|CAP64932.1| protein product [Podospora anserina]
  misc_feature (3)..(134): NCBI GI: 67522042 Blast Desc: AN1478.2 [Aspergillus nidulans FGSC A4] gi|40745452|gb|EAA64608.1| AN1478.2 [Aspergillus nidulans FGSC A4]
  misc_feature (3)..(134): NCBI GI: 259486795 Blast Desc: TPA: conserved [Aspergillus nidulans FGSC A4]
  misc_feature (7)..(133): NCBI GI: 169602743 Blast Desc: SNOG_04374 [Phaeosphaeria nodorum SN15] gi|160706245|gb|EAT88134.2| SNOG_04374 [Phaeosphaeria nodorum SN15]
  misc_feature (10)..(134): NCBI GI: 70983502 Blast Desc: conserved [Aspergillus fumigatus Af293] gi|66844904|gb|EAL85240.1| conserved [Aspergillus fumigatus Af293] gi|159123717|gb|EDP48836.1| conserved [Aspergillus A1163]
  misc_feature (3)..(103): NCBI GI: 119484232 Blast Desc: NFIA_097500 [Neosartorya fischeri NRRL 181] gi|119410175|gb|EAW20122.1| conserved [Neosartorya fischeri NRRL 181]
MLGERRAASNAAFRQKLNQMALPLAPLVQLTTGEVHPAFPNTLLNFWLLTDSQLEDLASHYDQRTPNRYTQHYPCPINWSSDMSLEEKRRKIGRFIGLRGCESPIRVRTEAEILEDARRARAAEEDEMWKRKLRWY

SEQ ID NO: 18334 - DNA, 1293 bp, Muscodor strobelii
  misc_feature: SGI cDNA ID NO. 566145
  misc_feature: Encodes the peptide sequence at SEQ ID NO 18335
atggcagaagagactgtggcaggcgcgccttttggcgcagttaccatacttcaaaatcagatcacgggtgcttggagctctggtcccaagacgacagacgaaccaacgcacaccgccatgactcgcctcaccgaccttccttgtgagatggtcattgccgtcttaaaacatctcggcggcctcgaggaccttttgtcatgccttctcacttgtcgccatatctacctttcatacaaggaagcgtcacccgtctccatacctcgtgcaatagtacaagagcagattggcctggccttacttccctacgccttcgcaatacaagaggccccccgtccatcgttgtccgttccagagctactcgtatccttgcgcgatgagccggatatcttgctggaccggctacgtgcctgccctctcacagctctcgcacaactcggccgtatgcacacattggttgagaaatatgcgaagagatttgcgtcagcagcttggcacagcatttggtctcccgttttgaagtacccttcggatcgtagaggcatgacattcgacctagaaaggtccttcttgtcttcggcaagcttctcgctttcgccgacagaaaaactccgcttctgccgcgcgttctacggcttcgagttatatatcatgctatttcgcataaccgaccgcccaaatcatcttgagcaaatcgacggatttttctctagacactcggcccaggaaattgaacaaatttcctgtatctatgaatttctcgatcgagaattctcacatgtactcttccaaaaggcggtcaactccaagatagactttctcacgatgattgataccggatggctgaataagagatggtttagtgaagcacagaatagcttaatctcacgaggccttcgtttcttcgaccaggccaaaagcacaacctcccttaaacactcactggcattattgcaaacagtcagcgatatgcaatggcagattcccatccaggacatacgcgagaacgcctacttcgtgggccgtggacgtgaccccacaacagacggccgtgatataggagacggcgacaaaggcccatctacgaccttgaattgcctctcaaaagaagaacctctcaatctgtggatcgagcataacaagattaaccggttatctgcctatgtcttctgggacttggctcaagtggagaaatacgagatggtcactttcttcaggcactcgttccgcttcgacatacaactaggccgtttagatattgagaagtggcttggagacacggacgaagattcatga

SEQ ID NO: 18335 - protein, 430 aa, Muscodor strobelii
  misc_feature: SGI Peptide ID NO. 566145
  misc_feature (35)..(255): NCBI GI: 238845280 Blast Desc: conserved [Microsporum canis CBS 113480]
  misc_feature (41)..(279): NCBI GI: 119182895 Blast Desc: [Coccidioides immitis RS]
  misc_feature (40)..(346): NCBI GI: 256726011 Blast Desc: [Nectria haematococca mpVI 77-13-4]
MAEETVAGAPFGAVTILQNQITGAWSSGPKTTDEPTHTAMTRLTDLPCEMVIAVLKHLGGLEDLLSCLLTCRHIYLSYKEASPVSIPRAIVQEQIGLALLPYAFAIQEAPRPSLSVPELLVSLRDEPDILLDRLRACPLTALAQLGRMHTLVEKYAKRFASAAWHSIWSPVLKYPSDRRGMTFDLERSFLSSASFSLSPTEKLRFCRAFYGFELYIMLFRITDRPNHLEQIDGFFSRHSAQEIEQISCIYEFLDREFSHVLFQKAVNSKIDFLTMIDTGWLNKRWFSEAQNSLISRGLRFFDQAKSTTSLKHSLALLQTVSDMQWQIPIQDIRENAYFVGRGRDPTTDGRDIGDGDKGPSTTLNCLSKEEPLNLWIEHNKINRLSAYVFWDLAQVEKYEMVTFFRHSFRFDIQLGRLDIEKWLGDTDEDS

SEQ ID NO: 18336 - DNA, 558 bp, Muscodor strobelii
  misc_feature: SGI cDNA ID NO. 566146
  misc_feature: Encodes the peptide sequence at SEQ ID NO 18337
atgcaaggagtcttcaacgccctaggcagcaatctgcctctcgccaatgtcgtccgcgacacttcgctgcaggtcggccatggccctgagactattgtgatcgccaacggttctcactcatgtccaaaatgctgcggacccgactcaatcaagatgtctactgagattgctacacgttcaggagtccgcatcgaacctcccgtctccggacttgatcccgtggccagtggcgacccaactgtcacgcctgtccctgaaggggcagtccttactgtcattaccgcaaccccgaccgcccctgacgggcctgaagtcgtcacttcgcggccgagcgtgtcacctacagcgcctgacggacccgaagtcgtaacaccacgatcgagtggtctcgctacggcccctgacggaccagaggttgtgacatcgcgaccgagcgttcttgccacagctcctggatggtcccgaagtcgtcactcctcgatcaagtgctctcgttacggctcccgacggacccgaagtcgtgacaccgaggtcgagcgcttttgctacggcccctga

SEQ ID NO: 18337 - protein, 185 aa, Muscodor strobelii
  misc_feature: SGI Peptide ID NO. 566146
MQGVFNALGSNLPLANVVRDTSLQVGHGPETIVIANGSHSCPKCCGPDSIKMSTEIATRSGVRIEPPVSGLDPVASGDPTVTPVPEGAVLTVITATPTAPDGPEVVTSRPSVSPTAPDGPEVVTPRSSGLATAPDGPEVVTSRPSVLATAPGWSRSRHSSIKCSRYGSRRTRSRDTEVERFCYGP

SEQ ID NO: 18338 - DNA, 771 bp, Muscodor strobelii
  misc_feature: SGI cDNA ID NO. 566147
  misc_feature: Encodes the peptide sequence at SEQ ID NO 18339
atggcagtcaaagttttattcctcctggcatctgtgttcggcgccttgaccggggccgctcccgtgtctcctcggcagtacgccgtcgatctaccgatcaaagtaatcgaaggatctacccctgacgtcgacggcctggaagtaacggaatcaagagagatcatctcattatttcacacacgacttggccaaaatggtacttccaaactcgtcgaagcagatgtagcagccgccgacgcattctggcacaaagcgctgtccaatgccacaagttacgtcggcggtgttgcacgtatccaagcatatgctccgaccagcgtattcaatgccacatcggtgctgatctggtttggaggtgccggtacaggctggccaaacgatttcctgaacacgagtccccagcattatctcgctttctccggtgccgggaccagcgatccgaaggcagcgattgagtcgactgagacgtggggagctggtccaactacatatttcaagggtattcccgccgagaaaccatcgtatatccctgccttgccagaattccctgttcagaattcgctggcgctggtcttgaaggacgggacagttttcgcgcattcgattactgctgcaaggaatctggaagatactgaaggcgtggagatataccaggctatttggatcccggataatgtgccagattatgttgttaaggggatgacggagcatatcacggtggagttcacgaactggttgaggtttgcttatcggaaagctactgggacgtga

SEQ ID NO: 18339 - protein, 256 aa, Muscodor strobelii
  misc_feature: SGI Peptide ID NO. 566147
  misc_feature (40)..(246): NCBI GI: 282864669 Blast Desc: SACTEDRAFT_4269 [Streptomyces sp. ACTE] gi|282560608|gb|EFB66155.1| SACTEDRAFT_4269 [Streptomyces sp. ACTE]
  misc_feature (28)..(249): NCBI GI: 256668892 Blast Desc: StAA4_17145 [Streptomyces sp. AA4]
  misc_feature (60)..(251): NCBI GI: 145608142 Blast Desc: [Magnaporthe grisea 70-15] gi|145015642|gb|EDK00132.1| [Magnaporthe grisea 70-15]
  misc_feature (47)..(251): NCBI GI: 115443442 Blast Desc: [Aspergillus terreus NIH2624] gi|114188397|gb|EAU30097.1| [Aspergillus terreus NIH2624]
MAVKVLFLLASVFGALTGAAPVSPRQYAVDLPIKVIEGSTPDVDGLEVTESREIISLFHTRLGQNGTSKLVEADVAAADAFWHKALSNATSYVGGVARIQAYAPTSVFNATSVLIWFGGAGTGWPNDFLNTSPQHYLAFSGAGTSDPKAAIESTETWGAGPTTYFKGIPAEKPSYIPALPEFPVQNSLALVLKDGTVFAHSITAARNLEDTEGVEIYQAIWIPDNVPDYVVKGMTEHITVEFTNWLRFAYRKATGT

SEQ ID NO: 18340 - DNA, 1253 bp, Muscodor strobelii
  misc_feature: SGI EST ID NO. CUFF.43146.0
  misc_feature: Variant of the nucleotide sequence at SEQ ID NO 18338
gaattggggagtctcatcactcgcgcgccaagaccaagatctgtattcccttcgcagtcttactcctatgtcctagtcccgtcaattatatgaataaacatttaacaaccttgctgccgaggttgcctagtcgctcaatgtagatgcgaatgcgaggagggcattgcccgatgcccagaaacgccgtatccggaaaatacgacctacctacaccgggaatgtataattcataagcatgagaacacgtggatgagctaaatcatcgaaagcgatataagaggcaggtcaccgtcctcatactattacacactgactcgagtttcaataaggcaattcccggcctaggatccagatggcagtcaaagttttattcctcctggcatctgtgttcggcgccttgaccggggccgctcccgtgtctcctcggcagtacgccgtcgatctaccgatcaaagtaatcgaaggatctacccctgacgtcgacggcctggaagtaacggaatcaagagagatcatctcattatttcacacacgacttggccaaaatggtacttccaaactcgtcgaagcagatgtagcagccgccgacgcattctggcacaaagcgctgtccaatgccacaagttacgtcggcggtgttgcacgtatccaagcatatgctccgaccagcgtattcaatgccacatcggtgctgatctggtttggaggtgccggtacaggctggccaaacgatttcctgaacacgagtccccagcattatctcgctttctccggtgccgggaccagcgatccgaaggcagcgattgagtcgactgagacgtggggagctggtccaactacatatttcaagggtattcccgccgagaaaccatcgtatatccctgccttgccagaattccctgttcagaattcgctggcgctggtcttgaaggacgggacagttttcgcgcattcgattactgctgcaaggaatctggaagatactgaaggcgtggagatataccaggctatttggatcccggataatgtgccagattatgttgttaaggggatgacggagcatatcacggtggagttcacgaactggttgaggtttgcttatcggaaagctactgggacgtgaattcagtaaatagattgtacgtcatagcactaaataacatgagattgagacctctggctacagttgagtagtccgacttcggttatgtaatacgtagatccccaatctattcgtgaaagtcggagtgaga

SEQ ID NO: 18341 - DNA, 1218 bp, Muscodor strobelii
  misc_feature: SGI cDNA ID NO. 566148
  misc_feature: Reduced expression when VOC is produced
  misc_feature: Encodes the peptide sequence at SEQ ID NO 18342
atgtcgataacgcccattataacgttcaaggcgggcaaatgtgacgtcgatacctcgtcaaagccttacaaggtcactgccgacccgcgccccggctacatctatctctactctgaagatggtgcatttctaccccatacctcccgagatctgatgtgccccgctaatgactgcgtagatctcgttcacttctgctggcgggagcgctctgcgaccctcaatgagcccgaagacgacctcgtaatgatccccacagatggccacttcgtcccgtacgaagccaaagatcaccccgcctccgccaagacaaatggccgaatcttcgccctcaagttctcctcctcatcacaacgttatcttttctggctgcagtccaaaccgcagggccggggcggagacccagcttggctcagcccacgggaccgcaagattggtgatatagtagatcagctcttgcaaggtgatgaagtagatgtcgcacgcgagctgcgctctgttagtaacagcgataatgacgactcccacggcggtgatggcgacgcgaccatggaagatgcccagggttctggagactcgaacgagcctcacggcggcagcggaggtgccggagccgatgctacgggtggcgatgtacgggaagagggcgaggaggcccgggaaggaggcgcagatggtgcacgagctgctgcttctggacctcccgatgctgccgccgcagtcagagatttcctcgcatcgctgaaaggaagtgcgcaagggggtgtgagccacggcgaaggcaaactatatcccctactttcagatctcctcaccccagataccaccgtacccgtagcccgcaccggaacagaagatgaaatcgatgccctcttaaactttctaccgcctgcggtcgtggtcctcgctcagcatggcaatcacgacgacaccacaacggaaccgacaccagccaccgttgaagcggccaaggccgcaatgagcctcgggcagaagaaggcgctggttgagaaggtgctccgaagtccgcaattccaccagagtctcgctagcttgacgatggctatccgggatggtggtctgcctaccgttgcagatgcactctcgatcaaagttcagaacggtggatatttacgaggcagccagatgcctcttggaggtggcgatgcggtggaggctttcgttgagggtgtaaaaaagacggtgcaagagaagaaatag

SEQ ID NO: 18342 - protein, 405 aa, Muscodor strobelii
  misc_feature: SGI Peptide ID NO. 566148
  misc_feature (61)..(124): Pfam Id: PF04683 Pfam Desc: Adhesion regulating molecule conserved region
  misc_feature (1)..(404): NCBI GI: 85111694 Blast Desc: NCU02634 [Neurospora crassa OR74A] gi|28925821|gb|EAA34823.1| conserved [Neurospora crassa OR74A]
  misc_feature (1)..(404): NCBI GI: 116182012 Blast Desc: CHGG_01634 [Chaetomium globosum CBS 148.51] gi|88185931|gb|EAQ93399.1| CHGG_01634 [Chaetomium globosum CBS 148.51]
  misc_feature (1)..(404): NCBI GI: 171687285 Blast Desc: protein product [Podospora anserina] gi|170943604|emb|CAP69256.1| protein product [Podospora anserina]
  misc_feature (1)..(405): NCBI GI: 256735175 Blast Desc: NECHADRAFT_98777 [Nectria haematococca mpVI 77-13-4]
  misc_feature (1)..(405): NCBI GI: 46108254 Blast Desc: FG01009.1 [Gibberella zeae PH-1]
  misc_feature (1)..(405): NCBI GI: 226285889 Blast Desc: conserved [Paracoccidioides brasiliensis Pb01]
  misc_feature (1)..(405): NCBI GI: 226291361 Blast Desc: conserved [Paracoccidioides brasiliensis Pb18]
  misc_feature (1)..(404): NCBI GI: 255936575 Blast Desc: Pc13g08890 [Penicillium chrysogenum Wisconsin 54-1255] gi|211583934|emb|CAP91958.1| Pc13g08890 [Penicillium chrysogenum Wisconsin 54-1255]
  misc_feature (1)..(404): NCBI GI: 154297416 Blast Desc: BC1G_12112 [Botryotinia fuckeliana B05.10] gi|150858617|gb|EDN33809.1| BC1G_12112 [Botryotinia fuckeliana B05.10]
  misc_feature (1)..(403): NCBI GI: 121701779 Blast Desc: conserved [Aspergillus clavatus NRRL 1] gi|119397297|gb|EAW07728.1| conserved [Aspergillus clavatus NRRL 1]
  misc_feature: Useful for introducing or modulating the production of volatile compounds
MSITPIITFKAGKCDVDTSSKPYKVTADPRPGYIYLYSEDGAFLPHTSRDLMCPANDCVDLVHFCWRERSATLNEPEDDLVMIPTDGHFVPYEAKDHPASAKTNGRIFALKFSSSSQRYLFWLQSKPQGRGGDPAWLSPRDRKIGDIVDQLLQGDEVDVARELRSVSNSDNDDSHGGDGDATMEDAQGSGDSNEPHGGSGGAGADATGGDVREEGEEAREGGADGARAAASGPPDAAAAVRDFLASLKGSAQGGVSHGEGKLYPLLSDLLTPDTTVPVARTGTEDEIDALLNFLPPAVVVLAQHGNHDDTTTEPTPATVEAAKAAMSLGQKKALVEKVLRSPQFHQSLASLTMAIRDGGLPTVADALSIKVQNGGYLRGSQMPLGGGDAVEAFVEGVKKTVQEKK

SEQ ID NO: 18343 - DNA, 1976 bp, Muscodor strobelii
  misc_feature: SGI EST ID NO. CUFF.43216.0
  misc_feature: Variant of the nucleotide sequence at SEQ ID NO 18341
gacagaccttgggtttcacattcccgtcactcaggtcccgtctggttacgtaggtacctaaggtagctcgcgctgccccacgttagagctcttccttacccggtacatgtcgtttcagcgacgaggcatagaaggcgctagtacatgacagcactgacgaagctcacctgcagccttgtcgcctacatctctaagctctgaagctatcaaacaactcaggtcttccacttcattacctcccatctccctgcgagctctacaatcacgcccaaactccggcgccttgacactctgcttctcccactcacgctcttgagttgcaacatcccctcacatctgccgaaacatgtcgataacgcccattataacgttcaaggcgggcaaatgtgacgtcgatacctcgtcaaagccttacaaggtcactgccgacccgcgccccggctacatctatctctactctgaagatgatctcgttcacttctgctggcgggagcgctctgcgaccctcaatgagcccgaagacgacctcgtaatgatccccacagatggccacttcgtcccgtacgaagccaaagatcaccccgcctccgccaagacaaatggccgaatcttcgccctcaagttctcctcctcatcacaacgttatcttttctggctgcagtccaaaccgcagggccggggcggagacccagcttggctcagcccacgggaccgcaagattggtgatatagtagatcagctcttgcaaggtgatgaagtagatgtcgcacgcgagctgcgctctgttagtaacagcgataatgacgactcccacggcggtgatggcgacgcgaccatggaagatgcccagggttctggagactcgaacgagcctcacggcggcagcggaggtgccggagccgatgctacgggtggcgatgtacgggaagagggcgaggaggcccgggaaggaggcgcagatggtgcacgagcgtaggtcatcatccattcacgaattcgcggtatttccagaaagagcaagagacgaagcgagactgcgagcatgactttgattacgtaaaaaggttgaggagagaggccaatgcgtctcttctgtactatcatgtactactagagatgatgctcaatgagaaccgctagattctattatgctctgctttcacttaccaagctgctattctgcttggaccacagtgctaacttactgttagtgctgcttctggacctcccgatgctgccgccgcagtcagagatttcctcgcatcgctgaaaggaagtgcgcaagggggtgtgagccacggcgaaggcaaactatatcccctactttcagatctcctcaccccagataccaccgtacccgtagcccgcaccggaacagaagatgaaatcgatgccctcttaaactttctaccgcctgcggtcgtggtcctcgctcagcatggcaatcacgacgacaccacaacggaaccgacaccagccaccgttgaagcggccaaggccgcaatgagcctcgggcagaagaaggcgctggttgagaaggtgctccgaagtccgcaattccaccagagtctcgctagcttgacgatggctatccgggatggtggtctgcctaccgttgcagatgcactctcgatcaaagttcagaacggtggatatttacgaggcagccagatgcctcttggaggtggcgatgcggtggaggctttcgttgagggtgtaaaaaagacggtgcaagagaagaaatagcaaaacaaggatttaggcaccatgtcatattaatcgccattacctatcggaattgcgaatgcgacaaggcattagctgaataatctgctagtatttgagattaatgatgcatgaagtttcaatgtggtgaggatgtgcagatgcacagtaattgtcagcccagtattccgctagttccgccatgaatcctatcttggcatcattatcaatgctgtctggattgatctcag

SEQ ID NO: 18344 - DNA, 1161 bp, Muscodor strobelii
  misc_feature: SGI cDNA ID NO. 566149
  misc_feature: Encodes the peptide sequence at SEQ ID NO 18345
atgtcgataacgcccattataacgttcaaggcgggcaaatgtgacgtcgatacctcgtcaaagccttacaaggtcactgccgacccgcgccccggctacatctatctctactctgaagatgatctcgttcacttctgctggcgggagcgctctgcgaccctcaatgagcccgaagacgacctcgtaatgatccccacagatggccacttcgtcccgtacgaagccaaagatcaccccgcctccgccaagacaaatggccgaatcttcgccctcaagttctcctcctcatcacaacgttatcttttctggctgcagtccaaaccgcagggccggggcggagacccagcttggctcagcccacgggaccgcaagattggtgatatagtagatcagctcttgcaaggtgatgaagtagatgtcgcacgcgagctgcgctctgttagtaacagcgataatgacgactcccacggcggtgatggcgacgcgaccatggaagatgcccagggttctggagactcgaacgagcctcacggcggcagcggaggtgccggagccgatgctacgggtggcgatgtacgggaagagggcgaggaggcccgggaaggaggcgcagatggtgcacgagctgctgcttctggacctcccgatgctgccgccgcagtcagagatttcctcgcatcgctgaaaggaagtgcgcaagggggtgtgagccacggcgaaggcaaactatatcccctactttcagatctcctcaccccagataccaccgtacccgtagcccgcaccggaacagaagatgaaatcgatgccctcttaaactttctaccgcctgcggtcgtggtcctcgctcagcatggcaatcacgacgacaccacaacggaaccgacaccagccaccgttgaagcggccaaggccgcaatgagcctcgggcagaagaaggcgctggttgagaaggtgctccgaagtccgcaattccaccagagtctcgctagcttgacgatggctatccgggatggtggtctgcctaccgttgcagatgcactctcgatcaaagttcagaacggtggatatttacgaggcagccagatgcctcttggaggtggcgatgcggtggaggctttcgttgagggtgtaaaaaagacggtgcaagagaagaaatag

SEQ ID NO: 18345 - protein, 386 aa, Muscodor strobelii
  misc_feature: SGI Peptide ID NO. 566149
  misc_feature (4)..(105): Pfam Id: PF04683 Pfam Desc: Adhesion regulating molecule conserved region
  misc_feature (1)..(385): NCBI GI: 85111694 Blast Desc: NCU02634 [Neurospora crassa OR74A] gi|28925821|gb|EAA34823.1| conserved [Neurospora crassa OR74A]
  misc_feature (1)..(385): NCBI GI: 116182012 Blast Desc: CHGG_01634 [Chaetomium globosum CBS 148.51] gi|88185931|gb|EAQ93399.1| CHGG_01634 [Chaetomium globosum CBS 148.51]
  misc_feature (1)..(385): NCBI GI: 171687285 Blast Desc: protein product [Podospora anserina] gi|170943604|emb|CAP69256.1| protein product [Podospora anserina]
  misc_feature (1)..(386): NCBI GI: 256735175 Blast Desc: NECHADRAFT_98777 [Nectria haematococca mpVI 77-13-4]
  misc_feature (1)..(386): NCBI GI: 46108254 Blast Desc: FG01009.1 [Gibberella zeae PH-1]
  misc_feature (1)..(386): NCBI GI: 226285889 Blast Desc: conserved [Paracoccidioides brasiliensis Pb01]
  misc_feature (1)..(386): NCBI GI: 226291361 Blast Desc: conserved [Paracoccidioides brasiliensis Pb18]
  misc_feature (1)..(385): NCBI GI: 255936575 Blast Desc: Pc13g08890 [Penicillium chrysogenum Wisconsin 54-1255] gi|211583934|emb|CAP91958.1| Pc13g08890 [Penicillium chrysogenum Wisconsin 54-1255]
  misc_feature (1)..(385): NCBI GI: 154297416 Blast Desc: BC1G_12112 [Botryotinia fuckeliana B05.10] gi|150858617|gb|EDN33809.1| BC1G_12112 [Botryotinia fuckeliana B05.10]
  misc_feature (1)..(384): NCBI GI: 121701779 Blast Desc: conserved [Aspergillus clavatus NRRL 1] gi|119397297|gb|EAW07728.1| conserved [Aspergillus clavatus NRRL 1]
MSITPIITFKAGKCDVDTSSKPYKVTADPRPGYIYLYSEDDLVHFCWRERSATLNEPEDDLVMIPTDGHFVPYEAKDHPASAKTNGRIFALKFSSSSQRYLFWLQSKPQGRGGDPAWLSPRDRKIGDIVDQLLQGDEVDVARELRSVSNSDNDDSHGGDGDATMEDAQGSGDSNEPHGGSGGAGADATGGDVREEGEEAREGGADGARAAASGPPDAAAAVRDFLASLKGSAQGGVSHGEGKLYPLLSDLLTPDTTVPVARTGTEDEIDALLNFLPPAVVVLAQHGNHDDTTTEPTPATVEAAKAAMSLGQKKALVEKVLRSPQFHQSLASLTMAIRDGGLPTVADALSIKVQNGGYLRGSQMPLGGGDAVEAFVEGVKKTVQEKK

SEQ ID NO: 18346 - DNA, 1976 bp, Muscodor strobelii; identical to SEQ ID NO: 18343
  misc_feature: SGI EST ID NO. CUFF.43216.0
  misc_feature: Variant of the nucleotide sequence at SEQ ID NO 18344

SEQ ID NO: 18347 - DNA, 603 bp, Muscodor strobelii
  misc_feature: SGI cDNA ID NO. 566150
  misc_feature: Reduced expression when VOC is produced
  misc_feature: Encodes the peptide sequence at SEQ ID NO 18348
atgtcgcagccgagcaccagcaagaagttcggaaagtcgacccgggaggtccctcacccgtcccaggcggcccagaagtggtaccctgccaccgacgaggccaagcccaagaagacccgcaaggctcttcgtccctgggctccccgcgagtctctcgtccccggcagcgttctcatcctcctcgctggccgattccgcggcaagcgtgtcgtgctcctcaagaccctcgaccagggtgtcctcctagtcaccggccccttcaaggtcaacggtgtccccctccgccgtgtcaacgcccgctacgtcattgccacctctatgaccattgacctcaaaggtctcgacgagaagaagatcagcgagatcgcacagcccacctacttcgcccgtgacaccaccaaggacaaggcaagcgaggaggcattctttaagcagggagagaagccacagaagaaggagatcagcagcagccgggcagcagaccagaaggccgtcgacaaggccttgatcgccaacatcaagaaggtagatggcctcgccagctacctcgccagctctttcagcttgcgcaagggcgacaagccccacgagatgaagtggtaa

SEQ ID NO: 18348 - protein, 200 aa, Muscodor strobelii
  misc_feature: SGI Peptide ID NO. 566150
  misc_feature (89)..(200): Pfam Id: PF01159 Pfam Desc: Ribosomal protein L6e
  misc_feature (1)..(200): NCBI GI: 116207030 Blast Desc: CHGG_02808 [Chaetomium globosum CBS 148.51] gi|88183405|gb|EAQ90873.1| CHGG_02808 [Chaetomium globosum CBS 148.51]
  misc_feature (1)..(200): NCBI GI: 171680197 Blast Desc: protein product [Podospora anserina] gi|170939725|emb|CAP64951.1| protein product [Podospora anserina]
  misc_feature (7)..(200): NCBI GI: 164427787 Blast Desc: NCU02707 [Neurospora crassa OR74A] gi|157071885|gb|EAA36244.2| NCU02707 [Neurospora crassa OR74A]
  misc_feature (1)..(200): NCBI GI: 256735171 Blast Desc: [Nectria haematococca mpVI 77-13-4]
  misc_feature (7)..(200): NCBI GI: 38567212 Blast Desc: ribosomal protein L6.e.B, cytosolic [Neurospora crassa]
  misc_feature (1)..(200): NCBI GI: 46108268 Blast Desc: FG01016.1 [Gibberella zeae PH-1]
  misc_feature (5)..(200): NCBI GI: 261356287 Blast Desc: 60S ribosomal protein L6-2 [Verticillium albo-atrum VaMs.102]
  misc_feature (6)..(200): NCBI GI: 39944924 Blast Desc: MGG_04444 [Magnaporthe grisea 70-15] gi|145021533|gb|EDK05662.1| MGG_04444 [Magnaporthe grisea 70-15]
  misc_feature (5)..(200): NCBI GI: 242768393 Blast Desc: 60S ribosomal protein L6 [Talaromyces stipitatus ATCC 10500] gi|218724756|gb|EED24173.1| 60S ribosomal protein L6 [Talaromyces stipitatus ATCC 10500]
  misc_feature (7)..(200): NCBI GI: 119184285 Blast Desc: conserved [Coccidioides immitis RS] gi|240109829|gb|EER27998.1| 60S ribosomal protein L6-B, [Coccidioides posadasii C735 delta SOWgp]
  misc_feature: Useful for introducing or modulating the production of volatile compounds
MSQPSTSKKFGKSTREVPHPSQAAQKWYPATDEAKPKKTRKALRPWAPRESLVPGSVLILLAGRFRGKRVVLLKTLDQGVLLVTGPFKVNGVPLRRVNARYVIATSMTIDLKGLDEKKISEIAQPTYFARDTTKDKASEEAFFKQGEKPQKKEISSSRAADQKAVDKALIANIKKVDGLASYLASSFSLRKGDKPHEMKW

SEQ ID NO: 18349 - DNA, 3245 bp, Muscodor strobelii
  misc_feature: SGI EST ID NO. CUFF.43579.0
  misc_feature: Variant of the nucleotide sequence at SEQ ID NO 18347
ccaccaccgattttgctgtggcaccacccacagggcttcgcctaaacccacaatctctaattgatctttttgcgcagggtcacttttaacatctgcacgactactcgacatcacccaacaacccaggagtcgccaattacctcccacaacaaccactcccgaccaacgtcacgatgtcgcagccgagcaccagcaagaagttcggaaagtcgacccgggaggtccctcacccgtcccaggcggcccagaagtggtaccctgccaccgacgaggccaagcccaagaagacccgcaaggctcttcgtccctgggctccccgcgagtctctcgtccccggcagcgttctcatcctcctcgctggccgattccgcggcaagcgtgtcgtgctcctcaagaccctcgaccagggtgtcctcctagtcaccggccccttcaaggtcaacggtgtccccctccgccgtgtcaacgcccgctacgtcattgccacctctatgaccattgacctcaaaggtctcgacgagaagaagatcagcgagatcgcacagcccacctacttcgcccgtgacaccaccaaggacaaggcaagcgaggaggcattctttaagcagggagagaagccacagaagaaggagatcagcagcagccgggcagcagaccagaaggccgtcgacaaggccttgatcgccaacatcaagaaggtagatggcctcgccagctacctcgccagctctttcagcttgcgcaagggcgacaagccccacgagatgaagtggtaaacagaaaaccaccgccaagtaacgacgatgggacacttttttttgcgggctcggtcgggttatgatgatgtctagagaggaaaactcactacacctaagagattgcggatggcgaatcgcggattgcggaaactaggctggtttctgccacttgcatctggacgttgaggcatcggtcacattgattctggcgtctgtaattgaggtttaagtcaataaaaaaaaatgactaaaggcaaaacggtcacaatgtttttataaattcccagacaagtgtgctctcgcatccaggcatcatttctcgtcatggtgttaaggaatggcatggagtttggtcaatagactctgctgatttctcttctctagacttgagcaatcgcacgaatcactgcgcgatgcaatgcaatcttgccgctcttgctatgacgtctttagttgtaacacacatcaaccgaccatgcagaacactaattcaccgaggcacaatgcgccaaaactagcgaaacagaccaatccgactctactatcagcttacacttggcgctcagcccaagactggatcattcctgccggcgtcgcatcgtagtgcttgagcgcaaccttccccgtggcctcgtctaggtaagtatttgcctgaacaaacaccttgcgaggctgcttcttcgcgaggacctcgtcgcggacctttttgccccagaactcggaatcgacgttcgtcatatcgccaaagaacttagtacccgcctcaacatcggcagttgatttaaagatgtgtagcttctggaggtattcgccaacagccttgcgtcccaccgtagggatcttggatcgatcaagattgatcacggcgccgctcaggtcgtctccctcgtactcgagtttacagaagtcatcgccagcctggaggaaacactgcaggatagagaaacgcgcctgcgaatgtgcttggccccattttcggctcttcggatcccacatttctaacgaaacaagaccagctctcgccatgctaagatatgaagcgtagagaacatcgccagcttcgccgtctatgtcgaaagacccgtcgccaaagccgaaaatcttcagaaccggaaattcacagctgaggaacatagcgacaagctctgcacggcactcttcgtaagcacctgctacactgccaaaaacggatccccatgtttggccgggcttataccaggtcttgacgggctccttcgtcaatggtgagatgggcgggttctccttgtcgaaattgaacactccgggcgacgtttcctgcaacagctttccacagccatgaccagtgagttcgtgtaagccgacttgaacctcaaatgcgccatcgcgatacttctgatagacttccagatctttctcggcaatgaaagggatcttttcgttcggtgcctttgcactcaaaacatttccgagagaaacattcttgaaaccttcagtttgtcggatatcgtcgtagttggggatgttgatgcccgctgggatgcctgatccggcaaacgtgagtacttctaatgaagtgaaatcaggagataagaacttgtctttctcaaaatccttgttccatggaagaagggggatgagcgacggagcggcttcaacgagagccccgaaagcccgagtgcgttccatgttgaccacagcagcgaatccttcccactcccccctaataccagcagggtctctgtacgtctcaatgaagccaatgtttgactcaacgaagggccccttgtcgcgaatccagaatctttggctatctttgaaggcgagcagcgaaccattggaaaatgacttggaatacgcctcgtacattttctgctggttatcgttgtcgccgttttctgcagccttctttgtgttagcagcgatagcagacatttccttcgaatagtccccgtaaaacaatctgatagtctttccactcaaggtgccctcgttaatcttaaattcggtttgctttccgatgtcaccgccttcgctaggaacagcgctggcagccgacgcaatgagtatctgaaaagtgttggcgtctgatttgacaagtcgagtgttttcggggaggagtcccttcgtctccatccatgccgagactgcatcgatctcaggtttcgtgatatcaggtgaatctgggtagtaggtagtcatgtgaccctggtcagggtaaccaagatgcatgagaccgggcttgtcagccgagaatattgcacctttcgttgcgtcgtagaagccctgtgcctcgggagaggttgcggcgagtgctgcgaatgctgactctgcacatctgggaatgaattttgcatcaccgaaactcttgtagttaccattgttaccgaggaattgtgcagcatagttaaagaagtgatcgagatcctcatcggagatcttagacttcgattgcaggctcttccaatccccacctgaggatttatggagggcgagaatgaaatcaaa

SEQ ID NO: 18350 - DNA, 2124 bp, Muscodor strobelii
  misc_feature: SGI cDNA ID NO. 566151
  misc_feature: Encodes the peptide sequence at SEQ ID NO 18351
atggatgcacaggatctcaagcactatcttgccgatgcccctccttcggtggtacgattggagattgagaagcactttgaacctctgaatgacaagcagaaacgatatgctcatttcattagcagagcctcttttgaaggcacaagagtcgtattaagacagatttctcccgaatccgagccaatttttgatttcattctcgccctccataaatcctcaggtggggattggaagagcctgcaatcgaagtctaagatctccgatgaggatctcgatcacttctttaactatgctgcacaattcctcggtaacaatggtaactacaagagtttcggtgatgcaaaattcattcccagatgtgcagagtcagcattcgcagcactcgccgcaacctctcccgaggcacagggcttctacgacgcaacgaaaggtgcaatattctcggctgacaagcccggtctcatgcatcttggttaccctgaccagggtcacatgactacctactacccagattcacctgatatcacgaaacctgagatcgatgcagtctcggcatggatggagacgaagggactcctccccgaaaacactcgacttgtcaaatcagacgccaacacttttcagatactcattgcgtcggctgccagcgctgttcctagcgaaggcggtgacatcggaaagcaaaccgaatttaagattaacgagggcaccttgagtggaaagactatcagattgttttacggggactattcgaaggaaatgtctgctatcgctgctaacacaaagaaggctgcagaaaacggcgacaacgataaccagcagaaaatgtacgaggcgtattccaagtcattttccaatggttcgctgctcgccttcaaagatagccaaagattctggattcgcgacaaggggcccttcgttgagtcaaacattggcttcattgagacgtacagagaccctgctggtattaggggggagtgggaaggattcgctgctgtggtcaacatggaacgcactcgggctttcggggctctcgttgaagccgctccgtcgctcatcccccttcttccatggaacaaggattttgagaaagacaagttcttatctcctgatttcacttcattagaagtactcacgtttgccggatcaggcatcccagcgggcatcaacatccccaactacgacgatatccgacaaactgaaggtttcaagaatgtttctctcggaaatgttttgagtgcaaaggcaccgaacgaaaagatccctttcattgccgagaaagatctggaagtctatcagaagtatcgcgatggcgcatttgaggttcaagtcggcttacacgaactcactggtcatggctgtggaaagctgttgcaggaaacgtcgcccggagtgttcaatttcgacaaggagaacccgcccatctcaccattgacgaaggagcccgtcaagacctggtataagcccggccaaacatggggatccgtttttggcagtgtagcaggtgcttacgaagagtgccgtgcagagcttgtcgctatgttcctcagctgtgaatttccggttctgaagattttcggctttggcgacgggtctttcgacatagacggcgaagctggcgatgttctctacgcttcatatcttagcatggcgagagctggtcttgtttcgttagaaatgtgggatccgaagagccgaaaatggggccaagcacattcgcaggcgcgtttctctatcctgcagtgtttcctccaggctggcgatgacttctgtaaactcgagtacgagggagacgacctgagcggcgccgtgatcaatcttgatcgatccaagatccctacggtgggacgcaaggctgttggcgaatacctccagaagctacacatctttaaatcaactgccgatgttgaggcgggtactaagttctttggcgatatgacgaacgtcgattccgagttctggggcaaaaaggtccgcgacgaggtcctcgcgaagaagcagcctcgcaaggtgtttgttcaggcaaatacttacctagacgaggccacggggaaggttgcgctcaagcactacgatgcgacgccggcaggaatgatccagtcttgggctgagcgccaagtgtaa

SEQ ID NO: 18351 - protein, 707 aa, Muscodor strobelii
  misc_feature: SGI Peptide ID NO. 566151
  misc_feature (136)..(707): Pfam Id: PF03571 Pfam Desc: Peptidase family M49
  misc_feature (156)..(707): Pfam Id: PF03571 Pfam Desc: Peptidase family M49
  misc_feature (1)..(706): NCBI GI: 164427792 Blast Desc: NCU02701 [Neurospora crassa OR74A] gi|38567218|emb|CAE76510.1| dipeptidylpeptidase III [Neurospora crassa] gi|157071887|gb|EAA36238.2| NCU02701 [Neurospora crassa
  misc_feature (1)..(707): NCBI GI: 256734453 Blast Desc: [Nectria haematococca mpVI 77-13-4]
  misc_feature (1)..(707): NCBI GI: 46108270 Blast Desc: FG01017.1 [Gibberella zeae PH-1]
  misc_feature (1)..(706): NCBI GI: 171680187 Blast Desc: protein product [Podospora anserina] gi|170939720|emb|CAP64946.1| protein product [Podospora anserina]
  misc_feature (1)..(706): NCBI GI: 261356286 Blast Desc: dipeptidyl-peptidase [Verticillium albo-atrum VaMs.102]
  misc_feature (1)..(707): NCBI GI: 39944926 Blast Desc: MGG_04445 [Magnaporthe grisea 70-15] gi|145021532|gb|EDK05661.1| MGG_04445 [Magnaporthe grisea 70-15]
  misc_feature (1)..(707): NCBI GI: 116207040 Blast Desc: CHGG_02813 [Chaetomium globosum CBS 148.51] gi|88183410|gb|EAQ90878.1| CHGG_02813 [Chaetomium globosum CBS 148.51]
  misc_feature (1)..(707): NCBI GI: 156062080 Blast Desc: SS1G_01155 [Sclerotinia sclerotiorum 1980] gi|154696492|gb|EDN96230.1| SS1G_01155 [Sclerotinia sclerotiorum 1980]
  misc_feature (1)..(704): NCBI GI: 242765819 Blast Desc: dipeptidyl peptidase, [Talaromyces stipitatus ATCC 10500] gi|218724247|gb|EED23664.1| dipeptidyl peptidase, [Talaromyces stipitatus ATCC 10500]
  misc_feature (1)..(705): NCBI GI: 212528656 Blast Desc: dipeptidyl peptidase, [Penicillium marneffei ATCC 18224] gi|210073883|gb|EEA27970.1| dipeptidyl peptidase, [Penicillium marneffei ATCC 18224]
  misc_feature (6)..(707): SWISSPROT Homolog: EC 3.4.14.4 Dipeptidyl-peptidase III
MDAQDLKHYLADAPPSVVRLEIEKHFEPLNDKQKRYAHFISRASFEGTRVVLRQISPESEPIFDFILALHKSSGGDWKSLQSKSKISDEDLDHFFNYAAQFLGNNGNYKSFGDAKFIPRCAESAFAALAATSPEAQGFYDATKGAIFSADKPGLMHLGYPDQGHMTTYYPDSPDITKPEIDAVSAWMETKGLLPENTRLVKSDANTFQILIASAASAVPSEGGDIGKQTEFKINEGTLSGKTIRLFYGDYSKEMSAIAANTKKAAENGDNDNQQKMYEAYSKSFSNGSLLAFKDSQRFWIRDKGPFVESNIGFIETYRDPAGIRGEWEGFAAVVNMERTRAFGALVEAAPSLIPLLPWNKDFEKDKFLSPDFTSLEVLTFAGSGIPAGINIPNYDDIRQTEGFKNVSLGNVLSAKAPNEKIPFIAEKDLEVYQKYRDGAFEVQVGLHELTGHGCGKLLQETSPGVFNFDKENPPISPLTKEPVKTWYKPGQTWGSVFGSVAGAYEECRAELVAMFLSCEFPVLKIFGFGDGSFDIDGEAGDVLYASYLSMARAGLVSLEMWDPKSRKWGQAHSQARFSILQCFLQAGDDFCKLEYEGDDLSGAVINLDRSKIPTVGRKAVGEYLQKLHIFKSTADVEAGTKFFGDMTNVDSEFWGKKVRDEVLAKKQPRKVFVQANTYLDEATGKVALKHYDATPAGMIQSWAERQV

SEQ ID NO: 18352 - DNA, 3926 bp, Muscodor strobelii
  misc_feature: SGI EST ID NO. CUFF.43580.1
  misc_feature: Variant of the nucleotide sequence at SEQ ID NO 18350
gacaaacgttcaaatcagctcgattccgcgaactcgcacgacatctgcctccagcacgttcgccaatctacctcagctttttgaggttacattctaccgccatggatgcacaggatctcaagcactatcttgccgatgcccctccttcggtggtacgattggagattgagaagcactttgaacctctgaatgacaagcagaaacgatatgctcatttcattagcagagcctcttttgaaggcacaagagtcgtattaagacagatttctcccgaatccgagccaatttttgatttcattctcgccctccataaatcctcaggtggggattggaagagcctgcaatcgaagtctaagatctccgatgaggatctcgatcacttctttaactatgctgcacaattcctcggtaacaatggtaactacaagagtttcggtgatgcaaaattcattcccagatgtgcagagtcagcattcgcagcactcgccgcaacctctcccgaggcacagggcttctacgacgcaacgaaaggtgcaatattctcggctgacaagcccggtctcatgcatcttggttaccctgaccagggtcacatgactacctactacccagattcacctgatatcacgaaacctgagatcgatgcagtctcggcatggatggagacgaagggactcctccccgaaaacactcgacttgtcaaatcagacgccaacacttttcagatactcattgcgtcggctgccagcgctgttcctagcgaaggcggtgacatcggaaagcaaaccgaatttaagattaacgagggcaccttgagtggaaagactatcagattgttttacggggactattcgaaggaaatgtctgctatcgctgctaacacaaagaaggctgcagaaaacggcgacaacgataaccagcagaaaatgtacgaggcgtattccaagtcattttccaatggttcgctgctcgccttcaaagatagccaaagattctggattcgcgacaaggggcccttcgttgagtcaaacattggcttcattgagacgtacagagaccctgctggtattaggggggagtgggaaggattcgctgctgtggtcaacatggaacgcactcgggctttcggggctctcgttgaagccgctccgtcgctcatcccccttcttccatggaacaaggattttgagaaagacaagttcttatctcctgatttcacttcattagaagtactcacgtttgccggatcaggcatcccagcgggcatcaacatccccaactacgacgatatccgacaaactgaaggtttcaagaatgtttctctcggaaatgttttgagtgcaaaggcaccgaacgaaaagatccctttcattgccgagaaagatctggaagtctatcagaagtatcgcgatggcgcatttgaggttcaagtcggcttacacgaactcactggtcatggctgtggaaagctgttgcaggaaacgtcgcccggagtgttcaatttcgacaaggagaacccgcccatctcaccattgacgaaggagcccgtcaagacctggtataagcccggccaaacatggggatccgtttttggcagtgtagcaggtgcttacgaagagtgccgtgcagagcttgtcgctatgttcctcagctgtgaatttccggttctgaagattttcggctttggcgacgggtctttcgacatagacggcgaagctggcgatgttctctacgcttcatatcttagcatggcgagagctggtcttgtttcgttagaaatgtgggatccgaagagccgaaaatggggccaagcacattcgcaggcgcgtttctctatcctgcagtgtttcctccaggctggcgatgacttctgtaaactcgagtacgagggagacgacctgagcggcgccgtgatcaatcttgatcgatccaagatccctacggtgggacgcaaggctgttggcgaatacctccagaagctacacatctttaaatcaactgccgatgttgaggcgggtactaagttctttggcgatatgacgaacgtcgattccgagttctggggcaaaaaggtccgcgacgaggtcctcgcgaagaagcagcctcgcaaggtgtttgttcaggcaaatacttacctagacgaggccacggggaaggttgcgctcaagcactacgatgcgacgccggcaggaatgatccagtcttgggctgagcgccaagtgtaagctgatagtagagtcggattggtctgtttcgctagttttggcgcattgtgcctcggtgaattagtgttctgcatggtcggttgatgtgtgttacaactaaagacgtcatagcaagagcggcaagattgcattgcatcgcgcagtgattcgtgcgattgctcaagtctagagaagagaaatcagcagagtctattgaccaaactccatgccattccttaacaccatgacgagaaatgatgcctggatgcgagagcacacttgtctgggaatttataaaaacattgtgaccgttttgcctttagtcatttttttttattgacttaaacctcaattacagacgccagaatcaatgtgaccgatgcctcaacgtccagatgcaagtggcagaaaccagcctagtttccgcaatccgcgattcgccatccgcaatctcttaggtgtagtgagttttcctctctagacatcatcataacccgaccgagcccgcaaaaaaaagtgtcccatcgtcgttacttggcggtggttttctgtttaccacttcatctcgtggggcttgtcgcccttgcgcaagctgaaagagctggcgaggtagctggcgaggccatctaccttcttgatgttggcgatcaaggccttgtcgacggccttctggtctgctgcccggctgctgctgatctccttcttctattgtcgcgacaccagttagtcatcgccctattcaaatcttgcacgcatcttctcttgaaatggaattctccgtacctgtggcttctctccctgcttaaagaatgcctcctcgcttgccttgtccttggtggtgtcacgggcgaagtaggtgggctgtgcgatctcgctgatcttcttctcgtcgagacctttgaggtcaatggtcatagaggtggcaatgacgtagcgggcgttgacacggcggagggggacaccgttgaccttgaaggggccggtgactaggaggacaccctggtcgagggtcttgaggagcacgacacgcttgccgcggaatcggccagcgaggaggatgagaacgctgccggggacgagagactcgcggggagcccagggacgaagagccttgcgggtctgagaaattccatcgttagtctccgttgtgccactgtcgcatgagggagtgattcttctgagcgtggcaatcgtgccgcctacgatgtattgtgcttcccgatgctgcctccatgccatatatagttgtgtatgcatccgatctagggatttcgaagtgtgcatatgtccaagctcattccagccaaacactttgtactcctagatcttgcaatatcgtttcccctcgaaggcagcatcggtaatcggttccatcgcggcatgcacacgtaatttcccgacctcaaactcagaaatgcgtcgtcgtgcaactcaccttcttgggcttggcctcgtcggtggcagggtaccacttctgggccgcctgggacgggtgagggacctcccgggtcgactttccgaacttcttgctggtgctcggctgcgacatcgtgacgttggtcgggagtggttgttgtgggaggtaattggcgactcctgggttgttgggtgatgtcgagtagtcgtgcagatgttaaaagtgaccctgcgcaaaaagatcaattagagattgtgggtttaggcgaagccctgtgggtggtgccacagcaaaatcggtggtgg

SEQ ID NO: 18353 - DNA, 690 bp, Muscodor strobelii
  misc_feature: SGI cDNA ID NO. 566152
  misc_feature: Reduced expression when VOC is produced
  misc_feature: Encodes the peptide sequence at SEQ ID NO 18354
atgttggccaacgccccgctcccgatgaccggaaatattccagcagttacctcgagaaccgtcgccatggatccaaatctacagcaacctactggtaccatcaacaacataccaaatgccggtggtcagccgggtccgaaaatccatcacatctggctcgttacgggcccagccggatgtggaaagacgacagtagctgaatacgtatctgagttgatacatttaccatacatagagggcgattcattccatccaccagcaaacatagagaagatgcgcaatggaattccattaactgacgcagaccgatgggattggctcacgctgctgcgagaagaggctctccgccaactagcatctggggccgaaggcgtggtgctcacatgctcagctctgaagcggaaatatcgggacgttctccgcgtagcgccatatttttcgcacaatattcagctccatttcatctatctctctgcgcccgaagccctactcctggagcgcgtgggtctacgtcagggacattatatgggcgccaacatggtgcacagccaattcgagattctggagccaccgacagccgaggagacggacgtgatcagcatcgatgtgagcggccccatttctggggtcttagatgaggcttccaagcagatcgcaaagaagatcagcgctgccgtcgaacaagtctag

SEQ ID NO: 18354 - protein, 229 aa, Muscodor strobelii
  misc_feature: SGI Peptide ID NO. 566152
  misc_feature (58)..(219): Pfam Id: PF01202 Pfam Desc: Shikimate kinase
  misc_feature (35)..(222): NCBI GI: 85118576 Blast Desc: NCU02702 [Neurospora crassa OR74A] gi|28927284|gb|EAA36239.1| NCU02702 [Neurospora crassa OR74A] gi|38567217|emb|CAE76509.1| related to thermoresistant crassa]
  misc_feature (27)..(218): NCBI GI: 171680189 Blast Desc: protein product [Podospora anserina] gi|170939721|emb|CAP64947.1| protein product [Podospora anserina]
  misc_feature (26)..(228): NCBI GI: 261356284 Blast Desc: thermoresistant gluconokinase [Verticillium albo-atrum VaMs.102]
  misc_feature (6)..(225): NCBI GI: 256735170 Blast Desc: [Nectria haematococca mpVI 77-13-4]
  misc_feature (26)..(222): NCBI GI: 156053039 Blast Desc: SS1G_06687 [Sclerotinia sclerotiorum 1980] gi|154704465|gb|EDO04204.1| SS1G_06687 [Sclerotinia sclerotiorum 1980]
  misc_feature (14)..(229): NCBI GI: 46108272 Blast Desc: FG01018.1 [Gibberella zeae PH-1]
  misc_feature (43)..(228): NCBI GI: 154318393 Blast Desc: glucokinase [Botryotinia fuckeliana B05.10] gi|150842887|gb|EDN18080.1| glucokinase [Botryotinia fuckeliana B05.10]
  misc_feature (43)..(218): NCBI GI: 116207038 Blast Desc: CHGG_02812 [Chaetomium globosum CBS 148.51] gi|88183409|gb|EAQ90877.1| CHGG_02812 [Chaetomium globosum CBS 148.51]
  misc_feature (50)..(224): NCBI GI: 39944928 Blast Desc: MGG_04446 [Magnaporthe grisea 70-15] gi|145021531|gb|EDK05660.1| MGG_04446 [Magnaporthe grisea 70-15]
  misc_feature (45)..(223): NCBI GI: 242768812 Blast Desc: thermoresistant gluconokinase family protein [Talaromyces stipitatus ATCC 10500] gi|218724841|gb|EED24258.1| thermoresistant gluconokinase family protein [Talaromyces ATCC
  misc_feature (50)..(203): SWISSPROT Homolog: EC 2.7.1.12 Gluconokinase
  misc_feature: Useful for introducing or modulating the production of volatile compounds
MLANAPLPMTGNIPAVTSRTVAMDPNLQQPTGTINNIPNAGGQPGPKIHHIWLVTGPAGCGKTTVAEYVSELIHLPYIEGDSFHPPANIEKMRNGIPLTDADRWDWLTLLREEALRQLASGAEGVVLTCSALKRKYRDVLRVAPYFSHNIQLHFIYLSAPEALLLERVGLRQGHYMGANMVHSQFEILEPPTAEETDVISIDVSGPISGVLDEASKQIAKKISAAVEQV

SEQ ID NO: 18355 - DNA, 1483 bp, Muscodor strobelii
  misc_feature: SGI EST ID NO. CUFF.43175.0
  misc_feature: Variant of the nucleotide sequence at SEQ ID NO 18353
gtccgtcacgtcgagtccaaggggttttcagagggtttatgacagaccaaactggtcatatctgccctcgtactgtctgaggaaatagtcactgccgggcaaactcactcgcgtgctcgaaacgaggtcgagacccgggctggagacatgactttttcccgggaaaggcgggtagtattttagaaacttgccgcagttcattattatcctacctcctttaaacataataatcacttataacatcgcccacaccacttaaggcggtctgtcctggtttctccattcactccagcctgatagccttgactcaacatttgactcaacgaatcactgtgacgatcgctgtgtgacatccctttcactatctacttaacccgtcctcaacacacctcgaggcaaacactcccagatttaaaatgttggccaacgccccgctcccgatgaccggaaatattccagcagttacctcgagaaccgtcgccatggatccaaatctacagcaacctactggtaccatcaacaacataccaaatgccggtggtcagccgggtccgaaaatccatcacatctggctcgttacgggcccagccggatgtggaaagacgacagtagctgaatacgtatctgagttgatacatttaccatacatagagggcgattcattccatccaccagcaaacatagagaagatgcgcaatggaattccattaactgacgcagaccgatgggattggctcacgctgctgcgagaagaggctctccgccaactagcatctggggccgaaggcgtggtgctcacatgctcagctctgaagcggaaatatcgggacgttctccgcgtagcgccatatttttcgcacaatattcagctccatttcatctatctctctgcgcccgaagccctactcctggagcgcgtgggtctacgtcagggacattatatgggcgccaacatggtgcacagccaattcgagattctggagccaccgacagccgaggagacggacgtgatcagcatcgatgtgagcggccccatttctggggtcttagatgaggcttccaagcagatcgcaaagaagatcagcgctgccgtcgaacaagtctagttcagtcgggcaggcgagagatcggcagtcatgcacgcgtatgcgtaacgatgcatctcgcatggcctcggagcgctgttcttccccgcagactcaaaaaattgcgactgaccgctgggccagagtgtgctcattatatgacgtaagtgcatgaccggcatcgttatggacgccgctttgagacggatcgcgttggtgtttgtaattttgcacactcatgtcgtttagcgagaggagttgggagaaggatgcatcatgatcatcgttttactttgggttatcggtgtgtttccgatttgatagtcttgattttaagacacctcaatacagacacccagtgtcgttttggaaattttggtgccggttattcgagagtc

SEQ ID NO: 18356 - DNA, 1398 bp, Muscodor strobelii
  misc_feature: SGI cDNA ID NO. 566153
  misc_feature: Elevated expression when VOC is produced
  misc_feature: Encodes the peptide sequence at SEQ ID NO 18357
atgtatgctgttgcgagagacttccactccacgaaaaggatgcgggttgtcaagccagtgttgctggcagatattggcgaaggcatcgtggaatgcgagatcattcagtggtttgtcgagcccgaagcccgcgtcgaagagttctcgccgttatgtgaagttcagagcgacaaagcctcggtcgagataacaagccgcttcgccggtgtagttaagaagctacactatgaggctggagagatggcaaaggttggaaagccattcgtggatatagatattctagatgccaagcaagaagacttggatgctttgactgctccggagccatccaaagaagccgcctcggagcctgtgagaacagagtcatcagaacagtctgctcagcccaagatatcagatcacgcagcatcagcgacgccagtaacccctgaagttaaagagcagacacaatctcgagaaaaggggaaatatgcatcaatagcaacacccgctgttcgccatttatctaaagatttgaacgtagacatatcagaaatatacggaaccggcaaaggcggcagagtaatgaaagaagatatctacaaatttgttgaggctcgagatacaccaaaacaggtaccacaatctacgagaccgccgtctgaccctatcagtcccgcagaaaaccaaacagaaaccttggttccattaacgaatacccaacaccagatgttcaagtccatgactagatcattatccataccgcactttttatacgcggatgaagtcgatttcgcacaactctacgacttgcgtcggcggctgaacaaagtattagcacagtctggtcaagaaggggatgtttcaaagctatcctatctacctttcatcatcaaggcagtttcgcttgctatatacaaatatcccatactcaacgcgagggtggacgtggatactcagacctccaagccaacccttgtctaccgcgaccagcacaatatcggggtagctatggatacacccataggtttacttgtgccggtgatcaagaatgtgggggtcaagaatgtaatgaccatcgcaaaagagataacggatttacaagctcgggctacggcaggaaagttgacgccccaaaacttgagtggactcaccattaccgtttcgaacatcgggaacatcggagggacgtatctctcacccgtcgttgtggacaaaagtgtagccattgtaggaataggccgcatgcgcaccgtccctgcgtttgacgagaatgacaatgtcattaagaagcaggtgtgcaactttagctggagtgccgatcatcgcgttatcgacggagccaccatggctcgggccgcagaggtcgtgaggcagatagtggaagaacccgatagcatgatactacatctgcggtga

SEQ ID NO: 18357 - protein, 465 aa, Muscodor strobelii
  misc_feature: SGI Peptide ID NO. 566153
  misc_feature (222)..(462): Pfam Id: PF00198 Pfam Desc: 2-oxoacid dehydrogenases acyltransferase (catalytic domain)
  misc_feature (18)..(91): Pfam Id: PF00364 Pfam Desc: Biotin-requiring enzyme
  misc_feature (157)..(195): Pfam Id: PF02817 Pfam Desc: e3 binding domain
  misc_feature (160)..(195): Pfam Id: PF02817 Pfam Desc: e3 binding domain
  misc_feature (6)..(465): NCBI GI: 85118585 Blast Desc: NCU02704 [Neurospora crassa OR74A] gi|28927286|gb|EAA36241.1| NCU02704 [Neurospora crassa OR74A] gi|38567215|emb|CAE76507.1| related to branched-chain alpha-keto
  misc_feature (5)..(465): NCBI GI: 171680191 Blast Desc: protein product [Podospora anserina] gi|170939722|emb|CAP64948.1| protein product [Podospora anserina]
  misc_feature (6)..(465): NCBI GI: 256734452 Blast Desc: NECHADRAFT_31439 [Nectria haematococca mpVI 77-13-4]
  misc_feature (6)..(465): NCBI GI: 39944934 Blast Desc: MGG_04449 [Magnaporthe grisea 70-15] gi|145021528|gb|EDK05657.1| MGG_04449 [Magnaporthe grisea 70-15]
  misc_feature (8)..(465): NCBI GI: 156053041 Blast Desc: SS1G_06688 [Sclerotinia sclerotiorum 1980] gi|154704466|gb|EDO04205.1| SS1G_06688 [Sclerotinia sclerotiorum 1980]
  misc_feature (8)..(465): NCBI GI: 154318389 Blast Desc: BC1G_03362 [Botryotinia fuckeliana B05.10] gi|150842885|gb|EDN18078.1| BC1G_03362 [Botryotinia fuckeliana B05.10]
  misc_feature (6)..(465): NCBI GI: 261356283 Blast Desc: dihydrolipoamide branched chain transacylase E2 [Verticillium albo-atrum VaMs.102]
  misc_feature (2)..(465): NCBI GI: 239613481 Blast Desc: dihydrolipoamide branched chain transacylase E2 [Ajellomyces dermatitidis ER-3]
  misc_feature (2)..(465): NCBI GI: 261194591 Blast Desc: dihydrolipoamide branched chain transacylase E2 [Ajellomyces dermatitidis SLH14081] gi|239588238|gb|EEQ70881.1| dihydrolipoamide branched chain transacylase E2 [Ajellomyces
  misc_feature (6)..(465): NCBI GI: 258567844 Blast Desc: conserved [Uncinocarpus reesii 1704] gi|237906112|gb|EEP80513.1| conserved [Uncinocarpus reesii 1704]
  misc_feature (22)..(465): SWISSPROT Homolog: EC 2.3.1.168 Dihydrolipoyllysine-residue (2-methylpropanoyl)transferase
  misc_feature: Useful for introducing or modulating the production of volatile compounds
MYAVARDFHSTKRMRVVKPVLLADIGEGIVECEIIQWFVEPEARVEEFSPLCEVQSDKASVEITSRFAGVVKKLHYEAGEMAKVGKPFVDIDILDAKQEDLDALTAPEPSKEAASEPVRTESSEQSAQPKISDHAASATPVTPEVKEQTQSREKGKYASIATPAVRHLSKDLNVDISEIYGTGKGGRVMKEDIYKFVEARDTPKQVPQSTRPPSDPISPAENQTETLVPLTNTQHQMFKSMTRSLSIPHFLYADEVDFAQLYDLRRRLNKVLAQSGQEGDVSKLSYLPFIIKAVSLAIYKYPILNARVDVDTQTSKPTLVYRDQHNIGVAMDTPIGLLVPVIKNVGVKNVMTIAKEITDLQARATAGKLTPQNLSGLTITVSNIGNIGGTYLSPVVVDKSVAIVGIGRMRTVPAFDENDNVIKKQVCNFSWSADHRVIDGATMARAAEVVRQIVEEPDSMILHLR

SEQ ID NO: 18358 - DNA, 1986 bp, Muscodor strobelii
  misc_feature: SGI EST ID NO. CUFF.43182.0
  misc_feature: Variant of the nucleotide sequence at SEQ ID NO 18356
ctgtcggcttccccagaccacggatacaggcggcccattgtgggggatcggtgagccgggcgtcattcctccctctcttctcccaccttttctagaggaaattcgctgtgaaatcttgggattgcaacaatttctcgtcatgatatagattttctactccttttgcagtcccaatggcgttcctacagagaggttctcgtgttttgcgccgtcaatggcgcgtttgtcagggcattgtccgtcctacggagccccaattacgtggggcgatgtatgctgttgcgagagacttccactccacgaaaaggatgcgggttgtcaagccagtgttgctggcagatattggcgaaggcatcgtggaatgcgagatcattcagtggtttgtcgagcccgaagcccgcgtcgaagagttctcgccgttatgtgaagttcagagcgacaaagcctcggtcgagataacaagccgcttcgccggtgtagttaagaagctacactatgaggctggagagatggcaaaggttggaaagccattcgtggatatagatattctagatgccaagcaagaagacttggatgctttgactgctccggagccatccaaagaagccgcctcggagcctgtgagaacagagtcatcagaacagtctgctcagcccaagatatcagatcacgcagcatcagcgacgccagtaacccctgaagttaaagagcagacacaatctcgagaaaaggggaaatatgcatcaatagcaacacccgctgttcgccatttatctaaagatttgaacgtagacatatcagaaatatacggaaccggcaaaggcggcagagtaatgaaagaagatatctacaaatttgttgaggctcgagatacaccaaaacaggtaccacaatctacgagaccgccgtctgaccctatcagtcccgcagaaaaccaaacagaaaccttggttccattaacgaatacccaacaccagatgttcaagtccatgactagatcattatccataccgcactttttatacgcggatgaagtcgatttcgcacaactctacgacttgcgtcggcggctgaacaaagtattagcacagtctggtcaagaaggggatgtttcaaagctatcctatctacctttcatcatcaaggcagtttcgcttgctatatacaaatatcccatactcaacgcgagggtggacgtggatactcagacctccaagccaacccttgtctaccgcgaccagcacaatatcggggtagctatggatacacccataggtttacttgtgccggtgatcaagaatgtgggggtcaagaatgtaatgaccatcgcaaaagagataacggatttacaagctcgggctacggcaggaaagttgacgccccaaaacttgagtggactcaccattaccgtttcgaacatcgggaacatcggagggacgtatctctcacccgtcgttgtggacaaaagtgtagccattgtaggaataggccgcatgcgcaccgtccctgcgtttgacgagaatgacaatgtcattaagaagcaggtgtgcaactttagctggagtgccgatcatcgcgttatcgacggagccaccatggctcgggccgcagaggtcgtgaggcagatagtggaagaacccgatagcatgatactacatctgcggtgagagctacggtgaagaaaaatgggagatgatgggtcgaaaagcgaacccgggcagagtctggccacatctggacgcctgcatgaagttctatctgcggcttacaggatgtcatgtggtttctattcattacgtcttgtagagcggtggtcgcaaggctagcatagcagtcagcaggtagcgtatgacatttgatcatagaatgcatcattctcaatgtacatgcaattccccgccgggccccagcgtaggcatgcagtgtagctagtggtggtttggaagttggtctcgtgatcgtaggacaattgagcggaagcaatgc

SEQ ID NO: 18359 - DNA, 957 bp, Muscodor strobelii
  misc_feature: SGI cDNA ID NO. 566154
  misc_feature: Encodes the peptide sequence at SEQ ID NO 18360
atgttgctcacaaagcaccaatctagattcctttgtctattctgccagacccgggctttctcgacaacgtatcgcaatctagccaaaccggcgccgaaatccgcagctcctaagaccgtcactccaccaccaaaggctccgaaagtcattgcgccatcgcctctcgagaatgcccctcgctcatatggcaagcgagtcgaggaattcactcccacgccgctctcacggcccatcggccttccatacccgccggaggctggccagaacacaggcatagacctgcgcactcttaaacagcgccgcgatgacttcgtggactacgacaagcatctcgtccgccgggaagagctaaaatccaaaatggcgcgcccctattttcgcgattggggcaatctatcgttccacaagggcaagacattcattgcccctgcgcgacccttcaaagccgagctctcgctcttcttccccaacctctacggccagacactctccaaaacagacaaagatcccaaggacacgacaccgatcttagatagtcgtgtctccatcgtcagcgtgttcagcagtatgtgggcagagaatcaatgcaagacatttatctcccctgaactcgagaaggtgatcgccgaatcccgaggaagagcgcagcacgtgaggataaacatcgaagaggactcgctaaaagcctggctggttaagctgtggatgggaagcctgaggagacaagtcggtgagccgaactgggataagtacttcctggtcaggaagggtgtgagtgatgagattagggagaacatcgggttgctgaacagcaaagtcggttatacttatctcgttgatgaggcttgcagaatacgatgggcaggcagtgggttgtgtgaggagcatgagaaggatagccttattgcttcgttgcaaaggttgttgggtggtcaggcggctaagaaagccccgtga

SEQ ID NO: 18360 - protein, 318 aa, Muscodor strobelii
  misc_feature: SGI Peptide ID NO. 566154
  misc_feature (262)..(308): Pfam Id: PF05176 Pfam Desc: ATP10 protein
  misc_feature (12)..(309): NCBI GI: 171680193 Blast Desc: protein product [Podospora anserina] gi|170939723|emb|CAP64949.1| protein product [Podospora anserina]
  misc_feature (12)..(309): NCBI GI: 116207034 Blast Desc: CHGG_02810 [Chaetomium globosum CBS 148.51] gi|88183407|gb|EAQ90875.1| CHGG_02810 [Chaetomium globosum CBS 148.51]
  misc_feature (12)..(309): NCBI GI: 85118589 Blast Desc: NCU02705 [Neurospora crassa OR74A] gi|28927287|gb|EAA36242.1| conserved [Neurospora crassa OR74A] gi|38567214|emb|CAE76506.1| related to F1F0 ATPase complex
  misc_feature (12)..(309): NCBI GI: 256735169 Blast Desc: NECHADRAFT_74734 [Nectria haematococca mpVI 77-13-4]
  misc_feature (12)..(309): NCBI GI: 154318387 Blast Desc: BC1G_03361 [Botryotinia fuckeliana B05.10] gi|150842884|gb|EDN18077.1| BC1G_03361 [Botryotinia fuckeliana B05.10]
  misc_feature (12)..(309): NCBI GI: 156053043 Blast Desc: SS1G_06689 [Sclerotinia sclerotiorum 1980] gi|154704467|gb|EDO04206.1| SS1G_06689 [Sclerotinia sclerotiorum 1980]
  misc_feature (12)..(309): NCBI GI: 39944942 Blast Desc: MGG_04453 [Magnaporthe grisea 70-15] gi|145021524|gb|EDK05653.1| MGG_04453 [Magnaporthe grisea 70-15]
  misc_feature (1)..(309): NCBI GI: 261194857 Blast Desc: F1F0 ATP synthase assembly protein Atp10 [Ajellomyces dermatitidis SLH14081] gi|239588371|gb|EEQ71014.1| F1F0 ATP synthase assembly protein Atp10 [Ajellomyces dermatitidis
  misc_feature (1)..(309): NCBI GI: 239613352 Blast Desc: F1F0 ATP synthase assembly protein Atp10 [Ajellomyces dermatitidis ER-3]
  misc_feature (3)..(309): NCBI GI: 225682832 Blast Desc: mitochondrial ATPase complex subunit ATP10 [Paracoccidioides brasiliensis Pb03]
MLLTKHQSRFLCLFCQTRAFSTTYRNLAKPAPKSAAPKTVTPPPKAPKVIAPSPLENAPRSYGKRVEEFTPTPLSRPIGLPYPPEAGQNTGIDLRTLKQRRDDFVDYDKHLVRREELKSKMARPYFRDWGNLSFHKGKTFIAPARPFKAELSLFFPNLYGQTLSKTDKDPKDTTPILDSRVSIVSVFSSMWAENQCKTFISPELEKVIAESRGRAQHVRINIEEDSLKAWLVKLWMGSLRRQVGEPNWDKYFLVRKGVSDEIRENIGLLNSKVGYTYLVDEACRIRWAGSGLCEEHEKDSLIASLQRLLGGQAAKKAP

SEQ ID NO: 18361 - DNA, 1188 bp, Muscodor strobelii
  misc_feature: SGI EST ID NO. CUFF.43160.0
  misc_feature: Variant of the nucleotide sequence at SEQ ID NO 18359
ctgcagcccagaacgcccagaacgagggaagtgggtcgctgatttggtctgtctgcgggagacatttccgtgcatctggaaattttatggtcggatggtcagcagttacctgtcagatccgactaccattgtgttcaacctaaacggcaagatgttgctcacaaagcaccaatctagattcctttgtctattctgccagacccgggctttctcgacaacgtatcgcaatctagccaaaccggcgccgaaatccgcagctcctaagaccgtcactccaccaccaaaggctccgaaagtcattgcgccatcgcctctcgagaatgcccctcgctcatatggcaagcgagtcgaggaattcactcccacgccgctctcacggcccatcggccttccatacccgccggaggctggccagaacacaggcatagacctgcgcactcttaaacagcgccgcgatgacttcgtggactacgacaagcatctcgtccgccgggaagagctaaaatccaaaatggcgcgcccctattttcgcgattggggcaatctatcgttccacaagggcaagacattcattgcccctgcgcgacccttcaaagccgagctctcgctcttcttccccaacctctacggccagacactctccaaaacagacaaagatcccaaggacacgacaccgatcttagatagtcgtgtctccatcgtcagcgtgttcagcagtatgtgggcagagaatcaatgcaagacatttatctcccctgaactcgagaaggtgatcgccgaatcccgaggaagagcgcagcacgtgaggataaacatcgaagaggactcgctaaaagcctggctggttaagctgtggatgggaagcctgaggagacaagtcggtgagccgaactgggataagtacttcctggtcaggaagggtgtgagtgatgagattagggagaacatcgggttgctgaacagcaaagtcggttatacttatctcgttgatgaggcttgcagaatacgatgggcaggcagtgggttgtgtgaggagcatgagaaggatagccttattgcttcgttgcaaaggttgttgggtggtcaggcggctaagaaagccccgtgaaggtgactgtgatggatgtattatataattgtaaaaaagactcaagagcaatgatacccagattctacttcgtgtatctg

SEQ ID NO: 18362 - DNA, 687 bp, Muscodor strobelii
  misc_feature: SGI cDNA ID NO. 566155
  misc_feature: Encodes the peptide sequence at SEQ ID NO 18363
atggcggcaaccactggaaaccagggctgggcgcaattgcgacagcaggctcgcagtctagaatcccagaccgaatccctcttccacacatactctcaatactctacagtctccaacatcccaccaaagccaagtaaagaagaaagagaaacagaagcaaagctagaggaactcttatcgaagcgagagacggtggtcgaccagctagctcgactcctggacaccgaagcgagtctcacatcatcagcactcaaacagaacaatctcgccctcttgcgcgaaaagcttggagaacaccgccgcgacctaggccgtctaaagtccaatctcgaaactgcaaggaaacgtgtaaacttggtgtcggacgtgcgcgacgacatcaatacataccgcgccaataaccccgaagccgccgaggcagagtacatgcttgacgagcggaatcgcatcgacaactcgcataacatggtagacagcgtgcttagtcaggcctacgctacgaacgagagcttcaacctccagcgtgagaccctcgccagtatcaaccgaaggataacctttgctgcgagtcaagttcccgggctgaacaccctgatcggaaagatctcggcgaggaagaggcgtgatagtttcatcatggcaggattcatctcgttttgttttatcctattctttttcttcctttaa

SEQ ID NO: 18363 - protein, 228 aa, Muscodor strobelii
  misc_feature: SGI Peptide ID NO. 566155
  misc_feature (55)..(209): Pfam Id: PF05008 Pfam Desc: Vesicle transport v-SNARE protein
  misc_feature (1)..(227): NCBI GI: 242767996 Blast Desc: vesicle transport v-SNARE protein Gos1, [Talaromyces stipitatus ATCC 10500] gi|218724676|gb|EED24093.1| vesicle transport v-SNARE protein Gos1, [Talaromyces stipitatus ATCC
  misc_feature (1)..(227): NCBI GI: 212542799 Blast Desc: vesicle transport v-SNARE protein Gos1, [Penicillium marneffei ATCC 18224] gi|210066461|gb|EEA20554.1| vesicle transport v-SNARE protein Gos1, [Penicillium marneffei ATCC
  misc_feature (3)..(228): NCBI GI: 116207032 Blast Desc: CHGG_02809 [Chaetomium globosum CBS 148.51] gi|88183406|gb|EAQ90874.1| CHGG_02809 [Chaetomium globosum CBS 148.51]
  misc_feature (1)..(227): NCBI GI: 85118593 Blast Desc: NCU02706 [Neurospora crassa OR74A] gi|28927288|gb|EAA36243.1| NCU02706 [Neurospora crassa OR74A] gi|38567213|emb|CAE76505.1| related to SNARE protein of Golgi
  misc_feature (1)..(227): NCBI GI: 169781684 Blast Desc: [Aspergillus oryzae RIB40] gi|238498486|ref|XP_002380478.1| vesicle transport v-SNARE protein Gos1, [Aspergillus flavus NRRL3357] protein product Gos1,
  misc_feature (1)..(227): NCBI GI: 121701895 Blast Desc: Vesicle transport v-SNARE protein superfamily [Aspergillus clavatus NRRL 1] gi|119397355|gb|EAW07786.1| Vesicle transport v-SNARE protein superfamily [Aspergillus clavatus NRRL
  misc_feature (1)..(227): NCBI GI: 119495886 Blast Desc: Vesicle transport v-SNARE protein superfamily [Neosartorya fischeri NRRL 181] gi|146322578|ref|XP_752416.2| vesicle transport v-SNARE protein Gos1 [Aspergillus fumigatus
  misc_feature (1)..(227): NCBI GI: 115491401 Blast Desc: conserved [Aspergillus terreus NIH2624] gi|114197188|gb|EAU38888.1| conserved [Aspergillus terreus NIH2624]
  misc_feature (1)..(227): NCBI GI: 145239431 Blast Desc: An08g02460 [Aspergillus niger] gi|134076873|emb|CAK45282.1| protein product [Aspergillus niger]
  misc_feature (1)..(227): NCBI GI: 238841313 Blast Desc: protein transport protein GOS1 [Microsporum canis CBS 113480]
MAATTGNQGWAQLRQQARSLESQTESLFHTYSQYSTVSNIPPKPSKEERETEAKLEELLSKRETVVDQLARLLDTEASLTSSALKQNNLALLREKLGEHRRDLGRLKSNLETARKRVNLVSDVRDDINTYRANNPEAAEAEYMLDERNRIDNSHNMVDSVLSQAYATNESFNLQRETLASINRRITFAASQVPGLNTLIGKISARKRRDSFIMAGFISFCFILFFFFL

SEQ ID NO: 18364 - DNA, 1370 bp, Muscodor strobelii
  misc_feature: SGI EST ID NO. CUFF.43170.0
  misc_feature: Variant of the nucleotide sequence at SEQ ID NO 18362
tgctgttgcaataagctactaccttacctgttgttggtggcactcctagactgcatcactgtcgccctgactggctcaagaacaagttaaccattaagacgtctattccataattgcacctcaactttctatccgtcatcatcggcatcaccacaccaacctctaattacttcagaacagcctcgcatagcattttgtcatacctgcctagataaattagcttacagacagcgacccttcgttactaaatctgtcgtcactgctaagttcagccgtgccattgcatcaactcaactctgctcatctcccgccatggcggcaaccactggaaaccagggctgggcgcaattgcgacagcaggctcgcagtctagaatcccagaccgaatccctcttccacacatactctcaatactctacagtctccaacatcccaccaaagccaagtaaagaagaaagagaaacagaagcaaagctagaggaactcttatcgaagcgagagacggtggtcgaccagctagctcgactcctggacaccgaagcgagtctcacatcatcagcactcaaacagaacaatctcgccctcttgcgcgaaaagcttggagaacaccgccgcgacctaggccgtctaaagtccaatctcgaaactgcaaggaaacgtgtaaacttggtgtcggacgtgcgcgacgacatcaatacataccgcgccaataaccccgaagccgccgaggcagagtacatgcttgacgagcggaatcgcatcgacaactcgcataacatggtagacagcgtgcttagtcaggcctacgctacgaacgagagcttcaacctccagcgtgagaccctcgccagtatcaaccgaaggataacctttgctgcgagtcaagttcccgggctgaacaccctgatcggaaagatctcggcgaggaagaggcgtgatagtttcatcatggcaggattcatctcgttttgttttatcctattctttttcttcctttaaggggcgacgggaaccgttgacttgggctcgggcaaaagagaggtggttagattttgtacaagttatcgcatacttggggcactttgggagttgcatgtagtagtcttttttttcttttcaaatccgcgaggcatggcgttatggttcacatcaaattaaggaaaaagtcccttatgtacattgcccgatgcttcggcctggttgttcacataccctttggagcatagaaaacttcattgaaacccgtttgatgcaggagagacagttgggtccaaactaatattagtctacaaattctcgaactgtcaaatcgctatctctgaacaattgatgatgcaattattatgaaatgttttgcattagtgtttgcg

SEQ ID NO: 18365 - DNA, 375 bp, Muscodor strobelii
  misc_feature: SGI cDNA ID NO. 566156
  misc_feature: Reduced expression when VOC is produced
  misc_feature: Encodes the peptide sequence at SEQ ID NO 18366
atgtcgacagccaaggtcaagtccggtgcgctctggaacaagagcaaggatgatctgatgaagcagctcggcgagctcaagaccgagctgggccagctccgcatccagaagatcacatcctccggcagcaagctgaacaagatccacgacctgcgcaagtcgatcgctcgcgtcttgactgtcgtcaacctcaagcagagacagcagcttcgtctgttctacaagaacaagaagtatctgccgctcgaccttcgacccaagcagacccgtgccatccgccgccgcctgtcaccagaggagaagtccaaggtcttagagaagaccaagaagaagaccacgcatttccctcagcgaaaatacgctgtcaaggcttag

SEQ ID NO: 18366 - protein, 124 aa, Muscodor strobelii
  misc_feature: SGI Peptide ID NO. 566156
  misc_feature (8)..(65): Pfam Id: PF00831 Pfam Desc: Ribosomal L29 protein
  misc_feature (1)..(124): NCBI GI: 46108278 Blast Desc: FG01021.1 [Gibberella zeae PH-1] gi|46396937|sp|Q8L805.1|RL35_WHEAT RecName: Full=60S ribosomal protein L35 gi|110590378|pdb|2GO5|5 Chain 5, Structure Of Signal
  misc_feature (1)..(124): NCBI GI: 256735168 Blast Desc: [Nectria haematococca mpVI 77-13-4]
  misc_feature (1)..(124): NCBI GI: 164427785 Blast Desc: 60S ribosomal protein L35 [Neurospora crassa OR74A] gi|38567211|emb|CAE76503.1| ribosomal protein L35 [Neurospora crassa] gi|157071884|gb|EDO65318.1| 60S ribosomal protein L35
  misc_feature (1)..(124): NCBI GI: 116207028 Blast Desc: 60S ribosomal protein L35 [Chaetomium globosum CBS 148.51] gi|88183404|gb|EAQ90872.1| 60S ribosomal protein L35 [Chaetomium globosum CBS 148.51]
  misc_feature (1)..(124): NCBI GI: 171680199 Blast Desc: protein product [Podospora anserina] gi|170939726|emb|CAP64952.1| protein product [Podospora anserina]
  misc_feature (1)..(124): NCBI GI: 39944946 Blast Desc: MGG_04455 [Magnaporthe grisea 70-15] gi|145021522|gb|EDK05651.1| MGG_04455 [Magnaporthe grisea 70-15]
  misc_feature (1)..(124): NCBI GI: 261356280 Blast Desc: 60S ribosomal protein L35 [Verticillium albo-atrum VaMs.102]
  misc_feature (1)..(124): NCBI GI: 238841312 Blast Desc: 60S ribosomal protein [Microsporum canis CBS 113480]
  misc_feature (1)..(124): NCBI GI: 119173962 Blast Desc: conserved [Coccidioides immitis RS] gi|240106639|gb|EER24826.1| 60S ribosomal protein L35, [Coccidioides posadasii C735 delta SOWgp]
  misc_feature (1)..(124): NCBI GI: 15808950 Blast Desc: AF416509_1 ribosomal protein L35 [Paracoccidioides brasiliensis] gi|226285347|gb|EEH40913.1| ribosomal protein L35 [Paracoccidioides brasiliensis Pb01]
  misc_feature: Useful for introducing or modulating the production of volatile compounds
MSTAKVKSGALWNKSKDDLMKQLGELKTELGQLRIQKITSSGSKLNKIHDLRKSIARVLTVVNLKQRQQLRLFYKNKKYLPLDLRPKQTRAIRRRLSPEEKSKVLEKTKKKTTHFPQRKYAVKA

SEQ ID NO: 18367 - DNA, 1357 bp, Muscodor strobelii
  misc_feature: SGI EST ID NO. CUFF.43368.0
  misc_feature: Variant of the nucleotide sequence at SEQ ID NO 18365
cagcactttatctaggtgcatttaatcttatcagtcacctgactatcgattttcagcccacaaccctattgtgtgtagcgaacggccccccaaccccaaatctttgactccatccagaaattctacgccaaatttcgtgacatcctcgacgacaccaccggacaccgccaattcccacgcccaacgccattcacgatgtcgacagccaaggtcaagtccggtgcgctctggaacaagagcaaggatgatctgatgaagcagctcggcgagctcaagaccgagctgggccagctccgcatccagaagatcacatcctccggcagcaagctgaacaagatccacgacctgcgcaagtcgatcgctcgcgtcttgactgtcgtcaacctcaagcagagacagcagcttcgtctgttctacaagaacaagaagtatctgccgctcgaccttcgacccaagcagacccgtgccatccgccgccgcctgtcaccagaggagaagtccaaggtcttagagaagaccaagaagaagaccacgcatttccctcagcgaaaatacgctgtcaaggcttagatgagtttttcttcggctttgtaggggaacgggtttagggatacagaagggcgcggttattgccaaaacggaatctgacatttgcatggcatcacggcttttttcggttcgtaggtgttatgaggtcactttgcagcagccaaaaagatgctgctaacaatacgaaaaaaatgaattgcctacgggcaaatgaacccacccatccatcactccgaacgacgaaacgtgaccgaacgccttgtacgatacccgattatcttgactctggagctttcagaacctctggctatggggcgacgagagagaacttccaccttcacgataggcttcctgttcatagttgtcgatagacttaacaggtaatgatcaaatggccattttctggtcccttgcttgcgtggtgtggtcgacgttgatgacactgatgaccgagggacgcttgtggagatattataagcctacttgtcctcacgttcagcagatcaagttgtagagcgatatgactgcgggactttgcccgtatgatcctgaactacctactgagacaactcccgaggctccaatgaacctcgaaatctggacaagagcgtcgaattatgagatgacccacgtcgttccaaccgactctctcccacagtcaatttatacacgacaccctataatgctcttacattcaggatgtcacaaagtggcacgcttattcgggttaaccatctaaagtaacgcggtacactctaaagagcataatataaagatttaaaggtgtatatataaatgttattcgccg

SEQ ID NO: 18368 - DNA, 378 bp, Muscodor strobelii
  misc_feature: SGI cDNA ID NO. 566157
  misc_feature: Encodes the peptide sequence at SEQ ID NO 18369
atgggtaatatatgtggcaaggccgagagcgatgctttctcccagccaggtcgtgtcctcggctcagcacctccacaacccgaacgtgcctccgttcctgccaaagtcggtggtacgccccggacattaggaggttccaacaccacccctcaagcaaacgccggtgacagctccggagatgctgacgcccggaaacgagctgctgaggcggccgaggcaagagctcaagcaacgtcatcaaaatataccggtactttgggctcaaagctagctgcgcagaagaaacagactagaaatgatacccttcaggagataagcaatgaggagagaaggcagcgggatgctgatgaggcggcacaggctaggactcatagttaa

SEQ ID NO: 18369 - protein, 125 aa, Muscodor strobelii
  misc_feature: SGI Peptide ID NO. 566157
  misc_feature (1)..(125): NCBI GI: 46108282 Blast Desc: FG01023.1 [Gibberella zeae PH-1]
  misc_feature (1)..(122): NCBI GI: 212542877 Blast Desc: conserved [Penicillium marneffei ATCC 18224] gi|210066500|gb|EEA20593.1| conserved [Penicillium marneffei ATCC 18224]
  misc_feature (1)..(122): NCBI GI: 242767820 Blast Desc: conserved [Talaromyces stipitatus ATCC 10500] gi|218724640|gb|EED24057.1| conserved [Talaromyces stipitatus ATCC 10500]
  misc_feature (1)..(112): NCBI GI: 261356278 Blast Desc: [Verticillium albo-atrum VaMs.102]
  misc_feature (1)..(125): NCBI GI: 169607573 Blast Desc: SNOG_06845 [Phaeosphaeria nodorum SN15] gi|111064376|gb|EAT85496.1| SNOG_06845 [Phaeosphaeria nodorum SN15]
  misc_feature (1)..(125): NCBI GI: 189188962 Blast Desc: conserved [Pyrenophora tritici-repentis Pt-1C-BFP] gi|187972426|gb|EDU39925.1| conserved [Pyrenophora tritici-repentis Pt-1C-BFP]
  misc_feature (1)..(125): NCBI GI: 171680183 Blast Desc: protein product [Podospora anserina] gi|170939718|emb|CAP64944.1| protein product [Podospora anserina]
  misc_feature (1)..(122): NCBI GI: 154280895 Blast Desc: [Ajellomyces capsulatus NAm1] gi|150411439|gb|EDN06827.1| [Ajellomyces capsulatus NAm1]
  misc_feature (1)..(122): NCBI GI: 119173772 Blast Desc: CIMG_10302 [Coccidioides immitis RS]
  misc_feature (1)..(122): NCBI GI: 240111920 Blast Desc: CPC735_013830 [Coccidioides posadasii C735 delta SOWgp]
MGNICGKAESDAFSQPGRVLGSAPPQPERASVPAKVGGTPRTLGGSNTTPQANAGDSSGDADARKRAAEAAEARAQATSSKYTGTLGSKLAAQKKQTRNDTLQEISNEERRQRDADEAAQARTHS

SEQ ID NO: 18370 - DNA, 1261 bp, Muscodor strobelii
  misc_feature: SGI EST ID NO. CUFF.43167.0
  misc_feature: Variant of the nucleotide sequence at SEQ ID NO 18368
tgggcacctagcatcaagcgtacatgtgctgtagtactactttcatccactactgacaccgaccgagaataatatatgcatggatatgaaatatactcttttagtggtattaatgaatgtattcgctaacgattgccttattactggagctgcaatggaacgcattctaagtttgagagttctttgaggtagggaactaaccctggcaagcctggcaactgctagtcttggctccttctcatgggacgacttctgggtctggatgttcgtcgtaccgaaaacccacgtggaattgtagacaaagacctataaagacactcagctcattcaagcctcactcaacgactcagcctcatcatattgcccgtcatatcctgtgactctagctcatgttccaacattaaatgtaaactgttataagcacattgtttgacaatctaccccgcggttagatcactcaacccttggcctttgagtcagccggacatttactttctcgactcgtcaccttgccaccaattctgattgtcgttgaagactttcgccatgggtaatatatgtggcaaggccgagagcgatgctttctcccagccaggtcgtgtcctcggctcagcacctccacaacccgaacgtgcctccgttcctgccaaagtcggtggtacgccccggacattaggaggttccaacaccacccctcaagcaaacgccggtgacagctccggagatgctgacgcccggaaacgagctgctgaggcggccgaggcaagagctcaagcaacgtcatcaaaatataccggtactttgggctcaaagctagctgcgcagaagaaacagactagaaatgatacccttcaggagataagcaatgaggagagaaggcagcgggatgctgatgaggcggcacaggctaggactcatagttaagccgacgaaatactagaacaatatatcagagttgatgacacatactcaggtgagaatggatggatggacggattaaaggggtcatctgcttgcatttcgtgtcagatttttcgcacgtttagcgatgcatcttcctgcttgctggcatcgctttgtttgttgcatggccatttgaccttgttataagtttacgtgagaagcgccttgcactgctactatgaagagtcgtcgtgggggagccaatgtcttatctcgcatatgcgtcaagttaaggataatctaatatgcctttctgagtcgattataggaaggtcgtactgtaatgcctatgagctca

SEQ ID NO: 18371 - DNA, 1059 bp, Muscodor strobelii
  misc_feature: SGI cDNA ID NO. 566158
  misc_feature: Encodes the peptide sequence at SEQ ID NO 18372
atgttacggataacgtctattactactatactgctcttcgcgcagcatgcctctgctcaggggcgtctgctccggtttgtctgttcgcagctcgtgattgaacggatcgaccctctcgtgtctccaggcatggtgccgtctcctcacacgcaccaggtcgttggaggcaactcgtttaatgcgacgatggatccagcgcaacttgatcccgccacaacatccacctgcactacgtgctcatatgccgaggattttagcaattattggactgcgaatttgtattttaaatcaccagaaaacggaactttcaaacgggtgccgcagatgccaaaccccacttgctgccagcaaaacggcggcctaacgatatactacatgtctcccttttctggcaaccagaaggtcacagcgttcaaacctggtttccgaatgctcgctggcgacccggcactccgcaccgctacgggtcaagacccgggtatatgccaccggtgcttaggcgctagcaatggcttccagccatgcgacagaacggatagttccgaacttccatcgaagccgtgcccgcaggggatacggtcgagcatcatcttcccgacctgctgggacggcaaaaacctcgacagccccgaccacaagtcgcacgtggcgtactctccagggatatgtagtaatggtaactgcctcgccggggcatcctgtccaagcacccaccccgttagagttcccggagttatgtatgagatctactggaatacgagccagttcaatgacccgaagtacttctcggcgggctcacagccatttgtgtatagttttggtgacggagtgggccacggtcaacatggcgattacctgttcgggtggaaaggcgatgccctccagcgcggcatggatgccctgtcaggatctaattgtgccaacgagaagtgtagcgcgctgaagtctcaatcgtacgaagatgccatggcgtgtacgaagaaagccgtcgtagacgaggatgtaggcttggatgggtggattcccgctctgcctggtggtatgccagtaacatactaa

SEQ ID NO: 18372 - protein, 352 aa, Muscodor strobelii
  misc_feature: SGI Peptide ID NO. 566158
  misc_feature (37)..(289): Pfam Id: PF09362 Pfam Desc: Domain of function (DUF1996)
  misc_feature (12)..(352): NCBI GI: 169619878 Blast Desc: SNOG_13137 [Phaeosphaeria nodorum SN15] gi|111058344|gb|EAT79464.1| SNOG_13137 [Phaeosphaeria nodorum SN15]
  misc_feature (5)..(352): NCBI GI: 189195938 Blast Desc: conserved [Pyrenophora tritici-repentis Pt-1C-BFP] gi|187980186|gb|EDU46812.1| conserved [Pyrenophora tritici-repentis Pt-1C-BFP]
  misc_feature (1)..(335): NCBI GI: 171678105 Blast Desc: protein product [Podospora anserina] gi|170937122|emb|CAP61779.1| protein product [Podospora anserina]
  misc_feature (4)..(336): NCBI GI: 171678707 Blast Desc: protein product [Podospora anserina] gi|170937423|emb|CAP62081.1| protein product [Podospora anserina]
  misc_feature (8)..(335): NCBI GI: 171682738 Blast Desc: protein product [Podospora anserina] gi|170941328|emb|CAP66978.1| protein product [Podospora anserina]
  misc_feature (14)..(352): NCBI GI: 39941238 Blast Desc: MGG_05530 [Magnaporthe grisea 70-15] gi|145022203|gb|EDK06223.1| MGG_05530 [Magnaporthe grisea 70-15]
  misc_feature (23)..(346): NCBI GI: 116203171 Blast Desc: CHGG_09470 [Chaetomium globosum CBS 148.51] gi|88177988|gb|EAQ85456.1| CHGG_09470 [Chaetomium globosum CBS 148.51]
  misc_feature (10)..(346): NCBI GI: 116191393 Blast Desc: CHGG_05414 [Chaetomium globosum CBS 148.51] gi|88181327|gb|EAQ88795.1| CHGG_05414 [Chaetomium globosum CBS 148.51]
  misc_feature (23)..(335): NCBI GI: 171694483 Blast Desc: protein product [Podospora anserina] gi|170947190|emb|CAP73995.1| protein product [Podospora anserina]
  misc_feature (11)..(346): NCBI GI: 85090100 Blast Desc: NCU07763 [Neurospora crassa OR74A] gi|28919599|gb|EAA29021.1| conserved [Neurospora crassa OR74A]
MLRITSITTILLFAQHASAQGRLLRFVCSQLVIERIDPLVSPGMVPSPHTHQVVGGNSFNATMDPAQLDPATTSTCTTCSYAEDFSNYWTANLYFKSPENGTFKRVPQMPNPTCCQQNGGLTIYYMSPFSGNQKVTAFKPGFRMLAGDPALRTATGQDPGICHRCLGASNGFQPCDRTDSSELPSKPCPQGIRSSIIFPTCWDGKNLDSPDHKSHVAYSPGICSNGNCLAGASCPSTHPVRVPGVMYEIYWNTSQFNDPKYFSAGSQPFVYSFGDGVGHGQHGDYLFGWKGDALQRGMDALSGSNCANEKCSALKSQSYEDAMACTKKAVVDEDVGLDGWIPALPGGMPVTY

SEQ ID NO: 18373 - DNA, 1219 bp, Muscodor strobelii
  misc_feature: SGI EST ID NO. CUFF.43172.1
  misc_feature: Variant of the nucleotide sequence at SEQ ID NO 18371
tgtctcccttttctggcaaccagaaggtcacagcgttcaaacctggtttccgaatgctcgctggcgacccggcactccgcaccgctacgggtcaagacccgggtatatgccaccggtgcttaggcgctagcaatggcttccagccatgcgacagaacggatagttccgaacttccatcgaagccgtgcccgcaggggatacggtcgagcatcatcttcccgacctgctgggacggcaaaaacctcgacagccccgaccagtgagtctcctgtgacctttattcgcccctttcaagatgtcggcgagccatgtattgcctcaaagggtatctttcctccttgctacttccgtgagcttccgaagccctggatgatctttcaccgtaaatcgacactgctgattctggtgctataatagcaagtcgcacgtggcgtactctccagggatatgtagtaatggtaactgcctcgccggggcatcctgtccaagcacccaccccgttagagttcccggagttatgtatgagatctactggaatacgagccagttcaatgacccgaagtacttctcggcgggctcacagccatttgtgtatagttttggtgacgggtaattacaaaatttttacttctctcctccatccgaactctgtgacactcctcggtcgcttcttcaacaacatagctttgatcttatagtaggtactaatgatgaaatcactagagtgggccacggtcaacatggcgattacctgttcgggtggaaaggcgatgccctccagcgcggcatggatgccctgtcaggatctaattgtgccaacgagaagtgtagcgcgctgaagtctcaatcgtacgaagatgccatggcgtgtacgaagaaagccgtcgtagacgaggatgtaggcttggatgggtggattcccgctctgcctggtggtatgccagtaacatactaatagctccttgtgtttaggcaaggaatgcggcttctggcgataaaatgttaatttaatgattttgcgatcatctctggttttgacgacagatatgaagttcctgctttcaaactacaccattgaacagtgcacgactattacatgtgaaatgccataacctctacgttaggcatatattccaaaggggaaaagtagtaacgagctatttataataagcttgcaacgagttgtaaggtacacagcattatggctattgagttttcg

SEQ ID NO: 18374 - DNA, 3450 bp, Muscodor strobelii
  misc_feature: SGI cDNA ID NO. 566159
  misc_feature: Encodes the peptide sequence at SEQ ID NO 18375
atgggtaccgactacggcggtggtcacccctccgaccgcgtccacggtcacccgccgcctctcaacgacggcggctaccagcttgatcgtgatcgccccagcatgacgtcgagcccggcctactccaacggcgcattgccccctccgaaccgccctcccggctcgcctactctcagtgcgcgtagcgacccgaggcgaagcggtgagcgcaacagatccaaccctcgcaccgggcgcagcgccagcggttctctgcgagtctgtgcaaagtgcggcgagtcactcacaggccagttcgtgcgcgccttggatggcaccttccatttggagtgtttcaaatgtcatgattgcggtcagatcgtagcttccaagttcttccccgccgacgacgaggagacaggcggtcagtaccccctgtgcgagacggactatttccgtcgactaggtctgctctgccaccattgcggtggtgctctccgtggaagctatatcacagctctcgaccgaaagtaccacgtcgaccacttcacatgttgtctgtgctcgaccgtttttggtgcccaggacagctactacgaacatgatggcgatgtatattgccactatcactactccactcagtttgcgcaacggtgcaatggctgtcagaccgctattctcaagcagttcgtcgagattttccgtaacggtcagaaccagcattggcaccccgaatgctacatgatacataagttctggaatgtacgactggctgcgcctcaagatggcccagagccccttccagagcctgcagatgccgagaggcgagagctcgtacgtcaccaggaagagatcatggaagataaggtctaccgaatctggagtgttctgtcgaccttcgaagagtcttccgccgcctgcatctctgacatgttacttcatgtcagcaatggatcttatatcgacggcgtatatgtcgctaagaagttcattctccatgtggagatcctattccaatctgcagatcgccttgacgagagcctcaggaagctgcagttggaagggttgcaatacagtcgagagtctaagcttctctgcaagaagatcgtgtctttcttttcgctcctctccaagacacaggatgcgaaattaacgaaaaccggagttacacacgaacttctgtcccttgtcaccgggcttgcgcactacctcaagttgcttataagaatttgcctcagaggaacgctcaagcttgaacgcgaacaaaactcttcagaaggcctgttccattttcttgaagatctcggcgtgcttgagcagatgaaggccgatgatgagactcttgagcttacactgcgcatgggacggctctctgctaatgactcagaccagtgtacctcatgccgaaagcccattgaagacgagtgcgccgtctgcggtgataagaggtggcacattgcttgcgtagcttgtagccaatgtggccgcaacctaggcacggaactagatcaagcaactttccatcatgatcagaaggtctactgcccagaatgttcaatgcaagccggagatatcggccggtcgctggaacgagctacgaaactacaacaatacatcttcttgctcaaggttgcattggctcgcttactcgaaattcttcacactaatggtgcgttgcaatatgacgagatccagggcgtcgatgataagggatcatcagcagacaatggaagtgctctactaaggtcggactctcgctcgaagtcctacaccggaggagaacgtcaccagcgagagtcatcttacgaaaacactctcaacgacgtgcgaagattgaaaagcacgcggctcgacaagcatctttcttccagtctcagaaaagccaggacatcgaggataatggatggcccagagggacacagtctccgtccagggtctgcaggcgcgaatggcgacctccgcaacaggaatatgcagattgaagaggaccgagagatgggatctggaggcacaaacgagtacttcggccatgcagatgcgttgacgctggacgatattccccggattgtagcggctgagcaagctcgcgagcagcaaccaaaagctacgagacaagagttattcagatcacctgctactgagccagtgtatggtgctggccacagcagaaatttgtctggcggccgtgataatgaccttaggttattaggagaacacaaaggagcaaggaaattcttctcagagctttctgggttggagtactttattgttcgtcacgttgctgttctcacaattcagcctatgcttgagtccgaatttacgctggacgaattgctgggcctgatcgaggcaagaaagccgcctaacttttggaacaagtttgcaaaaggctttggcaacaaagacacccgcaaaggtactaagaagaagggggtcttcggtgttcctctggaagttatccttgagaaagacggcgctgattctaccgatggagtcggccctggtgctctccgcattcctgcaattgtcgaggacactattattgcgttgaagaacaaagatctctccgtggaaggtgttttccggaagagtggcaacatcaaaagattgggagaacaagtcgctgccgtggacagagacggttgtgatgccatcaaatggaatgacgaatctcctcaccagcttgccgcacttctcaaacgctacttacgcgaattgcctgacccattgatgacattcaaactccataggctgtggatagcagccaccaagatcaaagatccggacaaaagacgcctgtgtcttcatatgacctgttgcttactccctcagacccatcgtgataccctggaagtcctgtttgccttcttcaagtgggttgcgaccttccaccaggtcgacgaagatacgggctcacgaatggacgtacacaacttggctcgagttatcgctccaaacatcctccgagcaaatgtaaaaacccagagcttttccgacgaacccatgactgttgttgcttgcgttgaggaactcatgcaggcaaacgaggaattgtgcatggttccggctgaaatcatggacattctcagcgattcaactcttttcagcaacaacggcgagataacaacaaaagagatacttaagcgtatcgaaggccgatctcacaatggtggctcaaaacaattcgacaatgcagagttttcatcgcgacaggacaattacaagagaccacctgccacaagagttgatactgacccaacggttctgcaagaaccaactattcccttcactgcgacacagggaacgccatcaagtcagtggcggaaccccgattatccagagcatacacactctgatcagtacgagcgaagtggaacgccacaaggcgaacatagccaacggcgagaatggcgcaactcaggatggaatagaccgaataattctgttccaacggggatgggcccgagctag

SEQ ID NO: 18375 - protein, 1149 aa, Muscodor strobelii
  misc_feature: SGI Peptide ID NO. 566159
  misc_feature (152)..(208): Pfam Id: PF00412 Pfam Desc: LIM domain
  misc_feature (88)..(148): Pfam Id: PF00412 Pfam Desc: LIM domain
  misc_feature (458)..(516): Pfam Id: PF00412 Pfam Desc: LIM domain
  misc_feature (833)..(988): Pfam Id: PF00620 Pfam Desc: RhoGAP domain
  misc_feature (458)..(508): Pfam Id: PF00412 Pfam Desc: LIM domain
  misc_feature (212)..(239): Pfam Id: PF00412 Pfam Desc: LIM domain
  misc_feature (8)..(1145): NCBI GI: 145614676 Blast Desc: MGG_04377 [Magnaporthe grisea 70-15] gi|145021581|gb|EDK05710.1| MGG_04377 [Magnaporthe grisea 70-15]
  misc_feature (3)..(1145): NCBI GI: 38567230 Blast Desc: related to GTPase-activating protein of the rho/rac family (LRG1 protein) [Neurospora crassa]
  misc_feature (3)..(1093): NCBI GI: 187234352 Blast Desc: LIM and Rho-GAP domain containing protein [Neurospora crassa]
  misc_feature (67)..(1139): NCBI GI: 261356199 Blast Desc: rho-type GTPase-activating protein [Verticillium albo-atrum VaMs.102]
  misc_feature (3)..(1093): NCBI GI: 164427800 Blast Desc: NCU02689 [Neurospora crassa OR74A] gi|157071890|gb|EAA36226.2| NCU02689 [Neurospora crassa OR74A]
  misc_feature (47)..(1145): NCBI GI: 171680173 Blast Desc: protein product [Podospora anserina] gi|170939713|emb|CAP64939.1| protein product [Podospora anserina]
  misc_feature (46)..(1135): NCBI GI: 154295009 Blast Desc: BC1G_13633 [Botryotinia fuckeliana B05.10] gi|150844409|gb|EDN19602.1| BC1G_13633 [Botryotinia fuckeliana B05.10]
  misc_feature (2)..(1144): NCBI GI: 116207054 Blast Desc: CHGG_02820 [Chaetomium globosum CBS 148.51] gi|88183417|gb|EAQ90885.1| CHGG_02820 [Chaetomium globosum CBS 148.51]
  misc_feature (121)..(1137): NCBI GI: 256734368 Blast Desc: [Nectria haematococca mpVI 77-13-4]
  misc_feature (121)..(1134): NCBI GI: 46108644 Blast Desc: FG01204.1 [Gibberella zeae PH-1]
MGTDYGGGHPSDRVHGHPPPLNDGGYQLDRDRPSMTSSPAYSNGALPPPNRPPGSPTLSARSDPRRSGERNRSNPRTGRSASGSLRVCAKCGESLTGQFVRALDGTFHLECFKCHDCGQIVASKFFPADDEETGGQYPLCETDYFRRLGLLCHHCGGALRGSYITALDRKYHVDHFTCCLCSTVFGAQDSYYEHDGDVYCHYHYSTQFAQRCNGCQTAILKQFVEIFRNGQNQHWHPECYMIHKFWNVRLAAPQDGPEPLPEPADAERRELVRHQEEIMEDKVYRIWSVLSTFEESSAACISDMLLHVSNGSYIDGVYVAKKFILHVEILFQSADRLDESLRKLQLEGLQYSRESKLLCKKIVSFFSLLSKTQDAKLTKTGVTHELLSLVTGLAHYLKLLIRICLRGTLKLEREQNSSEGLFHFLEDLGVLEQMKADDETLELTLRMGRLSANDSDQCTSCRKPIEDECAVCGDKRWHIACVACSQCGRNLGTELDQATFHHDQKVYCPECSMQAGDIGRSLERATKLQQYIFLLKVALARLLEILHTNGALQYDEIQGVDDKGSSADNGSALLRSDSRSKSYTGGERHQRESSYENTLNDVRRLKSTRLDKHLSSSLRKARTSRIMDGPEGHSLRPGSAGANGDLRNRNMQIEEDREMGSGGTNEYFGHADALTLDDIPRIVAAEQAREQQPKATRQELFRSPATEPVYGAGHSRNLSGGRDNDLRLLGEHKGARKFFSELSGLEYFIVRHVAVLTIQPMLESEFTLDELLGLIEARKPPNFWNKFAKGFGNKDTRKGTKKKGVFGVPLEVILEKDGADSTDGVGPGALRIPAIVEDTIIALKNKDLSVEGVFRKSGNIKRLGEQVAAVDRDGCDAIKWNDESPHQLAALLKRYLRELPDPLMTFKLHRLWIAATKIKDPDKRRLCLHMTCCLLPQTHRDTLEVLFAFFKWVATFHQVDEDTGSRMDVHNLARVIAPNILRANVKTQSFSDEPMTVVACVEELMQANEELCMVPAEIMDILSDSTLFSNNGEITTKEILKRIEGRSHNGGSKQFDNAEFSSRQDNYKRPPATRVDTDPTVLQEPTIPFTATQGTPSSQWRNPDYPEHTHSDQYERSGTPQGEHSQRREWRNSGWNRPNNSVPTGMGPS

SEQ ID NO: 18376 - DNA, 4788 bp, Muscodor strobelii
  misc_feature: SGI EST ID NO. CUFF.43185.0
  misc_feature: Variant of the nucleotide sequence at SEQ ID NO 18374
caaggcatagtgcctctcccacctctagcacctggctcagcttgacctgctcgccgtcacaactcttgccgccgttgctcaaccctgaacacctcacttaccccatactcccctgtcggcgactctgcaatcggcggcccagcggatgttttgagagcgattcttttgatttgtttcctgtttaccgtcttattgtttgctcgccgtcgacttcatcgccacagcgagtccacggcccacgctcgtcgaagaccaacaagccctgcattgcatcggcccagcgactgctcttccacccacgatccagctattcttttattcccccaggcccgcatgcctctagcttgataattattctcggcactggaccattcgtccctggcaacaggctccgacagctccctcgttacacatgccatacaacaaccccaattgctccacgcccaatgccacacgctgaggtctgatgtccaccaacacgagcaacgatcctgcagattgacagcccttcccacctcaatctccacgatcattcaatctccagccttgcgccctcgttcccctgctgccctgaactgcgtaccccataatcactgcccgccgaccacctgccgccatgggtaccgactacggcggtggtcacccctccgaccgcgtccacggtcacccgccgcctctcaacgacggcggctaccagcttgatcgtgatcgccccagcatgacgtcgagcccggcctactccaacggcgcattgccccctccgaaccgccctcccggctcgcctactctcagtgcgcgtagcgacccgaggcgaagcggtgagcgcaacagatccaaccctcgcaccgggcgcagcgccagcggttctctgcgagtctgtgcaaagtgcggcgagtcactcacaggccagttcgtgcgcgccttggatggcaccttccatttggagtgtttcaaatgtcatgattgcggtcagatcgtagcttccaagttcttccccgccgacgacgaggagacaggcggtcagtaccccctgtgcgagacggactatttccgtcgactaggtctgctctgccaccattgcggtggtgctctccgtggaagctatatcacagctctcgaccgaaagtaccacgtcgaccacttcacatgttgtctgtgctcgaccgtttttggtgcccaggacagctactacgaacatgatggcgatgtatattgccactatcactactccactcagtttgcgcaacggtgcaatggctgtcagaccgctattctcaagcagttcgtcgagattttccgtaacggtcagaaccagcattggcaccccgaatgctacatgatacataagttctggaatgtacgactggctgcgcctcaagatggcccagagccccttccagagcctgcagatgccgagaggcgagagctcgtacgtcaccaggaagagatcatggaagataaggtctaccgaatctggagtgttctgtcgaccttcgaagagtcttccgccgcctgcatctctgacatgttacttcatgtcagcaatggatcttatatcgacggcgtatatgtcgctaagaagttcattctccatgtggagatcctattccaatctgcagatcgccttgacgagagcctcaggaagctgcagttggaagggttgcaatacagtcgagagtctaagcttctctgcaagaagatcgtgtctttcttttcgctcctctccaagacacaggatgcgaaattaacgaaaaccggagttacacacgaacttctgtcccttgtcaccgggcttgcgcactacctcaagttgcttataagaatttgcctcagaggaacgctcaagcttgaacgcgaacaaaactcttcagaaggcctgttccattttcttgaagatctcggcgtgcttgagcagatgaaggccgatgatgagactcttgagcttacactgcgcatgggacggctctctgctaatgactcagaccagtgtacctcatgccgaaagcccattgaagacgagtgcgccgtctgcggtgataagaggtggcacattgcttgcgtagcttgtagccaatgtggccgcaacctaggcacggaactagatcaagcaactttccatcatgatcagaaggtctactgcccagaatgttcaatgcaagccggagatatcggccggtcgctggaacgagctacgaaactacaacaatacatcttcttgctcaaggttgcattggctcgcttactcgaaattcttcacactaatggtgcgttgcaatatgacgagatccagggcgtcgatgataagggatcatcagcagacaatggaagtgctctactaaggtcggactctcgctcgaagtcctacaccggaggagaacgtcaccagcgagagtcatcttacgaaaacactctcaacgacgtgcgaagattgaaaagcacgcggctcgacaagcatctttcttccagtctcagaaaagccaggacatcgaggataatggatggcccagagggacacagtctccgtccagggtctgcaggcgcgaatggcgacctccgcaacaggaatatgcagattgaagaggaccgagagatgggatctggaggcacaaacgagtacttcggccatgcagatgcgttgacgctggacgatattccccggattgtagcggctgagcaagctcgcgagcagcaaccaaaagctacgagacaagagttattcagatcacctgctactgagccagtgtatggtgctggccacagcagaaatttgtctggcggccgtgataatgaccttaggttattaggagaacacaaaggagcaaggaaattcttctcagagctttctgggttggagtactttattgttcgtcacgttgctgttctcacaattcagcctatgcttgagtccgaatttacgctggacgaattgctgggcctgatcgaggcaagaaagccgcctaacttttggaacaagtttgcaaaaggctttggcaacaaagacacccgcaaaggtactaagaagaagggggtcttcggtgttcctctggaagttatccttgagaaagacggcgctgattctaccgatggagtcggccctggtgctctccgcattcctgcaattgtcgaggacactattattgcgttgaagaacaaagatctctccgtggaaggtgttttccggaagagtggcaacatcaaaagattgggagaacaagtcgctgccgtggacagagacggttgtgatgccatcaaatggaatgacgaatctcctcaccagcttgccgcacttctcaaacgctacttacgcgaattgcctgacccattgatgacattcaaactccataggctgtggatagcagccaccaagatcaaagatccggacaaaagacgcctgtgtcttcatatgacctgttgcttactccctcagacccatcgtgataccctggaagtcctgtttgccttcttcaagtgggttgcgaccttccaccaggtcgacgaagatacgggctcacgaatggacgtacacaacttggctcgagttatcgctccaaacatcctccgagcaaatgtaaaaacccagagcttttccgacgaacccatgactgttgttgcttgcgttgaggaactcatgcaggcaaacgaggaattgtgcatggttccggctgaaatcatggacattctcagcgattcaactcttttcagcaacaacggcgagataacaacaaaagagatacttaagcgtatcgaaggccgatctcacaatggtggctcaaaacaattcgacaatgcagagttttcatcgcgacaggacaattacaagagaccacctgccacaagagttgatactgacccaacggttctgcaagaaccaactattcccttcactgcgacacagggaacgccatcaagtcagtggcggaaccccgattatccagagcatacacactctgatcagtacgagcgaagtggaacgccacaaggcgaacatagccaacggcgagaatggcgcaactcaggatggaatagaccgaataattctgttccaacggggatgggcccgagctagagaacatgcggtatatattctacgtcttgtagctactacgtcgctatttcggcaaatgatgctcctgtatagcattatgaaggcgatgcagttttcgaccgccactgccggtggtactagcagctggcatcacgatttcactctgggaccctttcatttcacttctgttttcgcgttgagaaacccgaaaccccttcacgatgtcacttttcacgagcaggcgtcttttgctttacggaagggggcaagctcattactcccctggtttgacggtgcggtttggagtaatgtggagctgtctgttaccttgttcatcttggtttgatccaagcaaaaattccacattagacgagttaggaccctaggaggtgagatccggggaattgcatgagcatgcggatggtctagaaaagctgacgcaagcctttcggttgtggttgttgttgttactgtagtagctatggcatctccttgtttcggatgatgactttgttggagctttcgtttccctccctgttggctttagtagatagcttcgcagtggcgaaaatgggctgagaggatagttgatattgattgatgaagaatgagctgggtggtgaaggcaccagggctgtgtggcacaaagttaccagatgacaggagcctatgttagaataggtagcataggtggaagagcggccgaatgacagatgctgcaacaagaacaaaaagacctcgtg

SEQ ID NO: 18377 - DNA, 1401 bp, Muscodor strobelii
  misc_feature: SGI cDNA ID NO. 566160
  misc_feature: Encodes the peptide sequence at SEQ ID NO 18378
atggagagagaaccagatacagagattcttgtccacataggcgctcctgccagagcatctgatgatgcccgatatagggcattggcagccgcctacttagccttcgagcctgcagagacaacttcattttactcatcggagagagccttgggtggtgctaacgacaagctcctcctgtctgagcataccaacttgtcagggcaggcctcggcttgtggagataacctctctgaatctccatcttctgggcccctagggtctttgaagtctccccaggcttcatttcgtagtgtgttggaaggttcaccgcatatgccaaagacaccgacccggcaaggccaatatgctgctcacacgagtgcatcaattcctaccacacaagcttcatggcaaacgccatcaagcgtggttgatgactcacaagatgctacaaatgccaaagtcagcacatttgtttctccaactcgcgtattggaaagctacctccaacagttcagcactccgtccagacgctcaaattctagctcacagtcaaatgccagaggaaagccatatggtggtgcctctcggtcgctcggagacaccagctccagaagattccaaaccccacgtatcatattggagacaatcccatgtagtcttcgagccgacaaacctgcacggcaccctgaaatactgagtgagaaccgtggctcagacatccgaagcgaaggggccatggacgaaagcatcgtgaacgaaacggtatttacgtcatcctcatcagcgcaacggttagcagaatatagaggtaactctgcaccaccccaactaccacctctcccagttaatacagtcacatcctcaactccccttttcctaactcgctcgtcaagtgacacgggccctcacccgtcaaccaacccccaaatggtcttcaccatccccttcctcacatctgtccactcgatcacctacgacactctagaaatccgggctcctcaaccaccagtatccatctcagacatccaacctgaagacctcctcacgaaagggctaaggaaactcgcagaagacatcaatcttccggagaaattccgcccgcagcaaaaagttcgagaccttcggcctttcgagaggggacactggctcctggattgcacgacctggagcccagagctgaagagagatgcctgggcctttctggccaactatgtcggcactggaatagcgggctggggcgtgtggtgtacacgagatgcagacttcaagcgtatcaagctgtactgctggggatatgtcactgcgcatgtctactatgtcgggtacatcgcaagtcaacgtgaagtgaagtataccgggacttcgtggatagatgcagaaggagcgcaagtcatcgtgatgggtgcaaggagtcggtag

SEQ ID NO: 18378 - protein, 466 aa, Muscodor strobelii
  misc_feature: SGI Peptide ID NO. 566160
  misc_feature (5)..(464): NCBI GI: 171680177 Blast Desc: protein product [Podospora anserina] gi|170939715|emb|CAP64941.1| protein product [Podospora anserina]
  misc_feature (6)..(459): NCBI GI: 46108640 Blast Desc: FG01202.1 [Gibberella zeae PH-1]
  misc_feature (6)..(460): NCBI GI: 261356197 Blast Desc: conserved [Verticillium albo-atrum VaMs.102]
  misc_feature (287)..(466): NCBI GI: 85118543 Blast Desc: NCU02694 [Neurospora crassa OR74A] gi|28927276|gb|EAA36231.1| [Neurospora crassa OR74A] gi|38567225|emb|CAE76517.1| conserved [Neurospora crassa]
  misc_feature (73)..(464): NCBI GI: 17977861 Blast Desc: [Podospora anserina]
  misc_feature (336)..(455): NCBI GI: 116207050 Blast Desc: CHGG_02818 [Chaetomium globosum CBS 148.51] gi|88183415|gb|EAQ90883.1| CHGG_02818 [Chaetomium globosum CBS 148.51]
  misc_feature (6)..(459): NCBI GI: 156032479 Blast Desc: SS1G_13937 [Sclerotinia sclerotiorum 1980] gi|154699339|gb|EDN99077.1| SS1G_13937 [Sclerotinia sclerotiorum 1980]
  misc_feature (315)..(463): NCBI GI: 145614682 Blast Desc: MGG_04375 [Magnaporthe grisea 70-15] gi|145021584|gb|EDK05713.1| MGG_04375 [Magnaporthe grisea 70-15]
  misc_feature (296)..(461): NCBI GI: 255931003 Blast Desc: Pc12g01630 [Penicillium chrysogenum Wisconsin 54-1255] gi|211581677|emb|CAP79790.1| Pc12g01630 [Penicillium chrysogenum Wisconsin 54-1255]
  misc_feature (307)..(461): NCBI GI: 212538961 Blast Desc: conserved [Penicillium marneffei ATCC 18224] gi|210069378|gb|EEA23469.1| conserved [Penicillium marneffei ATCC 18224]
MEREPDTEILVHIGAPARASDDARYRALAAAYLAFEPAETTSFYSSERALGGANDKLLLSEHTNLSGQASACGDNLSESPSSGPLGSLKSPQASFRSVLEGSPHMPKTPTRQGQYAAHTSASIPTTQASWQTPSSVVDDSQDATNAKVSTFVSPTRVLESYLQQFSTPSRRSNSSSQSNARGKPYGGASRSLGDTSSRRFQTPRIILETIPCSLRADKPARHPEILSENRGSDIRSEGAMDESIVNETVFTSSSSAQRLAEYRGNSAPPQLPPLPVNTVTSSTPLFLTRSSSDTGPHPSTNPQMVFTIPFLTSVHSITYDTLEIRAPQPPVSISDIQPEDLLTKGLRKLAEDINLPEKFRPQQKVRDLRPFERGHWLLDCTTWSPELKRDAWAFLANYVGTGIAGWGVWCTRDADFKRIKLYCWGYVTAHVYYVGYIASQREVKYTGTSWIDAEGAQVIVMGARSR

SEQ ID NO: 18379 - DNA, 972 bp, Muscodor strobelii
  misc_feature: SGI cDNA ID NO. 566161
  misc_feature: Reduced expression when VOC is produced
  misc_feature: Encodes the peptide sequence at SEQ ID NO 18380
atgctgtttgctatcggtcgcctggcgactcgacgcctaggcctgggcactttccgtgcttctcgcgccgtcttcgtcccccggaccgccgcatttgtctacaatccctccgcccgtgcctttgctactacgaagaaagagcccacggccgccaaagccaagagcgcaaagcccgcatccaccaagaagaaggcacctgccaaatcggccaagcccaagaagacggccaagaaggtcgtcgccaaagctgcaaagccaaagcgcaaggccagggccgtctcgccggagaagaaggccgagaacaagctggttgcagaccgtagggccttgaagaagctcgctcttctcgatgaacccaagcgtaatgtccctggtagatgggtccaatactacgcggagaagctccacgcgcgactgcaggagacggagccacttgcacggtccactgtgaacgactttatgcgtgaatccagcaagcagttcaagacaatctcggagtccgagaagcagcgactcgatgccgttgttgagcagaacagacttaccgttgctgctacgcacaaggcttgggtcgaatcccatcatccgcaagatatccgtctggccaataatgcccgtaaactcttgaggaagaaccacaactatcctctcaagagtctcctcaggcccatccacgatgaccgccagccttcgaggccaatgacggccatgaacttctacaccaaggccagatgggcctccggcgagtttaactcaacgagccccaccgccgctgtccagctgatggcaagcgagtggaagaacttgactcccgccgagagacagccatacgacgacctcgcaaagtctgcctccgagaagtatcacaaggagatgacgcacatgttcggccctaatggaccgcagctgaccagaagcgccatagtagatttgcagagggtcgcaaaagccgagaaggccacgactgcatag

SEQ ID NO: 18380 - protein, 323 aa, Muscodor strobelii
  misc_feature: SGI Peptide ID NO. 566161
  misc_feature (230)..(296): Pfam Id: PF00505 Pfam Desc: HMG (high mobility group) box
  misc_feature (265)..(292): Pfam Id: PF00505 Pfam Desc: HMG (high mobility group) box
  misc_feature (85)..(307): NCBI GI: 238498594 Blast Desc: HMG box protein, [Aspergillus flavus NRRL3357] gi|220693806|gb|EED50151.1| HMG box protein, [Aspergillus flavus NRRL3357]
  misc_feature (155)..(296): NCBI GI: 156053345 Blast Desc: SS1G_06840 [Sclerotinia sclerotiorum 1980] gi|154704618|gb|EDO04357.1| SS1G_06840 [Sclerotinia sclerotiorum 1980]
  misc_feature (148)..(297): NCBI GI: 154315051 Blast Desc: [Botryotinia fuckeliana B05.10] gi|150848405|gb|EDN23598.1| [Botryotinia fuckeliana B05.10]
  misc_feature (87)..(285): NCBI GI: 189189678 Blast Desc: conserved [Pyrenophora tritici-repentis Pt-1C-BFP] gi|187972784|gb|EDU40283.1| conserved [Pyrenophora tritici-repentis Pt-1C-BFP]
  misc_feature (93)..(296): NCBI GI: 256735089 Blast Desc: NECHADRAFT_98705 [Nectria haematococca mpVI 77-13-4]
  misc_feature (153)..(307): NCBI GI: 239613406 Blast Desc: conserved [Ajellomyces dermatitidis ER-3]
  misc_feature (153)..(307): NCBI GI: 261194747 Blast Desc: conserved [Ajellomyces dermatitidis SLH14081] gi|239588316|gb|EEQ70959.1| conserved [Ajellomyces dermatitidis SLH14081]
  misc_feature (85)..(296): NCBI GI: 169781780 Blast Desc: [Aspergillus oryzae RIB40] gi|83774095|dbj|BAE64220.1| protein product [Aspergillus oryzae]
  misc_feature (108)..(291): NCBI GI: 85118547 Blast Desc: NCU02695 [Neurospora crassa OR74A] gi|28927277|gb|EAA36232.1| [Neurospora crassa OR74A] gi|38567224|emb|CAE76516.1| [Neurospora crassa]
  misc_feature (161)..(306): NCBI GI: 226290233 Blast Desc: conserved [Paracoccidioides brasiliensis Pb18]
  misc_feature: Useful for introducing or modulating the production of volatile compounds
MLFAIGRLATRRLGLGTFRASRAVFVPRTAAFVYNPSARAFATTKKEPTAAKAKSAKPASTKKKAPAKSAKPKKTAKKVVAKAAKPKRKARAVSPEKKAENKLVADRRALKKLALLDEPKRNVPGRWVQYYAEKLHARLQETEPLARSTVNDFMRESSKQFKTISESEKQRLDAVVEQNRLTVAATHKAWVESHHPQDIRLANNARKLLRKNHNYPLKSLLRPIHDDRQPSRPMTAMNFYTKARWASGEFNSTSPTAAVQLMASEWKNLTPAERQPYDDLAKSASEKYHKEMTHMFGPNGPQLTRSAIVDLQRVAKAEKATTA

SEQ ID NO: 18381 - DNA, 3312 bp, Muscodor strobelii
  misc_feature: SGI EST ID NO. CUFF.43197.0
  misc_feature: Variant of the nucleotide sequence at SEQ ID NO 18379
cgaacgcataataaacatggggctggggtttccgtcactgccctgtaacctgtttcaatcttctcgcaagcaagcgatcaacaccacacacgatcaccgcagctctgtccatccaatcttcacttgtcgactgcccatcgccggctgccgtcgtgaccaagcctgacctctaccatcgagactgagagctgcccacaatgctgtttgctatcggtcgcctggcgactcgacgcctaggcctgggcactttccgtgcttctcgcgccgtcttcgtcccccggaccgccgcatttgtctacaatccctccgcccgtgcctttgctactacgaagaaagagcccacggccgccaaagccaagagcgcaaagcccgcatccaccaagaagaaggcacctgccaaatcggccaagcccaagaagacggccaagaaggtcgtcgccaaagctgcaaagccaaagcgcaaggccagggccgtctcgccggagaagaaggccgagaacaagctggttgcagaccgtagggccttgaagaagctcgctcttctcgatgaacccaagcgtaatgtccctggtagatgggtccaatactacgcggagaagctccacgcgcgactgcaggagacggagccacttgcacggtccactgtgaacgactttatgcgtgaatccagcaagcagttcaagacaatctcggagtccgagaagcagcgactcgatgccgttgttgagcagaacagacttaccgttgctgctacgcacaaggcttgggtcgaatcccatcatccgcaagatatccgtctggccaataatgcccgtaaactcttgaggaagaaccacaactatcctctcaagagtctcctcaggcccatccacgatgaccgccagccttcgaggccaatgacggccatgaacttctacaccaaggccagatgggcctccggcgagtttaactcaacgagccccaccgccgctgtccagctgatggcaagcgagtggaagaacttgactcccgccgagagacagccatacgacgacctcgcaaagtctgcctccgagaagtatcacaaggagatgacgcacatgttcggccctaatggaccgcagctgaccagaagcgccatagtagatttgcagagggtcgcaaaagccgagaaggccacgactgcataggctggttcatgcttcgagattggcaagggacgccggtcagcagaggagaagcaggagaggggtggcatatctgacacaacagagacacagtctgtggttctgaagcccgcatttcatttgtcagcctcgtcttgattttgtcattggcttgtcagtggtgcgatcaattatttgtgtatattagtcttcactgtattgtgttcacggtggataaggcagggcatgtcgggtgccgccttcatgtttgtatcaatagttggttgtgctgacgcacgcagcgaactacctaggcgtaagagaagcccggaaaatgtttcacaagagaaaaaaaattattataatccattatggtgtataatatctaagtgcgctggtttgtatcctacccagcctagaaatagcttgaagcgccgaaactccatcccagatgctaatccaaattccagatgcgcctatgctaaacccatgcagtgatataataaataagcaagataactaccgactccttgcacccatcacgatgacttgcgctccttctgcatctatccacgaagtcccggtatacttcacttcacgttgacttgcgatgtacccgacatagtagacatgcgcagtgacatatccccagcagtacagcttgatacgcttgaagtctgcatctcgtgtacaccacacgccccagcccgctattccagtgccgacatagttggccagaaaggcccaggcatctctcttcagctctgggctccaggtcgtgcaatccaggagccagtgtcccctctcgaaaggccgaaggtctcgaactttttgctgcgggcggaatttctccggaagattgatgtcttctgcgagtttccttagccctttcgtgaggaggtcttcaggttggatgtctgagatggatactggtggttgaggagcccggatttctagagtgtcgtaggtgatcgagtggacagatgtgaggaaggggatggtgaagaccatttgggggttggttgacgggtgagggcccgtgtcacttgacgagcgagttaggaaaaggggagttgaggatgtgactgtattaactgggagaggtggtagttggggtggtgcagagttacctctatattctgctaaccgttgcgctgatgaggatgacgtaaataccgtttcgttcacgatgctttcgtccatggccccttcgcttcggatgtctgagccacggttctcactcagtatttcagggtgccgtgcaggtttgtcggctcgaagactacatgggattgtctccaatatgatacgtggggtttggaatcttctggagctggtgtctccgagcgaccgagaggcaccaccatatggctttcctctggcatttgactgtgagctagaatttgagcgtctggacggagtgctgaactgttggaggtagctttccaatacgcgagttggagaaacaaatgtgctgactttggcatttgtagcatcttgtgagtcatcaaccacgcttgatggcgtttgccatgaagcttgtgtggtaggaattgatgcactcgtgtgagcagcatattggccttgccgggtcggtgtctttggcatatgcggtgaaccttccaacacactacgaaatgaagcctggggagacttcaaagaccctaggggcccagaagatggagattcagagaggttatctccacaagccgaggcctgccctgacaagttggtatgctcagacaggaggagcttgtcgttagcaccacccaaggctctctccgatgagtaaaatgaagttgtctctgcaggctcgaaggctaagtaggcggctgccaatgccctatatcgggcatcatcagatgctctggcaggagcgcctatgtggacaagaatctctgtatctggttctctctccatgtttccgtatcatcatgactgagctggtggttgtggaaattagaagcagatgaagaagccatcgagcccttggtgccttttctactgaatgtagatgggagttttcgaacgcacgggcctcaaatatggattgaaataaagcagtacaccagaatactgaatgaagtatcaatggagagccagaacaaggttattagcaataagagctgttgtatcatatagtatgtcagtgaatggaggatcgagg

SEQ ID NO: 18382 - DNA, 426 bp, Muscodor strobelii
  misc_feature: SGI cDNA ID NO. 566162
  misc_feature: Encodes the peptide sequence at SEQ ID NO 18383
atgcttcgccacagcgccggaaccgccactacgaccgtgaccgtgaccgtgatcgcgagagggatcgtgaccgcgacagagaccgcgatcgggatctccgccgccgcgaccgatccgcagatcgccgagacgacggccactacaggggcccgagagaccggaggagatcccgagaccgctatggcgaccgagaccgagaacgatctccagaccaccgacgccggagaagccgcgaccgcgatggagactgggaccgtcgccctaggcaagacgactctcgtgatcgaggcagagggccgcgtgaaacaccagctggctcaacgcctcgtagccgacgagatagtcgcgatcgcgcccgcgagccagccattgctgctgcacccacacctccgcctgctgcgcctgcccagtccgaggctgacgtga

SEQ ID NO: 18383 - protein, 141 aa, Muscodor strobelii
  misc_feature: SGI Peptide ID NO. 566162
MLRHSAGTATTTVTVTVIARGIVTATETAIGISAAATDPQIAETTATTGARETGGDPETAMATETENDLQTTDAGEAATAMETGTVALGKTTLVIEAEGRVKHQLAQRLVADEIVAIAPASQPLLLHPHLRLLRLPSPRLT

SEQ ID NO: 18384 - DNA, 4379 bp, Muscodor strobelii
  misc_feature: SGI EST ID NO. CUFF.43218.0
  misc_feature: Variant of the nucleotide sequence at SEQ ID NO 18382
ggggaggtggagatggctttaaacttattcgaagtctgaacattgtccttcgactcattcatcaacacccccatttttccctgccgtctcgcaacgcgtagcctataaatcgccatcaactcggccatcgccccaggctagacacccagccgcagtaatcggcagagctcattgacacatcgcttgtgtgttggcgcagcctgagctgtcaagctgccggttctatcgagtcctctggtagctctcaccttgtagtcccgtcgagccgcactgcaaatgaccatggctcggctcaatgactctcgctcaccaactccagcaggcagccagttttcttccaagagaagtcgcaaagatgacgacagacgggagcgcgatcgcgatcgcgaccgccgcgaccatccccgcgaccagggccgagaccagcccagagaccagcctagagaccagcgacgccgctctcgatccaggagccccatagatcgccggaaccgccactacgaccgtgaccgtgaccgtgatcgcgagagggatcgtgaccgcgacagagaccgcgatcgggatctccgccgccgcgaccgatccgcagatcgccgagacgacggccactacaggggcccgagagaccggaggagatcccgagaccgctatggcgaccgagaccgagaacgatctccagaccaccgacgccggagaagccgcgaccgcgatggagactgggaccgtcgccctaggcaagacgactctcgtgatcgaggcagagggccgcgtgaaacaccagctggctcaacgcctcgtagccgacgagatagtcgcgatcgcgcccgcgagccagccattgctgctgcacccacacctccgcctgctgcgcctgcccagtccgaggctgacgtgaagaaggcagagcgtctggcgaggctcgcagcatggaagaagaggcacgagggcaaagaaaacacaaggagaaagagtcgaccccaggggctacccgcaagctccttgccgagatggatgaaaagaccaatgggacatccgcttctccgactcccgcatcgcccgctgatgtcgtgtctcccgccgtagaatatgctgggaagtttgatcccaaggcgatcgcaaagaaatcagcttcgaaacaacccacagctgggtccaaactcggggctgttggcccgccgtccgccgcaccaatagcgccgcccacccaagccaaggtctcaagcgcctctgccctccctcagaccaggactagcggattcgggttccataaacaaaatgcggaagataaggcaccccagaaacggaagttgatgctcgatgaagaagaaacatcagatcgcaaactcgccaagctgccatccttgcccctggctgtcgtcgatgacactccttatgaaaaccaagatgacgagggagccgaagacgacgacgctggggcctttgctttggatgaggaagaagaggccgccgccgctcgcgctgctcaagagcggcgagaggagcgtattgcgcaagaaactgctcagcaagagaccgaaatgcagatcgattctgttcaagaggatacaagttcccaggttgctaagaacgaggaggaaaagccaacgtctacagctatggaggttgatgatgacgacgaggaagtcgaccccttggatgctttcatgaacgatcttgataccaaaaccccagcaaaatcttcactagccccccaaaaggactcgaagaaaaagactgcacaggaacctgaagcctattttagcgacgatgaatatgattaccgcaaagagaacggcaacgacgaatttgctgcggcgcttgcgtcaaaacaacgcaagaagaaggatatcccatttcatgattatagcaagctggagctcgagtccattcggaagaatttctgggttgaacccgcggagctgtcccagatgacagaagccgaattggtcgatcttcgcatcgaacttgatggcatcaaagtcgctggcaaagatgtgcccaagcctgtgcaaagatggtcccatttagccctttcgcgcaagaccctagatgtcattgacagtcttggtttcgaaaggccaacacctatccaaatgcaagcattcccggcaatcatgtccggccgagacgtaatcggtgtcgctaagactggctcggggaagacactggcattcctgttacccatgttcagacacatcaaggaccaatctgcgctgagagagaatgatggccccattggactgatcatgacaccaactcgtgagttggcgacccagattcaccgcgattgcaaacctttcttgaaatcaatgaacatgagggcagtatgtgcttacggtggcgcgcccattaaagatcatattgccgagctaaagagaggggccgaaattgttgtttgcacaccggggcgcatgatcgatcttcttgctgctaatcaagggcgtgtgaccaatttgaagagagtcacctatgtggttcttgatgaagctgatagaatgttcgacatgggctttgaacctcaggtcatgaagattttcgccaacatgagggcagatcggcaaactattcttttctcggctacaatgcctcgtgctatggattccctagctaagaaggtgctaaataatcccgttgaaatcaccgtaggcggaaaaagtgttgtcgccccagaaatcacccaaatcgttgaaatccgagaagaagagaccaaattccttcgtactctcgagctgcttggtgaattatatgacaaagatgaggacgctaggaccttgatctttgtcgaacgtcaagaaaaggccgatgatctgctgaaggatctcctgcagaaaggctatccgtgtatgtctattcatggtggcaaggatcaaatcgaccgggactcaactattcaagacttcaaaagtggcgttgtgcccattctcattgccacttccgtagccgcgcgtgggctggatgtcaagcaattgaaattggtagtcaactttgatgcccccaaccatttggaagactatgtgcaccgagcagggcgtactgggcgcgctggaaataaaggcactgcagttaccttcattacatcaaaccaagaaaactgtgctcctggtatctcgaaagctcttgagcaaagcgggcagcccgtaccagaacagcttgaggaaatgcgcaaggcttttaggaagaaagtcaagtctggagaagctaaagaccagtctggcttcggcggcaagggtctagaacgtctcgatcaagaaagagaagccgcgcggcaacgcgagcagaaaacccatcgtaccgaaggtgatgaagaggaagacaagaaggaagagaaaggagcgagcgataaaaagtttgataaagccgctgctgccatccaaagcgcttcttcaggcattcaatctcgcgatgccgcccctaaggttgagatcgagccgagtgcgctcaagttcactatccacaagcgggaagacgcagcgccctcgaccagtggaagtggtggtaataacgctttggacaaggtatcgcttgctgctagtgctatcaatgctcgtttgggacgtgccggccagactcgacccgggcagcccattgataataaaggccctgatgctggcgcattccacgccaccctcgaaatcaacgacttcccccagaaagctcggtgggctgtcacgaaccgcaccaacgtcgcaaagattctggattccactggcacttccatcacaaccaaaggcaatttctacccagctaatgctgaggttccagccggagaggcgaagctgtatatcctcgtagagggtgacaccgaaaaagttgtggctaatgctatggaccaactgacgaccctgctgaaggaaggcacattagctgcagctgacgcggataacagggcaccaattgggggccgatacacagttacgtgagaggggtgatccatttgtgtatgttagggcgggttgatagattgtattatgataggaccaagagaatatcggtcttgacgggtcgtgtgcctgtgttggatggtgtgatagacaaaagctcgaatgaatggtacgccctatgatggtgaagagacttgcaatcgatgttcctgtgtttctttcagcatgtttacctgtcacgactctggaaataatcgataaaagtagccagccaacttgtgaatctatcacctgccattcacctctattgaatccatctgcggtttgcgaaagtatagaacagcaagacggaggatagaatggacgatcaaaactaatgaagttaccttgatgttcagtctcaaagtgaggctcaaaacatctctaatgcagaccacttgctccacgctctagtaaattcaggatcaatctctgtgtgttaaccttccagtagtaggc

SEQ ID NO: 18385 - DNA, 2994 bp, Muscodor strobelii
  misc_feature: SGI cDNA ID NO. 566163
  misc_feature: Encodes the peptide sequence at SEQ ID NO 18386
atggaagaagaggcacgagggcaaagaaaacacaaggagaaagagtcgaccccaggggctacccgcaagctccttgccgagatggatgaaaagaccaatgggacatccgcttctccgactcccgcatcgcccgctgatgtcgtgtctcccgccgtagaatatgctgggaagtttgatcccaaggcgatcgcaaagaaatcagcttcgaaacaacccacagctgggtccaaactcggggctgttggcccgccgtccgccgcaccaatagcgccgcccacccaagccaaggtctcaagcgcctctgccctccctcagaccaggactagcggattcgggttccataaacaaaatgcggaagataaggcaccccagaaacggaagttgatgctcgatgaagaagaaacatcagatcgcaaactcgccaagctgccatccttgcccctggctgtcgtcgatgacactccttatgaaaaccaagatgacgagggagccgaagacgacgacgctggggcctttgctttggatgaggaagaagaggccgccgccgctcgcgctgctcaagagcggcgagaggagcgtattgcgcaagaaactgctcagcaagagaccgaaatgcagatcgattctgttcaagaggatacaagttcccaggttgctaagaacgaggaggaaaagccaacgtctacagctatggaggttgatgatgacgacgaggaagtcgaccccttggatgctttcatgaacgatcttgataccaaaaccccagcaaaatcttcactagccccccaaaaggactcgaagaaaaagactgcacaggaacctgaagcctattttagcgacgatgaatatgattaccgcaaagagaacggcaacgacgaatttgctgcggcgcttgcgtcaaaacaacgcaagaagaaggatatcccatttcatgattatagcaagctggagctcgagtccattcggaagaatttctgggttgaacccgcggagctgtcccagatgacagaagccgaattggtcgatcttcgcatcgaacttgatggcatcaaagtcgctggcaaagatgtgcccaagcctgtgcaaagatggtcccatttagccctttcgcgcaagaccctagatgtcattgacagtcttggtttcgaaaggccaacacctatccaaatgcaagcattcccggcaatcatgtccggccgagacgtaatcggtgtcgctaagactggctcggggaagacactggcattcctgttacccatgttcagacacatcaaggaccaatctgcgctgagagagaatgatggccccattggactgatcatgacaccaactcgtgagttggcgacccagattcaccgcgattgcaaacctttcttgaaatcaatgaacatgagggcagtatgtgcttacggtggcgcgcccattaaagatcatattgccgagctaaagagaggggccgaaattgttgtttgcacaccggggcgcatgatcgatcttcttgctgctaatcaagggcgtgtgaccaatttgaagagagtcacctatgtggttcttgatgaagctgatagaatgttcgacatgggctttgaacctcaggtcatgaagattttcgccaacatgagggcagatcggcaaactattcttttctcggctacaatgcctcgtgctatggattccctagctaagaaggtgctaaataatcccgttgaaatcaccgtaggcggaaaaagtgttgtcgccccagaaatcacccaaatcgttgaaatccgagaagaagagaccaaattccttcgtactctcgagctgcttggtgaattatatgacaaagatgaggacgctaggaccttgatctttgtcgaacgtcaagaaaaggccgatgatctgctgaaggatctcctgcagaaaggctatccgtgtatgtctattcatggtggcaaggatcaaatcgaccgggactcaactattcaagacttcaaaagtggcgttgtgcccattctcattgccacttccgtagccgcgcgtgggctggatgtcaagcaattgaaattggtagtcaactttgatgcccccaaccatttggaagactatgtgcaccgagcagggcgtactgggcgcgctggaaataaaggcactgcagttaccttcattacatcaaaccaagaaaactgtgctcctggtatctcgaaagctcttgagcaaagcgggcagcccgtaccagaacagcttgaggaaatgcgcaaggcttttaggaagaaagtcaagtctggagaagctaaagaccagtctggcttcggcggcaagggtctagaacgtctcgatcaagaaagagaagccgcgcggcaacgcgagcagaaaacccatcgtaccgaaggtgatgaagaggaagacaagaaggaagagaaaggagcgagcgataaaaagtttgataaagccgctgctgccatccaaagcgcttcttcaggcattcaatctcgcgatgccgcccctaaggttgagatcgagccgagtgcgctcaagttcactatccacaagcgggaagacgcagcgccctcgaccagtggaagtggtggtaataacgctttggacaaggtatcgcttgctgctagtgctatcaatgctcgtttgggacgtgccggccagactcgacccgggcagcccattgataataaaggccctgatgctggcgcattccacgccaccctcgaaatcaacgacttcccccagaaagctcggtgggctgtcacgaaccgcaccaacgtcgcaaagattctggattccactggcacttccatcacaaccaaaggcaatttctacccagctaatgctgaggttccagccggagaggcgaagctgtatatcctcgtagagggtgacaccgaaaaagttgtggctaatgctatggaccaactgacgaccctgctgaaggaaggcacattagctgcagctgacgcggataacagggcaccaattgggggccgatacacagttacgtga

SEQ ID NO: 18386 - protein, 997 aa, Muscodor strobelii
  misc_feature: SGI Peptide ID NO. 566163
  misc_feature (386)..(560): Pfam Id: PF00270 Pfam Desc: DEAD/DEAH box helicase
  misc_feature (631)..(707): Pfam Id: PF00271 Pfam Desc: Helicase conserved C-terminal domain
  misc_feature (11)..(997): NCBI GI: 46108284 Blast Desc: FG01024.1 [Gibberella zeae PH-1] gi|91207410|sp|Q4IP34.1|PRP5_GIBZE RecName: Full=Pre-mRNA-processing ATP-dependent RNA helicase PRP5
  misc_feature (1)..(997): NCBI GI: 145614688 Blast Desc: MGG_11403 [Magnaporthe grisea 70-15] gi|152032666|sp|A4RN46.1|PRP5_MAGGR RecName: Full=Pre-mRNA-processing ATP-dependent RNA helicase PRP5 grisea
  misc_feature (11)..(997): NCBI GI: 256734450 Blast Desc: NECHADRAFT_74731 [Nectria haematococca mpVI 77-13-4]
  misc_feature (26)..(997): NCBI GI: 261356277 Blast Desc: pre-mRNA-processing ATP-dependent RNA helicase PRP5 [Verticillium albo-atrum VaMs.102]
  misc_feature (3)..(996): NCBI GI: 116207046 Blast Desc: CHGG_02816 [Chaetomium globosum CBS 148.51] gi|118597490|sp|Q2HAD8.1|PRP5_CHAGB RecName: Full=Pre-mRNA-processing ATP-dependent RNA helicase PRP5 globosum
  misc_feature (9)..(997): NCBI GI: 156053343 Blast Desc: SS1G_06839 [Sclerotinia sclerotiorum 1980] gi|160419162|sp|A7ENE0.1|PRP5_SCLS1 RecName: Full=Pre-mRNA-processing ATP-dependent RNA helicase prp5 1980]
  misc_feature (3)..(997): NCBI GI: 171680181 Blast Desc: protein product [Podospora anserina] gi|170939717|emb|CAP64943.1| protein product [Podospora anserina]
  misc_feature (9)..(997): NCBI GI: 85118552 Blast Desc: NCU02696 [Neurospora crassa OR74A] gi|74662807|sp|Q7SH33.1|PRP5_NEUCR RecName: Full=Pre-mRNA-processing ATP-dependent RNA helicase prp-5 crassa
  misc_feature (9)..(997): NCBI GI: 154315049 Blast Desc: BC1G_04866 [Botryotinia fuckeliana B05.10] gi|160419161|sp|A6RW79.1|PRP5_BOTFB RecName: Full=Pre-mRNA-processing ATP-dependent RNA helicase prp5 B05.10]
  misc_feature (8)..(997): NCBI GI: 115491279 Blast Desc: ATEG_00181 [Aspergillus terreus NIH2624] gi|121743211|sp|Q0D1K3.1|PRP5_ASPTN RecName: Full=Pre-mRNA-processing ATP-dependent RNA helicase prp5 terreus
MEEEARGQRKHKEKESTPGATRKLLAEMDEKTNGTSASPTPASPADVVSPAVEYAGKFDPKAIAKKSASKQPTAGSKLGAVGPPSAAPIAPPTQAKVSSASALPQTRTSGFGFHKQNAEDKAPQKRKLMLDEEETSDRKLAKLPSLPLAVVDDTPYENQDDEGAEDDDAGAFALDEEEEAAAARAAQERREERIAQETAQQETEMQIDSVQEDTSSQVAKNEEEKPTSTAMEVDDDDEEVDPLDAFMNDLDTKTPAKSSLAPQKDSKKKTAQEPEAYFSDDEYDYRKENGNDEFAAALASKQRKKKDIPFHDYSKLELESIRKNFWVEPAELSQMTEAELVDLRIELDGIKVAGKDVPKPVQRWSHLALSRKTLDVIDSLGFERPTPIQMQAFPAIMSGRDVIGVAKTGSGKTLAFLLPMFRHIKDQSALRENDGPIGLIMTPTRELATQIHRDCKPFLKSMNMRAVCAYGGAPIKDHIAELKRGAEIVVCTPGRMIDLLAANQGRVTNLKRVTYVVLDEADRMFDMGFEPQVMKIFANMRADRQTILFSATMPRAMDSLAKKVLNNPVEITVGGKSVVAPEITQIVEIREEETKFLRTLELLGELYDKDEDARTLIFVERQEKADDLLKDLLQKGYPCMSIHGGKDQIDRDSTIQDFKSGVVPILIATSVAARGLDVKQLKLVVNFDAPNHLEDYVHRAGRTGRAGNKGTAVTFITSNQENCAPGISKALEQSGQPVPEQLEEMRKAFRKKVKSGEAKDQSGFGGKGLERLDQEREAARQREQKTHRTEGDEEEDKKEEKGASDKKFDKAAAAIQSASSGIQSRDAAPKVEIEPSALKFTIHKREDAAPSTSGSGGNNALDKVSLAASAINARLGRAGQTRPGQPIDNKGPDAGAFHATLEINDFPQKARWAVTNRTNVAKILDSTGTSITTKGNFYPANAEVPAGEAKLYILVEGDTEKVVANAMDQLTTLLKEGTLAAADADNRAPIGGRYTVT

SEQ ID NO: 18387 - DNA, 4379 bp, Muscodor strobelii; identical to SEQ ID NO: 18384
  misc_feature: SGI EST ID NO. CUFF.43218.0
  misc_feature: Variant of the nucleotide sequence at SEQ ID NO 18385

SEQ ID NO: 18388 - DNA, 1113 bp, Muscodor strobelii
  misc_feature: SGI cDNA ID NO. 566164
  misc_feature: Encodes the peptide sequence at SEQ ID NO 18389
atgcctcccgccgagcaggagaaagtgagtctcggccgagtcctcgtcataggcggctgtggatttctcgggcaccatgtcgtcaacctcttgctgcgagactggaaagcctctgtctcggtcatcgatctcaagtgccagcgcaatcgccgccctgcctccgacggcattgactacgtcgaagcagacatcaccgacgccgacggtctcttgaaactctttgggcgtctgcgtcccgacgtagtcatccacaccgcctcgcctccggcccagggcttgggcgccatctccaacgagatattttacaaggtcaatgtcgagggcacacgagccgtgatcaaggcctgccaggccaatggcgtcaaggcattggtctacacgagctccgccagtgttatcagcgacaacaaatcagatctcattaatgccaacgaggactaccccgtgatcaggggcaagctgcagtccgaatactactcagagaccaaggctcatgccgaacaactggtgatagaagcaaatagaggcgagggcgacctcctcacaaccgccatccggccctcaggtatcttcggcgagggcgacatgcagctagtataccatgcaatcaacgtctaccgccagggcaacgacaaggtccaagtaggagacaacactaacatgttcgacttcacatacgccgagaacgtagcgcatgcgcatctcctcgccgcaaacgcgctcctcgtgaccgccgcctccaagacagcacccctcgaccacgagaaagtagacggcgaggcgtttttggtatcaaatggtagcccgatatacttctgggacatgatgcgatccatctggcacgaagccggatcccagaagggcccagactccgcgtggattctcagccgcgatcttggtctgacgctcggcttcttcggcgagatgtttggcaagatctcagggaagacgccttctctgacccgccaacgcattgttttcagtacgatgacacggtattatgacatatcgaaagcccgacggcgcttaggctacgaaccccttaccagtctcgccgatggcgttaggcgtacggtgaagtggaccttggagcaggagcagaaggcgaagtaa

SEQ ID NO: 18389 - protein, 370 aa, Muscodor strobelii
  misc_feature: SGI Peptide ID NO. 566164
  misc_feature (15)..(297): Pfam Id: PF01073 Pfam Desc: 3-beta hydroxysteroid dehydrogenase/isomerase family
  misc_feature (12)..(146): Pfam Id: PF00106 Pfam Desc: short chain dehydrogenase
  misc_feature (14)..(265): Pfam Id: PF01370 Pfam Desc: NAD dependent epimerase/dehydratase family
  misc_feature (16)..(234): Pfam Id: PF07993 Pfam Desc: Male sterility protein
  misc_feature (14)..(240): Pfam Id: PF01370 Pfam Desc: NAD dependent epimerase/dehydratase family
  misc_feature (99)..(193): Pfam Id: PF07993 Pfam Desc: Male sterility protein
  misc_feature (4)..(367): NCBI GI: 171680175 Blast Desc: protein product [Podospora anserina] gi|170939714|emb|CAP64940.1| protein product [Podospora anserina]
  misc_feature (4)..(370): NCBI GI: 85118539 Blast Desc: NCU02693 [Neurospora crassa OR74A] gi|28927275|gb|EAA36230.1| conserved [Neurospora crassa OR74A] gi|38567226|emb|CAE76518.1| related to C-3 sterol dehydrogenase
  misc_feature (4)..(370): NCBI GI: 116207052 Blast Desc: conserved [Chaetomium globosum CBS 148.51] gi|88183416|gb|EAQ90884.1| conserved [Chaetomium globosum CBS 148.51]
  misc_feature (11)..(366): NCBI GI: 261356198 Blast Desc: sterol-4-alpha-carboxylate 3-dehydrogenase [Verticillium albo-atrum VaMs.102]
  misc_feature (6)..(368): NCBI GI: 145614678 Blast Desc: MGG_11399 [Magnaporthe grisea 70-15] gi|145021582|gb|EDK05711.1| MGG_11399 [Magnaporthe grisea 70-15]
  misc_feature (11)..(368): NCBI GI: 256735088 Blast Desc: [Nectria haematococca mpVI 77-13-4]
  misc_feature (11)..(369): NCBI GI: 46108642 Blast Desc: FG01203.1 [Gibberella zeae PH-1]
  misc_feature (4)..(370): NCBI GI: 156050991 Blast Desc: SS1G_08084 [Sclerotinia sclerotiorum 1980] gi|154692483|gb|EDN92221.1| SS1G_08084 [Sclerotinia sclerotiorum 1980]
  misc_feature (10)..(369): NCBI GI: 189203845 Blast Desc: C-3 sterol dehydrogenase/C-4 decarboxylase family protein [Pyrenophora tritici-repentis Pt-1C-BFP] gi|187985357|gb|EDU50845.1| C-3 sterol dehydrogenase/C-4 family
  misc_feature (6)..(368): NCBI GI: 154296743 Blast Desc: BC1G_12399 [Botryotinia fuckeliana B05.10] gi|150843238|gb|EDN18431.1| BC1G_12399 [Botryotinia fuckeliana B05.10]
  misc_feature (9)..(368): SWISSPROT Homolog: EC 1.1.1.170 Sterol-4-alpha-carboxylate 3-dehydrogenase (decarboxylating)
MPPAEQEKVSLGRVLVIGGCGFLGHHVVNLLLRDWKASVSVIDLKCQRNRRPASDGIDYVEADITDADGLLKLFGRLRPDVVIHTASPPAQGLGAISNEIFYKVNVEGTRAVIKACQANGVKALVYTSSASVISDNKSDLINANEDYPVIRGKLQSEYYSETKAHAEQLVIEANRGEGDLLTTAIRPSGIFGEGDMQLVYHAINVYRQGNDKVQVGDNTNMFDFTYAENVAHAHLLAANALLVTAASKTAPLDHEKVDGEAFLVSNGSPIYFWDMMRSIWHEAGSQKGPDSAWILSRDLGLTLGFFGEMFGKISGKTPSLTRQRIVFSTMTRYYDISKARRRLGYEPLTSLADGVRRTVKWTLEQEQKAK

SEQ ID NO: 18390 - DNA, 1811 bp, Muscodor strobelii
  misc_feature: SGI EST ID NO. CUFF.43225.0
  misc_feature: Variant of the nucleotide sequence at SEQ ID NO 18388
ataaaaagacgtatgagtgactggtgtcgtgagtgtcaccggaagagggcatgtaagcgagatgcgaggctactacagcacgagcctgccgagatcaattgggtctgcaagatcagatagatatactcatatgtaggaagatgcagcatctctgcaaggtggatcaggtcacatcccagcagtctatcccagcatatcccagtccaattcagggtccatgactccatcacggagcgagccattagccatcctgctggatccgaatacgcaatttcccatttggaattgcccacttgagacctgtcaattatattttgactatatcaccttctgcgtacctgagtctcttgcaacgacacgactcgttgcatcctcatccccgactcgcgtccgtcgcctgccattggcacctctacaccatctctacaccacctcgacgacacacctcctcgccctccccgtgtcccagcccaatcctgaaccacccagcaacaccccaccacgccaccgtcgcaatgcctcccgccgagcaggagaaagtgagtctcggccgagtcctcgtcataggcggctgtggatttctcgggcaccatgtcgtcaacctcttgctgcgagactggaaagcctctgtctcggtcatcgatctcaagtgccagcgcaatcgccgccctgcctccgacggcattgactacgtcgaagcagacatcaccgacgccgacggtctcttgaaactctttgggcgtctgcgtcccgacgtagtcatccacaccgcctcgcctccggcccagggcttgggcgccatctccaacgagatattttacaaggtcaatgtcgagggcacacgagccgtgatcaaggcctgccaggccaatggcgtcaaggcattggtctacacgagctccgccagtgttatcagcgacaacaaatcagatctcattaatgccaacgaggactaccccgtgatcaggggcaagctgcagtccgaatactactcagagaccaaggctcatgccgaacaactggtgatagaagcaaatagaggcgagggcgacctcctcacaaccgccatccggccctcaggtatcttcggcgagggcgacatgcagctagtataccatgcaatcaacgtctaccgccagggcaacgacaaggtccaagtaggagacaacactaacatgttcgacttcacatacgccgagaacgtagcgcatgcgcatctcctcgccgcaaacgcgctcctcgtgaccgccgcctccaagacagcacccctcgaccacgagaaagtagacggcgaggcgtttttggtatcaaatggtagcccgatatacttctgggacatgatgcgatccatctggcacgaagccggatcccagaagggcccagactccgcgtggattctcagccgcgatcttggtctgacgctcggcttcttcggcgagatgtttggcaagatctcagggaagacgccttctctgacccgccaacgcattgttttcagtacgatgacacggtattatgacatatcgaaagcccgacggcgcttaggctacgaaccccttaccagtctcgccgatggcgttaggcgtacggtgaagtggaccttggagcaggagcagaaggcgaagtaatgggaaaggggggccggctaggaaaatgggaaaatatatatacataatacatagagcggcaacctcataatttgacgatgatgacgataatagattcggcgggttggtacacacacaattccatattgcatgccgtgcatgttgaacacataaccgtctcccatttgtctgtctagatcatct

SEQ ID NO: 18391 - DNA, 1353 bp, Muscodor strobelii
  misc_feature: SGI cDNA ID NO. 566165
  misc_feature: Encodes the peptide sequence at SEQ ID NO 18392
atggctgaccagtcaatgatccggatcaccaaggaattgggcgacatccagaagaactcggatttgtccctagctgttgccctccgcgacactgacgtccgaaacatcaaggccttaatcatcggccctcacgagacgccttatgaattcggattcttcgagttcaatgttaagttcggcaaaaattatccggagaaatcaccgtcggtcagctgtgtcacgaccaatggtggtcgctgtcgcttcaacccgaacatctatgcctcgggcaaagtgtgcctgtcaattcttggcacatggcgaggcgagccaggcgaagaatggtctccggcccaaggactggaatcgattcttttatccatacagagcctcatgtcttctaatccctacgaaaacgagcccggattcgacacggcaaacgagccttcagacaagcagaaccagaaacattacatcaacaagatccggcacgaaaccctacgtattgccgtaatccagagactagaagagtttctctcgctcaacatcggcctagatccccagaccgaagcacaacaagatcagagtggagacgaagatgctgctgacctggaggagctagacgtgccttgggaacccttcaaagacctctacaagacgcgatttctatggtattacgactcatacctagaaagcattgataaggccaagaaggagaacgagaaagaggtcaaagacggcgcgtcattcacacgaatgcccttcgagggatctagtaacaccatggagggcaagttcaactacacagaattgaaacaacgtctgcaacggatcaaaggcacattagatgcggagcccactaaatgggcagtagaaggcgcgttggcgaagacgaaggaccttacggtggccgtcaatctcatgcgtcaattcgagcaggtcaaagagtcattcaggagaggcgacgtgccgcacaacgtcgagctagaggacaacaatcctttcgtttggacattgacatacttcgggcgtcctatgacgaatctcgatggtggcatgttcaagatccgactcaacttcagcccccgtttccctgaagaacagccacgtgccagacttttgacgcctatcttccaccatcgcgtcacgactgacggtataccctgctatacgccgaaccgcagccgcacggacgatgtaagacagcacattgatgccatcttcaaggctctggaagaagagaatccgccctacgatccgagagtgcaggtccacccggaggcgcacaagctctactggggcggtgcagatgggcgaaagctctacaatcgtagacttcgccggtcagtgcaagatagcctagattcgttctga

SEQ ID NO: 18392 - protein, 450 aa, Muscodor strobelii
  misc_feature: SGI Peptide ID NO. 566165
  misc_feature (8)..(159): Pfam Id: PF00179 Pfam Desc: Ubiquitin-conjugating enzyme
  misc_feature (8)..(137): Pfam Id: PF00179 Pfam Desc: Ubiquitin-conjugating enzyme
  misc_feature (1)..(448): NCBI GI: 154296767 Blast Desc: BC1G_12411 [Botryotinia fuckeliana B05.10] gi|150843250|gb|EDN18443.1| BC1G_12411 [Botryotinia fuckeliana B05.10]
  misc_feature (1)..(446): NCBI GI: 261356113 Blast Desc: ubiquitin-conjugating enzyme [Verticillium albo-atrum VaMs.102]
  misc_feature (3)..(448): NCBI GI: 256734365 Blast Desc: [Nectria haematococca mpVI 77-13-4]
  misc_feature (3)..(448): NCBI GI: 38567231 Blast Desc: related to ubiquitin-conjugating enzyme [Neurospora crassa]
  misc_feature (22)..(448): NCBI GI: 171680167 Blast Desc: protein product [Podospora anserina] gi|170939710|emb|CAP64936.1| protein product [Podospora anserina]
  misc_feature (1)..(446): NCBI GI: 189203843 Blast Desc: ubiquitin-conjugating enzyme E2Z [Pyrenophora tritici-repentis Pt-1C-BFP] gi|187985356|gb|EDU50844.1| ubiquitin-conjugating enzyme E2Z [Pyrenophora tritici-repentis
  misc_feature (3)..(448): NCBI GI: 46108650 Blast Desc: FG01207.1 [Gibberella zeae PH-1]
  misc_feature (3)..(448): NCBI GI: 85118516 Blast Desc: NCU02688 [Neurospora crassa OR74A] gi|28927270|gb|EAA36225.1| NCU02688 [Neurospora crassa OR74A]
  misc_feature (1)..(448): NCBI GI: 119195977 Blast Desc: CIMG_02363 [Coccidioides immitis RS]
  misc_feature (1)..(448): NCBI GI: 226283672 Blast Desc: conserved [Paracoccidioides brasiliensis Pb01]
  misc_feature (2)..(272): SWISSPROT Homolog: EC 6.3.2.19 Ubiquitin--protein ligase
MADQSMIRITKELGDIQKNSDLSLAVALRDTDVRNIKALIIGPHETPYEFGFFEFNVKFGKNYPEKSPSVSCVTTNGGRCRFNPNIYASGKVCLSILGTWRGEPGEEWSPAQGLESILLSIQSLMSSNPYENEPGFDTANEPSDKQNQKHYINKIRHETLRIAVIQRLEEFLSLNIGLDPQTEAQQDQSGDEDAADLEELDVPWEPFKDLYKTRFLWYYDSYLESIDKAKKENEKEVKDGASFTRMPFEGSSNTMEGKFNYTELKQRLQRIKGTLDAEPTKWAVEGALAKTKDLTVAVNLMRQFEQVKESFRRGDVPHNVELEDNNPFVWTLTYFGRPMTNLDGGMFKIRLNFSPRFPEEQPRARLLTPIFHHRVTTDGIPCYTPNRSRTDDVRQHIDAIFKALEEENPPYDPRVQVHPEAHKLYWGGADGRKLYNRRLRRSVQDSLDSF

SEQ ID NO: 18393 - DNA, 3388 bp, Muscodor strobelii
  misc_feature: SGI EST ID NO. CUFF.43355.0
  misc_feature: Variant of the nucleotide sequence at SEQ ID NO 18391
taacaaccccgcagtaaattcaaaggcaaaaggtaagtgcagtgactaactcaagaggaccccgctagcaggtcgggctgcgagttcaacagctgattctcagtgacactaccttccaaccttctacaagtgcttcaggtttaaagttcagtccagcatcgaaacaagccccctgacaaacaacgcacccagcctttttatctcggcctaatccgatgctggcaactctgtacccgacatcgacactctcgtttctgtagtctcctctcattatcctttttctggcattgagtgccaacacgagcgcccttttcacgctccagttcccaattcacacctcccgccaaggcattctaatgaggtgctcgaattcagctttcccatttcgtcgtaaccatggctgaccagtcaatgatccggatcaccaaggaattgggcgacatccagaagaactcggatttgtccctagctgttgccctccgcgacactgacgtccgaaacatcaaggccttaatcatcggccctcacgagacgccttatgaattcggattcttcgagttcaatgttaagttcggcaaaaattatccggagaaatcaccgtcggtcagctgtgtcacgaccaatggtggtcgctgtcgcttcaacccgaacatctatgcctcgggcaaagtgtgcctgtcaattcttggcacatggcgaggcgagccaggcgaagaatggtctccggcccaaggactggaatcgattcttttatccatacagagcctcatgtcttctaatccctacgaaaacgagcccggattcgacacggcaaacgagccttcagacaagcagaaccagaaacattacatcaacaagatccggcacgaaaccctacgtattgccgtaatccagagactagaagagtttctctcgctcaacatcggcctagatccccagaccgaagcacaacaagatcagagtggagacgaagatgctgctgacctggaggagctagacgtgccttgggaacccttcaaagacctctacaagacgcgatttctatggtattacgactcatacctagaaagcattgataaggccaagaaggagaacgagaaagaggtcaaagacggcgcgtcattcacacgaatgcccttcgagggatctagtaacaccatggagggcaagttcaactacacagaattgaaacaacgtctgcaacggatcaaaggcacattagatgcggagcccactaaatgggcagtagaaggcgcgttggcgaagacgaaggaccttacggtggccgtcaatctcatgcgtcaattcgagcaggtcaaagagtcattcaggagaggcgacgtgccgcacaacgtcgagctagaggacaacaatcctttcgtttggacattgacatacttcgggcgtcctatgacgaatctcgatggtggcatgttcaagatccgactcaacttcagcccccgtttccctgaagaacagccacgtgccagacttttgacgcctatcttccaccatcgcgtcacgactgacggtataccctgctatacgccgaaccgcagccgcacggacgatgtaagacagcacattgatgccatcttcaaggctctggaagaagagaatccgccctacgatccgagagtgcaggtccacccggaggcgcacaagctctactggggcggtgcagatgggcgaaagctctacaatcgtagacttcgccggtcagtgcaagatagcctagattcgttctgatcgggccgatggcatgcacactttctgtcatgagaaacaagagatggtttaaaaacaaaactggtttcagaaaggcgtttttcataggtaagggagcgagcgagcataagtcaggcgcctggagctattgtggagctagtccaactcggcatacgctctttagatacgatcagcagccgtgtgctggtaggcttccacgtattttgataatgggttgctatttctcttctgcgtaagatgatgacacgcgcatgcaagacaagaatgtcggtagagtccatacctcagggagtctgcagctgtcgatgtgagtagagaaacagaatatatacattaaatctacacagaatgcgccatattggccattagtatgaatatcgtaattcgtgtctcgtatttgctacattattctactacggtagactagcaatatctcatctttgcacaccgattaagtatgttccgtgccactagacttttctttctccttttccaccaaggaagatattttgggtattttgatcttgcgatcaatcctatccttccctggcgcgtacggagctgcgacaccaatatagcgttcctgcttgccctcaccagctctgaactcaaaatggccatcggccgtcatgacggcgggcgtaccttgcgacggtcgcatgacttgctcgttgtgtagtttgtcgagcgattcgcctacgacggcatactgcgaccagttgataggtgggcatcgaacgatattctgtggtttggggattgcgccccagtcggtggtggttgtggatgtatttgatgtagatggagcgatactgctgtctgagggtggtggttttatcttagctgcggactcgggctcggcttcactatcgctttcgctgtcggagttttctttgctgtttgggtccctttgtccctcgacgcggattttatttgatgttagatcgcggatgaaagattcggggtcggatagagctgcggtcttgatgcgactgatcgtcaccatgtcgcgctctgcttttcgcttttgcatctgtaggacggagatggcggatttgagggccaggacgtctgggttggattcgaagtctattggttctggtaatggagctggtgcggctacggagtcgctgtgggtgttgtgggtgaatgtctgccttggtgggagggcttgtgggtttagaggcggcgttatgggactgtatgttggtcgggttggggatgatgagcgggagttgtctcgcgattcgtgggttgcgaatggtgcagttgcgggtgcgggcgcgggtatagatatgggtaatggcgccggcactggcactggaatgggtgttgtcgatgtcatgactggcggcgggtttgtgggagtttgacttgttgaggccgaagcggcctgttgttcgctgaatgtgagtcctggcatcgtgcagcgtggcaatgatacgaggggatatggcgatttcggagccaaggattcagagacgtgggtaaaggtattgagagatagtagagggagatgcagccgagatacaggtcaaataaagaaagagaagccttcgagtcgagagtcactagtcataagccccgagtgtgatgaaggaatttgtctggcgcaaaatgtcggatgatgatgttgttg

SEQ ID NO: 18394 - DNA, 1365 bp, Muscodor strobelii
  misc_feature: SGI cDNA ID NO. 566166
  misc_feature: Encodes the peptide sequence at SEQ ID NO 18395
atggctgaccagtcaatgatccggatcaccaaggaattgggcgacatccagaagaactcggatttgtccctagctgttgccctccgcgacactgacgtccgaaacatcaaggccttaatcatcggccctcacgagacgccttatgaattcggattcttcgagttcaatgttaagttcggcaaaacctcctatctagattatccggagaaatcaccgtcggtcagctgtgtcacgaccaatggtggtcgctgtcgcttcaacccgaacatctatgcctcgggcaaagtgtgcctgtcaattcttggcacatggcgaggcgagccaggcgaagaatggtctccggcccaaggactggaatcgattcttttatccatacagagcctcatgtcttctaatccctacgaaaacgagcccggattcgacacggcaaacgagccttcagacaagcagaaccagaaacattacatcaacaagatccggcacgaaaccctacgtattgccgtaatccagagactagaagagtttctctcgctcaacatcggcctagatccccagaccgaagcacaacaagatcagagtggagacgaagatgctgctgacctggaggagctagacgtgccttgggaacccttcaaagacctctacaagacgcgatttctatggtattacgactcatacctagaaagcattgataaggccaagaaggagaacgagaaagaggtcaaagacggcgcgtcattcacacgaatgcccttcgagggatctagtaacaccatggagggcaagttcaactacacagaattgaaacaacgtctgcaacggatcaaaggcacattagatgcggagcccactaaatgggcagtagaaggcgcgttggcgaagacgaaggaccttacggtggccgtcaatctcatgcgtcaattcgagcaggtcaaagagtcattcaggagaggcgacgtgccgcacaacgtcgagctagaggacaacaatcctttcgtttggacattgacatacttcgggcgtcctatgacgaatctcgatggtggcatgttcaagatccgactcaacttcagcccccgtttccctgaagaacagccacgtgccagacttttgacgcctatcttccaccatcgcgtcacgactgacggtataccctgctatacgccgaaccgcagccgcacggacgatgtaagacagcacattgatgccatcttcaaggctctggaagaagagaatccgccctacgatccgagagtgcaggtccacccggaggcgcacaagctctactggggcggtgcagatgggcgaaagctctacaatcgtagacttcgccggtcagtgcaagatagcctagattcgttctga

SEQ ID NO: 18395 - protein, 454 aa, Muscodor strobelii
  misc_feature: SGI Peptide ID NO. 566166
  misc_feature (8)..(163): Pfam Id: PF00179 Pfam Desc: Ubiquitin-conjugating enzyme
  misc_feature (8)..(141): Pfam Id: PF00179 Pfam Desc: Ubiquitin-conjugating enzyme
  misc_feature (1)..(450): NCBI GI: 261356113 Blast Desc: ubiquitin-conjugating enzyme [Verticillium albo-atrum VaMs.102]
  misc_feature (1)..(452): NCBI GI: 154296767 Blast Desc: BC1G_12411 [Botryotinia fuckeliana B05.10] gi|150843250|gb|EDN18443.1| BC1G_12411 [Botryotinia fuckeliana B05.10]
  misc_feature (3)..(452): NCBI GI: 256734365 Blast Desc: [Nectria haematococca mpVI 77-13-4]
  misc_feature (3)..(452): NCBI GI: 38567231 Blast Desc: related to ubiquitin-conjugating enzyme [Neurospora crassa]
  misc_feature (22)..(452): NCBI GI: 171680167 Blast Desc: protein product [Podospora anserina] gi|170939710|emb|CAP64936.1| protein product [Podospora anserina]
  misc_feature (1)..(450): NCBI GI: 189203843 Blast Desc: ubiquitin-conjugating enzyme E2Z [Pyrenophora tritici-repentis Pt-1C-BFP] gi|187985356|gb|EDU50844.1| ubiquitin-conjugating enzyme E2Z [Pyrenophora tritici-repentis
  misc_feature (3)..(452): NCBI GI: 46108650 Blast Desc: FG01207.1 [Gibberella zeae PH-1]
  misc_feature (3)..(452): NCBI GI: 85118516 Blast Desc: NCU02688 [Neurospora crassa OR74A] gi|28927270|gb|EAA36225.1| NCU02688 [Neurospora crassa OR74A]
  misc_feature (1)..(452): NCBI GI: 226283672 Blast Desc: conserved [Paracoccidioides brasiliensis Pb01]
  misc_feature (1)..(452): NCBI GI: 119195977 Blast Desc: CIMG_02363 [Coccidioides immitis RS]
  misc_feature (2)..(276): SWISSPROT Homolog: EC 6.3.2.19 Ubiquitin--protein ligase
MADQSMIRITKELGDIQKNSDLSLAVALRDTDVRNIKALIIGPHETPYEFGFFEFNVKFGKTSYLDYPEKSPSVSCVTTNGGRCRFNPNIYASGKVCLSILGTWRGEPGEEWSPAQGLESILLSIQSLMSSNPYENEPGFDTANEPSDKQNQKHYINKIRHETLRIAVIQRLEEFLSLNIGLDPQTEAQQDQSGDEDAADLEELDVPWEPFKDLYKTRFLWYYDSYLESIDKAKKENEKEVKDGASFTRMPFEGSSNTMEGKFNYTELKQRLQRIKGTLDAEPTKWAVEGALAKTKDLTVAVNLMRQFEQVKESFRRGDVPHNVELEDNNPFVWTLTYFGRPMTNLDGGMFKIRLNFSPRFPEEQPRARLLTPIFHHRVTTDGIPCYTPNRSRTDDVRQHIDAIFKALEEENPPYDPRVQVHPEAHKLYWGGADGRKLYNRRLRRSVQDSLDSF

SEQ ID NO: 18396 - DNA, 3388 bp, Muscodor strobelii; identical to SEQ ID NO: 18393
  misc_feature: SGI EST ID NO. CUFF.43355.0
  misc_feature: Variant of the nucleotide sequence at SEQ ID NO 18394

SEQ ID NO: 18397 - DNA, 894 bp, Muscodor strobelii
  misc_feature: SGI cDNA ID NO. 566167
  misc_feature: Reduced expression when VOC is produced
  misc_feature: Encodes the peptide sequence at SEQ ID NO 18398
atgacatcgacaacacccattccagtgccagtgccggcgccattacccatatctatacccgcgcccgcacccgcaactgcaccattcgcaacccacgaatcgcgagacaactcccgctcatcatccccaacccgaccaacatacagtcccataacgccgcctctaaacccacaagccctcccaccaaggcagacattcacccacaacacccacagcgactccgtagccgcaccagctccattaccagaaccaatagacttcgaatccaacccagacgtcctggccctcaaatccgccatctccgtcctacagatgcaaaagcgaaaagcagagcgcgacatggtgacgatcagtcgcatcaagaccgcagctctatccgaccccgaatctttcatccgcgatctaacatcaaataaaatccgcgtcgagggacaaagggacccaaacagcaaagaaaactccgacagcgaaagcgatagtgaagccgagcccgagtccgcagctaagataaaaccaccaccctcagacagcagtatcgctccatctacatcaaatacatccacaaccaccaccgactggggcgcaatccccaaaccacagaatatcgttcgatgcccacctatcaactggtcgcagtatgccgtcgtaggcgaatcgctcgacaaactacacaacgagcaagtcatgcgaccgtcgcaaggtacgcccgccgtcatgacggccgatggccattttgagttcagagctggtgagggcaagcaggaacgctatattggtgtcgcagctccgtacgcgccagggaaggataggattgatcgcaagatcaaaatacccaaaatatcttccttggtggaaaaggagaaagaaaagtctagtggcacggaacatacttaa

SEQ ID NO: 18398 - protein, 297 aa, Muscodor strobelii
  misc_feature: SGI Peptide ID NO. 566167
  misc_feature (42)..(276): NCBI GI: 256735087 Blast Desc: NECHADRAFT_98701 [Nectria haematococca mpVI 77-13-4]
  misc_feature (87)..(274): NCBI GI: 39944802 Blast Desc: MGG_04383 [Magnaporthe grisea 70-15] gi|145021575|gb|EDK05704.1| MGG_04383 [Magnaporthe grisea 70-15]
  misc_feature (36)..(258): NCBI GI: 154319143 Blast Desc: BC1G_02523 [Botryotinia fuckeliana B05.10] gi|150856954|gb|EDN32146.1| BC1G_02523 [Botryotinia fuckeliana B05.10]
  misc_feature (40)..(274): NCBI GI: 171680169 Blast Desc: protein product [Podospora anserina] gi|170939711|emb|CAP64937.1| protein product [Podospora anserina]
  misc_feature (23)..(245): NCBI GI: 261356114 Blast Desc: conserved [Verticillium albo-atrum VaMs.102]
  misc_feature (37)..(279): NCBI GI: 116207058 Blast Desc: CHGG_02822 [Chaetomium globosum CBS 148.51] gi|88183419|gb|EAQ90887.1| CHGG_02822 [Chaetomium globosum CBS 148.51]
  misc_feature (51)..(246): NCBI GI: 46108648 Blast Desc: FG01206.1 [Gibberella zeae PH-1]
  misc_feature (36)..(258): NCBI GI: 156063460 Blast Desc: SS1G_01848 [Sclerotinia sclerotiorum 1980] gi|154697182|gb|EDN96920.1| SS1G_01848 [Sclerotinia sclerotiorum 1980]
  misc_feature (80)..(276): NCBI GI: 226288311 Blast Desc: conserved [Paracoccidioides brasiliensis Pb18]
  misc_feature (80)..(276): NCBI GI: 225683213 Blast Desc: conserved [Paracoccidioides brasiliensis Pb03]
  misc_feature: Useful for introducing or modulating the production of volatile compounds
MTSTTPIPVPVPAPLPISIPAPAPATAPFATHESRDNSRSSSPTRPTYSPITPPLNPQALPPRQTFTHNTHSDSVAAPAPLPEPIDFESNPDVLALKSAISVLQMQKRKAERDMVTISRIKTAALSDPESFIRDLTSNKIRVEGQRDPNSKENSDSESDSEAEPESAAKIKPPPSDSSIAPSTSNTSTTTTDWGAIPKPQNIVRCPPINWSQYAVVGESLDKLHNEQVMRPSQGTPAVMTADGHFEFRAGEGKQERYIGVAAPYAPGKDRIDRKIKIPKISSLVEKEKEKSSGTEHT

SEQ ID NO: 18399 - DNA, 474 bp, Muscodor strobelii
  misc_feature: SGI cDNA ID NO. 566168
  misc_feature: Reduced expression when VOC is produced
  misc_feature: Encodes the peptide sequence at SEQ ID NO 18400
atgggcgcaattgacccagcggatggctcgcatgccttgcgcagcgcaaatggcgactttggtgacgatccagcgtgtcagcaccgtcccgctggcatgacagacaatgctaagcgtaaagcgaaagagggaaagcctcgctggctatcacagctcaaggattgggtgactgttgcggaaccatcaaaccaggccttgaaagactacaagaagcaaacgtaccaaaaagccggaattgcatatgatgatcctcgagctaatgccaagcttcacttaccaattggtactctacctgcggaggccataaaaccaggaggtcgcggtctcgatcctgaagaaatggctctgcagaaagcaatgcatcgcaaaaaggcccgtgggtcgatgtgcaccgccagcacctcgcaaagctcgtgttatagcgaaagccactactcatcctcgagcagtattgggatgaggaattcttcgtga

SEQ ID NO: 18400 - protein, 157 aa, Muscodor strobelii
  misc_feature: SGI Peptide ID NO. 566168
  misc_feature (4)..(113): NCBI GI: 46108646 Blast Desc: FG01205.1 [Gibberella zeae PH-1]
  misc_feature (38)..(119): NCBI GI: 256734366 Blast Desc: NECHADRAFT_98702 [Nectria haematococca mpVI 77-13-4]
  misc_feature (40)..(122): NCBI GI: 261356115 Blast Desc: conserved [Verticillium albo-atrum VaMs.102]
  misc_feature (42)..(116): NCBI GI: 39944794 Blast Desc: [Magnaporthe grisea 70-15] gi|145021579|gb|EDK05708.1| [Magnaporthe grisea 70-15]
  misc_feature (49)..(124): NCBI GI: 85118531 Blast Desc: NCU02691 [Neurospora crassa OR74A] gi|28927273|gb|EAA36228.1| [Neurospora crassa OR74A] gi|38567228|emb|CAE76520.1| [Neurospora crassa]
  misc_feature: Useful for introducing or modulating the production of volatile compounds
MGAIDPADGSHALRSANGDFGDDPACQHRPAGMTDNAKRKAKEGKPRWLSQLKDWVTVAEPSNQALKDYKKQTYQKAGIAYDDPRANAKLHLPIGTLPAEAIKPGGRGLDPEEMALQKAMHRKKARGSMCTASTSQSSCYSESHYSSSSSIGMRNSS

SEQ ID NO: 18401 - DNA, 3354 bp, Muscodor strobelii
  misc_feature: SGI EST ID NO. CUFF.43227.0
  misc_feature: Variant of the nucleotide sequence at SEQ ID NO 18399
cattttgactactagacttatttgccacgagcggttagtataaaactacgtggagattatatgcttctcaccgggcaggccctctgtgacaatctagaacaagttcgtggaaccgcgccctagtcatcgaagcgagaaaatgcatagaaagaatccaaactgcgacaatgtctcactagatccatgcaactagcttaatttatgcgagcctgccataggttggaaaagacgtcgcaatttatatcaagaaacttattgcttttgcgtgaaacaaagcatggtggctgactggcgagatttggtgagaaaggagccgagagcttggatggcaagcgcccacgatctgactagaccgctccacatggcttcgaaataccagcgccgaagacaagttcgggattgcattgcttgaagaatctatcggcgctgtagaattatgtaattctcttttcttttctctcctgtcctcggctaatgacgtgcttttcttccgctggggccttcacattgccaatgcccgcgtggatgtgaccttcaagtgccatacctcgaggtttcccaaactacattccaaccatgacggcacttacctaacctacacattccgcacgtctgcccttcctattctggctatggatttggcgagctggcgttgttgaaacgctcatctaccctctttagattttgcatcttcttacgaggaaacttgaatccttcctctctcgtcttgatcggtttccagcagtctgtcccacgtggttgccatgtccctagctctgtcatgacactctcattcccactatagtcaagtcataaattgtcaaagagcaattgtactccatgggtctgcccatttagacgccatagagctgtttcacctatgagacaccacaccaggcatattaaagctttcatcttacgacacgagacatccaggcactaatcttcggtccgaaatttttgcatcagtgtccgctcacgacaacaagctatcccttgtaaatactaccaaaacactgtgccattgacatccgagtgaggcaaggcgttgtacgcttgacttcttcattgtcgtggcctttagctcggaggttattgtcttccttcgtacaatggtagggttcgttggacgtcttaggaagccaatgccgccagtcgtcctaggttcaccacgaaaagacggtgttttacacagcccaacgactcaaagctccgtaaaaaggacgcctcctgtgatacggaacttcagttatccaactagtatcgcttgtgggtatcggccaccaacaccaaacagcgagagagagcaaagtacatgggaccaacttggtgaaatctgtactttttcgtcatcggccgcacggtcagggcgagccaggactgcaggactagaagaccctttcttctacaccaacgagtgtgcatcttacagccgtctcgcggactacggtgagtccagtccggaagattcgaagcccttggcagacacagcttctaccccagagccagcattgctggggaaaagacaacgtcgaagtacattaccaggattatctacgtctcaagctcaactgtctcaactctagaagagcaccgagaaagcgggagccaaagagaaaacatcgaaatctccacgggtatcctctattggtgatcatatttttgcccaaacaacccatattaccgcaaaactaaaacgcaattccgtcgggaagcacagagcgtcgtcctcttttgacgtatcgcagctgcttttcttatcttctgaccgtctcgatcgtcccgtctccagctccggagtaccgctcattgacacgaaggatttttcgatcaactctgacgattctgcgcattccgcttacttgttgacaccctcgctttcacaaagcattccgatgggcgcaattgacccagcggatggctcgcatgccttgcgcagcgcaaatggcgactttggtgacgatccagcgtgtcagcaccgtcccgctggcatgacagacaatgctaagcgtaaagcgaaagagggaaagcctcgctggctatcacagctcaaggattgggtgactgttgcggaaccatcaaaccaggccttgaaagactacaagaagcaaacgtaccaaaaagccggaattgcatatgatgatcctcgagctaatgccaagcttcacttaccaattggtactctacctgcggaggccataaaaccaggaggtcgcggtctcgatcctgaagaaatggctctgcagaaagcaatgcatcgcaaaaaggcccgtgggtcgatgtgcaccgccagcacctcgcaaagctcgtgttatagcgaaagccactactcatcctcgagcagtattgggatgaggaattcttcgtgaaggatctggtcgccgcaacgaaatggagatcccgatagctaatcatcattcatttgtgtctatctcatgtggaggggagtgctcagttgtttggttgtatcgttcacagtatctcatttcctaacatatggtgcccgaatatcacacatgtgaagtgatagtatcgcaaatagaggcggagcccggacgtttgtcgttgattggggaaaatataagaacttcccgcattcctctacttagcttttgctcatatagtttatttcatccgcgcagtcaatatttcttacttgttgtgagcttgtcggtttcgcaaataatgttttcactcttgaatcataccttgaaacggacacgggtcacctttaagtagatgcaagatgctggccgaagtcacagaggagctagttttaagatctgacattttccaacgtgcacattttccgttcacaattgagataatcatacgtagcgcagattcctatcgtttagccaaatgcatcctatgttcagcttgtgtcatgcctcagtttccgggtcatctcgagactagtcctaactgtacaccttatttactctgtgcttgtccgatagacttctttccctccgtcctggcgcccgaacctccggagatgattcagagcatcctagcgacgtagcgggtctgccggccgggtgtggcccgaaatggacggccgtcatcatgggtgtccaaaaagtggttgtggcagtgttgatgatccgtcccgaggtatccaatgactccccagaaagtattcactggaaggaaatgccagtcttccttctccggttcgaaacttcacgagccgctccaattttgtcatgatgactagctctatctgcgaggcatgtcgcgctattgacttcggcacagttttgaaactacacccagctgagacttggcaagccgacgaatctgacagatttcggcgtattgtattggacgaaaatgcgaatcgatttgatt

SEQ ID NO: 18402 - DNA, 1803 bp, Muscodor strobelii
  misc_feature: SGI cDNA ID NO. 566169
  misc_feature: Encodes the peptide sequence at SEQ ID NO 18403
atgttcgtgcctaagctgattcctgacgctttcgatcacgagcaagtcaagttatggctacgacactgcaaaagcaaccacaagttcccatgtattgatgagattgagaccgtacagggtatgaagttgatcgactgcaatactttgaagatcgtgaaggttcgcccgggcatggcctggttagcattgagctatatgtggactaatatggactcggaccccaaagtcactactacagctagttcagacatgcttcccgacaacctcacattgactgtacagcatgctattcaagtcacacgaagcttgggatatagatatctatggattgatcgatactgcatagaccagaaagatgagacgcacaagcccagccaaatcgcagtgatggatgctatttatcgcggtgcagaacttaccctcatcgctgctacgactttggatggttttccgggcgtcggaactaccaaacgaaaaaaacaatgctacctcgagctcgataaatgcgtactagtccacactgggcctgacccgacatgggagactcgaaattctcgctggtggacaaggggttggactttccaggaaggtctcttgtcgcgccggcgactgatcttcacggatcaccaatcttggttcgaatgcggtcatataagttggatggaagctttgggcggattggagcttctcagaagtccggaagacttccaatgggagtcgaggtcgtctgtgccagctgtgcattcttggctggtctcaatggccaggatacgcaaaacaagagggcagtttgagaattgtgaagacgcagcagtagatctcgagcagttctttacaattgcttcgatttattccgggagagatctaaagttcgacagcgatgtgctaaatgcttttgctggtattgcacgatatctgtggaactcgcccgcgcaaacccgtcatttattaggtatcccgtatgtgttagattcgtgcatcccaagtcacgcagaggagtatttctttttttcggtctcctggctccacagcacaaaatctgagcctcgtcgacgtcccggtttcccatcatggacttggctgggctgggttggtgtggttcggtggctgacaggccgatacagtgggctggaatatacttatcccatgatgagaaagattcgtgtggaagaggacggtcaccaggttgccttggacagctaccttaacggcttgagcctcggccatcctcaacttatcggcgagacaaatattgttctttgctttgaagctcagttggttccaccatctgagttttgggttccaggaaacgacgtctcatcaactgagtcctcgagcagccaagaagagaaagatgaacaatggagcgaggaggatggatatatagaaggaatagaacaagttcaagagtctggtaacaatgagcctgatagttcaagggcgtccggccgtctttcaggggcaaagagcgtcaaatctaccgcatctgggcccgatcctagcaaatgggagaactgggcagtcggtgagcattatttttgggacgcttgcaagcctccagactgcgaccccgaaacctttataaagcggctcgaagctggtcaatggggctgcctcctgcttggagactataacggaaacggaggcttttctcatcgaagatttcttttgatagtcgagtggttggaaaacggattagcacagcggataggggccgtggtcttgaacaaccatccttactacgatgtagacgagttctttgagcatgacgatttcgagtggaagtctgtacgtcttgtctga

SEQ ID NO: 18403 - protein, 600 aa, Muscodor strobelii
  misc_feature: SGI Peptide ID NO. 566169
  misc_feature (60)..(196): Pfam Id: PF06985 Pfam Desc: Heterokaryon incompatibility protein (HET)
  misc_feature (1)..(371): NCBI GI: 256723982 Blast Desc: NECHADRAFT_86266 [Nectria haematococca mpVI 77-13-4]
  misc_feature (1)..(370): NCBI GI: 256731216 Blast Desc: [Nectria haematococca mpVI 77-13-4]
  misc_feature (3)..(369): NCBI GI: 256722891 Blast Desc: NECHADRAFT_87161 [Nectria haematococca mpVI 77-13-4]
  misc_feature (3)..(365): NCBI GI: 256728352 Blast Desc: NECHADRAFT_87690 [Nectria haematococca mpVI 77-13-4]
  misc_feature (19)..(367): NCBI GI: 256727917 Blast Desc: [Nectria haematococca mpVI 77-13-4]
  misc_feature (7)..(403): NCBI GI: 46121251 Blast Desc: FG05004.1 [Gibberella zeae PH-1]
  misc_feature (8)..(374): NCBI GI: 171693549 Blast Desc: protein product [Podospora anserina] gi|170946723|emb|CAP73526.1| protein product [Podospora anserina]
  misc_feature (6)..(367): NCBI GI: 171678749 Blast Desc: protein product [Podospora anserina] gi|170937444|emb|CAP62102.1| protein product [Podospora anserina]
  misc_feature (5)..(369): NCBI GI: 145239895 Blast Desc: An08g04760 [Aspergillus niger] gi|134077108|emb|CAK45449.1| protein product [Aspergillus niger]
  misc_feature (5)..(359): NCBI GI: 171686632 Blast Desc: protein product [Podospora anserina] gi|170943277|emb|CAP68930.1| protein product [Podospora anserina]
MFVPKLIPDAFDHEQVKLWLRHCKSNHKFPCIDEIETVQGMKLIDCNTLKIVKVRPGMAWLALSYMWTNMDSDPKVTTTASSDMLPDNLTLTVQHAIQVTRSLGYRYLWIDRYCIDQKDETHKPSQIAVMDAIYRGAELTLIAATTLDGFPGVGTTKRKKQCYLELDKCVLVHTGPDPTWETRNSRWWTRGWTFQEGLLSRRRLIFTDHQSWFECGHISWMEALGGLELLRSPEDFQWESRSSVPAVHSWLVSMARIRKTRGQFENCEDAAVDLEQFFTIASIYSGRDLKFDSDVLNAFAGIARYLWNSPAQTRHLLGIPYVLDSCIPSHAEEYFFFSVSWLHSTKSEPRRRPGFPSWTWLGWVGVVRWLTGRYSGLEYTYPMMRKIRVEEDGHQVALDSYLNGLSLGHPQLIGETNIVLCFEAQLVPPSEFWVPGNDVSSTESSSSQEEKDEQWSEEDGYIEGIEQVQESGNNEPDSSRASGRLSGAKSVKSTASGPDPSKWENWAVGEHYFWDACKPPDCDPETFIKRLEAGQWGCLLLGDYNGNGGFSHRRFLLIVEWLENGLAQRIGAVVLNNHPYYDVDEFFEHDDFEWKSVRLV

SEQ ID NO: 18404 - DNA, 746 bp, Muscodor strobelii
  misc_feature: SGI cDNA ID NO. 566170
  misc_feature: Encodes the peptide sequence at SEQ ID NO 18405
atgaaaaagctctggggaaccgaacaggacggcgatgagcgccccggctctgcgtcgcgggacgccgaggattcgactcctcccaatgagcatacccgcctcctcccaaaccgtgtcgatactacaagttatctgagccccgacgatccagcagtctcgccatacaacttgtggagtgttcgaattgtcagatatctaacagtgctcttcaccctcattgccttcgcatggtggctgatccttctggtgtctgcattcatcaccccacctggctttcacattcgtggatcggggttttttcctttcagctttgccagtgtggcgcttgtcaacttgctgttcacgctcatattcttctctttcccgtcgaaagcagtgagaatattgagtattgtcatcgccggtatactcctcatcgatgcgattcttttgatctcagttcaacagacgcgatacgaggaaggatgggtcggcatcgcaagtatcatatggacatttgtcatggctctttggacacttggcactgatcgccttgttgcatggggcaaaaacgaagaagaggagcgactgaccggccgagctgaaaacagacgcactctttccgaatggatcgctgttcttgtctcgactatttccctcgtcgtcattgctatcgtcgtctttttgatgacctgcacattgatattacgggctctcgatgctggtcttgcaccaccaggcaagatgtattgggttgatggtcaaag

SEQ ID NO: 18405 - protein, 248 aa, Muscodor strobelii
  misc_feature: SGI Peptide ID NO. 566170
  misc_feature (1)..(248): NCBI GI: 116207056 Blast Desc: CHGG_02821 [Chaetomium globosum CBS 148.51] gi|88183418|gb|EAQ90886.1| CHGG_02821 [Chaetomium globosum CBS 148.51]
  misc_feature (8)..(248): NCBI GI: 256734367 Blast Desc: NECHADRAFT_103079 [Nectria haematococca mpVI 77-13-4]
  misc_feature (1)..(248): NCBI GI: 156057401 Blast Desc: SS1G_04431 [Sclerotinia sclerotiorum 1980] gi|154702217|gb|EDO01956.1| SS1G_04431 [Sclerotinia sclerotiorum 1980]
  misc_feature (4)..(248): NCBI GI: 154324184 Blast Desc: BC1G_00491 [Botryotinia fuckeliana B05.10] gi|150842720|gb|EDN17913.1| BC1G_00491 [Botryotinia fuckeliana B05.10]
  misc_feature (18)..(246): NCBI GI: 171680171 Blast Desc: protein product [Podospora anserina] gi|170939712|emb|CAP64938.1| protein product [Podospora anserina]
  misc_feature (7)..(248): NCBI GI: 39944792 Blast Desc: MGG_04378 [Magnaporthe grisea 70-15] gi|145021580|gb|EDK05709.1| MGG_04378 [Magnaporthe grisea 70-15]
  misc_feature (1)..(248): NCBI GI: 169766714 Blast Desc: [Aspergillus oryzae RIB40] gi|238483479|ref|XP_002372978.1| mitochondrial integral membrane protein [Aspergillus flavus NRRL3357] gi|83765683|dbj|BAE55826.1|
  misc_feature (1)..(248): NCBI GI: 121703175 Blast Desc: integral membrane protein [Aspergillus clavatus NRRL 1] gi|119397995|gb|EAW08426.1| integral membrane protein [Aspergillus clavatus NRRL 1]
  misc_feature (1)..(246): NCBI GI: 225562904 Blast Desc: integral membrane protein [Ajellomyces capsulatus G186AR]
  misc_feature (1)..(246): NCBI GI: 240279729 Blast Desc: integral membrane protein [Ajellomyces capsulatus H143]
MKKLWGTEQDGDERPGSASRDAEDSTPPNEHTRLLPNRVDTTSYLSPDDPAVSPYNLWSVRIVRYLTVLFTLIAFAWWLILLVSAFITPPGFHIRGSGFFPFSFASVALVNLLFTLIFFSFPSKAVRILSIVIAGILLIDAILLISVQQTRYEEGWVGIASIIWTFVMALWTLGTDRLVAWGKNEEEERLTGRAENRRTLSEWIAVLVSTISLVVIAIVVFLMTCTLILRALDAGLAPPGKMYWVDGQ

SEQ ID NO: 18406 - DNA, 1349 bp, Muscodor strobelii
  misc_feature: SGI EST ID NO. CUFF.43236.0
  misc_feature: Variant of the nucleotide sequence at SEQ ID NO 18404
aaatgatgcgatgatgcggcacaactggtgaatacaagtattcgtagttcccatgccactgatgctatgatcgtctcacattagcccggacctttcaccccctaacgcgatcgagcaattctgacgtaaaacttgatatttgcttgaacctcggccatttgcgtcgaagaaaaacaattatacagtctgcaacatctaaaactctttttcggaactctctcttgtcttcgagttcaagatggatcccacagtctttagagtggaagctaccaatgtcttggtggttatagtcgtcatcccgttgctccaagcactagcgtcgccactaaacaaggcaatccgacattttataagctgccaggcagaacgacgccatcaacccgtctttgttaactgaaaccttgatttcccccgttgttttcccgcgcaacttcactaccaacgtatttaattactacggtaaaagtggacaaaatgaaaaagctctggggaaccgaacaggacggcgatgagcgccccggctctgcgtcgcgggacgccgaggattcgactcctcccaatgagcatacccgcctcctcccaaaccgtgtcgatactacaagttatctgagccccgacgatccagcagtctcgccatacaacttgtggagtgttcgaattgtcagatatctaacagtgctcttcaccctcattgccttcgcatggtggctgatccttctggtgtctgcattcatcaccccacctggctttcacattcgtggatcggggttttttcctttcagctttgccagtgtggcgcttgtcaacttgctgttcacgctcatattcttctctttcccgtcgaaagcagtgagaatattgagtattgtcatcgccggtatactcctcatcgatgcgattcttttgatctcagttcaacagacgcgatacgaggaaggatgggtcggcatcgcaagtatcatatggacatttgtcatggctctttggacacttggcactgatcgccttgttgcatggggcaaaaacgaagaagaggagcgactgaccggccgagctgaaaacagacgcactctttccgaatggatcgctgttcttgtctcgactatttccctcgtcgtcattgctatcgtcgtctttttgatgacctgcacattgatattacgggctctcgatgctggtcttgcaccaccaggcaagatgtattgggttgatggtcaaaggtacagattgcatgtctattgcgaaggcaatgaaaccgattcgcatgggattcgacttccaacagttctgctcgagggaggcgaagggcctgttgaggacgggctttggcaatttgctaacaatgccct

SEQ ID NO: 18407 - DNA, 408 bp, Muscodor strobelii
  misc_feature: SGI cDNA ID NO. 566171
  misc_feature: Encodes the peptide sequence at SEQ ID NO 18408
atgatgttcattggccctcttcttgtcattggttttagctcgttggcggtcgctctaccctcgaaacgtcaggcatccgtttgcacaaacattcgtgaccgagtaccatggactgatctcacggccactgaaaaggctgaatacatccaagcggacctttgtctgatgagtttaccctcgacgtcaggtattgagggcgcagtcacgcgatgggatgatcttcaatggccacatatcgctcaaactgtgactgtgcataacgtcggcgcctttctgccatttcaccgatattacatgacaatccatgaacgattgatcaaggatgaatgcgggtattccggccgcatgccatactgggatgagctcgcagaccttgcaaccggactcgcaaactctgagctttgggaa

SEQ ID NO: 18408 - protein, 136 aa, Muscodor strobelii
  misc_feature: SGI Peptide ID NO. 566171
  misc_feature (22)..(134): NCBI GI: 261356949 Blast Desc: conserved [Verticillium albo-atrum VaMs.102]
  misc_feature (18)..(120): NCBI GI: 169862989 Blast Desc: CC1G_05599 [Coprinopsis cinerea okayama7#130] gi|116500800|gb|EAU83695.1| CC1G_05599 [Coprinopsis cinerea okayama7#130]
  misc_feature (1)..(136): NCBI GI: 67904802 Blast Desc: AN9388.2 [Aspergillus nidulans FGSC A4] gi|40747299|gb|EAA66455.1| AN9388.2 [Aspergillus nidulans FGSC A4] gi|259488230|tpe|CBF87520.1| TPA: conserved [Aspergillus FGSC
  misc_feature (2)..(136): NCBI GI: 27924026 Blast Desc: monooxygenase [Fusarium sporotrichioides]
  misc_feature (27)..(135): NCBI GI: 154321706 Blast Desc: BC1G_01000 [Botryotinia fuckeliana B05.10] gi|150850247|gb|EDN25440.1| BC1G_01000 [Botryotinia fuckeliana B05.10]
  misc_feature (25)..(136): NCBI GI: 154285700 Blast Desc: [Ajellomyces capsulatus NAm1] gi|150407286|gb|EDN02827.1| [Ajellomyces capsulatus NAm1]
  misc_feature (8)..(124): NCBI GI: 170940291 Blast Desc: protein product [Podospora anserina]
  misc_feature (7)..(120): NCBI GI: 169852195 Blast Desc: [Coprinopsis cinerea okayama7#130] gi|116506133|gb|EAU89028.1| [Coprinopsis cinerea okayama7#130]
  misc_feature (24)..(120): NCBI GI: 170108688 Blast Desc: tyrosinase [Laccaria bicolor S238N-H82] gi|164639428|gb|EDR03699.1| tyrosinase [Laccaria bicolor S238N-H82]
  misc_feature (29)..(124): NCBI GI: 145604204 Blast Desc: MGG_13937 [Magnaporthe grisea 70-15] gi|145012249|gb|EDJ96905.1| MGG_13937 [Magnaporthe grisea 70-15]
MMFIGPLLVIGFSSLAVALPSKRQASVCTNIRDRVPWTDLTATEKAEYIQADLCLMSLPSTSGIEGAVTRWDDLQWPHIAQTVTVHNVGAFLPFHRYYMTIHERLIKDECGYSGRMPYWDELADLATGLANSELWE

SEQ ID NO: 18409 - DNA, 337 bp, Muscodor strobelii
  misc_feature: SGI EST ID NO. CUFF.43240.0
  misc_feature: Variant of the nucleotide sequence at SEQ ID NO 18407
gaaacgtcaggcatccgtttgcacaaacattcgtgaccgagtaccatggactgatctcacggccactgaaaaggctgaatacatccaagcggacctttgtctgatgagtttaccctcgacgtcaggtattgagggcgcagtcacgcgatgggatgatcttcaatggccacatatcgctcaaactgtgactgtgcataacgtcggcgcctttctgccatttcaccgatattacatgacaatccatgaacgattgatcaaggatgaatgcgggtattccggccgcatgccatactgggatgagctcgcagaccttgcaaccggactcgcaaactctgag

SEQ ID NO: 18410 - DNA, 744 bp, Muscodor strobelii
  misc_feature: SGI cDNA ID NO. 566172
  misc_feature: Encodes the peptide sequence at SEQ ID NO 18411
atgcgtacacgagggactctgagaacagacgagggaatcaattggtactatgagcaagaaggctcagggccggacattgtacttatccctgacggcatcggagagtgccacatgttcgatgaaccgatccccttgatcgctgccgcaggttttcgtgtgacaacattcgatatgcctggcatgtcgcgatcttcagaagctcccgcagagacgtatcaggacgtgactgcccaaaagctagcttcatacgtaattagcattgtcgataagctgagtaaggctgtaacctgtgccgacgagaatgagcgcgtgcgcaacggccttgctcacgaggttccgacgtatttgatggacaacctgacagatctcagcaaggtggacgatgagcaaatctcaaaagatctgaaggcgatgatgccgacttattgcggcaatgatgatgcctgggctaagctcgaggccgagacagattcccgactttggaagaattaccctcgctgggctcggggatatcctcgatccatccctcagtcgtcaccaacagagatcaaggacctgcagaagcggccacttgattggacagtcgggggagctacgcaaacgtctcggttcttcgataacattgtcactgcagtgaaagccggagtgaatgtaggatatttgccgggtatgcatttcccttatgtgtcacacccggatgtgtttgcgaactatgtggtagacacaactcgcaaatatctgtaa

SEQ ID NO: 18411 - protein, 247 aa, Muscodor strobelii
  misc_feature: SGI Peptide ID NO. 566172
  misc_feature (1)..(247): NCBI GI: 259221400 Blast Desc: zearalenone hydrolase [Bionectria ochroleuca]
  misc_feature (1)..(247): NCBI GI: 21693124 Blast Desc: zearalenone hydrolase [Bionectria ochroleuca]
  misc_feature (3)..(91): NCBI GI: 147904364 Blast Desc: epoxide hydrolase 2, cytoplasmic [Xenopus laevis] gi|50417776|gb|AAH78066.1| Ephx2-prov protein [Xenopus laevis]
  misc_feature (3)..(91): NCBI GI: 55742049 Blast Desc: epoxide hydrolase 2, cytoplasmic [Xenopus (Silurana) tropicalis] gi|49522999|gb|AAH75370.1| epoxide hydrolase 2, cytoplasmic [Xenopus (Silurana) tropicalis]
MRTRGTLRTDEGINWYYEQEGSGPDIVLIPDGIGECHMFDEPIPLIAAAGFRVTTFDMPGMSRSSEAPAETYQDVTAQKLASYVISIVDKLSKAVTCADENERVRNGLAHEVPTYLMDNLTDLSKVDDEQISKDLKAMMPTYCGNDDAWAKLEAETDSRLWKNYPRWARGYPRSIPQSSPTEIKDLQKRPLDWTVGGATQTSRFFDNIVTAVKAGVNVGYLPGMHFPYVSHPDVFANYVVDTTRKYL

SEQ ID NO: 18412 - DNA, 1500 bp, Muscodor strobelii
  misc_feature: SGI EST ID NO. CUFF.43251.0
  misc_feature: Variant of the nucleotide sequence at SEQ ID NO 18410
cgacagaacaccgaaatgactgtttggaagcatttatactgtggaatcttatccatgggctctggagaactgtccgtctacccggcgctttctggcatgatggagcgctgcgtgtcgcataggactgttgttcggccggtcgggttgtcggacctaaagatcttcagtgccacggaaccctcggtgtaacaacgatgcaagttggatttagctacgatgcgacatgagaggctttgcgacagggagccaacttcagcgggcatttagaatataagaatgcagtttcacatgtccaagcagaatggaagaaccattatcagcattcaattaacatctgttctcgttgccataatcaacaatttatcacgatgcgtacacgagggactctgagaacagacgagggaatcaattggtactatgagcaagaaggctcagggccggacattgtacttatccctgacggcatcggagagtgccacatgttcgatgaaccgatccccttgatcgctgccgcaggttttcgtgtgacaacattcgatatgcctggcatgtcgcgatcttcagaagctcccgcagagacgtatcaggacgtgactgcccaaaagctagcttcatacgtaattagcattgtcgataagctgagtaaggctgtaacctgtgccgacgagaatgaggttaacatatcgcagacattgacatcgctacattttggggttgtagctcgggaggagcaacggttttggcactgatcgcgggatacccagagcgcgtgcgcaacggccttgctcacgaggttccgacgtatttgatggacaacctgacagatctcagcaaggtggacgatgagcaaatctcaaaagatctgaaggcgatgatgccgacttattgcggcaatgatgatgcctgggctaagctcgaggccgagacagattcccgactttggaagaattaccctcgctgggctcggggatatcctcgatccatccctcagtcgtcaccaacagagatcaaggacctgcagaagcggccacttgattggacagtcgggggagctacgcaaacgtctcggttcttcgataacattgtcactgcagtgaaagccggagtgaatgtaggatatttgccgggtatgcatttcccttatgtgtcacacccggatgtgtttgcgaactatgtggtagacacaactcgcaaatatctgtaaagatgacccatcttatattctattcacacttttatatgctggagtagcgaggacatgaggctattattgttgaagtttgtactgtcgaaaacctcattgttgatggtgcagctgcgtacgcagttacaggcgaccaccacaccacatatctacgtacgcagatataggctatcctaacaacatattaagagcacataactgcccactgctaaacttttgagttatcgcttacggaagtacatattcaatctagcatgacgcgtgaaagtcacccatgcgcccaccacactaaaaac

SEQ ID NO: 18413 - DNA, 792 bp, Muscodor strobelii
  misc_feature: SGI cDNA ID NO. 566173
  misc_feature: Elevated expression when VOC is produced
  misc_feature: Encodes the peptide sequence at SEQ ID NO 18414
atggagcccatcgagacattcctcgagtacatcatcgaccagcccaagtttcaacacgagcgtccctacgccgtccacgtcgggcccaacgaagagtactccccggacgatccgagactcaatacgatagaatggaaaggggagcctactactgtctatgacctacgccatctcaataatgtcactctacaagaatatggattccagaccggtcattgcgacttcacccctttcgctgccgccagtgctacggataaacaggtcgagtgttaccagatcgagacagaagactttttgaatcgaactttctcggctgagaaactgcggcgcaacggcccgctcttgaacaagggaactgtggttgacatgaacgacgctctaatactcgatcgcccgcctcgaggagcacataacatcaccttcgagagtgggccacagattatcaagaaagtcgtggcggaaacgaataacagccattttttaaatagcaagtatcgtttccgcattatcaacacatggcggccgctcatagagaagctggatgaccagccgctcgccgtctgtgattatcgcacaattgatatcaatgacctcgttgcagcagaccggatctatgtgaccctccggacgcagctctattatctcaagcataacccggcacaacgctggtactggttttcccatcagacacctaaagaagttatgatgatgctgatgtatgatacgaagccgctgcccggggcggcgaattgtgacactacccttcccgatctcttcaaagatttctactga

SEQ ID NO: 18414 - protein, 263 aa, Muscodor strobelii
  misc_feature: SGI Peptide ID NO. 566173
  misc_feature (8)..(251): NCBI GI: 242827477 Blast Desc: conserved [Talaromyces stipitatus ATCC 10500] gi|218711999|gb|EED11428.1| conserved [Talaromyces stipitatus ATCC 10500]
  misc_feature (8)..(251): NCBI GI: 242827473 Blast Desc: conserved [Talaromyces stipitatus ATCC 10500] gi|218711998|gb|EED11427.1| conserved [Talaromyces stipitatus ATCC 10500]
  misc_feature (8)..(251): NCBI GI: 242827468 Blast Desc: conserved [Talaromyces stipitatus ATCC 10500] gi|218711997|gb|EED11426.1| conserved [Talaromyces stipitatus ATCC 10500]
  misc_feature (140)..(242): NCBI GI: 91780194 Blast Desc: Bxe_C0126 [Burkholderia xenovorans LB400] gi|91692854|gb|ABE36051.1| Conserved [Burkholderia xenovorans LB400]
  misc_feature (61)..(242): NCBI GI: 91778676 Blast Desc: Bxe_B1430 [Burkholderia xenovorans LB400] gi|91691336|gb|ABE34534.1| conserved [Burkholderia xenovorans LB400]
  misc_feature (132)..(253): NCBI GI: 196256911 Blast Desc: conserved [Cyanothece sp. PCC 7822] gi|196202306|gb|EDX97124.1| conserved [Cyanothece sp. PCC 7822]
  misc_feature (52)..(243): NCBI GI: 186685770 Blast Desc: Npun_F5723 [Nostoc punctiforme PCC 73102] gi|186468222|gb|ACC84023.1| conserved [Nostoc punctiforme PCC 73102]
  misc_feature (140)..(242): NCBI GI: 163794579 Blast Desc: BAL199_05179 [alpha proteobacterium BAL199] gi|159180303|gb|EDP64826.1| BAL199_05179 [alpha proteobacterium BAL199]
  misc_feature (59)..(242): NCBI GI: 209522596 Blast Desc: conserved [Burkholderia sp. H160] gi|209496969|gb|EDZ97256.1| conserved [Burkholderia sp. H160]
  misc_feature (164)..(256): NCBI GI: 148254706 Blast Desc: BBta_3280 [Bradyrhizobium sp. BTAi1] gi|146406879|gb|ABQ35385.1| BBta_3280 [Bradyrhizobium sp. BTAi1]
  misc_feature: Useful for introducing or modulating the production of volatile compounds
MEPIETFLEYIIDQPKFQHERPYAVHVGPNEEYSPDDPRLNTIEWKGEPTTVYDLRHLNNVTLQEYGFQTGHCDFTPFAAASATDKQVECYQIETEDFLNRTFSAEKLRRNGPLLNKGTVVDMNDALILDRPPRGAHNITFESGPQIIKKVVAETNNSHFLNSKYRFRIINTWRPLIEKLDDQPLAVCDYRTIDINDLVAADRIYVTLRTQLYYLKHNPAQRWYWFSHQTPKEVMMMLMYDTKPLPGAANCDTTLPDLFKDFY

SEQ ID NO: 18415 - DNA, 1064 bp, Muscodor strobelii
  misc_feature: SGI EST ID NO. CUFF.43265.0
  misc_feature: Variant of the nucleotide sequence at SEQ ID NO 18413
gcaagcttcgcaatactaatcacttcaatgtacttcgcgactgtgtacacagtggtaccggtaccccgcagagccgctagaattggataaagttccaggatacaggggtggccactaccagatggcattgactaggttcttcacaagtaggtagaccggggtatgtgggggattccatacttacctgtacatacgtggacatcgcattgtaaaggcctgtaccatgtgcaggtcaagtatgtgtatgatgtgaagggttgtaggaagaccggtgatgcggctgttgagtgggagccactgcgctgttatctcacacccaagggtatctatatgcaggcagaaggcgtcaaggtgctgccataatgctgtcaatacctagtggcactcatcgtctattaacgagttcagtttgtgtgcgattccgtgtttccttgtctggtctccctactctcgtagaggtttgcgctgactattggcactttgatttgcgctatttgccatggagcccatcgagacattcctcgagtacatcatcgaccagcccaagtttcaacacgagcgtccctacgccgtccacgtcgggcccaacgaagagtactccccggacgatccgagactcaatacgatagaatggaaaggggagcctactactgtctatgacctacgccatctcaataatgtcactctacaagaatatggattccagaccggtcattgcgacttcacccctttcgctgccgccagtgctacggataaacaggtcgagtgttaccagatcgagacagaagactttttgaatcgaactttctcggctgagaaagtgatttgctatgactatagagtatcgtcgcaaacggtctcatggttttaatctctgactctcaaaaccagctgcggcgcaacggcccgctcttgaacaagggaactgtggttgacatgaacgacgctctaatactcgatcgcccgcctcgaggagcacataatggtactgcgaccatgcgcttgttggcgtttcatcgttgactagggctcagacatcaccttcgagagtgggccacagatta

SEQ ID NO: 18416 - DNA, 1401 bp, Muscodor strobelii
  misc_feature: SGI cDNA ID NO. 566174
  misc_feature: Elevated expression when VOC is produced
  misc_feature: Encodes the peptide sequence at SEQ ID NO 18417
atgaggatgcagaccgcccgcgaaacgggctcgaacgaccgctctgatgatgcgaacggcctgctttccgagatgggctgtattcatccggactacaccgagtacgccaattggtacatcgatttcctgaccgcgaagctcaacaacatttctccaatagtgatgaagacgatcttgtcctctcagccgcatggagagagctcgggcaacgcctcgaccagcgagtccgtagtctcgccgtcttttcgatgtctcaggattatggtcgagtcgctacgaacaaaagagaatctccgtgttgctcaaatgattgactacatcgagacgggaagtgattcgagcagggaaagggatggtttaatcacactatcgccaaataatgactcctccaaggaacctataacgcagctggtattcatctttctcgggctgctctcgctcctctatagtccatgtctcaatccagatcctataggtcaactgagagtagaggagaagttctccacggtacgaaggagcataccgcaagttgaggccagcaggtgtagcgagatgaagctgaaggatcttattcgatgcctgaactcacaatctccactctcgttcacgattctggacgccggcaatgaggcaagtcgagacacactatcctacttgaatgtgaactattacacattgtcccgactgtccaatatcacgatcacttggaccgagatggctatgaagcatttggagttcgatgcaaaggcgcagacactattcatattctgctatccttcgttctgtgcgctcatgtgtgggccagcccaagccggcggtggcttcttagacaagttgcttagcaaggactctcactcccgggaccttgggttccaagaatccgagttgcatctcgcaccaagaaacacagcctcgcagttctacaaagaaatcatcacctcatatagagttatcttcagccaagacaaacgatctatgaaagcctttcgagaagacaacgacgataatcccaagtggtggtttagaagatttcgagcccgacaacccagaatcacagcgacaaccaatacaattgatgacaagcttcttgccaagctctgtggcgaagattggagaaaacaagagatattcgatcacattgatctagggcctacaaaggtgtcgtacaacgtctccaaggagttcttctactttggagaccgcctgttagagctccaggatttcgtcctttcacaagaaccggacggtttcttcagcctctggcgtgaccgtcggaacactcagagatactggaccttttggggcttcatatacttcagcttgcttacactagggctgggagtactgcaggctggcctcactattgctcagctggcgcagggacgcaacaatcgagcatga

SEQ ID NO: 18417 - protein, 466 aa, Muscodor strobelii
  misc_feature: SGI Peptide ID NO. 566174
  misc_feature (176)..(414): NCBI GI: 119479919 Blast Desc: NFIA_080350 [Neosartorya fischeri NRRL 181] gi|119408142|gb|EAW18091.1| NFIA_080350 [Neosartorya fischeri NRRL 181]
  misc_feature (394)..(457): NCBI GI: 156060427 Blast Desc: [Sclerotinia sclerotiorum 1980] gi|154699760|gb|EDN99498.1| [Sclerotinia sclerotiorum 1980]
  misc_feature (395)..(457): NCBI GI: 156045443 Blast Desc: [Sclerotinia sclerotiorum 1980] gi|154694305|gb|EDN94043.1| [Sclerotinia sclerotiorum 1980]
  misc_feature: Useful for introducing or modulating the production of volatile compounds
MRMQTARETGSNDRSDDANGLLSEMGCIHPDYTEYANWYIDFLTAKLNNISPIVMKTILSSQPHGESSGNASTSESVVSPSFRCLRIMVESLRTKENLRVAQMIDYIETGSDSSRERDGLITLSPNNDSSKEPITQLVFIFLGLLSLLYSPCLNPDPIGQLRVEEKFSTVRRSIPQVEASRCSEMKLKDLIRCLNSQSPLSFTILDAGNEASRDTLSYLNVNYYTLSRLSNITITWTEMAMKHLEFDAKAQTLFIFCYPSFCALMCGPAQAGGGFLDKLLSKDSHSRDLGFQESELHLAPRNTASQFYKEIITSYRVIFSQDKRSMKAFREDNDDNPKWWFRRFRARQPRITATTNTIDDKLLAKLCGEDWRKQEIFDHIDLGPTKVSYNVSKEFFYFGDRLLELQDFVLSQEPDGFFSLWRDRRNTQRYWTFWGFIYFSLLTLGLGVLQAGLTIAQLAQGRNNRA

SEQ ID NO: 18418 - DNA, 3067 bp, Muscodor strobelii
  misc_feature: SGI EST ID NO. CUFF.43267.0
  misc_feature: Variant of the nucleotide sequence at SEQ ID NO 18416
ggcccgctagcaaggctgggtcatcttcttcgcagcatgaaggcggccgcaggcgacgtcttgttctctgacggaatgaaacccctgtagtagcgatacaactgtattgatttgattgaacaggggtttcggttcttctcaggccaacccccctcacccaccagtcccccgcgtacttaatgagaaatacgaaggcggtgacatgggcaaaaccctgagatttcccaccgggcgaagacttgagcctcatttgacagggttctcgtcgagcccacctactattgggatgttccggatgttccgtgtctaccgccacaggtgtactaacctgcaggccttgtattctaggtctttgatgttatactccttacacggtcgtgctttatcccttcaaggcggtgtcgcagtaaggctgaccggcatcgagttcaaggcttccatctccgcctcatggctatattggagaatcaaactacgtttttcgccagttgcactacagacacaatgttggaactaggtcaaacagacgctttgccaaaagctctggcatacgttctgtccacggcaggaatcatgcacaactttctctttccgacctgaggtattgacaatggcacgctcactctcttttccgatgatgaggatgcagaccgcccgcgaaacgggctcgaacgaccgctctgatgatgcgaacggcctgctttccgagatgggctgtattcatccggactacaccgagtacgccaattggtacatcgatttcctgaccgcgaagctcaacaacatttctccaatagtgatgaagacgatcttgtcctctcagccgcatggagagagctcgggcaacgcctcgaccagcgagtccgtagtctcgccgtcttttcgatgtctcaggattatggtcgagtcgctacgaacaaaagagaatctccgtgttgctcaaatgattgactacatcgagacgggaagtgattcgagcagggaaagggatggtttaatcacactatcgccaaataatgactcctccaaggaacctataacgcagctggtattcatctttctcgggctgctctcgctcctctatagtccatgtctcaatccagatcctataggtcaactgagagtagaggagaagttctccacggtacgaaggagcataccgcaagttgaggccagcaggtgtagcgagatgaagctgaaggatcttattcgatgcctgaactcacaatctccactctcgttcacgattctggacgccggcaatgaggcaagtcgagacacactatcctacttgaatgtgaactattacacattgtcccgactgtccaatatcacgatcacttggaccgagatggctatgaagcatttggagttcgatgcaaaggcgcagacactattcatattctgctatccttcgttctgtgcgctcatgtgtgggccagcccaagccggcggtggcttcttagacaagttgcttagcaaggactctcactcccgggaccttgggttccaagaatccgagttgcatctcgcaccaagaaacacagcctcgcagttctacaaagaaatcatcacctcatatagagttatcttcagccaagacaaacgatctatgaaagcctttcgagaagacaacgacgataatcccaagtggtggtttagaagatttcgagcccgacaacccagaatcacagcgacaaccaatacaattgatgacaagcttcttgccaagctctgtggcgaagattggagaaaacaagagatattcgatcacattgatctagggcctacaaaggtgtcgtacaacgtctccaaggagttcttctactttggagaccgcctgttagagctccaggatttcgtcctttcacaagaaccggacggtttcttcagcctctggcgtgaccgtcggaacactcagagatactggaccttttggggcttcatatacttcagcttgcttacactagggctgggagtactgcaggctggcctcactattgctcagctggcgcagggacgcaacaatcgagcatgactggataaaacagcatatagctatattacatctcaagctcgatggtgtttatctgagtcatttagctgatatctaccagctttgtaagactatatgaagaacaatgtcccgcataggctgtgaaccaatgtcaatagcctagtgttcgagcatgactatctcgctgctgtaaaggtatcccaccgtactgcaactagaactgcaaccagagttttcaatttggagacagaatcatgaaaaatagggaagcttaaggaaaccagcctggaagctatcattagaagaccagtcgcttcaatccagaacgacctatgagggatatcatgccaccactcatcgtacctcgccttgcatcattccgcaacagtatagaatgattgctacaagaaaaaaatgttgctttcgaatctattgaacattccgactctcaaagcgcgcctattagcatcttcatgacttcagggcaactggcaagacttacgagtcgatgaacggctagccgctccagctgcctaattcccacaccttcgggtcttggagaaccatgatcttctgtttaggaagggcggccattgcttcttcgtcgtagcgatcgaaactcatgatgttgttgacatcgcagaggaaagtgacgtccatctgcttccagggctgctcggcatcgctgtagtcgataaatccagcatcgtcggccggggcaaagatagcagcgatgggttcagaagacatgttgagagatgaagctggctcttgtgaaacggcgatgtggcgactatgcactggtctgactagcaggacaatctaggaatgccgattgatttgacggtaggagtgtgacaacagaaagtgcgagaagtctcacggagtggagtaattgtaagagttataagcgatcccgatactaacgatatttacgttcaagggatctatggtcaggtctaagcgcatgaacattgtaaagggggtcataaactctaatacgttgtgtaaggtgcgcaagatacctataaaagggacccccctttttaa

SEQ ID NO: 18419 - DNA, 234 bp, Muscodor strobelii
  misc_feature: SGI cDNA ID NO. 566175
  misc_feature: Encodes the peptide sequence at SEQ ID NO 18420
atgtcttctgaacccatcgctgctatctttgccccggccgacgatgctggatttatcgactacagcgatgccgagcagccctggaagcagatggacgtcactttcctctgcgatgtcaacaacatcatgagtttcgatcgctacgacgaagaagcaatggccgcccttcctaaacagaagatcatggttctccaagacccgaaggtgtgggaattaggcagctggagcggctag

SEQ ID NO: 18420 - protein, 77 aa, Muscodor strobelii
  misc_feature: SGI Peptide ID NO. 566175
MSSEPIAAIFAPADDAGFIDYSDAEQPWKQMDVTFLCDVNNIMSFDRYDEEAMAALPKQKIMVLQDPKVWELGSWSG

SEQ ID NO: 18421 - DNA, 3175 bp, Muscodor strobelii
  misc_feature: SGI EST ID NO. CUFF.43268.2
  misc_feature: Variant of the nucleotide sequence at SEQ ID NO 18419
ttaaaaaggggggtcccttttataggtatcttgcgcaccttacacaacgtattagagtttatgaccccctttacaatgttcatgcgcttagacctgaccatagatcccttgaacgtaaatatcgttagtatcgggatcgcttataactcttacaattactccactccgtgagacttctcgcactttctgttgtcacactcctaccgtcaaatcaatcggcattcctagattgtcctgctagtcagaccagtgcatagtcgccacatcgccgtttcacaagagccagcttcatctctcaacatgtcttctgaacccatcgctgctatctttgccccggccgacgatgctggatttatcgactacagcgatgccgagcagccctggaagcagatggacgtcactttcctctgcgatgtcaacaacatcatgagtttcgatcgctacgacgaagaagcaatggccgcccttcctaaacagaagatcatggttctccaagacccgaaggtgtgggaattaggcagctggagcggctagccgttcatcgactcagtcggaatgttcaatagattcgaaagcaacatttttttcttgtagcaatcattctatactgttgcggaatgatgcaaggcgaggtacgatgagtggtggcatgatatccctcataggtcgttctggattgaagcgactggtcttctaatgatagcttccaggctggtttccttaagcttccctatttttcatgattctgtctccaaattgaaaactctggttgcagttctagttgcagtacggtgggatacctttacagcagcgagatagtcatgctcgaacactaggctattgacattggttcacagcctatgcgggacattgttcttcatatagtcttacaaagctggtagatatcagctaaatgactcagataaacaccatcgagcttgagatgtaatatagctatatgctgttttatccagtcatgctcgattgttgcgtccctgcgccagctgagcaatagtgaggccagcctgcagtactcccagccctagtgtaagcaagctgaagtatatgaagccccaaaaggtccagtatctctgagtgttccgacggtcacgccagaggctgaagaaaccgtccggttcttgtgaaaggacgaaatcctggagctctaacaggcggtctccaaagtagaagaactccttggagacgttgtacgacacctttgtaggccctagatcaatgtgatcgaatatctcttgttttctccaatcttcgccacagagcttggcaagaagcttgtcatcaattgtattggttgtcgctgtgattctgggttgtcgggctcgaaatcttctaaaccaccacttgggattatcgtcgttgtcttctcgaaaggctttcatagatcgtttgtcttggctgaagataactctatatgaggtgatgatttctttgtagaactgcgaggctgtgtttcttggtgcgagatgcaactcggattcttggaacccaaggtcccgggagtgagagtccttgctaagcaaccttacaatggcatcagcgcagtgcaataggaaagaacggtttggtgcaaacatacttgtctaagaagccaccgccggcttgggctggcccacacatgagcgcacagaacgaaggatagcagaatatgaatagtgtctgcgcctttgcatcgaactccaaatgcttcatagccatctcggtccaagtgatcgtgatattggacagtcgggacaatgtgtaatagttcacattcaagtaggatagtgtgtctcgacttgcctcattgccggcgtccagaatcgtgaacgagagtggagattgtgagttcaggcatcgaataagatccttcagcttcatctcgctacacctgctggcctcaacttgcggtatgctccttcgtaccgtggagaacttctcctctactctcagttgacctataggatctggattgagacatggactatagaggagcgagagcagcccgagaaagatgaataccagctgcgttataggttccttggaggagtcattatttggcgatagtgtgattaaaccatccctttccctgctcgaatcacttcccgtctcgatgtagtcaatcatttgagcaacacggagattctcttttgttcgtagcgactcgaccataatcctgagacatcgaaaagacggcgagactacggactcgctggtcgaggcgttgcccgagctctctccatgcggctgagaggacaagatcgtcttcatcactattggagaaatgttgttgagcttcgcggtcaggaaatcgatgtaccaattggcgtactcggtgtagtccggatgaatacagcccatctcggaaagcaggccgttcgcatcatctgcccacacgttcgtaagtcctcgtgcgtatcataatggaagaaaagccgccggcgataatggagattccgtccgttcaccgtgtctggcttctctgggacacgtaccagagcggtcgttcgagcccgtttcgcgggcggtctgcatcctcatcatcggaaaagagagtgagcgtgccattgtcaatacctcaggtcggaaagagaaagttgtgcatgattcctgccgtggacagaacgtatgccagagcttttggcaaagcgtctgtttgacctagttccaacattgtgtctgtagtgcaactggcgaaaaacgtagtttgattctccaatatagccatgaggcggagatggaagccttgaactcgatgccggtcagccttactgcgacaccgccttgaagggataaagcacgaccgtgtaaggagtataacatcaaagacctagaatacaaggcctgcaggttagtacacctgtggcggtagacacggaacatccggaacatcccaatagtaggtgggctcgacgagaaccctgtcaaatgaggctcaagtcttcgcccggtgggaaatctcagggttttgcccatgtcaccgccttcgtatttctcattaagtacgcgggggactggtgggtgaggggggttggcctgagaagaaccgaaacccctgttcaatcaaatcaatacagttgtatcgctactacaggggtttcattccgtcagagaacaagacgtcgcctgcggccgccttcatgctgcgaagaagatgacccagccttgctagcgggcc

SEQ ID NO: 18422 - DNA, 360 bp, Muscodor strobelii
  misc_feature: SGI cDNA ID NO. 566176
  misc_feature: Encodes the peptide sequence at SEQ ID NO 18423
tcgggtgccttgttcaaaggtcgaaataaggaagatcgagtctggggccgatctgcataccaaactggcaagtacatctacgcgaaattgcaggagaatttggttgccgagacgatctctaagcgggacgtcgcaagcagcagggcaattcagaacaaggatgttcctcttacaatcattacctctggcgtagcgattcgcgacgatgatgaatgggagaagaagcaaagagacttgagtcacctaacacaccaactccaacattgggatattgtcaacaaggcaccgcatcaagtttgggaaacacttcaaggacgggaaacgatcgagaagcgattacggcaactggtccatggctaa

SEQ ID NO: 18423 - protein, 119 aa, Muscodor strobelii
  misc_feature: SGI Peptide ID NO. 566176
  misc_feature (2)..(118): NCBI GI: 116207056 Blast Desc: CHGG_02821 [Chaetomium globosum CBS 148.51] gi|88183418|gb|EAQ90886.1| CHGG_02821 [Chaetomium globosum CBS 148.51]
  misc_feature (2)..(117): NCBI GI: 171680171 Blast Desc: protein product [Podospora anserina] gi|170939712|emb|CAP64938.1| protein product [Podospora anserina]
  misc_feature (1)..(117): NCBI GI: 169603267 Blast Desc: SNOG_04641 [Phaeosphaeria nodorum SN15] gi|160706359|gb|EAT88401.2| SNOG_04641 [Phaeosphaeria nodorum SN15]
  misc_feature (1)..(117): NCBI GI: 189203525 Blast Desc: mitochondrial integral membrane protein [Pyrenophora tritici-repentis Pt-1C-BFP] gi|187985197|gb|EDU50685.1| mitochondrial integral membrane protein [Pyrenophora Pt-1C-BFP]
  misc_feature (2)..(117): NCBI GI: 39944792 Blast Desc: MGG_04378 [Magnaporthe grisea 70-15] gi|145021580|gb|EDK05709.1| MGG_04378 [Magnaporthe grisea 70-15]
  misc_feature (1)..(119): NCBI GI: 256734367 Blast Desc: NECHADRAFT_103079 [Nectria haematococca mpVI 77-13-4]
  misc_feature (2)..(119): NCBI GI: 154324184 Blast Desc: BC1G_00491 [Botryotinia fuckeliana B05.10] gi|150842720|gb|EDN17913.1| BC1G_00491 [Botryotinia fuckeliana B05.10]
  misc_feature (2)..(117): NCBI GI: 156057401 Blast Desc: SS1G_04431 [Sclerotinia sclerotiorum 1980] gi|154702217|gb|EDO01956.1| SS1G_04431 [Sclerotinia sclerotiorum 1980]
  misc_feature (1)..(119): NCBI GI: 115387241 Blast Desc: conserved [Aspergillus terreus NIH2624] gi|114195210|gb|EAU36910.1| conserved [Aspergillus terreus NIH2624]
  misc_feature (2)..(119): NCBI GI: 70990420 Blast Desc: mitochondrial integral membrane protein [Aspergillus fumigatus Af293] gi|66847691|gb|EAL88021.1| mitochondrial integral membrane protein [Aspergillus fumigatus Af293] integral
SGALFKGRNKEDRVWGRSAYQTGKYIYAKLQENLVAETISKRDVASSRAIQNKDVPLTIITSGVAIRDDDEWEKKQRDLSHLTHQLQHWDIVNKAPHQVWETLQGRETIEKRLRQLVHG

SEQ ID NO: 18424 - DNA, 591 bp, Muscodor strobelii
  misc_feature: SGI EST ID NO. CUFF.43254.0
  misc_feature: Variant of the nucleotide sequence at SEQ ID NO 18422
gtcgggtgccttgttcaaaggtcgaaataaggaagatcgagtctggggccgatctgcataccaaactggcaagtacatctacgcgaaattgcaggagaatttggttgccgagacgatctctaagcgggacgtcgcaagcagcagggcaattcagaacaaggatgttcctcttacaatcattacctctggcgtagcgattcgcgacgatgatgaatgggagaagaagcaaagagacttgagtcacctaacacaccaactccaacattgggatattgtcaacaaggcaccgcatcaagtttgggaaacacttcaaggacgggaaacgatcgagaagcgattacggcaactggtccatggctaaggagtgattgctgttaattaattgagtatggacatggaaattgtgagatggatgggttgagggttgcatcttaggtgtttacgatgacggatagtcatcttttcgttgtcagattgatatcctatgtcatttgtgtgacattcatgacatttacgattgagtacggcagcaatgactataatgtaatcagaaacaagtaatctactttataaactgattgttttcagcca

SEQ ID NO: 18425 - DNA, 1152 bp, Muscodor strobelii
  misc_feature: SGI cDNA ID NO. 566177
  misc_feature: Encodes the peptide sequence at SEQ ID NO 18426
atggcgagcttctttgatctgaaggcgcggaaagccgctgcagcaaatggcacttccactaagggtgcagacaccaaacaagcacctcgaaaagccccttgggtcgaaaaatatcgacccaagacgctaagcgatgtcacagcacaagatcacacagtcaatgtcctccagcggacgttacaagcctccaatcttcctcacatgcttttctatggcccacccggcacaggcaagacatcaacaatcctcgctctcgcgaaagagctatacggacccgagatgatgaaggcacgggtgctcgagctcaatgcctccgacgagcgtggaatcagcattgtacgagagaaagtgaaggattttgcccgaatgcagctcacgaacccgccgcccggctaccgagaccgatatccctgcccacctttcaagatcatcatcctcgacgaggctgacagcatgacacaagacgcacagagcgccctgcgcaggactatggagacatacagcaagatcacacgtttctgtctgatttgcaattatgtcacccgtattattgatcctctagctagtcgttgcagcaaattccggttcaagagcctggaccaggggaatgcgaagagacgacttgaggagatcgccgataaggagggcgttgcgctcgacgacggcgctgttgatgccttgattcggtgtagtgagggagatttgagaaaagcaattacgttcctgcagagtgctgcaagattggtgggcgcagtggagaagacggaagacggtggcgataaaatggacgtggatggggaggaagcaaaaaaggtcaccgtgaagacagtcgaggatatcgcgggcgttataccagagtcaaccatagagaagttgcagcaggctatacgacccaaggccgcgggggctacctatactgcagttgctaaggtcgtcgaggatatggttgctgatgggtggagtgccggacaagtggtcactcagttatatcaagctgtcatcaacgacgagataatcccagatctggccaagaacaaaatcacgttggtcttctccgagatcgacaagaggctggttgacggcgcggacgagcacttgtctattcttgacctggccctaaggatatctaatattctaggtgggaagggatga

SEQ ID NO: 18426 - protein, 383 aa, Muscodor strobelii
  misc_feature: SGI Peptide ID NO. 566177
  misc_feature (67)..(248): Pfam Id: PF00004 Pfam Desc: ATPase family associated with various cellular activities (AAA)
  misc_feature (282)..(375): Pfam Id: PF08542 Pfam Desc: Replication factor C
  misc_feature (67)..(116): Pfam Id: PF00004 Pfam Desc: ATPase family associated with various cellular activities (AAA)
  misc_feature (1)..(382): NCBI GI: 85118512 Blast Desc: activator 1 41 kDa subunit [Neurospora crassa OR74A] gi|28927269|gb|EAA36224.1| activator 1 41 kDa subunit [Neurospora crassa OR74A]
  misc_feature (1)..(382): NCBI GI: 116207062 Blast Desc: CHGG_02824 [Chaetomium globosum CBS 148.51] gi|88183421|gb|EAQ90889.1| CHGG_02824 [Chaetomium globosum CBS 148.51]
  misc_feature (1)..(382): NCBI GI: 38567232 Blast Desc: replication factor protein [Neurospora crassa]
  misc_feature (1)..(382): NCBI GI: 145614662 Blast Desc: conserved [Magnaporthe grisea 70-15] gi|145021569|gb|EDK05698.1| conserved [Magnaporthe grisea 70-15]
  misc_feature (1)..(380): NCBI GI: 156057403 Blast Desc: SS1G_04432 [Sclerotinia sclerotiorum 1980] gi|154702218|gb|EDO01957.1| SS1G_04432 [Sclerotinia sclerotiorum 1980]
  misc_feature (1)..(382): NCBI GI: 171680165 Blast Desc: protein product [Podospora anserina] gi|170939709|emb|CAP64935.1| protein product [Podospora anserina]
  misc_feature (68)..(382): NCBI GI: 256735086 Blast Desc: [Nectria haematococca mpVI 77-13-4]
  misc_feature (2)..(380): NCBI GI: 119177342 Blast Desc: CIMG_07623 [Coccidioides immitis RS] gi|240107696|gb|EER25875.1| Activator 1 41 kDa subunit , [Coccidioides posadasii C735 delta SOWgp]
  misc_feature (1)..(328): NCBI GI: 154324182 Blast Desc: BC1G_00490 [Botryotinia fuckeliana B05.10] gi|150842719|gb|EDN17912.1| BC1G_00490 [Botryotinia fuckeliana B05.10]
  misc_feature (68)..(382): NCBI GI: 46108652 Blast Desc: FG01208.1 [Gibberella zeae PH-1]
  misc_feature (38)..(316): SWISSPROT Homolog: EC 2.7.7.7 DNA-directed DNA polymerase
MASFFDLKARKAAAANGTSTKGADTKQAPRKAPWVEKYRPKTLSDVTAQDHTVNVLQRTLQASNLPHMLFYGPPGTGKTSTILALAKELYGPEMMKARVLELNASDERGISIVREKVKDFARMQLTNPPPGYRDRYPCPPFKIIILDEADSMTQDAQSALRRTMETYSKITRFCLICNYVTRIIDPLASRCSKFRFKSLDQGNAKRRLEEIADKEGVALDDGAVDALIRCSEGDLRKAITFLQSAARLVGAVEKTEDGGDKMDVDGEEAKKVTVKTVEDIAGVIPESTIEKLQQAIRPKAAGATYTAVAKVVEDMVADGWSAGQVVTQLYQAVINDEIIPDLAKNKITLVFSEIDKRLVDGADEHLSILDLALRISNILGGKG

SEQ ID NO: 18427 - DNA, 3201 bp, Muscodor strobelii
  misc_feature: SGI EST ID NO. CUFF.43257.0
  misc_feature: Variant of the nucleotide sequence at SEQ ID NO 18425
cgaaaactgacgcgggtgctagattgttacctgggagaaacgcgtgttgcttcaacgcaacagcagtccatcgagacaatttcatgcctcacaagctgtttccgagtccgcacatttgacctttgggaacacgcataatactacacacttcacattgtattgattctcgcatacgatcgagcgattggattgtcgtcatcagggggagaattgcgctgctatggcgagcttctttgatctgaaggcgcggaaagccgctgcagcaaatggcacttccactaagggtgcagacaccaaacaagcacctcgaaaagccccttgggtcgaaaaatatcgacccaagacgctaagcgatgtcacagcacaagatcacacagtcaatgtcctccagcggacgttacaagcctccaatcttcctcacatgcttttctatggcccacccggcacaggcaagacatcaacaatcctcgctctcgcgaaagagctatacggacccgagatgatgaaggcacgggtgctcgagctcaatgcctccgacgagcgtggaatcagcattgtacgagagaaagtgaaggattttgcccgaatgcagctcacgaacccgccgcccggctaccgagaccgatatccctgcccacctttcaagatcatcatcctcgacgaggctgacagcatgacacaagacgcacagagcgccctgcgcaggactatggagacatacagcaagatcacacgtttctgtctgatttgcaattatgtcacccgtattattgatcctctagctagtcgttgcagcaaattccggttcaagagcctggaccaggggaatgcgaagagacgacttgaggagatcgccgataaggagggcgttgcgctcgacgacggcgctgttgatgccttgattcggtgtagtgagggagatttgagaaaagcaattacgttcctgcagagtgctgcaagattggtgggcgcagtggagaagacggaagacggtggcgataaaatggacgtggatggggaggaagcaaaaaaggtcaccgtgaagacagtcgaggatatcgcgggcgttataccagagtcaaccatagagaagttgcagcaggctatacgacccaaggccgcgggggctacctatactgcagttgctaaggtcgtcgaggatatggttgctgatgggtggagtgccggacaagtggtcactcagttatatcaagctgtcatcaacgacgagataatcccagatctggccaagaacaaaatcacgttggtcttctccgagatcgacaagaggctggttgacggcgcggacgagcacttgtctattcttgacctggccctaaggatatctaatattctaggtgggaagggatgagggtattgagttttaagagtttggggattatgtaatggtaccgaggcacagaactgtgcacacgacaatagatgaggtatacctctagagctagcggcagccaatcattgctcactcattgatcagtcctaagtttccatctatacttgaccatatgctcttttgtctagaatccttcctggcatcaggtgcactctcctgctcactagataggggggtgagagggcccttgttctggagacgactcgtttgatccagcgcctgcatagcgtcatcgacggcaatctggcccgcatcaacagcttctgcaacgctctcgagcgtcgcgatcttggccgaatctgcggcgtagagccaggttcgaatctgagatacgacatcaggtccacttgtgaagttctgagactcagactgattggaatctggcgatgcgtgtttggaaagtagttcgcttgtctgggcgagttgtcgtagcttgtcgcgcgtagcttgcttctggcgtgcgatggtggagtttatgtgtgctctttcttgcgtcatactgcgctgctctatggctagtacagcgaggttctcaagataaggggtcaagaggtaggtttgcggctcgagttgatgttgtgatatttcctctttcttcggtgtctcgatatcttgcgccttggattggctgggcttgcttagttctttgatttgagcgaggttggcttctatttgccttcgaaactcaagatgtcgtacatagagcttctgaatatcagctagatggactttgtaatcgacttcatcctcggcgacaccctccttgacgggcgattgaggcatctcttcttcgtcgccttcccctgctttactcaacatggtctctatccagttgacgagcgagttcttgacgtcttgtagcgcctctacctgaacctcgagcggcaaccgattagggtcaatggggtctttggctttgagctccgctaatttcttctcatccctttggagggctagcttttcacgtagggtcgctttgcgaatgcgtgagactagatctctaatctcttgctctggcgcttccaggtctttcgtgaagccctccacgagttccttgggcaatttaggtagtgggccaaaatctttaaacatggctgccgggtcgagaaaatccggtgatgcggctggcatgcgagatagctcattataatagttattgatggccgacactcgggtatattccttttctagctcgttcacttccagctggaggtttagcagctcccgctctgcttctaccctgtctgtgcttttgatattggccgaaagtactgcattatgatcggctcgtagctgagtgagctgtttctgcagactgatattttttcttacggcttcaagaaattggctgtgctgttcttttggaaggtttaagtgcttcaccgctgcctcggcgtcgatgagagatacgggtctcgccagatactctgagccaccattttcgctgcggttgtccttcttctctattgaactcgtgccgtgtgaatcaaccacccgagctaatattccgcgtattttctcagcgcgaagcttgtcgtcaagatttagttgtgatgtttccatcatgatgtgatggcctcattacaggacgtattgctaggcacctaggtattacaggagaagtatagggtgcttgaacaatttgatcgaatttgtttcactgaggttgagacttcatgacatgaggtaatcccaagtaagcaaggcatgtgtctgttcctcgagctggcatcagaactgacgaacctttaaatcgatccagttgcgtccatagcgctggtgtcaac

SEQ ID NO: 18428 - DNA, 1497 bp, Muscodor strobelii
  misc_feature: SGI cDNA ID NO. 566178
  misc_feature: Encodes the peptide sequence at SEQ ID NO 18429
atgatggaaacatcacaactaaatcttgacgacaagcttcgcgctgagaaaatacgcggaatattagctcgggtggttgattcacacggcacgagttcaatagagaagaaggacaaccgcagcgaaaatggtggctcagagtatctggcgagacccgtatctctcatcgacgccgaggcagcggtgaagcacttaaaccttccaaaagaacagcacagccaatttcttgaagccgtaagaaaaaatatcagtctgcagaaacagctcactcagctacgagccgatcataatgcagtactttcggccaatatcaaaagcacagacagggtagaagcagagcgggagctgctaaacctccagctggaagtgaacgagctagaaaaggaatatacccgagtgtcggccatcaataactattataatgagctatctcgcatgccagccgcatcaccggattttctcgacccggcagccatgtttaaagattttggcccactacctaaattgcccaaggaactcgtggagggcttcacgaaagacctggaagcgccagagcaagagattagagatctagtctcacgcattcgcaaagcgaccctacgtgaaaagctagccctccaaagggatgagaagaaattagcggagctcaaagccaaagaccccattgaccctaatcggttgccgctcgaggttcaggtagaggcgctacaagacgtcaagaactcgctcgtcaactggatagagaccatgttgagtaaagcaggggaaggcgacgaagaagagatgcctcaatcgcccgtcaaggagggtgtcgccgaggatgaagtcgattacaaagtccatctagctgatattcagaagctctatgtacgacatcttgagtttcgaaggcaaatagaagccaacctcgctcaaatcaaagaactaagcaagcccagccaatccaaggcgcaagatatcgagacaccgaagaaagaggaaatatcacaacatcaactcgagccgcaaacctacctcttgaccccttatcttgagaacctcgctgtactagccatagagcagcgcagtatgacgcaagaaagagcacacataaactccaccatcgcacgccagaagcaagctacgcgcgacaagctacgacaactcgcccagacaagcgaactactttccaaacacgcatcgccagattccaatcagtctgagtctcagaacttcacaagtggacctgatgtcgtatctcagattcgaacctggctctacgccgcagattcggccaagatcgcgacgctcgagagcgttgcagaagctgttgatgcgggccagattgccgtcgatgacgctatgcaggcgctggatcaaacgagtcgtctccagaacaagggccctctcacccccctatctagtgagcaggagagtgcacctgatgccaggaaggattctagacaaaagagcatatggtcaagtatagatggaaacttaggactgatcaatgagtga

SEQ ID NO: 18429 - protein, 498 aa, Muscodor strobelii
  misc_feature: SGI Peptide ID NO. 566178
  misc_feature (49)..(497): NCBI GI: 261356111 Blast Desc: conserved [Verticillium albo-atrum VaMs.102]
  misc_feature (72)..(496): NCBI GI: 171680163 Blast Desc: protein product [Podospora anserina] gi|170939708|emb|CAP64934.1| protein product [Podospora anserina]
  misc_feature (51)..(498): NCBI GI: 46108654 Blast Desc: FG01209.1 [Gibberella zeae PH-1]
  misc_feature (49)..(498): NCBI GI: 256734364 Blast Desc: NECHADRAFT_98698 [Nectria haematococca mpVI 77-13-4]
  misc_feature (52)..(496): NCBI GI: 116207064 Blast Desc: CHGG_02825 [Chaetomium globosum CBS 148.51] gi|88183422|gb|EAQ90890.1| CHGG_02825 [Chaetomium globosum CBS 148.51]
  misc_feature (39)..(496): NCBI GI: 154324180 Blast Desc: BC1G_00489 [Botryotinia fuckeliana B05.10] gi|150842718|gb|EDN17911.1| BC1G_00489 [Botryotinia fuckeliana B05.10]
  misc_feature (52)..(498): NCBI GI: 145614660 Blast Desc: MGG_04390 [Magnaporthe grisea 70-15] gi|145021568|gb|EDK05697.1| MGG_04390 [Magnaporthe grisea 70-15]
  misc_feature (39)..(496): NCBI GI: 156057405 Blast Desc: SS1G_04433 [Sclerotinia sclerotiorum 1980] gi|154702219|gb|EDO01958.1| SS1G_04433 [Sclerotinia sclerotiorum 1980]
  misc_feature (49)..(453): NCBI GI: 38567202 Blast Desc: [Neurospora crassa]
  misc_feature (125)..(453): NCBI GI: 85118508 Blast Desc: NCU02686 [Neurospora crassa OR74A] gi|28927268|gb|EAA36223.1| [Neurospora crassa OR74A]
MMETSQLNLDDKLRAEKIRGILARVVDSHGTSSIEKKDNRSENGGSEYLARPVSLIDAEAAVKHLNLPKEQHSQFLEAVRKNISLQKQLTQLRADHNAVLSANIKSTDRVEAERELLNLQLEVNELEKEYTRVSAINNYYNELSRMPAASPDFLDPAAMFKDFGPLPKLPKELVEGFTKDLEAPEQEIRDLVSRIRKATLREKLALQRDEKKLAELKAKDPIDPNRLPLEVQVEALQDVKNSLVNWIETMLSKAGEGDEEEMPQSPVKEGVAEDEVDYKVHLADIQKLYVRHLEFRRQIEANLAQIKELSKPSQSKAQDIETPKKEEISQHQLEPQTYLLTPYLENLAVLAIEQRSMTQERAHINSTIARQKQATRDKLRQLAQTSELLSKHASPDSNQSESQNFTSGPDVVSQIRTWLYAADSAKIATLESVAEAVDAGQIAVDDAMQALDQTSRLQNKGPLTPLSSEQESAPDARKDSRQKSIWSSIDGNLGLINE

SEQ ID NO: 18430 - DNA, 1758 bp, Muscodor strobelii
  misc_feature: SGI cDNA ID NO. 566181
  misc_feature: Reduced expression when VOC is produced
  misc_feature: Encodes the peptide sequence at SEQ ID NO 18431
atgtcgagcgacgcaactacccagcccgccgtggctcagcccaccgagcctgcatctgctgccgcgacatctgaggccgctgcagctgaatcggtcgcgccggccgccgatgcaaagtctgccgagaccgatgcgcctgctgctgcgactactgctgacccgactgagggcaagaacggcgaccaagaatccaagactgaacccgctgtcgccgagccctctacttcagcgaccaaggactcaactgaggaagacgtcgacatgaaggacaaacctgctgaagagaccgctgagcccacggctagctcggataaggcccctgaaaccgacaccactgccgctgttgatagcgttgccgccgacgccgcggcctccaaggcccagccccgtcgcaagtccacaggcgtggctgacaagagcaagaagctcaacaagaaagcctccaaggccaagatcctacacctcgatgctagccccggcgagcactactttgcaaagctcaagggtttcccaccatggcctgtggtcatctgcgaggaggacatgctccctcagaacatgttgagctcgcgtcctgtcacagccgcgcgtgctgacggcacataccgcgaggatttcgccgatggtggcaaacgcgctgccgaccgcacgtttccagtcatgtatttgcatactaacgaattctcgtggacacccaacactgatctgagcgagctcgatgctagcactgtggccgacttggtcactgccaagatgcgcaaggacctccaagctgcgcaccatcttgccgctgaaggtcatgatctggactactataagaatgttttacgagagttcgaagagcaacgcctcgcaaaacttgaggccaaaaagtccaaagtcaagacgcccaagaaagccgtcaaggctgccgatgaggaaggtgacgttgacatggaggatgtcgaggaaggaaatggagagcccgcagagaagaagtcgaagtctaagaagcgtaaggcggaagaggatgcaagcacccctcagcagtctgactctgttaagaagccgaagatcaagttgacgggctcgtctacccccaagaatgccaatggtgttcaatcgcccagcgctgccaaggaagtcactaagcctgtcaaggtcaaggctaagtcatccaaggcggccaaagacgcggacggcaagaaggagaaggaggtagctacaccaaaggagcccgagctgacaccagaagagaaacgagttcgcaaagagaaggagatattgttcctccgccaccggctgcagagaggactcctaccacgcgaagggtcgcctgtacccgaggagatgaagcaggtctcggacttcctggccaagctggagactttcccggaccttgatgtcagcatcatccgtgcgaccaagatcaacaaggtgctcaaggccatcttgaagctcgagacgattccgaaagaggaggagttccagttcaagccgcgatcgcagacgctcctggacaaatggaatattctcctcgccagcgatgctgcaccagctgccacgaatggggtttcaggcaagagcagcaaggagacgacgaacggggtcaaggatgctgcgactgagagcaagagtgaggtcgagaaagaggagaaggagtccaaagacgaggcaaaggaatcagtcgagggcaaagatacgccatccaaagacgaggaggctggttcgaagacttccccggagacggccaccgcaacggtcgaggccagcgcttga

SEQ ID NO: 18431 - protein, 585 aa, Muscodor strobelii
  misc_feature: SGI Peptide ID NO. 566181
  misc_feature (156)..(254): Pfam Id: PF00855 Pfam Desc: PWWP domain
  misc_feature (156)..(186): Pfam Id: PF00855 Pfam Desc: PWWP domain
  misc_feature (37)..(572): NCBI GI: 145614654 Blast Desc: MGG_04409 [Magnaporthe grisea 70-15] gi|145021565|gb|EDK05694.1| MGG_04409 [Magnaporthe grisea 70-15]
  misc_feature (79)..(522): NCBI GI: 256735084 Blast Desc: NECHADRAFT_74558 [Nectria haematococca mpVI 77-13-4]
  misc_feature (142)..(564): NCBI GI: 85118500 Blast Desc: NCU02684 [Neurospora crassa OR74A] gi|28927266|gb|EAA36221.1| [Neurospora crassa OR74A] gi|38567200|emb|CAE76493.1| [Neurospora crassa]
  misc_feature (85)..(522): NCBI GI: 46108658 Blast Desc: FG01211.1 [Gibberella zeae PH-1]
  misc_feature (25)..(540): NCBI GI: 154324176 Blast Desc: BC1G_00487 [Botryotinia fuckeliana B05.10] gi|150842716|gb|EDN17909.1| BC1G_00487 [Botryotinia fuckeliana B05.10]
  misc_feature (1)..(526): NCBI GI: 156057409 Blast Desc: SS1G_04435 [Sclerotinia sclerotiorum 1980] gi|154702221|gb|EDO01960.1| SS1G_04435 [Sclerotinia sclerotiorum 1980]
  misc_feature (119)..(574): NCBI GI: 67522018 Blast Desc: AN1466.2 [Aspergillus nidulans FGSC A4] gi|40745440|gb|EAA64596.1| AN1466.2 [Aspergillus nidulans FGSC A4] gi|259486781|tpe|CBF84917.1| TPA: PWWP domain protein FGSC
  misc_feature (97)..(535): NCBI GI: 212541276 Blast Desc: PWWP domain protein [Penicillium marneffei ATCC 18224] gi|210068092|gb|EEA22184.1| PWWP domain protein [Penicillium marneffei ATCC 18224]
  misc_feature (80)..(534): NCBI GI: 261197984 Blast Desc: PWWP domain-containing protein [Ajellomyces dermatitidis SLH14081] gi|239595357|gb|EEQ77938.1| PWWP domain-containing protein [Ajellomyces dermatitidis SLH14081]
  misc_feature (33)..(526): NCBI GI: 119484206 Blast Desc: PWWP domain protein [Neosartorya fischeri NRRL 181] gi|119410162|gb|EAW20109.1| PWWP domain protein [Neosartorya fischeri NRRL 181]
  misc_feature: Useful for introducing or modulating the production of volatile compounds
MSSDATTQPAVAQPTEPASAAATSEAAAAESVAPAADAKSAETDAPAAATTADPTEGKNGDQESKTEPAVAEPSTSATKDSTEEDVDMKDKPAEETAEPTASSDKAPETDTTAAVDSVAADAAASKAQPRRKSTGVADKSKKLNKKASKAKILHLDASPGEHYFAKLKGFPPWPVVICEEDMLPQNMLSSRPVTAARADGTYREDFADGGKRAADRTFPVMYLHTNEFSWTPNTDLSELDASTVADLVTAKMRKDLQAAHHLAAEGHDLDYYKNVLREFEEQRLAKLEAKKSKVKTPKKAVKAADEEGDVDMEDVEEGNGEPAEKKSKSKKRKAEEDASTPQQSDSVKKPKIKLTGSSTPKNANGVQSPSAAKEVTKPVKVKAKSSKAAKDADGKKEKEVATPKEPELTPEEKRVRKEKEILFLRHRLQRGLLPREGSPVPEEMKQVSDFLAKLETFPDLDVSIIRATKINKVLKAILKLETIPKEEEFQFKPRSQTLLDKWNILLASDAAPAATNGVSGKSSKETTNGVKDAATESKSEVEKEEKESKDEAKESVEGKDTPSKDEEAGSKTSPETATATVEASA

SEQ ID NO: 18432 - DNA, 10535 bp, Muscodor strobelii
  misc_feature: SGI EST ID NO. CUFF.44083.0
  misc_feature: Variant of the nucleotide sequence at SEQ ID NO 18430
ctcaacgtcgtcaaaataactgcaaccggcgccctttcgtttgtcaactctgccgatatctaagaggaagacaatatctggacgcaactgtgtcttcatttcaatgattgcggcgtagtccctcacggcgcacacgtccatttgaccatccaaataggaccagccgtcaccgtggtctgcctgcctgcctgcccgttattccatccgccacacgcaacgcgactctcgaagatccgtcaagatgggcgacaaccaccaccgcgatgtgtcgcagtacaagtactcggctatgtccaacctggtcctccaggccgatcgccgattcataacaaggagaagcgatgaggctactggcgaccccgagtcccttgctggcagactaaacgtcacccagatgggctcgcgaattacacgcgacgatgcaccgagagctcgaaggacggggcccaacgtccagaggggcgatgtgcaggaaggacgagacatactggcacgtgagcaaggaaagcggaagaatgagttaaagggcactggcatcctcggccagggagactcgtcagttgagggccttctgtatcgaccgataacgagtgcgacacgggctacatatgatttaatactacatctggttgccagtaatcttggagatgtctcgcatgatgtcgtcctcagcgctgcggatgctgctctcgagtatctcaaggacgaggacatgaaggacatcgacaagaagaaggaaattgatgagctcatcggcactcctttgaatccaaaacagtacaacgagctggtaaaccttggcaagaagattacagattatgatacccagggcgatgatgacgagatggacactggggctggcaaagatgacgacgacgagctcgacgatcgccaaggtgtcgccatcgagttcgatgaggaggacgaagatgaggaagccgcaatcttgaacgagattcgagacgaatcctccgaggacgaagctggagtagaggacgaagaggaggaggtcatcatgggaggggaagaaaatgcagctggcgatggtcctggtggagaaccaagtgttggcgctgctcccgttgatgaggatgctatggtcatcgactctggcttagagaagaagaaaaaggatccttcgcgggacaaaaactacatccccgctcgagatatcgatgcatattggttgcagcgagaaataggtggtatctattcggatgctcatactcaacacgacaaaacggctgatgcgttacggattctctcgggtgagcccgatgaaccaaatggtgaagagaaacagctcagagaaatcgaaaacgatctaatggagctttttgattacgaacatcacgaggttgtccaaaaactgattgaaaaccgggagaagatcatctggctcacaaaattggctaagactgaagatgaggaggagcggggggttatagaaagagaaatggcttcggagggcctccggtggatccttgatgagctccgagggaagaaggctggcaacgctggaaagaaaatggagatcaagatggacattgatgttccagccaatttcgctgaagcgcccaaggcagagaaagccgaaggggaattgattggtaatcttcagccgcgcaaactcatcaacttggagaatctcgtctttgaccaaggaaaccatctcatgacgaacccaaaagttcgtcttcccgaaggctctaccagaagaacattcaagggatacgaggaaattcatgttccacctcccaagaaacgcaatgcgcctgatgatgttagcatcccgatcactgacatgccggaatgggctcaaggacctttcagctcatccaaagccctcaacaagatccaatcgaaatgttaccctacggccttcgaagacgatggcaacatgttgatctgcgccccgactggttccggcaagacaaatgttgccatgttgacaattttgcgtgagttgggtaagcatagaaacccaaagactggtgatattgacctagacgccttcaagattgtgtacatcgcacccttgaaagctctggttcaagagcaggtcggaaactttggtgctcgtctcaagccatttggtattacggtctctgagctgacgggtgatcgtcagctcactaaacagcaaatcacggagacccaggtcattgtaacgacgccagagaaatgggatgtcatcacaagaaaagcctcggatttgtcctacacgaatcttgtacggctcatcatcattgatgaaatccacttgttgcatgatgagcgaggaccggttctcgaaagcattgtcagccgaacgattcgtaagaccgaacagaccggcgatcctgttcgacttattggattatcagcaaccttgcccaactatcgagatgttgctagcttcctccgcgttgatcctagcaagggtcttttccatttcgatggttccttccgaccatgtcccttaaaacaggaattcatcggagtgaccgacaaaaaggctatcaagcagctgaagacgatgaatgacataacttatactaaggtcatcgaacacgtgggcacacaccacaaccaaatgctcatttttgtgcattcacgtaaagaaacagcgaagactgcacgctatattcgagacaaggctttagagatggagacgatcaaccaaattctgaagcatgacgccgggtctagggaagtcttgaatgagattgtaaacgatgtcactgacgcggatctcaaggacttgcttccatatgggtttggtatccatcatgctggtatgaacagactcgaccgtgatgaagtcgagggtctcttcgctcaaggccttattcaggtgcttgtgtgtaccgcgactctagcttggggtgtcaatcttccggcacacacggtcatcatcaaaggtacccaggtctattctcctgaaaaaggtagctgggtcgagctcagtcctcaagatgttctccaaatgctggggcgtgctggccgtccccagtacgatacatatggcgaaggtatcatcctcacaactcaagccgaaatgcaatattatctgtccctgcttaatcaacaactacctatcgaaagtcagtttgctagtaaactggttgacaacttgaacgcagagattgtgctcggcaatgtccgcagtcgtgatgaaggtgtagaatggcttggctacacctatctattcgtcaggatgttacgatcgcctggcttgtacagtgtcggggctgactatgaagatgatgtagcactcgagcaaaagcgcgttgatctcatccactccgccgccgctgtcttgaagaaatccaatctcatcacatatgatgagaaaaccggaaagctcaaggcgacggagcttggaagaattgcttcgcattactatatcactcatgggtccatggatacctacaacaaacttatccaaccctcgattacaacgattgaactcttccgaatttttgccctaagcgcagaatttaagtacataccagtacgacaagacgagaagcttgaacttgcaaagcttctaggccgagtacctattcctgttaaagaaggcatcgaagagccacatgcaaaaatcaacgtccttctccaggcatatatatcgcgcctcaagctcgacggtcttgctttgatggctgatatggtttatgtcacgcagtcagctggacgtattctgcgtgccatcttcgagatcacacttcaaaaaggatggtctaatgtatgcaggactgctttggacctttgtaagatggctgagaaacggatgtggccaacgatgacgcctctcagacagttccctcgttgctcgcgcgatattgttgccaaagccgaacgaattgacgtgccatgggaaagctactttgatcttgatcctccacgtatgggagaactacttggattgcccaaagcaggccgaacggtgtgtgatttggtatctaaattcccacgtctcgagatacaagcccaagcccaacccattactcgttctatgttgcgtgttgagctgtcgatcaccccaagcttcgagtgggacgatgaggtacatggcacgtccgaaagcttctggatcatggtcgaggattgtgatggcgaagacattcttttccaagatcagtttattttgcgcaaagaatacgcggtatcggaatctaatgagcatctcgtggatttcttcgtccccatcacggatccaatgccgccgaactacttcttgtcagtcgtttcagaccgatggatgcactctgagacgcgcctgccggtatccttccaaaaactgattctacccgaaaagttccctcctcacactgctcttctggacctccaacctcttcccgttaacgctttgaaggcaaaggactacgcaagtgcttacgatcaatgggaatatttcaataagatccaatcccagactttcaactccttgtacagtaccgacgacaatgtacttgtcggtgcccccactggtagtgggaagactgtctgcgccgaatttgcaataatgagactatggaccaaaccagaaatcggtcgcatcgtatacattgcacccttccaagagcttgttgacctcagacatcgggactgggagaaacgacttggccatctacgcggcgggaaagaaatcgtgaaactgaccggagagacgacaaccgatcttaagcttctcgacaaaggtgatctgatactggctacaccagcccagtgggatgtcctctctcgccaatggcgaagacgtaaaaatattcagtcagttgagttgttcatcgctgatgagttacacttactgggtggtccgcaaggctatgtttatgagatcatcgtttctcgaatgctttcgatgcagaatgcaacggagtcaaatctgagaatggttggactaagcgtgtcactcgctaacgcccgagatctcggcgagtggcttggtgctaaaaagaaggatatttacaattttagcccacacgttcgacctattcctctggaacttaggatccaatcatatacgatacctcacttcccttcgcttatgcttgccatggcgaaaccgacctaccttgcgatcactgaactctctccagatcagccagctttaatattcgtacctaccaggaaacagactagagcgaccgctcgtgacatactggcagcctgctctgcagatgatgacgaagatcgcttcttgcacgtggacgttgatcagatacgcccgttgctcgagcgggttcaagaagaagctttggctgaggctatatcgcacggtgttggttattaccatgaagctcttagctccagcgataagcgcatcgtcatgcacctttacaatcagggtgcgatccaggttctgattgcttcccgagatacgtgctgggagctcgattgcttagctcacctcgttgtggttatgggtacacagtactttgagggccgcgagcacagatatatcgactaccaactcagcgaaatactacagatgtttggcaaagcccttcgtccatcgagggacagtcgtagtcgaggagtcttgatgacctccgcagtgaagagggaatacttcaaaaagtttctcaacgaagccctccctgttgagtcgcacgttcacaactacgtacacgacgccttcgtcactgaaatcagcacaaagatgatcggctcaactgaagaggctttccaatgggtcacttttacatatttttaccgccgattattggcaaatcctagctactacagcctcacagctcccactcaggatggtctgagtagctatctttcagatatggttgagactaccttcaaagatctcaccgaatccaagattatcgagtatgacgaagaagacgattcggttgcgccacagaatgcggccatgatcgcggcttattacaacatttcgtatatcacgatgcaaaccttcctcttgtcgctgaatgcaagaactaaactgaagggtattcttgaaattgtcacgtcagcaacagaatttgaatcgatacagattcgacgctacgaagacagcctcctccgtcgcatctatgatcgggtacctgttaagatgtcagatccagtctatgattcaccccacttcaaggctttcgtgcttttgcaggcacacttctctcgaatgcagctaccgattgatctagctaaagatcaggaggtcatcatctccaaagtgttaagcctattgagtgccactgtcgatgtactctcatctgatggtcacctcaacgctatgaatgccatggagatgtcacagatggtagtccaggccatgtgggatcgtgatagccctttaaaacagatccctcacttcacacctgacgtcgttaaggtggccaatgaattcgagtatgcctcatccaatcttcgttactcaccaacaccttcagctaacttcaaacgtcgcaggatcaatgacatattcgacttcatggaagcgatgaatccggaggagaataccaattatggggcactcattgagcgcatgggcctgtcgcaagctcaattggcacaggcagctgctttcaccaacaacaagtatcctgatatctcacttgagatggagctggttgacgaagacgatatccatgcaggagagctggcgtacatcaacgtccaaattcaacgagaggtcgaagacgaggaaggagaggtggatactactgtacacgctcccttctaccccgctaagaagctcgagaattggtggctcgttgttggcgaggagagcacaaagacactcctagcgatcaagagagtcacgattgggcagcaactcaaagtcaaacttgactacacggtgccgacacccggcaagcatgacttgaaactcttcctcatgagtgacagttacatcggagttgatcaagaacctacattctccgtcaatgtagcagaggggatggatgtggacagcgatgaggatgaggatgaggactgagagcttggaaatctacccaggtgtggactctctatccgtttatgtgacaactcactgtatttatagcgggtgaaaagtggcttgcaaggataaaggcaaatgaagatattgatgacggatcagattcccgttttgaagcaaatgatagttacatatttccatgtgcgtggttgtggacggtgaaaaacgaggtgacacgggcttaaggagagacaagaatgacgaggagaggcatgttacaatgaactacacatggtgttgttggcgtgagctgagtttgtgagactcccggggggcggacagaggtcgataggctctcctccatctcggcgtaggagaagtgactggtgctcgatcctctctggcttggccggttgcctagtctaacacagccaaggggaacctaatcaaacccgccaacccagctccaagactacgtcgaggccttgagaggacttcagtcccggcggacagaggtcaggggtcacgtgcattgctcgtcagagtcagttgaagttggtacctcattgggcagttgagaaaggcaaagaggcattgcgaccttggttggactcaatcaatcaatcagtcaatcgatgatcccatcccatcatccatctgccactttccaattccaaccacgcacacagcctttcctttccctctccttgttcgttcttaatccggcagccgcgctccatcgattttttgacggcgccatctccatccatcaagcacacttgtctcgtagcatcgagtagctgctcgtctatcgactaagctcccgtagcttggctatccttgccacctgcattccccaattgattatgactgcacgtatctcgcggccctgcgtttgattgttattggcgccttcacccgctccaccagaaaagttgacctgacgcgttttctttcgccgtccggtcgactttttgtgtcatagtcctccactttacaacacctcacagaccagccacccgcgaaccactctttcctcccccaaacttgctacattcctatcacacctccattcctgtgcactctccaccactgctccgtcgcgccaagccacaaacgcccgcgaccgcacttctgtcgccgtgacatcgtgagctttgcatcgccgcatcgccgcatcgcagcatcgcagcaacgagcaacgggcaacatgtcgagcgacgcaactacccagcccgccgtggctcagcccaccgagcctgcatctgctgccgcgacatctgaggccgctgcagctgaatcggtcgcgccggccgccgatgcaaagtctgccgagaccgatgcgcctgctgctgcgactactgctgacccgactgagggcaagaacggcgaccaagaatccaagactgaacccgctgtcgccgagccctctacttcagcgaccaaggactcaactgaggaagacgtcgacatgaaggacaaacctgctgaagagaccgctgagcccacggctagctcggataaggcccctgaaaccgacaccactgccgctgttgatagcgttgccgccgacgccgcggcctccaaggcccagccccgtcgcaagtccacaggcgtggctgacaagagcaagaagctcaacaagaaagcctccaaggccaagatcctacacctcgatgctagccccggcgagcactactttgcaaagctcaagggtttcccaccatggcctgtggtcatctgcgaggaggacatgctccctcagaacatgttgagctcgcgtcctgtcacagccgcgcgtgctgacggcacataccgcgaggatttcgccgatggtggcaaacgcgctgccgaccgcacgtttccagtcatgtatttgcatactaacgaattctcgtggacacccaacactgatctgagcgagctcgatgctagcactgtggccgacttggtcactgccaagatgcgcaaggacctccaagctgcgcaccatcttgccgctgaaggtcatgatctggactactataagaatgttttacgagagttcgaagagcaacgcctcgcaaaacttgaggccaaaaagtccaaagtcaagacgcccaagaaagccgtcaaggctgccgatgaggaaggtgacgttgacatggaggatgtcgaggaaggaaatggagagcccgcagagaagaagtcgaagtctaagaagcgtaaggcggaagaggatgcaagcacccctcagcagtctgactctgttaagaagccgaagatcaagttgacgggctcgtctacccccaagaatgccaatggtgttcaatcgcccagcgctgccaaggaagtcactaagcctgtcaaggtcaaggctaagtcatccaaggcggccaaagacgcggacggcaagaaggagaaggaggtagctacaccaaaggagcccgagctgacaccagaagagaaacgagttcgcaaagagaaggagatattgttcctccgccaccggctgcagagaggactcctaccacgcgaagggtcgcctgtacccgaggagatgaagcaggtctcggacttcctggccaagctggagactttcccggaccttgatgtcagcatcatccgtgcgaccaagatcaacaaggtgctcaaggccatcttgaagctcgagacgattccgaaagaggaggagttccagttcaagccgcgatcgcagacgctcctggacaaatggaatattctcctcgccagcgatgctgcaccagctgccacgaatggggtttcaggcaagagcagcaaggagacgacgaacggggtcaaggatgctgcgactgagagcaagagtgaggtcgagaaagaggagaaggagtccaaagacgaggcaaaggaatcagtcgagggcaaagatacgccatccaaagacgaggaggctggttcgaagacttccccggagacggccaccgcaacggtcgaggccagcgcttgagtgcctggctacctatgagctagaaggatactacggagtggagattgtcggggtcgggcgtgaccatgttttcaccatcttaccatgtcatcatttcacatcagtgtgctctacgagggaacaaagacttctacggcgtttggcagcattcctttcaggcacggcacgggagacgtgcacagtcccggcgcgctctctcggggggggaagccgacagggtagataataggcctgtgttcgatcccgatgttatgtaaagtaggcaattttatttcgacgagggtttgcaaaggaaagcaggcaggcaagcaggcaaagcaggctcggagctgaggattgctggtaaagggagcccgtggcctcgagggtctctggcggggaagttggccctcacctcaaccaggcagcgccagtactggggggatgtgggaagccagcagagagctcagtcttgcaataaaagtcgatttcgttccattcaataagagttttacatgtttgcatagctagctgctaccgtatacttgtctcaatggaatttatgactgagctgcgttgtacaatctggcacgtgtaaaaggaatttggattgactcttaagaggccattttctgtttgctctgtcagcttgtcttcagattgcatttgggcgtgttcaga

SEQ ID NO: 18433 - DNA, 2028 bp, Muscodor strobelii
  misc_feature: SGI cDNA ID NO. 566182
  misc_feature: Reduced expression when VOC is produced
  misc_feature: Encodes the peptide sequence at SEQ ID NO 18434
atgttgctccgactgcgagggcctgatggcatgcttcgcatcaccatcgacaagaatgactccttcgccgaccttgcccgccagctggtgcctctgctgccctcgaccgtcgacccggccaccatcaccatgtccccgaacccgcagtcgcaggactcaaggaagttgagggacatagccaaggccaagctcggccagatcggtctcagccacggagacatcatcttcatcaactaccagcacaccgatgccctcaccaacggacatgccaacggcgaccctccgactgcaaataccctgccgtctgccaaccgactgaacggaaaacccgtcataccatcccaagatctgcccatcgacccgccgcccctgacctcgccgacccagatcatcaagaacccgtgggaggtagtcaagcagtcggcacttgacgaccgcctcgacaagagagacggcaagatcccccgcgggcgcgaccgtatgtgcaagcacgggcccaagggcatgtgcgactactgcatgcctctcgaccccttcaacgcccagtacctggccgacaagaagatcaaatacctctctttccactcctacctccgcaaaatcaactcggccaccaacaagcccgagctcggaagctcctacatccctcctctcaagccgccctacttcagcgtcaagaaggactgcccttcaggtcacccgcagtggcccgagggtatctgcaccaagtgccagcccagcgccatcacgctacagccccagactttccgcatggtcgaccatgtcgagttcgcctctttcgacttggtcaacatcttcatcgacgcctggcggaagacgggagcccagcgcgtgggctatctctacggccgatatgaggagtatgccgaggtgccgctcggcgtcaaggccgtcgttgaggccatctacgaggtcccccaggtcgacgaggtcgatggcgtgtccctgaacacctgggagaacgaggcagatgtcaacggccttgcgcgcttgtgcggtctcgagcaggtcggggtcatcttcacggacctacttgatgcaggcgccggagacggaaccgtcgtctgcaagagacatgctgactcttactatctcacctccttggagatatgctatgccgcacggcttcagaaccagcatctcaagcccacgaaatggagtgatactggcagatttggctccaacttcgttacctgtatcatctcgggcgatgagacgggacagattgctatttcctcctatcaagtatctaacgatgctatggagatggttcgggcagatctggtcgaaccatctgctgaccccaacgtggtgctggtgcgcgaagaggaagatgaggatgaatcggcaagccggacacggtatatacctgaagtcttctatcgcaagatcaacgaatatggcgccaaagtacaagagaacgccaaacccgacttcccagccgaatatctgttcgtgactttgacgcacggattcccacaagagcctaagcccatattcaacacagcaagcttccctatagaaaaccgcgaggtcatgggcgagagccagcagtacaaagacgttgccctagctattagcaaatctgaagacaacaaactcggatctctctcggatttccactttctcaacttcatccatggaatgggtgtcttatccaaggaggaagaggcactcctttgcaaagccgcaaccacgcatgatctggccgaaacatatcagctattctcgatgcccggctggcagacgctcgagactatactgcaagcgactggtgagacacttcccaagaaacgccctcgtggttcaagtggcgacggggatggcgcgtctggccgtcaagcgaacggttcagcgactgcgaatctttcttcccaaactctttcctctcacaagggtgaaccgctcgctaagcgctttgctgccgttaggctgaacgaccgcgacgaggatggtggtagtcgaccgagacctgtctacaacaggactagaattgaagacttgtga

SEQ ID NO: 18434 - protein, 675 aa, Muscodor strobelii
  misc_feature: SGI Peptide ID NO. 566182
  misc_feature (284)..(596): Pfam Id: PF05021 Pfam Desc: NPL4 family
  misc_feature (137)..(282): Pfam Id: PF05020 Pfam Desc: NPL4 family, zinc binding region
  misc_feature (1)..(652): NCBI GI: 238843134 Blast Desc: NPL4 [Microsporum canis CBS 113480]
  misc_feature (1)..(652): NCBI GI: 261196446 Blast Desc: nuclear protein localization protein 4 [Ajellomyces dermatitidis SLH14081] gi|239595871|gb|EEQ78452.1| nuclear protein localization protein 4 [Ajellomyces dermatitidis
  misc_feature (1)..(652): NCBI GI: 226287417 Blast Desc: endoplasmic reticulum and nuclear membrane proteinc Npl4 [Paracoccidioides brasiliensis Pb18]
  misc_feature (1)..(652): NCBI GI: 226279028 Blast Desc: endoplasmic reticulum and nuclear membrane proteinc Npl4 [Paracoccidioides brasiliensis Pb01]
  misc_feature (1)..(622): NCBI GI: 190359915 Blast Desc: endoplasmic reticulum and nuclear membrane proteinc Npl4 [Paracoccidioides brasiliensis Pb01]
  misc_feature (1)..(644): NCBI GI: 169602695 Blast Desc: SNOG_04350 [Phaeosphaeria nodorum SN15] gi|160706232|gb|EAT88110.2| SNOG_04350 [Phaeosphaeria nodorum SN15]
  misc_feature (1)..(653): NCBI GI: 70990368 Blast Desc: endoplasmic reticulum and nuclear membrane proteinc Npl4, [Aspergillus fumigatus Af293] gi|74669989|sp|Q4WKD7.1|NPL4_ASPFU RecName: Full=Nuclear protein
  misc_feature (1)..(652): NCBI GI: 119497211 Blast Desc: endoplasmic reticulum and nuclear membrane proteinc Npl4, [Neosartorya fischeri NRRL 181] gi|190359914|sp|A1D4X8.1|NPL4_NEOFI RecName: Full=Nuclear protein
  misc_feature (1)..(652): NCBI GI: 225677845 Blast Desc: nuclear protein localization 4 [Paracoccidioides brasiliensis Pb03]
  misc_feature (1)..(599): NCBI GI: 238483481 Blast Desc: endoplasmic reticulum and nuclear membrane proteinc Npl4, [Aspergillus flavus NRRL3357] gi|220701029|gb|EED57367.1| endoplasmic reticulum and nuclear membrane proteinc Npl4, flavus
  misc_feature: Useful for introducing or modulating the production of volatile compounds
MLLRLRGPDGMLRITIDKNDSFADLARQLVPLLPSTVDPATITMSPNPQSQDSRKLRDIAKAKLGQIGLSHGDIIFINYQHTDALTNGHANGDPPTANTLPSANRLNGKPVIPSQDLPIDPPPLTSPTQIIKNPWEVVKQSALDDRLDKRDGKIPRGRDRMCKHGPKGMCDYCMPLDPFNAQYLADKKIKYLSFHSYLRKINSATNKPELGSSYIPPLKPPYFSVKKDCPSGHPQWPEGICTKCQPSAITLQPQTFRMVDHVEFASFDLVNIFIDAWRKTGAQRVGYLYGRYEEYAEVPLGVKAVVEAIYEVPQVDEVDGVSLNTWENEADVNGLARLCGLEQVGVIFTDLLDAGAGDGTVVCKRHADSYYLTSLEICYAARLQNQHLKPTKWSDTGRFGSNFVTCIISGDETGQIAISSYQVSNDAMEMVRADLVEPSADPNVVLVREEEDEDESASRTRYIPEVFYRKINEYGAKVQENAKPDFPAEYLFVTLTHGFPQEPKPIFNTASFPIENREVMGESQQYKDVALAISKSEDNKLGSLSDFHFLNFIHGMGVLSKEEEALLCKAATTHDLAETYQLFSMPGWQTLETILQATGETLPKKRPRGSSGDGDGASGRQANGSATANLSSQTLSSHKGEPLAKRFAAVRLNDRDEDGGSRPRPVYNRTRIEDL

SEQ ID NO: 18435 - DNA, 2724 bp, Muscodor strobelii
  misc_feature: SGI EST ID NO. CUFF.43495.2
  misc_feature: Variant of the nucleotide sequence at SEQ ID NO 18433
ctctgattcacttgaagcgtaaaccttagcacttacatctcaggcggtcttcgacgatattctccgccacaccgtctacaacttccgtcttgacctacataacccctatagctgccacctcctgtcccacacacagatgctcgtagacgaccaacgctcctcataacccgcacctcagaccgtctccgccgacggcactcctccggccatgttgctccgactgcgagggcctgatggcatgcttcgcatcaccatcgacaagaatgactccttcgccgaccttgcccgccagctggtgcctctgctgccctcgaccgtcgacccggccaccatcaccatgtccccgaacccgcagtcgcaggactcaaggaagttgagggacatagccaaggccaagctcggccagatcggtctcagccacggagacatcatcttcatcaactaccagcacaccgatgccctcaccaacggacatgccaacggcgaccctccgactgcaaataccctgccgtctgccaaccgactgaacggaaaacccgtcataccatcccaagatctgcccatcgacccgccgcccctgacctcgccgacccagatcatcaagaacccgtgggaggtagtcaagcagtcggcacttgacgaccgcctcgacaagagagacggcaagatcccccgcgggcgcgaccgtatgtgcaagcacgggcccaagggcatgtgcgactactgcatgcctctcgaccccttcaacgcccagtacctggccgacaagaagatcaaatacctctctttccactcctacctccgcaaaatcaactcggccaccaacaagcccgagctcggaagctcctacatccctcctctcaagccgccctacttcagcgtcaagaaggactgcccttcaggtcacccgcagtggcccgagggtatctgcaccaagtgccagcccagcgccatcacgctacagccccagactttccgcatggtcgaccatgtcgagttcgcctctttcgacttggtcaacatcttcatcgacgcctggcggaagacgggagcccagcgcgtgggctatctctacggccgatatgaggagtatgccgaggtgccgctcggcgtcaaggccgtcgttgaggccatctacgaggtcccccaggtcgacgaggtcgatggcgtgtccctgaacacctgggagaacgaggcagatgtcaacggccttgcgcgcttgtgcggtctcgagcaggtcggggtcatcttcacggacctacttgatgcaggcgccggagacggaaccgtcgtctgcaagagacatgctgactcttactatctcacctccttggagatatgctatgccgcacggcttcagaaccagcatctcaagcccacgaaatggagtgatactggcagatttggctccaacttcgttacctgtatcatctcgggcgatgagacgggacagattgctatttcctcctatcaagtatctaacgatgctatggagatggttcgggcagatctggtcgaaccatctgctgaccccaacgtggtgctggtgcgcgaagaggaagatgaggatgaatcggcaagccggacacggtatatacctgaagtcttctatcgcaagatcaacgaatatggcgccaaagtacaagagaacgccaaacccgacttcccagccgaatatctgttcgtgactttgacgcacggattcccacaagagcctaagcccatattcaacacagcaagcttccctatagaaaaccgcgaggtcatgggcgagagccagcagtacaaagacgttgccctagctattagcaaatctgaagacaacaaactcggatctctctcggatttccactttctcaacttcatccatggaatgggtgtcttatccaaggaggaagaggcactcctttgcaaagccgcaaccacgcatgatctggccgaaacatatcagctattctcgatgcccggctggcagacgctcgagactatactgcaagcgactggtgagacacttcccaagaaacgccctcgtggttcaagtggcgacggggatggcgcgtctggccgtcaagcgaacggttcagcgactgcgaatctttcttcccaaactctttcctctcacaagggtgaaccgctcgctaagcgctttgctgccgttaggctgaacgaccgcgacgaggatggtggtagtcgaccgagacctgtctacaacaggactagaattgaagacttgtgatggcacacgaagtgggatactaggagagctcaaggatgacatggcgatgatgaagaagggcgggagagcgggattggtcacacgatgtctgtcgtagaagacatcgcaaaaggcgaagtttaccaccattctgcgatattacatcctccggtggcgaattggaaggacaccgaaccgataggcatactcgggaagtacgggcgtgatataggggaacagaattagctacatattcacccagctacctaactcaggctatcacttgtactcagaatatgccgttactttaaggaagaaaaaaagcatcaactagcctagatcacttatgtgctatacttacctatccgagaggtatcctttttaagacagagctgtgttacctgtctataataggatgaggttatagcgttgagtttctagtagttttgacggcgatgttgggcctactacggaggttttgctgcttttactacgaaagtattgttctt

SEQ ID NO: 18436 - DNA, 3513 bp, Muscodor strobelii
  misc_feature: SGI cDNA ID NO. 566183
  misc_feature: Reduced expression when VOC is produced
  misc_feature: Encodes the peptide sequence at SEQ ID NO 18437
atggcgtttgctacgaagcttgccggcagggcacctgcgctgctccggcatggacgtcgctttcctgccgtcgtacctcgacgcgccttcgttgtcgccaacgcccgcacgcccgcttcagttctgccctcgaccagatcgagtgtcttatcgcagaacaggagcttcacccagacggcgcggtgctgcgcggccggtgccgcagcggcgcaacaggccccgaaccccaaggcctacttagaaagcggtgtcatcaagcccaaggagcttgtcaatgtaaagaaggtcttggtcattggtagtggtggcttagctataggacaggccggcgagttcgattattcgggatctcaagctctgaaggctctcaaggaggctggagttgcctccgtgcttatgaaccccaacattgctactatccaaaccaatcacacactcgccgacgaaatctactatcttccagtcactcccgaatatgtatcttatgtgattgagaaggagaagccggatggcatcttcctgtccttcggtggccagacggcgctgaatctgggtgtgcagatgcagcgcctcggcctcttcgagaagtacggcgtcaaagtcctcggcaccagtgtccacactctcgagctgagtgaagatcgcgatctttttgccaaggctctcaacgaaattgatatccccatcgccaaatctatcgctgtggggacaattgacgaggccctcgatgctgctaacaaggtcggctatcccatcattgtccgagctgcctacgcgctcggtgggttaggatctggtttcgcaaataacgaggaggagcttcgcaacatggccgcccggtccttgacgctttcgccacagatcctggtcgagaagtcgttgaagggctggaaggaagttgagtacgaagtcgtccgtgatgctaacaataactgcattaccgtgtgcaacatggagaattttgacccccttggaacgcatactggcgactcgatcgttgtcgcgccaagtcagaccttgtcggacgaggagtaccatatgcttcgctcggctgccatcaagatcgtgcgccatcttggtgtggttggtgaatgtaatgtccagtatgctctccaaccagatggcctcgattaccgagttattgaagtcaatgcgcgtctctctcgatcctccgccctggcttccaaggcgactggctatcccctcgcatacacagcggccaaaatcggtctgggacacagcttgccagagcttccaaatgccgtcaccaagacgacgacggctaatttcgagccctcgctcgactacatcgtcacgaagattcctcgatgggatctctcgaaattccagcatgtgaagcgagatattggcagcgctatgaagtcggttggagaagttatggctattggccgtacctttgaagaatctttccagaaagccattcgccaagttgaccccaaatttgttggattccaaggcgacaagtttgaggatctcgacttcgaacttgccaaccccactgaccgacggtggttagctgttggccaagccatgcttcacgagggttacactgtagaccggatccacgagctcagcaagattgacaagtggttcctccacaagctccagaaccttgttgactgcaccagagagatagaggccgtcggcagccttgagggtctgaagaaggaacttgttctcaaagccaagaagatgggtttctcagataggcaaattgccaacgcagtcaagagcaacgaagattcggttcgtgctcttcgtttgagcatgggtattcgtccttgggtcaagaagattgacactctcgccgccgagttccctgctgacaccaattatctgtacacaacctacaacgctagttctcatgatgtcactttcgaggacaacggcactgtcattcttggtagcggtgtatacagaattggtagctctgttgagttcgattggtgtgccgttagtgccacgcaagcactcaggaatatgggacagaagaccgtcatgatcaactacaaccccgagacgtattccaccgacttcgacaccgctgacaagctttatttcgaagaactgagctacgagcgtgtcatggacatttacgagcttgagagcgcctctggcgtagttgtctctgttggcggccagctgcctcagaacattgctctgcgtctacaggaaaccggaaaggccaacgtcctaggtaccgaccccaaggacatcgacaaagccgaggatcgtcagaagttctctgaaatcttggatagcatcggcgttgaccaacctgcctggaaagaacttacatctgtggcagatgctgagaagttcgccgagtctgtcggctaccctgtcttggttcgccctagttacgtcctctcaggcgctgctatgacggtcattcgcagccaagaagacctgaaggacaaactagaggctgctgccaatgtgtcacctgaccatcccgttgtcattaccaagttcatcgagggcgctcaagagatcgacgtggatggtgttgcttcagaaggtaacctggtcgtccatgcagttagtgagcacgtggagcaagctggtgttcactcaggtgatgccaccttaatcctccccccagtcaatcttgatgacaacaccatggctcgcctgaaggaaatcgcccaaaaggttgccaaagcctggaagatcaccggccctttcaacatgcagatcatcaaggcagagaatcctgaaggtggtgagcccttactcaaggtcatcgagtgtaacttgcgtgcctcgcgatctttccccttcgtcagtaaggtccttggcaccaatttcatcgacgttgctaccaaggctcttgttggcaaggaggttcctgagcctacggacctgatggccgtcaagcgagactacgttgctacgaaggttcctcagttctcgtggacccgtcttgcaggtgccgacccatttttgggtgtggaaatggccagcacgggtgagatggcttgcttcggcaaggatgtggtcgaggcctactgggcttctctgcagtccaccatgaacttccgtatgcctgagcctggcgagggtatcctcttcggtggcgaagtatcgaagccttggctcactaccatcgcggattacctctctccgctcggctacaagttttacgctgctagcgaggacgtcaagcagcacctcgagtccactaccaaggataaggccaaggtagaggtcatcgagttccccaaagaagacaagcgtgcgcttcgcgaagtcttccagaagtatgacatccgtggtgtgtttaacttggctttggctcgtggcaagacgaccatggatgttgactacgtcatgcgccgcaacgctgtcgattttggtgtacctttattcatggaaccccagactgctatgctcttcgctcagtgtatgagcgagaagctgccccgaaaggagggcattccctctgaagtccgccggtggtcagacttcatcggaggcaaacctttgtaa

SEQ ID NO: 18437 - protein, 1170 aa, Muscodor strobelii
  misc_feature: SGI Peptide ID NO. 566183
  misc_feature (92)..(212): Pfam Id: PF00289 Pfam Desc: Carbamoyl-phosphate synthase L chain, N-terminal domain
  misc_feature (634)..(749): Pfam Id: PF00289 Pfam Desc: Carbamoyl-phosphate synthase L chain, N-terminal domain
  misc_feature (214)..(446): Pfam Id: PF02786 Pfam Desc: Carbamoyl-phosphate synthase L chain, ATP binding domain
  misc_feature (751)..(980): Pfam Id: PF02786 Pfam Desc: Carbamoyl-phosphate synthase L chain, ATP binding domain
  misc_feature (499)..(624): Pfam Id: PF02787 Pfam Desc: Carbamoyl-phosphate synthetase large chain, oligomerisation domain
  misc_feature (1)..(1170): NCBI GI: 46108670 Blast Desc: FG01217.1 [Gibberella zeae PH-1]
  misc_feature (1)..(1170): NCBI GI: 116207076 Blast Desc: CHGG_02831 [Chaetomium globosum CBS 148.51] gi|88183428|gb|EAQ90896.1| CHGG_02831 [Chaetomium globosum CBS 148.51]
  misc_feature (8)..(1170): NCBI GI: 171680141 Blast Desc: protein product [Podospora anserina] gi|170939697|emb|CAP64923.1| protein product [Podospora anserina]
  misc_feature (8)..(1170): NCBI GI: 85118469 Blast Desc: carbamoyl-phosphate synthase arginine-specific large chain [Neurospora crassa OR74A] gi|28927259|gb|EAA36214.1| carbamoyl-phosphate synthase arginine-specific large chain crassa
  misc_feature (1)..(1170): NCBI GI: 154283467 Blast Desc: carbamoyl-phosphate synthase arginine-specific large chain [Ajellomyces capsulatus NAm1] gi|150410709|gb|EDN06097.1| carbamoyl-phosphate synthase arginine-specific large chain NAm1]
  misc_feature (1)..(1170): NCBI GI: 240275452 Blast Desc: carbamoyl-phosphate synthase [Ajellomyces capsulatus H143]
  misc_feature (1)..(1170): NCBI GI: 225561845 Blast Desc: carbamoyl-phosphate synthase [Ajellomyces capsulatus G186AR]
  misc_feature (52)..(1168): NCBI GI: 115395960 Blast Desc: carbamoyl-phosphate synthase, mitochondrial precursor [Aspergillus terreus NIH2624] gi|114193188|gb|EAU34888.1| carbamoyl-phosphate synthase, mitochondrial precursor terreus
  misc_feature (1)..(1168): NCBI GI: 242798922 Blast Desc: carbamoyl-phosphate synthase, large subunit [Talaromyces stipitatus ATCC 10500] gi|218716613|gb|EED16034.1| carbamoyl-phosphate synthase, large subunit [Talaromyces ATCC
  misc_feature (53)..(1170): NCBI GI: 258575591 Blast Desc: carbamoyl-phosphate synthase, large subunit [Uncinocarpus reesii 1704] gi|237902243|gb|EEP76644.1| carbamoyl-phosphate synthase, large subunit [Uncinocarpus reesii
  misc_feature (74)..(1170): SWISSPROT Homolog: EC 6.3.5.5 Carbamoyl-phosphate synthase (glutamine-hydrolyzing)
  misc_feature: Useful for introducing or modulating the production of volatile compounds
MAFATKLAGRAPALLRHGRRFPAVVPRRAFVVANARTPASVLPSTRSSVLSQNRSFTQTARCCAAGAAAAQQAPNPKAYLESGVIKPKELVNVKKVLVIGSGGLAIGQAGEFDYSGSQALKALKEAGVASVLMNPNIATIQTNHTLADEIYYLPVTPEYVSYVIEKEKPDGIFLSFGGQTALNLGVQMQRLGLFEKYGVKVLGTSVHTLELSEDRDLFAKALNEIDIPIAKSIAVGTIDEALDAANKVGYPIIVRAAYALGGLGSGFANNEEELRNMAARSLTLSPQILVEKSLKGWKEVEYEVVRDANNNCITVCNMENFDPLGTHTGDSIVVAPSQTLSDEEYHMLRSAAIKIVRHLGVVGECNVQYALQPDGLDYRVIEVNARLSRSSALASKATGYPLAYTAAKIGLGHSLPELPNAVTKTTTANFEPSLDYIVTKIPRWDLSKFQHVKRDIGSAMKSVGEVMAIGRTFEESFQKAIRQVDPKFVGFQGDKFEDLDFELANPTDRRWLAVGQAMLHEGYTVDRIHELSKIDKWFLHKLQNLVDCTREIEAVGSLEGLKKELVLKAKKMGFSDRQIANAVKSNEDSVRALRLSMGIRPWVKKIDTLAAEFPADTNYLYTTYNASSHDVTFEDNGTVILGSGVYRIGSSVEFDWCAVSATQALRNMGQKTVMINYNPETYSTDFDTADKLYFEELSYERVMDIYELESASGVVVSVGGQLPQNIALRLQETGKANVLGTDPKDIDKAEDRQKFSEILDSIGVDQPAWKELTSVADAEKFAESVGYPVLVRPSYVLSGAAMTVIRSQEDLKDKLEAAANVSPDHPVVITKFIEGAQEIDVDGVASEGNLVVHAVSEHVEQAGVHSGDATLILPPVNLDDNTMARLKEIAQKVAKAWKITGPFNMQIIKAENPEGGEPLLKVIECNLRASRSFPFVSKVLGTNFIDVATKALVGKEVPEPTDLMAVKRDYVATKVPQFSWTRLAGADPFLGVEMASTGEMACFGKDVVEAYWASLQSTMNFRMPEPGEGILFGGEVSKPWLTTIADYLSPLGYKFYAASEDVKQHLESTTKDKAKVEVIEFPKEDKRALREVFQKYDIRGVFNLALARGKTTMDVDYVMRRNAVDFGVPLFMEPQTAMLFAQCMSEKLPRKEGIPSEVRRWSDFIGGKPL

SEQ ID NO: 18438 - DNA, 4113 bp, Muscodor strobelii
  misc_feature: SGI EST ID NO. CUFF.43284.0
  misc_feature: Variant of the nucleotide sequence at SEQ ID NO 18436
ctggccgtcccaaaacttttgtgtgagaatagcgagtctaggagtattttagttgatccagcctgtcaattgtgtctttcctgttcacacactcttcaacagactcaattgacctcgattgggagccggggcactcaattgccgtctggcgaaccccctgtgtagaattgactgcgagttgacactgccgccgatatggcgtttgctacgaagcttgccggcagggcacctgcgctgctccggcatggacgtcgctttcctgccgtcgtacctcgacgcgccttcgttgtcgccaacgcccgcacgcccgcttcagttctgccctcgaccagatcgagtgtcttatcgcagaacaggagcttcacccagacggcgcggtgctgcgcggccggtgccgcagcggcgcaacaggccccgaaccccaaggcctacttagaaagcggtgtcatcaagcccaaggagcttgtcaatgtaaagaaggtcttggtcattggtagtggtggcttagctataggacaggccggcgagttcgattattcgggatctcaagctctgaaggctctcaaggaggctggagttgcctccgtgcttatgaaccccaacattgctactatccaaaccaatcacacactcgccgacgaaatctactatcttccagtcactcccgaatatgtatcttatgtgattgagaaggagaagccggatggcatcttcctgtccttcggtggccagacggcgctgaatctgggtgtgcagatgcagcgcctcggcctcttcgagaagtacggcgtcaaagtcctcggcaccagtgtccacactctcgagctgagtgaagatcgcgatctttttgccaaggctctcaacgaaattgatatccccatcgccaaatctatcgctgtggggacaattgacgaggccctcgatgctgctaacaaggtcggctatcccatcattgtccgagctgcctacgcgctcggtgggttaggatctggtttcgcaaataacgaggaggagcttcgcaacatggccgcccggtccttgacgctttcgccacagatcctggtcgagaagtcgttgaagggctggaaggaagttgagtacgaagtcgtccgtgatgctaacaataactgcattaccgtgtgcaacatggagaattttgacccccttggaacgcatactggcgactcgatcgttgtcgcgccaagtcagaccttgtcggacgaggagtaccatatgcttcgctcggctgccatcaagatcgtgcgccatcttggtgtggttggtgaatgtaatgtccagtatgctctccaaccagatggcctcgattaccgagttattgaagtcaatgcgcgtctctctcgatcctccgccctggcttccaaggcgactggctatcccctcgcatacacagcggccaaaatcggtctgggacacagcttgccagagcttccaaatgccgtcaccaagacgacgacggctaatttcgagccctcgctcgactacatcgtcacgaagattcctcgatgggatctctcgaaattccagcatgtgaagcgagatattggcagcgctatgaagtcggttggagaagttatggctattggccgtacctttgaagaatctttccagaaagccattcgccaagttgaccccaaatttgttggattccaaggcgacaagtttgaggatctcgacttcgaacttgccaaccccactgaccgacggtggttagctgttggccaagccatgcttcacgagggttacactgtagaccggatccacgagctcagcaagattgacaagtggttcctccacaagctccagaaccttgttgactgcaccagagagatagaggccgtcggcagccttgagggtctgaagaaggaacttgttctcaaagccaagaagatgggtttctcagataggcaaattgccaacgcagtcaagagcaacgaagattcggttcgtgctcttcgtttgagcatgggtattcgtccttgggtcaagaagattgacactctcgccgccgagttccctgctgacaccaattatctgtacacaacctacaacgctagttctcatgatgtcactttcgaggacaacggcactgtcattcttggtagcggtgtatacagaattggtagctctgttgagttcgattggtgtgccgttagtgccacgcaagcactcaggaatatgggacagaagaccgtcatgatcaactacaaccccgagacgtattccaccgacttcgacaccgctgacaagctttatttcgaagaactgagctacgagcgtgtcatggacatttacgagcttgagagcgcctctggcgtagttgtctctgttggcggccagctgcctcagaacattgctctgcgtctacaggaaaccggaaaggccaacgtcctaggtaccgaccccaaggacatcgacaaagccgaggatcgtcagaagttctctgaaatcttggatagcatcggcgttgaccaacctgcctggaaagaacttacatctgtggcagatgctgagaagttcgccgagtctgtcggctaccctgtcttggttcgccctagttacgtcctctcaggcgctgctatgacggtcattcgcagccaagaagacctgaaggacaaactagaggctgctgccaatgtgtcacctgaccatcccgttgtcattaccaagttcatcgagggcgctcaagagatcgacgtggatggtgttgcttcagaaggtaacctggtcgtccatgcagttagtgagcacgtggagcaagctggtgttcactcaggtgatgccaccttaatcctccccccagtcaatcttgatgacaacaccatggctcgcctgaaggaaatcgcccaaaaggttgccaaagcctggaagatcaccggccctttcaacatgcagatcatcaaggcagagaatcctgaaggtggtgagcccttactcaaggtcatcgagtgtaacttgcgtgcctcgcgatctttccccttcgtcagtaaggtccttggcaccaatttcatcgacgttgctaccaaggctcttgttggcaaggaggttcctgagcctacggacctgatggccgtcaagcgagactacgttgctacgaaggttcctcagttctcgtggacccgtcttgcaggtgccgacccatttttgggtgtggaaatggccagcacgggtgagatggcttgcttcggcaaggatgtggtcgaggcctactgggcttctctgcagtccaccatgaacttccgtatgcctgagcctggcgagggtatcctcttcggtggcgaagtatcgaagccttggctcactaccatcgcggattacctctctccgctcggctacaagttttacgctgctagcgaggacgtcaagcagcacctcgagtccactaccaaggataaggccaaggtagaggtcatcgagttccccaaagaagacaagcgtgcgcttcgcgaagtcttccagaagtatgacatccgtggtgtgtttaacttggctttggctcgtggcaagacgaccatggatgttgactacgtcatgcgccgcaacgctgtcgattttggtgtacctttattcatggaaccccagactgctatgctcttcgctcagtgtatgagcgagaagctgccccgaaaggagggcattccctctgaagtccgccggtggtcagacttcatcggaggcaaacctttgtaaaatgttctatagtatttgctggagcaaaggaagggaaaaaaaaaatacccctctagtctcacgaccaagatatccccccatcaccccggtcaagagacgaatcttttacggcgtttgaatatccgatggggaaaaaaagacaaaaacggaaggggaacaggagatttatgatatgtcgacttttcatgtatgacgtgtagctaccttggtgattagcaaagactataacggggagtttcgaagttctaatgagagagaaagtaaagtcgaacaaattttgtgatacatatcgttttctgttcaggtctcatgctaaatcagtgaatgaaacgccgtgagagactcctgttcatccccttccaatcctgtccgtagtggtcatgagatacctatgctaatcacgga

SEQ ID NO: 18439 - DNA, 1176 bp, Muscodor strobelii
  misc_feature: SGI cDNA ID NO. 566184
  misc_feature: Encodes the peptide sequence at SEQ ID NO 18440
atggcgacaaacacacggaatccccctccgccccttccctcgaaccctgaagacttcgattcagacgaccgcatctccttctcacgaacagacaataaatacatcggcataattggagagtaccccgatacttcagaattcgaatggaacgacgccattcgccgctggatgcctcatgtagatgaagaggttctggcacaacaagtagcacaacaacagtctgcctatggtggccaagcctcggcctcagaagatggagcaaacgccagccgtccttccaagaagcgcaaacgggcgcctcctcctccgcgccagaacacagccatctacgtgacgggactacccctcgacgtcacagtcgatgaagtcgccgaagtcttctcacggaaatgcggtgtcatcgcagaggagatcgactctggccggccaagaatcaagctctacgccgatgacaaggggaacttacaaggcgatgctctgatcgtcttcttcaagccccaaagcgtggacatggctatcatgttgctcgacgacacagatttccgctacacggcgtccgggctctcgagcggcaagatgcgcgtccaggctgctgaagccaagtacaagaaagtgcagtacgacacggagaacgcagacaaggcaggaaccaacgaaggagacagcgaggccctagatggcgatggagagcccgtgccgcatcacatgcgaggcgcagccaagcaaccaaaggacaaagcgaaggagcaggataagcagaagatcatcaagcggacccagaaacttgacgccagactcgcagactgggacgatgacgacgatggaccattctcagcgcagctagagacgaatgtgcgcaaggaacgggtcgtcatcttgaggcatatgttcacgctgacggaacttaatgaggatcctgcggcgttcctggagattaaggaggacataagagacgagtgcgagaagcttggcgaagtcacgaatgtcgtcctttatgatatggaggaggagggcattgcgagtgtcaagttcaagacgactgatgccgcagaggcttgtgtaaacctgatggatggacgggcgttcgatggtcggacggtcagagctgtgattgcgagcgggaaggagaagtttaaacggtctgatagaccgggtcaggagaaggatgaagactga

SEQ ID NO: 18440 - protein, 391 aa, Muscodor strobelii
  misc_feature: SGI Peptide ID NO. 566184
  misc_feature (313)..(369): Pfam Id: PF00076 Pfam Desc: RNA recognition motif. (a.k.a. RRM, RBD, or RNP domain)
  misc_feature (12)..(391): NCBI GI: 256735174 Blast Desc: NECHADRAFT_74744 [Nectria haematococca mpVI 77-13-4]
  misc_feature (12)..(381): NCBI GI: 39944920 Blast Desc: MGG_04442 [Magnaporthe grisea 70-15] gi|145021536|gb|EDK05665.1| MGG_04442 [Magnaporthe grisea 70-15]
  misc_feature (11)..(391): NCBI GI: 46108256 Blast Desc: FG01010.1 [Gibberella zeae PH-1]
  misc_feature (12)..(381): NCBI GI: 85111692 Blast Desc: NCU02633 [Neurospora crassa OR74A] gi|28925820|gb|EAA34822.1| NCU02633 [Neurospora crassa OR74A]
  misc_feature (12)..(381): NCBI GI: 116182010 Blast Desc: CHGG_01633 [Chaetomium globosum CBS 148.51] gi|88185930|gb|EAQ93398.1| CHGG_01633 [Chaetomium globosum CBS 148.51]
  misc_feature (5)..(378): NCBI GI: 156053139 Blast Desc: SS1G_06737 [Sclerotinia sclerotiorum 1980] gi|154704515|gb|EDO04254.1| SS1G_06737 [Sclerotinia sclerotiorum 1980]
  misc_feature (11)..(378): NCBI GI: 154318273 Blast Desc: BC1G_03304 [Botryotinia fuckeliana B05.10] gi|150842827|gb|EDN18020.1| BC1G_03304 [Botryotinia fuckeliana B05.10]
  misc_feature (3)..(381): NCBI GI: 238839101 Blast Desc: splicing factor u2af-associated protein 2 [Microsporum canis CBS 113480]
  misc_feature (12)..(382): NCBI GI: 238498374 Blast Desc: nuclear mRNA splicing factor-associated protein, [Aspergillus flavus NRRL3357] gi|220693696|gb|EED50041.1| nuclear mRNA splicing factor-associated protein, [Aspergillus flavus
  misc_feature (3)..(382): NCBI GI: 259488493 Blast Desc: TPA: nuclear mRNA splicing factor-associated protein, (AFU_orthologue; AFUA_1G10920) [Aspergillus nidulans FGSC A4]
MATNTRNPPPPLPSNPEDFDSDDRISFSRTDNKYIGIIGEYPDTSEFEWNDAIRRWMPHVDEEVLAQQVAQQQSAYGGQASASEDGANASRPSKKRKRAPPPPRQNTAIYVTGLPLDVTVDEVAEVFSRKCGVIAEEIDSGRPRIKLYADDKGNLQGDALIVFFKPQSVDMAIMLLDDTDFRYTASGLSSGKMRVQAAEAKYKKVQYDTENADKAGTNEGDSEALDGDGEPVPHHMRGAAKQPKDKAKEQDKQKIIKRTQKLDARLADWDDDDDGPFSAQLETNVRKERVVILRHMFTLTELNEDPAAFLEIKEDIRDECEKLGEVTNVVLYDMEEEGIASVKFKTTDAAEACVNLMDGRAFDGRTVRAVIASGKEKFKRSDRPGQEKDED

SEQ ID NO: 18441 - DNA, 702 bp, Muscodor strobelii
  misc_feature: SGI cDNA ID NO. 566185
  misc_feature: Reduced expression when VOC is produced
  misc_feature: Encodes the peptide sequence at SEQ ID NO 18442
atgttcgagtccatgttcgacatcgactggatgagccttgcgctccccttcgcatacatcaccgtgctaggcggctcgctttacacattctctaccatttatcggaaaagaaaggctgtccaaagcgcaaacctcgagccatggtttcccccgcacctccaacggaatatctacctctcactcctgcacatggagcccgaagagggccaggagaaagcccccaagatcccagactcgatcatcagggccgcattactacgcagagccgtggaggatattagacgtatcattcagatccgcacgagcaagcaggcactcaacaacctactgcagagaggtagcgtgggcgaggacttgaaccagagattcctagccgctgagaaggagacggaggaagagttgcgagacgtcgtgaacgaggcgaatgcccttgcgcccggctggggccagaccatatttcagtccgccaacgagattgccgctaacacggtccttcgacaacgtctagaggagattgagggcaagacggaggctgagaaggagtggtgggagaagagacgcgcgacgatccaaacggagtttatgaaggagttggatgacgaggtgtcgaccaaagtcggtagtgatgacgatgttgtgcacgtcgagtccaacagccctgctgcgacgccgagcgggaagaagaagaagggcaagcactga

SEQ ID NO: 18442 - protein, 233 aa, Muscodor strobelii
  misc_feature: SGI Peptide ID NO. 566185
  misc_feature (5)..(232): NCBI GI: 171680157 Blast Desc: protein product [Podospora anserina] gi|170939705|emb|CAP64931.1| protein product [Podospora anserina]
  misc_feature (5)..(230): NCBI GI: 85118487 Blast Desc: NCU02681 [Neurospora crassa OR74A] gi|28927263|gb|EAA36218.1| NCU02681 [Neurospora crassa OR74A] gi|38567197|emb|CAE76490.1| related to endoplasmic reticulum
  misc_feature (5)..(226): NCBI GI: 116207072 Blast Desc: CHGG_02829 [Chaetomium globosum CBS 148.51] gi|88183426|gb|EAQ90894.1| CHGG_02829 [Chaetomium globosum CBS 148.51]
  misc_feature (5)..(232): NCBI GI: 156057429 Blast Desc: SS1G_04445 [Sclerotinia sclerotiorum 1980] gi|154702231|gb|EDO01970.1| SS1G_04445 [Sclerotinia sclerotiorum 1980]
  misc_feature (5)..(232): NCBI GI: 154324158 Blast Desc: BC1G_00478 [Botryotinia fuckeliana B05.10] gi|150842707|gb|EDN17900.1| BC1G_00478 [Botryotinia fuckeliana B05.10]
  misc_feature (7)..(231): NCBI GI: 261356106 Blast Desc: translocation protein sec66 [Verticillium albo-atrum VaMs.102]
  misc_feature (5)..(217): NCBI GI: 256734363 Blast Desc: NECHADRAFT_74555 [Nectria haematococca mpVI 77-13-4]
  misc_feature (5)..(219): NCBI GI: 46108666 Blast Desc: FG01215.1 [Gibberella zeae PH-1]
  misc_feature (6)..(216): NCBI GI: 189203727 Blast Desc: conserved [Pyrenophora tritici-repentis Pt-1C-BFP] gi|187985298|gb|EDU50786.1| conserved [Pyrenophora tritici-repentis Pt-1C-BFP]
  misc_feature (5)..(226): NCBI GI: 255954783 Blast Desc: Pc21g11120 [Penicillium chrysogenum Wisconsin 54-1255] gi|211589855|emb|CAP96009.1| Pc21g11120 [Penicillium chrysogenum Wisconsin 54-1255]
  misc_feature: Useful for introducing or modulating the production of volatile compounds
MFESMFDIDWMSLALPFAYITVLGGSLYTFSTIYRKRKAVQSANLEPWFPPHLQRNIYLSLLHMEPEEGQEKAPKIPDSIIRAALLRRAVEDIRRIIQIRTSKQALNNLLQRGSVGEDLNQRFLAAEKETEEELRDVVNEANALAPGWGQTIFQSANEIAANTVLRQRLEEIEGKTEAEKEWWEKRRATIQTEFMKELDDEVSTKVGSDDDVVHVESNSPAATPSGKKKKGKH

SEQ ID NO: 18443 - DNA, 1204 bp, Muscodor strobelii
  misc_feature: SGI EST ID NO. CUFF.43326.0
  misc_feature: Variant of the nucleotide sequence at SEQ ID NO 18441
atcgaggcgaagaggcacatgccaccacactattaataccaccacagtccctcgttttcaagcgcgaacgccttcattccacactagctatctctccagctatcgctggctagtcaagatgttcgagtccatgttcgacatcgactggatgagccttgcgctccccttcgcatacatcaccgtgctaggcggctcgctttacacattctctaccatttatcggaaaagaaaggctgtccaaagcgcaaacctcgagccatggtttcccccgcacctccaacggaatatctacctctcactcctgcacatggagcccgaagagggccaggagaaagcccccaagatcccagactcgatcatcagggccgcattactacgcagagccgtggaggatattagacgtatcattcagatccgcacgagcaagcaggcactcaacaacctactgcagagaggtagcgtgggcgaggacttgaaccagagattcctagccgctgagaaggagacggaggaagagttgcgagacgtcgtgaacgaggcgaatgcccttgcgcccggctggggccagaccatatttcagtccgccaacgagattgccgctaacacggtccttcgacaacgtctagaggagattgagggcaagacggaggctgagaaggagtggtgggagaagagacgcgcgacgatccaaacggagtttatgaaggagttggatgacgaggtgtcgaccaaagtcggtagtgatgacgatgttgtgcacgtcgagtccaacagccctgctgcgacgccgagcgggaagaagaagaagggcaagcactgatagacggggtgatgtatttatacggagagggttgtctctagcattgcaggccggtatatactgcgtgtggcgtttcggcgtagggtgtggttgatggacggaaatgcatactcattttagggactattcttttctcatgccatacggcgcagatcgaatcgctcagcaattgcgtcgaagccactcttgataccatccataactttagatcgaaaatgtggggttcgctcggcagattacattgacagatatatctgtttcaattacaacgttgtcaagaatgacattccacgaattaggtgacttagagtgaactgcgtgccttgccgattctacatattcagacctaggaatgttccgaatcctcgcttttcttacgtcctg

SEQ ID NO: 18444 - DNA, 1215 bp, Muscodor strobelii
  misc_feature: SGI cDNA ID NO. 566186
  misc_feature: Encodes the peptide sequence at SEQ ID NO 18445
atgtcagccgcacggccggaattcgtcaaattgaacggccacgagaacttcacccagcgcctcgtcctagcaactctcaccggccggcccgtccacatctccaagatccgaccaaactcccccaccaatcctggtctcgcgccgcacgagatctccttcctccgcctcctcgaagccgtcaccaatggctcctctatgcagatctcctacacgggtacgaccataacgtatcacccgggactcgtcaccggtgctgtagcgggctacggcgcaggcgatggcgactccatcgagcacaacgttcccgcgacctgcacgcggggcatcacatacttcctattgcctctatgtatattagcacccttctccaaggcacacatgaacgtgcgcttctccggccccggcgtcatcacctcctctaccgaaaccggcgacctttccgtcgactcattccgaaccgccattctgcctctctacgacctcttcggcatccccgccatacgcattgagctgaaggttctgcaacggtcctgtacgggccagaggggaaatggaggcgccgggatcgtcgagttgaaattcgggagtcaagtcagattacccaaaaccttacatcttcacagaaacccaggccggataaaacgaataaggggtgtcgcgtacgcaaccggtgtctcggcttcaaacaacaatcgaatgatatattcagcgcgtgaggtgcttaataccttctgttcagatatccacatcgctgcgcaatatgaccaggctccgttagtcgcagatgagaaggcaggtggcaagaagagaatgggtatcggctttggattgagtctggtcgctgagtctaataccaacggtgtcttattctctgcagacactgttgtcccttcaaagggaggtgttgtcccagaagatattggcaaacgatgcgcatatcagctgctggagtcgattagcgttggcggttgtataagcagagcggccgctccgaccgttttgaccctgatggccatgggatccgaagacgtcggccgcctacgggtgggtagggatatcatcggatcagaagagttgatagaactagcccgggacctgaagaaattcggtgctagcagttgggctctgcgggatgtagacgaagaggaatcagatgatatcatcgtcgcggtcaaggggacaggtatgggaaatgttagcagaaaggtcgcatag

SEQ ID NO: 18445 - protein, 404 aa, Muscodor strobelii
  misc_feature: SGI Peptide ID NO. 566186
  misc_feature (11)..(381): Pfam Id: PF01137 Pfam Desc: RNA 3'-terminal phosphate cyclase
  misc_feature (208)..(322): Pfam Id: PF05189 Pfam Desc: RNA 3'-terminal phosphate cyclase (RTC), insert domain
  misc_feature (17)..(176): Pfam Id: PF01137 Pfam Desc: RNA 3'-terminal phosphate cyclase
  misc_feature (272)..(322): Pfam Id: PF05189 Pfam Desc: RNA 3'-terminal phosphate cyclase (RTC), insert domain
  misc_feature (208)..(250): Pfam Id: PF05189 Pfam Desc: RNA 3'-terminal phosphate cyclase (RTC), insert domain
  misc_feature (1)..(404): NCBI GI: 46108440 Blast Desc: FG01102.1 [Gibberella zeae PH-1]
  misc_feature (1)..(404): NCBI GI: 256735130 Blast Desc: [Nectria haematococca mpVI 77-13-4]
  misc_feature (1)..(404): NCBI GI: 171680145 Blast Desc: protein product [Podospora anserina] gi|170939699|emb|CAP64925.1| protein product [Podospora anserina]
  misc_feature (1)..(403): NCBI GI: 154324174 Blast Desc: BC1G_00486 [Botryotinia fuckeliana B05.10] gi|150842715|gb|EDN17908.1| BC1G_00486 [Botryotinia fuckeliana B05.10]
  misc_feature (1)..(403): NCBI GI: 156057411 Blast Desc: SS1G_04436 [Sclerotinia sclerotiorum 1980] gi|154702222|gb|EDO01961.1| SS1G_04436 [Sclerotinia sclerotiorum 1980]
  misc_feature (3)..(404): NCBI GI: 261356099 Blast Desc: RNA-3'-phosphate cyclase family protein [Verticillium albo-atrum VaMs.102]
  misc_feature (1)..(404): NCBI GI: 85118461 Blast Desc: NCU02675 [Neurospora crassa OR74A] gi|28927257|gb|EAA36212.1| NCU02675 [Neurospora crassa OR74A] gi|38567191|emb|CAE76484.1| related to RNA 3'-terminal phosphate
  misc_feature (1)..(404): NCBI GI: 116207080 Blast Desc: CHGG_02833 [Chaetomium globosum CBS 148.51] gi|88183430|gb|EAQ90898.1| CHGG_02833 [Chaetomium globosum CBS 148.51]
  misc_feature (2)..(404): NCBI GI: 39944880 Blast Desc: conserved [Magnaporthe grisea 70-15] gi|59803164|gb|AAX07732.1| RNA 3'-terminal phosphate cyclase-like protein [Magnaporthe grisea] gi|145021558|gb|EDK05687.1| grisea
  misc_feature (1)..(404): NCBI GI: 119195619 Blast Desc: CIMG_02184 [Coccidioides immitis RS]
  misc_feature (7)..(345): SWISSPROT Homolog: EC 6.5.1.4 RNA-3'-phosphate cyclase
MSAARPEFVKLNGHENFTQRLVLATLTGRPVHISKIRPNSPTNPGLAPHEISFLRLLEAVTNGSSMQISYTGTTITYHPGLVTGAVAGYGAGDGDSIEHNVPATCTRGITYFLLPLCILAPFSKAHMNVRFSGPGVITSSTETGDLSVDSFRTAILPLYDLFGIPAIRIELKVLQRSCTGQRGNGGAGIVELKFGSQVRLPKTLHLHRNPGRIKRIRGVAYATGVSASNNNRMIYSAREVLNTFCSDIHIAAQYDQAPLVADEKAGGKKRMGIGFGLSLVAESNTNGVLFSADTVVPSKGGVVPEDIGKRCAYQLLESISVGGCISRAAAPTVLTLMAMGSEDVGRLRVGRDIIGSEELIELARDLKKFGASSWALRDVDEEESDDIIVAVKGTGMGNVSRKVA

SEQ ID NO: 18446 - DNA, 1053 bp, Muscodor strobelii
  misc_feature: SGI cDNA ID NO. 566187
  misc_feature: Encodes the peptide sequence at SEQ ID NO 18447
atgaaccatgattcctccccgaccttgccggcggaccctcctcgcctccctctctcccagcacgccgacgccgacgttgacagaagcaacatccagcctccacaccgccgacaccaagagaatgcctcgcccggcggcgaggaagagccgctctcgcagcaggagaaggagggctttgccaagaagctccaattcttggtaaacttgactgtgaatctggatacgctcgtgtatgccgagctgtgtatactgtattatatggactgttccttttttagattgttcgtccggtggcttgcgcaaatgctgttcgtcagtcccaagacagaagataccatcctcatggtcccaaactaccacgtctccgctgtcgtcgctccgaacctactctgcatgctctcacatctcgtctcgcctctacccgaagcaggcgaagccgcgcggggctatctccacggaggtattctagttgactttgtcgggcaaaaacctccatcatcaaaactcacattgcttggcctggatgtcatcattcttgcgcttcaatgtttcatgatcactgtgaatatgagcaaggagagagtcaggaggacgatcaaaccttctcaagccaccgcaacttcaggggtctctgttcaggctgtccagacgacgcaagaccacgacgccgaagagcgtggggtgctgcgtgatgcgccaatcatggacgaaacagacaatattgagatgagagatctgagagagaatgatgagcacggcgatgcgagtcgtagcctgctcggggtcggcgaggggacggctgcattaagacggaggacagctcggcaagacgatcacgacccggatgacttggccgatgccttgcgatcaggcactgctgttcttgcccaattccatgtgccgaactcactacggagtgcgtggcatagcagggaaaataccccagagacggcagcggcgtacgctttacagaacgttggatacaatgcaacactagcagcattagcagctcagaggagggcgagattggtcacgcgacagacacaaacatga

SEQ ID NO: 18447 - protein, 350 aa, Muscodor strobelii
  misc_feature: SGI Peptide ID NO. 566187
  misc_feature (72)..(185): Pfam Id: PF08508 Pfam Desc: Fungal domain of function (DUF1746)
  misc_feature (51)..(344): NCBI GI: 171680143 Blast Desc: protein product [Podospora anserina] gi|170939698|emb|CAP64924.1| protein product [Podospora anserina]
  misc_feature (45)..(346): NCBI GI: 116207078 Blast Desc: CHGG_02832 [Chaetomium globosum CBS 148.51] gi|88183429|gb|EAQ90897.1| CHGG_02832 [Chaetomium globosum CBS 148.51]
  misc_feature (49)..(343): NCBI GI: 39944882 Blast Desc: MGG_04423 [Magnaporthe grisea 70-15] gi|145021557|gb|EDK05686.1| MGG_04423 [Magnaporthe grisea 70-15]
  misc_feature (1)..(350): NCBI GI: 256734419 Blast Desc: NECHADRAFT_98754 [Nectria haematococca mpVI 77-13-4]
  misc_feature (64)..(344): NCBI GI: 38567192 Blast Desc: [Neurospora crassa]
  misc_feature (64)..(344): NCBI GI: 85118465 Blast Desc: NCU02676 [Neurospora crassa OR74A] gi|28927258|gb|EAA36213.1| [Neurospora crassa OR74A]
  misc_feature (58)..(343): NCBI GI: 46108442 Blast Desc: FG01103.1 [Gibberella zeae PH-1]
  misc_feature (58)..(340): NCBI GI: 261356100 Blast Desc: conserved [Verticillium albo-atrum VaMs.102]
  misc_feature (47)..(311): NCBI GI: 238843710 Blast Desc: conserved [Microsporum canis CBS 113480]
  misc_feature (62)..(346): NCBI GI: 225562416 Blast Desc: conserved [Ajellomyces capsulatus G186AR]
MNHDSSPTLPADPPRLPLSQHADADVDRSNIQPPHRRHQENASPGGEEEPLSQQEKEGFAKKLQFLVNLTVNLDTLVYAELCILYYMDCSFFRLFVRWLAQMLFVSPKTEDTILMVPNYHVSAVVAPNLLCMLSHLVSPLPEAGEAARGYLHGGILVDFVGQKPPSSKLTLLGLDVIILALQCFMITVNMSKERVRRTIKPSQATATSGVSVQAVQTTQDHDAEERGVLRDAPIMDETDNIEMRDLRENDEHGDASRSLLGVGEGTAALRRRTARQDDHDPDDLADALRSGTAVLAQFHVPNSLRSAWHSRENTPETAAAYALQNVGYNATLAALAAQRRARLVTRQTQT

SEQ ID NO: 18448 - DNA, 2885 bp, Muscodor strobelii
  misc_feature: SGI EST ID NO. CUFF.43329.0
  misc_feature: Variant of the nucleotide sequence at SEQ ID NO 18446
attaagttgagtgataagctgccaaatctgccaaatcggtccaccatgctctaagagcgactgggctctattcttagctcctcggcttcttaagacataaacctccatttcctagcacgcatacgacaacgcgccgtggccatccaacgcccatcagccgcagctctgccgccagcacgtgtacatctcgaccccgacccttggtgccagcattctgcctcttctgatgatcgacactccacagcatgtgagacatgtgagagcataaacctctcacaatcatcaccatacatcgtcgaatgaggcgggagctatgaaccatgattcctccccgaccttgccggcggaccctcctcgcctccctctctcccagcacgccgacgccgacgttgacagaagcaacatccagcctccacaccgccgacaccaagagaatgcctcgcccggcggcgaggaagagccgctctcgcagcaggagaaggagggctttgccaagaagctccaattcttggtaaacttgactgtgaatctggatacgctcgtgtatgccgagctgtgtatactgtattatatggactgttccttttttagattgttcgtccggtggcttgcgcaaatgctgttcgtcagtcccaagacagaagataccatcctcatggtcccaaactaccacgtctccgctgtcgtcgctccgaacctactctgcatgctctcacatctcgtctcgcctctacccgaagcaggcgaagccgcgcggggctatctccacggaggtattctagttgactttgtcgggcaaaaacctccatcatcaaaactcacattgcttggcctggatgtcatcattcttgcgcttcaatgtttcatgatcactgtgaatatgagcaaggagagagtcaggaggacgatcaaaccttctcaagccaccgcaacttcaggggtctctgttcaggctgtccagacgacgcaagaccacgacgccgaagagcgtggggtgctgcgtgatgcgccaatcatggacgaaacagacaatattgagatgagagatctgagagagaatgatgagcacggcgatgcgagtcgtagcctgctcggggtcggcgaggggacggctgcattaagacggaggacagctcggcaagacgatcacgacccggatgacttggccgatgccttgcgatcaggcactgctgttcttgcccaattccatgtgccgaactcactacggagtgcgtggcatagcagggaaaataccccagagacggcagcggcgtacgctttacagaacgttggatacaatgcaacactagcagcattagcagctcagaggagggcgagattggtcacgcgacagacacaaacatgataccgctgcaacgaatgacagaatagtgtatatttctatgcgacctttctgctaacatttcccatacctgtccccttgaccgcgacgatgatatcatctgattcctcttcgtctacatcccgcagagcccaactgctagcaccgaatttcttcaggtcccgggctagttctatcaactcttctgatccgatgatatccctacccacccgtaggcggccgacgtcttcggatcccatggccatcagggtcaaaacggtcggagcggccgctctgcttatacaaccgccaacgctaatcgactccagcagctgatatgcgcatcgtttgccaatatcttctgggacaacacctccctttgaagggacaacagtgtctgcagagaataagacaccgttggtattagactcagcgaccagactcaatccaaagccgatacccattctcttcttgccacctgccttctcatctgcgactaacggagcctggtcatattgcgcagcgatgtggatatctgaacagaaggtattaagcacctcacgcgctgaatatatcattcgattgttgtttgaagccgagacaccggttgcgtacgcgacaccccttattcgttttatccggcctgggtttctgtgaagatgtaaggttttgggtaatctgacttgactcccgaatttcaactcgacgatcccggcgcctccatttcccctctggcccgtacaggaccgttgcagaaccttcagctcaatgcgtatggcggggatgccgaagaggtcgtagagaggcagaatggcggttcggaatgagtcgacggaaaggtcgccggtttcggtagaggaggtgatgacgccggggccggagaagcgcacgttcatgtgtgccttggagaagggtgctaatatacatagaggcaataggaagtatgtgatgccccgcgtgcaggtcgcgggaacgttgtgctcgatggagtcgccatcgcctgcgccgtagcccgctacagcaccggtgacgagtcccgggtgatacgttatggtcgtacccgtgtaggagatctgcatagaggagccattggtgacggcttcgaggaggcggaggaaggagatctcgtgcggcgcgagaccaggattggtgggggagtttggtcggatcttggagatgtggacgggccggccggtgagagttgctaggacgaggcgctgggtgaagttctcgtggccgttcaatttgacgaattccggccgtgcggctgacattgttcttgaccctaggcgtgagcgagctatatgtgtagctgcatgatttgatggtatgaatgcgaggcgattgcgattgcgatgggacaagccaaataaattctgccagcaaaaaataggcggtcgaagatttagtagagggaccgcagatacgtacctgcctagcctgggtcatgcgggatgaccccactaagtcccattttgatattcaccctagataggcgggaatctgcacgtcccttagccacaagcattgaactgcgcaagcc

SEQ ID NO: 18449 - DNA, 2607 bp, Muscodor strobelii
  misc_feature: SGI cDNA ID NO. 566188
  misc_feature: Reduced expression when VOC is produced
  misc_feature: Encodes the peptide sequence at SEQ ID NO 18450
atggcaggccttctttcctccttcaccacgggcagcaaaggcgattcccacagcctacccgtttacgaacatccatacacgcccacaaaagaacgactctcagacgactcttacgacgaatctgattatcatgactctgatacatcttcgccagatgttgctggttcacgatatgcctcgacaaccatctcccttcaagccccgattcttgccaaaccaacgcgatcaggatcgagaagaccagtcaggccatatcgactgccgaacagaataattcgttatctctgcttcggtcttgttgggctcatagtattatttatggctagtttagcacgtgctagtcagaacgaaaacaaagccatcgtggaaggcaaagtcattaaaaaaccgccgccacctcccatatgggagtcatatccattcctcacacgttactatggcggtattaagagcttggtacctctgtcgcagaataccccagaatatcctcgtgcgaaagacgagctgccattggacaagctggaattgaataatggtatcgtcgataccgagatcctggagactctggagaaccccccgctcgagaagcgtgacttgccttcaagcaaggatttcaccgattatcctcaaagtgtgtttgtggcctcccctgagaacgtccaaccgtgctttttggacaaggagaaggaagtccaggtccctccgattcgatactacgaaggacggccaagtggctttccagaaaatgtcctcggctcatatgagctgttgggtctacccgaggatgtctgttttgagcgctacggcaaatatgccccttatggccttggttattcgatcaggtcaggcggtctaggtactggagagcttggcgatacggaagggatagagtccacatggaacaaagtccccaaggttatctggagatcaatggactgggctgacacgcaaagacggtgttatcaagagaacgccgcccggtatgatccgctaccagtccgacaaccagctccgcatggcttctatattgaggaagtcaatgctaccgcggccgcgatgcgtctcgcaagtcgtgattcagcgctcgatgaatcgctccaatacacaagctcaggtactaaaaccggaagttcaagtgctgaaacagaggagcttgcaacatcgaattcccctacgaaagccgccagcaagactttgccacgaacagctgttgtggtccgatgttgggatgaatatatatggagagaggaggacataatgaacttgcgctctttgatcaccgagctttcactagcttcgggcggtcgctatgacgtacacctccttatccaggtcaaaaacgaagctgcgcatccaatttgggccgattcaaacgtatataagaaccgaattaacgaaacagtgccccctgaattccagggcctagccaccctttggacagagacacagatgttggctatgtaccagggcattcacgatctcttttctcgtggaccagatctgcctgtccatggcgtttaccgtggactgcagatggcaatgcagcactttgcttacctacaccccgagtacgactacttttggcaatgggagatggacatccgctacactggccactattatgatctcttctcgaaggttgagaaatggaccaaagagcaaccgagaaaggggctttgggagcggaacgctcgattctacttgccatctgtccatggtgactgggaggacttcaagcaaatggctcgcgtgcagtcagaaatgggtatgaaaggggctgacaacgtttgggagagtatcccaggctctgataagcctgtacaatctcgtgctgatcagaccgtctggggcccagaacgacctaacgaccgcaaggattggttcgagcccgagaaagatccgaaagtaccgtggtcgtacgaaaaggacaaatacgtctggggcgtcggcgaagaagctgattacatcactttcaatcccatgtttgatcccgcgggcacgacctggggtctagcagatgatatcactggctacaacgaaaccgagggcaacggcaaaccgccacgtcgtgcgcagattataacagcatctcgcatgtctcggcgcctacttttgacgatgcataaggagacggcgttcttcaagcaccatgctttcccggagatgtggcctgggaccgtagcattgcagcatggcttcaaagccgtattcacccctcacccactatatgtagaccgcgagtggcctactgagatgtttgcatcgacactcaatgctggcaagaatggcgcgagcggcggctcacggaatgcagtctttggcgatcgtgagcacaacctagagggactaagctggttctaccgatccgggtttgcgcctaatctgtaccgaagatggcttggcctaacggtcaacaacgacggaggcgaggaatttgaactcgtcgctgacgagagcaagaatgggtcgacagtgggtgagatgcgcggtggcgaaggcagaatgtgtctcccaccgatgcttcttcatcctatcaaggatgtggaacttcctgttgaggaggctgtgtcggagattgagattcctgtgtcggatcccaacgcatga

SEQ ID NO: 18450 - protein, 868 aa, Muscodor strobelii
  misc_feature: SGI Peptide ID NO. 566188
  misc_feature (85)..(858): NCBI GI: 145614626 Blast Desc: MGG_04440 [Magnaporthe grisea 70-15] gi|145021538|gb|EDK05667.1| MGG_04440 [Magnaporthe grisea 70-15]
  misc_feature (76)..(868): NCBI GI: 85117373 Blast Desc: NCU08338 [Neurospora crassa OR74A] gi|28927047|gb|EAA36005.1| conserved [Neurospora crassa OR74A]
  misc_feature (19)..(853): NCBI GI: 256735173 Blast Desc: NECHADRAFT_90051 [Nectria haematococca mpVI 77-13-4]
  misc_feature (72)..(868): NCBI GI: 116182030 Blast Desc: CHGG_01643 [Chaetomium globosum CBS 148.51] gi|88185940|gb|EAQ93408.1| CHGG_01643 [Chaetomium globosum CBS 148.51]
  misc_feature (39)..(858): NCBI GI: 171695466 Blast Desc: protein product [Podospora anserina] gi|170947975|emb|CAP60139.1| protein product [Podospora anserina]
  misc_feature (196)..(868): NCBI GI: 46108260 Blast Desc: FG01012.1 [Gibberella zeae PH-1]
  misc_feature (52)..(857): NCBI GI: 115491641 Blast Desc: conserved [Aspergillus terreus NIH2624] gi|114197308|gb|EAU39008.1| conserved [Aspergillus terreus NIH2624]
  misc_feature (38)..(859): NCBI GI: 121701689 Blast Desc: conserved [Aspergillus clavatus NRRL 1] gi|119397252|gb|EAW07683.1| conserved [Aspergillus clavatus NRRL 1]
  misc_feature (251)..(868): NCBI GI: 156053097 Blast Desc: SS1G_06716 [Sclerotinia sclerotiorum 1980] gi|154704494|gb|EDO04233.1| SS1G_06716 [Sclerotinia sclerotiorum 1980]
  misc_feature (43)..(855): NCBI GI: 255936975 Blast Desc: Pc13g10940 [Penicillium chrysogenum Wisconsin 54-1255] gi|211584134|emb|CAP92163.1| Pc13g10940 [Penicillium chrysogenum Wisconsin 54-1255]
  misc_feature: Useful for introducing or modulating the production of volatile compounds
MAGLLSSFTTGSKGDSHSLPVYEHPYTPTKERLSDDSYDESDYHDSDTSSPDVAGSRYASTTISLQAPILAKPTRSGSRRPVRPYRLPNRIIRYLCFGLVGLIVLFMASLARASQNENKAIVEGKVIKKPPPPPIWESYPFLTRYYGGIKSLVPLSQNTPEYPRAKDELPLDKLELNNGIVDTEILETLENPPLEKRDLPSSKDFTDYPQSVFVASPENVQPCFLDKEKEVQVPPIRYYEGRPSGFPENVLGSYELLGLPEDVCFERYGKYAPYGLGYSIRSGGLGTGELGDTEGIESTWNKVPKVIWRSMDWADTQRRCYQENAARYDPLPVRQPAPHGFYIEEVNATAAAMRLASRDSALDESLQYTSSGTKTGSSSAETEELATSNSPTKAASKTLPRTAVVVRCWDEYIWREEDIMNLRSLITELSLASGGRYDVHLLIQVKNEAAHPIWADSNVYKNRINETVPPEFQGLATLWTETQMLAMYQGIHDLFSRGPDLPVHGVYRGLQMAMQHFAYLHPEYDYFWQWEMDIRYTGHYYDLFSKVEKWTKEQPRKGLWERNARFYLPSVHGDWEDFKQMARVQSEMGMKGADNVWESIPGSDKPVQSRADQTVWGPERPNDRKDWFEPEKDPKVPWSYEKDKYVWGVGEEADYITFNPMFDPAGTTWGLADDITGYNETEGNGKPPRRAQIITASRMSRRLLLTMHKETAFFKHHAFPEMWPGTVALQHGFKAVFTPHPLYVDREWPTEMFASTLNAGKNGASGGSRNAVFGDREHNLEGLSWFYRSGFAPNLYRRWLGLTVNNDGGEEFELVADESKNGSTVGEMRGGEGRMCLPPMLLHPIKDVELPVEEAVSEIEIPVSDPNA

SEQ ID NO: 18451 - DNA, 3539 bp, Muscodor strobelii
  misc_feature: SGI EST ID NO. CUFF.43290.0
  misc_feature: Variant of the nucleotide sequence at SEQ ID NO 18449
tggtgacggatgaaaagggaaaatggacttggcaacgcccagccaaacagactcctcatcaatccacttcatgattcgtcgtctcaaggttggtaaacaacctggctaaacttggaacgggatataccatgtcttccctcctttccgtccaacatcctccccgggcgcatgtactagtaaatattttgcttctctcaagaatttgcacatatatccgtttgcatattgtaattgagcattcgcattcgcatttgtatctctgttccagtgtcttgcaagcgagcgtttcctagattggtccacttggcccctttcttgccgcgcgtacttcgtcgaaactcgcagggcacttcaaaagttgtcgcatcagagtgtcgtaattgtttctgttgctgccctcgaataagctcatattatcgatctaagttggcttttacctgcattacataacgttcagcgcaccaagtcccctattcgacattttccctcagtgcttgtcgagactcaggaaattggagagtcgactaggcatagagaacaactaacaacaaaccgctcctcgcggcgcctcgctatggcaggccttctttcctccttcaccacgggcagcaaaggcgattcccacagcctacccgtttacgaacatccatacacgcccacaaaagaacgactctcagacgactcttacgacgaatctgattatcatgactctgatacatcttcgccagatgttgctggttcacgatatgcctcgacaaccatctcccttcaagccccgattcttgccaaaccaacgcgatcaggatcgagaagaccagtcaggccatatcgactgccgaacagaataattcgttatctctgcttcggtcttgttgggctcatagtattatttatggctagtttagcacgtgctagtcagaacgaaaacaaagccatcgtggaaggcaaagtcattaaaaaaccgccgccacctcccatatgggagtcatatccattcctcacacgttactatggcggtattaagagcttggtacctctgtcgcagaataccccagaatatcctcgtgcgaaagacgagctgccattggacaagctggaattgaataatggtatcgtcgataccgagatcctggagactctggagaaccccccgctcgagaagcgtgacttgccttcaagcaaggatttcaccgattatcctcaaagtgtgtttgtggcctcccctgagaacgtccaaccgtgctttttggacaaggagaaggaagtccaggtccctccgattcgatactacgaaggacggccaagtggctttccagaaaatgtcctcggctcatatgagctgttgggtctacccgaggatgtctgttttgagcgctacggcaaatatgccccttatggccttggttattcgatcaggtcaggcggtctaggtactggagagcttggcgatacggaagggatagagtccacatggaacaaagtccccaaggttatctggagatcaatggactgggctgacacgcaaagacggtgttatcaagagaacgccgcccggtatgatccgctaccagtccgacaaccagctccgcatggcttctatattgaggaagtcaatgctaccgcggccgcgatgcgtctcgcaagtcgtgattcagcgctcgatgaatcgctccaatacacaagctcaggtactaaaaccggaagttcaagtgctgaaacagaggagcttgcaacatcgaattcccctacgaaagccgccagcaagactttgccacgaacagctgttgtggtccgatgttgggatgaatatatatggagagaggaggacataatgaacttgcgctctttgatcaccgagctttcactagcttcgggcggtcgctatgacgtacacctccttatccaggtcaaaaacgaagctgcgcatccaatttgggccgattcaaacgtatataagaaccgaattaacgaaacagtgccccctgaattccagggcctagccaccctttggacagagacacagatgttggctatgtaccagggcattcacgatctcttttctcgtggaccagatctgcctgtccatggcgtttaccgtggactgcagatggcaatgcagcactttgcttacctacaccccgagtacgactacttttggcaatgggagatggacatccgctacactggccactattatgatctcttctcgaaggttgagaaatggaccaaagagcaaccgagaaaggggctttgggagcggaacgctcgattctacttgccatctgtccatggtgactgggaggacttcaagcaaatggctcgcgtgcagtcagaaatgggtatgaaaggggctgacaacgtttgggagagtatcccaggctctgataagcctgtacaatctcgtgctgatcagaccgtctggggcccagaacgacctaacgaccgcaaggattggttcgagcccgagaaagatccgaaagtaccgtggtcgtacgaaaaggacaaatacgtctggggcgtcggcgaagaagctgattacatcactttcaatcccatgtttgatcccgcgggcacgacctggggtctagcagatgatatcactggctacaacgaaaccgagggcaacggcaaaccgccacgtcgtgcgcagattataacagcatctcgcatgtctcggcgcctacttttgacgatgcataaggagacggcgttcttcaagcaccatgctttcccggagatgtggcctgggaccgtagcattgcagcatggcttcaaagccgtattcacccctcacccactatatgtagaccgcgagtggcctactgagatgtttgcatcgacactcaatgctggcaagaatggcgcgagcggcggctcacggaatgcagtctttggcgatcgtgagcacaacctagagggactaagctggttctaccgatccgggtttgcgcctaatctgtaccgaagatggcttggcctaacggtcaacaacgacggaggcgaggaatttgaactcgtcgctgacgagagcaagaatgggtcgacagtgggtgagatgcgcggtggcgaaggcagaatgtgtctcccaccgatgcttcttcatcctatcaaggatgtggaacttcctgttgaggaggctgtgtcggagattgagattcctgtgtcggatcccaacgcatgattgaatgatagcatacgaatcgtggttggaattttgtcattctgacttttggtttatctatatacctggttggatataccacggcgttggctaggttgcatgaatatctggtgtgggattttgcgcataccacataattgcgtgtaaatgttgacatatttagttggaagaccttgaatggaaccttatatggggcacaaacaacttgcgcggagtagtatctgacagcgtttgttcatctacgatatttgccaattaaacctcttgagtgaaatgagcaaattcaggcgtgtgtctgaacttggcttagatatgatattatacaacttgttgcttcttgaggaccagtatatggaga

SEQ ID NO: 18452 - DNA, 1329 bp, Muscodor strobelii
  misc_feature: SGI cDNA ID NO. 566189
  misc_feature: Encodes the peptide sequence at SEQ ID NO 18453
atggccgctgctggttctgcaaagccattcgatgtcgccatcgtgggagggggcatcactggtctcacgttggcaatcagcctgcttcaacacgatgttccgataacgatttatgagtctgcggcaaagttcggcgagatcggcgctggcgttgggtttggaccgaatgccgtcagggcaatgaagctaatatcaccggagatcttagaacggtatggatcatgtcgaacaaagcaatggcaaggcagagagaaagtctggtttacggcgcatgtaggagaccaaaggaaagcaggagaagatgggacgttcaagttccaaggtcagccgggatataaggtcggagatgcgctgtacgagacaccgtacacagatatggatgaaattatcgaggaagtcggtggtgttggcggcgtgcatcgtgcgcattttctagatcacctcgttgaaatgatacccgagtcaattgcacgattcggaaaacggcttgtagatatcacgaaagcagaggactcgaatgacgcagtgttgcacttcgcagatggaactactgcccaacatgcagtcgtatttggttgcgatggtataaaggctcaaagtcgcaggatacttctggggggcaataagtatgatgcggtcttctcagggaagtgttgctaccggggtctagttccgatgaccaaggcggccgagcatcttggagcagaaaatgccaacaatagccagatatatttcggataccacggccatatccttacattccctattgcaggagggaagatcatgaacgtcgtggcttttgcgtcacgaaaatcatgggactcaactgaatggattgcgccagcaagcagagatgacatgatggctgactatgagacttggggccctccggcaactactattgtctctataatggagaagacagatatttgggctctatttgatcacccggcagcaccgacattctatgggacgcaaccacgtatatgtctcgtcggcgatgctgcccacgccagcacgcctcatcaaggagcgggagctgggatgggaatcgaagatgcctatatccttggtaatttgatcgggcagtctaagtctgtggaagatcttaacaaagcactgagagcgtatgacgaagtcagaagaccgcgaacgcagagactagtgacgactagccgcgaggcaggtacgctttgggacttcgaacttgaaggagacgacatagatgccgttaagcggaaccaaaactcacgtatgcattggatttggactatagaccttaaagccgagctagaaagagcgagagctatctttagacagtccagctaa

SEQ ID NO: 18453 - protein, 442 aa, Muscodor strobelii
  misc_feature: SGI Peptide ID NO. 566189
  misc_feature (9)..(392): Pfam Id: PF01494 Pfam Desc: FAD binding domain
  misc_feature (11)..(45): Pfam Id: PF01266 Pfam Desc: FAD dependent oxidoreductase
  misc_feature (2)..(441): NCBI GI: 205364084 Blast Desc: mannitol 1-phosphate dehydrogenase 2 [Phaeosphaeria nodorum] gi|205364086|gb|ACI04507.1| mannitol 1-phosphate dehydrogenase 2 [Phaeosphaeria nodorum]
  misc_feature (2)..(441): NCBI GI: 169624993 Blast Desc: mannitol 1-phosphate dehydrogenase [Phaeosphaeria nodorum SN15] gi|50841431|gb|AAT84078.1| mannitol 1-phosphate dehydrogenase [Phaeosphaeria nodorum] gi|111055738|gb|EAT76858.1|
  misc_feature (4)..(441): NCBI GI: 189194379 Blast Desc: mannitol 1-phosphate dehydrogenase [Pyrenophora tritici-repentis Pt-1C-BFP] gi|187979092|gb|EDU45718.1| mannitol 1-phosphate dehydrogenase [Pyrenophora tritici-repentis
  misc_feature (9)..(441): NCBI GI: 189209391 Blast Desc: mannitol 1-phosphate dehydrogenase [Pyrenophora tritici-repentis Pt-1C-BFP] gi|187977121|gb|EDU43747.1| mannitol 1-phosphate dehydrogenase [Pyrenophora tritici-repentis
  misc_feature (2)..(442): NCBI GI: 154319498 Blast Desc: BC1G_02230 [Botryotinia fuckeliana B05.10] gi|150855888|gb|EDN31080.1| BC1G_02230 [Botryotinia fuckeliana B05.10]
  misc_feature (8)..(438): NCBI GI: 156061635 Blast Desc: SS1G_02963 [Sclerotinia sclerotiorum 1980] gi|154700364|gb|EDO00103.1| SS1G_02963 [Sclerotinia sclerotiorum 1980]
  misc_feature (6)..(439): NCBI GI: 256723415 Blast Desc: NECHADRAFT_42151 [Nectria haematococca mpVI 77-13-4]
  misc_feature (6)..(439): NCBI GI: 256723382 Blast Desc: NECHADRAFT_98246 [Nectria haematococca mpVI 77-13-4]
  misc_feature (1)..(442): NCBI GI: 145251856 Blast Desc: An16g01280 [Aspergillus niger] gi|134082981|emb|CAK42745.1| protein product [Aspergillus niger]
  misc_feature (8)..(435): NCBI GI: 70989613 Blast Desc: salicylate hydroxylase [Aspergillus fumigatus Af293] gi|66847287|gb|EAL87618.1| salicylate hydroxylase, [Aspergillus fumigatus Af293] gi|159129063|gb|EDP54177.1| salicylate fumigatus
  misc_feature (1)..(435): SWISSPROT Homolog: EC 1.14.13.1 Salicylate 1-monooxygenase
MAAAGSAKPFDVAIVGGGITGLTLAISLLQHDVPITIYESAAKFGEIGAGVGFGPNAVRAMKLISPEILERYGSCRTKQWQGREKVWFTAHVGDQRKAGEDGTFKFQGQPGYKVGDALYETPYTDMDEIIEEVGGVGGVHRAHFLDHLVEMIPESIARFGKRLVDITKAEDSNDAVLHFADGTTAQHAVVFGCDGIKAQSRRILLGGNKYDAVFSGKCCYRGLVPMTKAAEHLGAENANNSQIYFGYHGHILTFPIAGGKIMNVVAFASRKSWDSTEWIAPASRDDMMADYETWGPPATTIVSIMEKTDIWALFDHPAAPTFYGTQPRICLVGDAAHASTPHQGAGAGMGIEDAYILGNLIGQSKSVEDLNKALRAYDEVRRPRTQRLVTTSREAGTLWDFELEGDDIDAVKRNQNSRMHWIWTIDLKAELERARAIFRQSS

SEQ ID NO: 18454 - DNA, 1875 bp, Muscodor strobelii
  misc_feature: SGI EST ID NO. CUFF.43298.0
  misc_feature: Variant of the nucleotide sequence at SEQ ID NO 18452
gtaaacggttaatgacccaacacatttgaatgcaagaaagtaagcaatgattttctgtcactagctagatgctcgtcgcgtttcgtgcccgcacaaggcattaaatatgcccagcgtcttcagaagctatctgcccatctaagtttctttaccatagacttggattcttttgtcatggccgctgctggttctgcaaagccattcgatgtcgccatcgtgggagggggcatcactggtctcacgttggcaatcagcctgcttcaacacgatgttccgataacgatttatgagtctgcggcaaagttcggcgagatcggcgctggcgttgggtttggaccgaatgccgtcagggcaatgaagctaatatcaccggagatcttagaacggtatggatcatgtcgaacaaagcaatggcaaggcagagagaaagtctggtttacggcgcatgtaggagaccaaaggaaagcaggagaagatgggacgttcaagttccaaggtcagccgggatataaggtcggagatgcgctgtacgagacaccgtacacagatatggatgaaattatcgaggaagtcggtggtgttggcggcgtgcatcgtgcgcattttctagatcacctcgttgaaatgatacccgagtcaattgcacgattcggaaaacggcttgtagatatcacgaaagcagaggactcgaatgacgcagtgttgcacttcgcagatggaactactgcccaacatgcagtcgtatttggttgcgatggtataaaggctcaaagtcgcaggatacttctggggggcaataagtatgatgcggtcttctcagggaagtgttgctaccggggtctagttccgatgaccaaggcggccgagcatcttggagcagaaaatgccaacaatagccagatatatttcggataccacggccatatccttacattccctattgcaggagggaagatcatgaacgtcgtggcttttgcgtcacgaaaatcatgggactcaactgaatggattgcgccagcaagcagagatgacatgatggctgactatgagacttggggccctccggcaactactattgtctctataatggagaagacagatatttgggctctatttgatcacccggcagcaccgacattctatgggacgcaaccacgtatatgtctcgtcggcgatgctgcccacgccagcacgcctcatcaaggagcgggagctgggatgggaatcgaagatgcctatatccttggtaatttgatcgggcagtctaagtctgtggaagatcttaacaaagcactgagagcgtatgacgaagtcagaagaccgcgaacgcagagactagtgacgactagccgcgaggcaggtacgctttgggacttcgaacttgaaggagacgacatagatgccgttaagcggaaccaaaactcacgtatgcattggatttggactatagaccttaaagccgagctagaaagagcgagagctatctttagacagtccagctaagggcgcttaagtgacggcggcatgcgtatctggcctattagacctatcagttgtggagaatggagcccgatatacgaaacgatgcccaaacatatttctatattcagtcgaaggatatctcgatatatttcactatatgatatgagttcctccggttaggcaactcttgttgctagtggagcttaagcaataccaatatactaaacaaggcaagacattccggttaccacatgtacccaagaagtaatgggcttatgaccagcagtacattgtcatattgctgtatccattagagaattttgaaatagaagccctgcgtagttcggaaataatcagtgtaacaagtcaatggcgtacacaacgtgcaaggga

SEQ ID NO: 18455 - DNA, 780 bp, Muscodor strobelii
  misc_feature: SGI cDNA ID NO. 566190
  misc_feature: Encodes the peptide sequence at SEQ ID NO 18456
atgcagctcaccaatctgttcgtcttcgcctcggcgctggtcgtcacatctgctgttccagccaggcctcgttgcagcacaactactgctactagcgctacatccacagtccaagctacgccttcgcctacattttcaagcaacgtcgcctatgttctacctagtaatggtggcaccactcctctagcctcaccacctacaggctcagtccttcagcacattgctgtcggtcacggtgtccagaactacacctgcacagcggccggtgtcaacggaacgtcattcggagctttagctgttctctacgacgcaacttcgctctaccccggatctggccccggagctttgtcacaagccgactgggatagcctcacgagcaaggtccttcgcacgacttccatgcccattgaccagtcaaacggggctgcttccccattcccagccaatgccgcccttactgttgatggagttgcctctcctcttccttacctagctcaccactacttcgacagtaacaaggtcccgactttcgaccttagccctgcgcttttcaagggttcgaagaccaccgacattctcgcacctacaagcgcggataagggtctgaccgacgagggtgctgttgactggcttgctctcagtgatgccggtggcagcgtctccatcaacatggtgtaccgtgtgctcacttccggtggtttccaaggcgtttgtgccgctgctggtgactcacagagcgtgccatacaccgccatgtactggttctacgccccggcatga

SEQ ID NO: 18456 - protein, 259 aa, Muscodor strobelii
  misc_feature: SGI Peptide ID NO. 566190
  misc_feature (52)..(257): NCBI GI: 256732236 Blast Desc: NECHADRAFT_41096 [Nectria haematococca mpVI 77-13-4]
  misc_feature (52)..(257): NCBI GI: 46137601 Blast Desc: FG10316.1 [Gibberella zeae PH-1]
  misc_feature (34)..(256): NCBI GI: 85090346 Blast Desc: NCU09848 [Neurospora crassa OR74A] gi|28919730|gb|EAA29136.1| NCU09848 [Neurospora crassa OR74A]
  misc_feature (53)..(256): NCBI GI: 171694457 Blast Desc: protein product [Podospora anserina] gi|170947177|emb|CAP73982.1| protein product [Podospora anserina]
  misc_feature (44)..(232): NCBI GI: 261353579 Blast Desc: conserved [Verticillium albo-atrum VaMs.102]
  misc_feature (52)..(257): NCBI GI: 39940592 Blast Desc: MGG_04944 [Magnaporthe grisea 70-15] gi|145010821|gb|EDJ95477.1| MGG_04944 [Magnaporthe grisea 70-15]
  misc_feature (13)..(257): NCBI GI: 154310307 Blast Desc: BC1G_07073 [Botryotinia fuckeliana B05.10] gi|150851405|gb|EDN26598.1| BC1G_07073 [Botryotinia fuckeliana B05.10]
  misc_feature (26)..(187): NCBI GI: 116197577 Blast Desc: CHGG_06944 [Chaetomium globosum CBS 148.51] gi|88178223|gb|EAQ85691.1| CHGG_06944 [Chaetomium globosum CBS 148.51]
  misc_feature (13)..(257): NCBI GI: 156055970 Blast Desc: SS1G_05337 [Sclerotinia sclerotiorum 1980] gi|154703121|gb|EDO02860.1| SS1G_05337 [Sclerotinia sclerotiorum 1980]
  misc_feature (1)..(257): NCBI GI: 256728492 Blast Desc: NECHADRAFT_96845 [Nectria haematococca mpVI 77-13-4]
MQLTNLFVFASALVVTSAVPARPRCSTTTATSATSTVQATPSPTFSSNVAYVLPSNGGTTPLASPPTGSVLQHIAVGHGVQNYTCTAAGVNGTSFGALAVLYDATSLYPGSGPGALSQADWDSLTSKVLRTTSMPIDQSNGAASPFPANAALTVDGVASPLPYLAHHYFDSNKVPTFDLSPALFKGSKTTDILAPTSADKGLTDEGAVDWLALSDAGGSVSINMVYRVLTSGGFQGVCAAAGDSQSVPYTAMYWFYAPA

SEQ ID NO: 18457 - DNA, 1694 bp, Muscodor strobelii
  misc_feature: SGI EST ID NO. CUFF.43316.0
  misc_feature: Variant of the nucleotide sequence at SEQ ID NO 18455
ctaacatctcgcacgcccaggaagtgaattcgtttgactatcttcgtttgtatagagctcgagtatataagattgtgccctcgcctcgacatcaacacaaactcatgaaaatagcatcagcccttacattcctctcatatctctaactcctttttctacagtccgttctgctatatcggtgccttacatttattattggaatattgcttaactagttcttcgacattctccattcttggccaagttttcggtctcaatctcggctcgggaagcctacatcttgcatacacatacatatttatatatagtaccacccgcattcttaagcgccctaaggccacccataacggcctccatcattcaagacagacactccaaggacaattacaaacgttggcgtcagctaccgccggcccatcccagttcatttcaccagccaattgcgcctcgctttgtcttcaaatttcaatatactatatctagagcctcgctcccgcttcacactcaccttgtcttttgactaccattccgttttcgaaagtcaaagcgtcgatcttccaaagacaaaaaacgagagtcctgaacagcagtcaacatgcagctcaccaatctgttcgtcttcgcctcggcgctggtcgtcacatctgctgttccagccaggcctcgttgcagcacaactactgctactagcgctacatccacagtccaagctacgccttcgcctacattttcaagcaacgtcgcctatgttctacctagtaatggtggcaccactcctctagcctcaccacctacaggctcagtccttcagcacattgctgtcggtcacggtgtccagaactacacctgcacagcggccggtgtcaacggaacgtcattcggagctttagctgttctctacgacgcaacttcgctctaccccggatctggccccggagctttgtcacaagccgactgggatagcctcacgagcaaggtccttcgcacgacttccatgcccattgaccagtcaaacggggctgcttccccattcccagccaatgccgcccttactgttgatggagttgcctctcctcttccttacctagctcaccactacttcgacagtaacaaggtcccgactttcgaccttagccctgcgcttttcaagggttcgaagaccaccgacattctcgcacctacaagcgcggataagggtctgaccgacgagggtgctgttgactggcttgctctcagtgatgccggtggcagcgtctccatcaacatggtgtaccgtgtgctcacttccggtggtttccaaggcgtttgtgccgctgctggtgactcacagagcgtgccatacaccgccatgtactggttctacgccccggcatgagtcctacgatatgacaaaataatgagatactccacagagaaatgtaaggagaagaaagattggcattcggaaggcgttcagggaaagaggtcttattttctacggcaacggctgggttaagccgcagctcatctacgggataaaattttgaggttttggtaatggggtcggatgctactgcttcgcttctctacgttctttttgcgatagatggccgggcctgcttgtttatcggcttaggccggtcaaatataccccttgcacttgagctactagtgtatatagaaggcaaaattaacataaatctgctgattcatat

SEQ ID NO: 18458 - DNA, 1254 bp, Muscodor strobelii
  misc_feature: SGI cDNA ID NO. 566191
  misc_feature: Elevated expression when VOC is produced
  misc_feature: Encodes the peptide sequence at SEQ ID NO 18459
atggccgatctgcaaggacgcaaggtcttcaaggtcttcaaccaagacttcatcgtagacgaacgatataccgtcaccaaggaactgggacagggagcttatggtatagtctgcgctgccgtgaacaatcagacgaacgaaggagttgccattaaaaaggtcacgaatgtattcagcaagaagatcctcgctaagcgcgctctgcgcgagattaagctcctccagcacttccggggacaccgtaacatcacatgtctatatgacatggacattccccggcctgacaacttcaacgagacatatctatatgaagagttgatggagtgcgacctggcggcgatcattcgctcaggccaacccctaacagatgctcacttccagtccttcatttaccaaatcctgtgcgggttaaaatacatccactccgcaaacgttctgcatcgtgatttgaagcccggcaatcttctcgtgaatgccgactgcgagctcaagatttgcgatttcggtcttgcgcgtgggttctccatcgacccagaggaaaatgccgggtacatgacggagtatgtggctacgcgatggtaccgagctccagaaatcatgttgagtttccagagttatacgaaagctattgatgtctggtctgtggggtgcattctcgctgaacttttgggtggccgacctttctttaaaggtcgtgattatgtcgaccagctgaaccagattcttcacattttgggtacgcccaatgaagacaccttgtcgcgcattgggtcgtcgcgcgcccaggaatatgtgcgcaacctgccatacatgcaaaaaaagcctttcccgtcgctattcccgaatgctaatcctgatgctcttgatcttctcgaccgaatgttggcttttgatccctcatcacgcattagtgttgagcgtgcactcgagcatccttacctccagatctggcacgacgcttccgatgagcctgactgtccagccacattcaacttcgatttcgaagtggtcgaagacgtcgccgacatgcgcaagatgatcatggacgaagttttccggttcaggcagcaagtgcgcactgcaccgggaacaactcctatgggtgccggacaacctgctcaagcaggtcaggtacccatgccagatcagtcaaaccaatggagagccgaggatccacgaccccaagagtacatgaaccagatgggcagtctcgaatccgagctgcagggtggattggatgctggtagacggtag

SEQ ID NO: 18459 - protein, 417 aa, Muscodor strobelii
  misc_feature: SGI Peptide ID NO. 566191
  misc_feature (23)..(314): Pfam Id: PF00069 Pfam Desc: Protein kinase domain
  misc_feature (105)..(172): Pfam Id: PF07714 Pfam Desc: Protein tyrosine kinase
  misc_feature (23)..(87): Pfam Id: PF07714 Pfam Desc: Protein tyrosine kinase
  misc_feature (1)..(416): NCBI GI: 39940594 Blast Desc: MGG_04943 [Magnaporthe grisea 70-15] gi|2465400|gb|AAC63682.1| MAP kinase Mps1 [Magnaporthe grisea] gi|145010822|gb|EDJ95478.1| MGG_04943 [Magnaporthe grisea 70-15]
  misc_feature (1)..(417): NCBI GI: 256731849 Blast Desc: [Nectria haematococca mpVI 77-13-4]
  misc_feature (1)..(416): NCBI GI: 83016541 Blast Desc: MAP kinase Mps1 [Hypocrea lixii]
  misc_feature (1)..(416): NCBI GI: 189313357 Blast Desc: TmkB [Hypocrea virens]
  misc_feature (1)..(417): NCBI GI: 89279387 Blast Desc: MAP kinase [Fusarium proliferatum]
  misc_feature (1)..(416): NCBI GI: 35384078 Blast Desc: MAP kinase [Trichoderma atroviride]
  misc_feature (1)..(405): NCBI GI: 224555567 Blast Desc: pMAP kinase THMK [Hypocrea lixii]
  misc_feature (1)..(417): NCBI GI: 46137595 Blast Desc: FG10313.1 [Gibberella zeae PH-1] gi|20153214|gb|AAM13670.1|AF492766_1 MAP kinase [Gibberella zeae]
  misc_feature (1)..(410): NCBI GI: 116197597 Blast Desc: CHGG_06954 [Chaetomium globosum CBS 148.51] gi|88178233|gb|EAQ85701.1| CHGG_06954 [Chaetomium globosum CBS 148.51]
  misc_feature (1)..(416): NCBI GI: 17978662 Blast Desc: mitogen-activated protein kinase [Colletotrichum lagenarium]
  misc_feature (8)..(383): SWISSPROT Homolog: EC 2.7.11.24 Mitogen-activated protein kinase
  misc_feature: Useful for introducing or modulating the production of volatile compounds
MADLQGRKVFKVFNQDFIVDERYTVTKELGQGAYGIVCAAVNNQTNEGVAIKKVTNVFSKKILAKRALREIKLLQHFRGHRNITCLYDMDIPRPDNFNETYLYEELMECDLAAIIRSGQPLTDAHFQSFIYQILCGLKYIHSANVLHRDLKPGNLLVNADCELKICDFGLARGFSIDPEENAGYMTEYVATRWYRAPEIMLSFQSYTKAIDVWSVGCILAELLGGRPFFKGRDYVDQLNQILHILGTPNEDTLSRIGSSRAQEYVRNLPYMQKKPFPSLFPNANPDALDLLDRMLAFDPSSRISVERALEHPYLQIWHDASDEPDCPATFNFDFEVVEDVADMRKMIMDEVFRFRQQVRTAPGTTPMGAGQPAQAGQVPMPDQSNQWRAEDPRPQEYMNQMGSLESELQGGLDAGRR

SEQ ID NO: 18460 - DNA, 2518 bp, Muscodor strobelii
  misc_feature: SGI EST ID NO. CUFF.43526.1
  misc_feature: Variant of the nucleotide sequence at SEQ ID NO 18458
catcagcatcagacttccccctcctttggcaaggagtattcgttcatcactcaaatcgcgtttcgttttattatcttgctgctggctcatctcggaggctgcccaatgtcaagactctcttgatcattcatacttatccttacgtacacctgctttgtaattctgccccatcatccccatcttgacaagcctgaaaagcggcggcgcattgcagttagattggagttcatcatcccgcccctcctttcaagagtcaaaaaggtggcagagcccccgactctttccatatcgagaagaagtaattgctgctcccaccaacacacatacgcctatatacctttacagacatccacaacccggcgaggtagcatcgatcctctccgtcggattttgtctcctgtcgtcttcctgtcataggtcgcgacacaggctctgcagttgcgttgcgccgtcagggtatctcttatttactccacagcctgccgccgcactcgacacaagcttattctagactctgcttgcccagtatatctaccacgggtcttgcttttattgcttccccgattcttcccactctttgcttttctcgcctttgctgccatcgcatctttatctgagccggtgccttggcggttctttgatcgagagccgctcttctctcaaagggtcttcttgatagctttgcgcctcattgtctcaatattgctccccagtcctcgaaattcgcttagagcctgttcagctcagttccctcgagcttcatacagtagatcgccgctgtcatccctggtgtaacatcgatacctatctaccacaactatcttcaaaatggccgatctgcaaggacgcaaggtcttcaaggtcttcaaccaagacttcatcgtagacgaacgatataccgtcaccaaggaactgggacagggagcttatggtatagtctgcgctgccgtgaacaatcagacgaacgaaggagttgccattaaaaaggtcacgaatgtattcagcaagaagatcctcgctaagcgcgctctgcgcgagattaagctcctccagcacttccggggacaccgtaacatcacatgtctatatgacatggacattccccggcctgacaacttcaacgagacatatctatatgaagagttgatggagtgcgacctggcggcgatcattcgctcaggccaacccctaacagatgctcacttccagtccttcatttaccaaatcctgtgcgggttaaaatacatccactccgcaaacgttctgcatcgtgatttgaagcccggcaatcttctcgtgaatgccgactgcgagctcaagatttgcgatttcggtcttgcgcgtgggttctccatcgacccagaggaaaatgccgggtacatgacggagtatgtggctacgcgatggtaccgagctccagaaatcatgttgagtttccagagttatacgaaagctattgatgtctggtctgtggggtgcattctcgctgaacttttgggtggccgacctttctttaaaggtcgtgattatgtcgaccagctgaaccagattcttcacattttgggtacgcccaatgaagacaccttgtcgcgcattgggtcgtcgcgcgcccaggaatatgtgcgcaacctgccatacatgcaaaaaaagcctttcccgtcgctattcccgaatgctaatcctgatgctcttgatcttctcgaccgaatgttggcttttgatccctcatcacgcattagtgttgagcgtgcactcgagcatccttacctccagatctggcacgacgcttccgatgagcctgactgtccagccacattcaacttcgatttcgaagtggtcgaagacgtcgccgacatgcgcaagatgatcatggacgaagttttccggttcaggcagcaagtgcgcactgcaccgggaacaactcctatgggtgccggacaacctgctcaagcaggtcaggtacccatgccagatcagtcaaaccaatggagagccgaggatccacgaccccaagagtacatgaaccagatgggcagtctcgaatccgagctgcagggtggattggatgctggtagacggtagacacagatgccacggccgatcacgtgcccaggggatgacgacgaacgagatgattgggtgttaattgacaatacaggcgatgatacacttggcgaagatgggtgcgggcatctgttttacaacaacctaaaaatgctggatgtctcttaaaggggtgattgataccattggtttaattgaaagacgctgattggaaagaaaggcagttgaaggtgatgcgcatgaagaatggaaacgctgagtttcttgcaggctttacaaattaaaaagagaattagaccacatagcaaaataatcggaagagccttgtcttgtattttcatgattgtatctagggcgcttacggctggctgttgatcacgatcgatggactccctttcgtcaagagtagtccagtagcacatttaccaattatcaaagcagactaacacgcttg

SEQ ID NO: 18461 - DNA, 540 bp, Muscodor strobelii
  misc_feature: SGI cDNA ID NO. 566192
  misc_feature: Encodes the peptide sequence at SEQ ID NO 18462
atgggaagcacggcagatagcgcaccggcgcctccaccggcgaatatctctgtgcttttcgtctgtctgggaaacatctgtcgctccacaatggccgagggcgtctttcgctctatcgtcaaggacccctcctcgccctattacggcctcgtcggcacggttgattcctgcgggacgggcggctatcacaccggtgacgagcccgattcgcgaacactgtccacactcgaagaccacggtatcacgaactacacacatgcagcgcgccggctacacgatagagacttcaagaacttcgactatatattcgccatggaccgatcgaaccttagcgacgtgaagagatggcgagacagaaagagtgtcgatgacaaggccaagatatcccttttcggcgaatactcaggaggaaaaccagaagtagtccaagatccgtattatggcggccgtgacggatttgaaacggcgtatgagcagtgtcgcaggttcacgctgaactttttagaggctacctttcctgatgtgcccaagccagaatga

SEQ ID NO: 18462 - protein, 179 aa, Muscodor strobelii
  misc_feature: SGI Peptide ID NO. 566192
  misc_feature (16)..(170): Pfam Id: PF01451 Pfam Desc: Low molecular weight phosphotyrosine protein phosphatase
  misc_feature (16)..(175): NCBI GI: 171694453 Blast Desc: protein product [Podospora anserina] gi|170947175|emb|CAP73980.1| protein product [Podospora anserina]
  misc_feature (16)..(177): NCBI GI: 154292137 Blast Desc: BC1G_14690 [Botryotinia fuckeliana B05.10] gi|150846241|gb|EDN21434.1| BC1G_14690 [Botryotinia fuckeliana B05.10]
  misc_feature (13)..(175): NCBI GI: 145602394 Blast Desc: MGG_04942 [Magnaporthe grisea 70-15] gi|145010823|gb|EDJ95479.1| MGG_04942 [Magnaporthe grisea 70-15]
  misc_feature (16)..(175): NCBI GI: 85089636 Blast Desc: low molecular weight phosphotyrosine protein phosphatase [Neurospora crassa OR74A] gi|28919351|gb|EAA28803.1| low molecular weight phosphotyrosine protein phosphatase crassa
  misc_feature (12)..(175): NCBI GI: 261353581 Blast Desc: phosphotyrosine protein phosphatase [Verticillium albo-atrum VaMs.102]
  misc_feature (13)..(172): NCBI GI: 46137593 Blast Desc: FG10312.1 [Gibberella zeae PH-1]
  misc_feature (16)..(174): NCBI GI: 256731848 Blast Desc: [Nectria haematococca mpVI 77-13-4]
  misc_feature (15)..(162): NCBI GI: 116197595 Blast Desc: CHGG_06953 [Chaetomium globosum CBS 148.51] gi|88178232|gb|EAQ85700.1| CHGG_06953 [Chaetomium globosum CBS 148.51]
  misc_feature (31)..(177): NCBI GI: 156055216 Blast Desc: SS1G_04959 [Sclerotinia sclerotiorum 1980] gi|154702744|gb|EDO02483.1| SS1G_04959 [Sclerotinia sclerotiorum 1980]
  misc_feature (10)..(169): NCBI GI: 169604965 Blast Desc: SNOG_05498 [Phaeosphaeria nodorum SN15] gi|111065442|gb|EAT86562.1| SNOG_05498 [Phaeosphaeria nodorum SN15]
  misc_feature (15)..(170): SWISSPROT Homolog: EC 3.1.3.48 Protein-tyrosine-phosphatase
  misc_feature (15)..(170): SWISSPROT Homolog: EC 3.1.3.2 Acid phosphatase
MGSTADSAPAPPPANISVLFVCLGNICRSTMAEGVFRSIVKDPSSPYYGLVGTVDSCGTGGYHTGDEPDSRTLSTLEDHGITNYTHAARRLHDRDFKNFDYIFAMDRSNLSDVKRWRDRKSVDDKAKISLFGEYSGGKPEVVQDPYYGGRDGFETAYEQCRRFTLNFLEATFPDVPKPE

SEQ ID NO: 18463 - DNA, 737 bp, Muscodor strobelii
  misc_feature: SGI EST ID NO. CUFF.43332.0
  misc_feature: Variant of the nucleotide sequence at SEQ ID NO 18461
cacatctccagagttgaatcctgtcgcgtagccattggttctgacgtctcttccatctaatatagcagacaaacatcaagatgggaagcacggcagatagcgcaccggcgcctccaccggcgaatatctctgtgcttttcgtctgtctgggaaacatctgtcgctccacaatggccgagggcgtctttcgctctatcgtcaaggacccctcctcgccctattacggcctcgtcggcacggttgattcctgcgggacgggcggctatcacaccggtgacgagcccgattcgcgaacactgtccacactcgaagaccacggtatcacgaactacacacatgcagcgcgccggctacacgatagagacttcaagaacttcgactatatattcgccatggaccgatcgaaccttagcgacgtgaagagatggcgagacagaaagagtgtcgatgacaaggccaagatatcccttttcggcgaatactcaggaggaaaaccagaagtagtccaagatccgtattatggcggccgtgacggatttgaaacggcgtatgagcagtgtcgcaggttcacgctgaactttttagaggctacctttcctgatgtgcccaagccagaatgaatagaaggctggaggctatgatgaaatctaatgatacccagagatatggatcaattgcttagagaagagcatagaaaatagacgaagactaatgctatcgagaaatttactctcgac

SEQ ID NO: 18464 - DNA, 1647 bp, Muscodor strobelii
  misc_feature: SGI cDNA ID NO. 566193
  misc_feature: Encodes the peptide sequence at SEQ ID NO 18465
atggaagaaaaccttgacgacaatgcgatccatgagatcgaggagatcctcggcactaagatatatccggggacggagatcatgaaagatgtcggagttcaccacttcgtgaaatcgcatcgtggaaactcgaattcaaatgtgctcatcccacagcctagcgatgatccgcacgatcctttgaactggagcccaaaatggaaagctgttgctatcacttgctctatttatcttgccttcagcctcaatctcggaccattggctctcgcgccgatgtttgagtattatataatggaatgggacagaagtctagcagacgttgtgcagtttacaggcattgctatcctaattcttggattcagcaatttcttctgggtccctataggcgtctgtttcggacgaagaccagtcttcattttcagtactcttatatgtatagcatcgtcaatctggcgagccaaggctacaagctatgactcttttcttggcgcttgcattctgaacggatttgcagctggtccttgcgagacattgcctcctcaggttatcaccgatttgatttttcttcatgatcgaggaaaatacaacacgttatattttgccttttactttatctcgttgaccgttgggcctattatatcaggggcgatggccttccatgtcggatggcgaagcttctggtggttcaatactgcactgcttgttctcggccttctgcttcacgtgtttctctttccggagacgcgttatacgaggacgcctccgccaggggaaaatgctatatcgccatcgaaagaagcagttgaaacgcatgaaaaggttctcgaatctcaagagaccgagacacagaaagttgacggccctaacgacgaagttcacggccatagccagacacacgaagatccctggctaggtagaggtagaccagggaaaagcaacttcaagcttgagggcagtctatggcgtgaattttgggtaccctggtacttacacgcgttccccattccggaatttgcggcgttcgttgtctcgtggactgcaagctgctacctcgttgccaatctcacccagacgcaggcattcaccgcaccgccttataactactcgtctcagaccattggattattcaacttggctatattgataggtggcctaattggactgttcacctgcggtcccttttctgactggagcgcggcttatctgaccaagaagaataatggtgtcagagaaccagaaatgcgtcttgtggcaatgataccatacgtggccatactgatcgtgggaagtgtagttaccgcggtaggttatgactaccattgggcatggcccgtgattgtggttctaggatacggcgctttgggtatccaagtctcggctctgccttcgattgcttctacatatgcgatcgatagttacaagcctgccaccggttctttgttcgtgatgattacagtgaacaagaatgtgtggggctatggtctctcgaagttcatcacggaatgggccgatgaggtcaattaccgagctcctatcctcttgaatatgggattgactgttttgtggtgcttgtgcggaatcatcttttggttctacggcaaacgattccgagggttgactaagaattccttggttcataagttgtag

SEQ ID NO: 18465 - protein, 548 aa, Muscodor strobelii
  misc_feature: SGI Peptide ID NO. 566193
  misc_feature (73)..(493): Pfam Id: PF07690 Pfam Desc: Major Facilitator Superfamily
  misc_feature (73)..(484): Pfam Id: PF07690 Pfam Desc: Major Facilitator Superfamily
  misc_feature (1)..(548): NCBI GI: 146324544 Blast Desc: MFS transporter [Aspergillus fumigatus Af293] gi|129557299|gb|EAL89226.2| MFS transporter, [Aspergillus fumigatus Af293] gi|159130282|gb|EDP55395.1| MFS transporter,
  misc_feature (13)..(548): NCBI GI: 242772781 Blast Desc: MFS transporter, [Talaromyces stipitatus ATCC 10500] gi|218721726|gb|EED21144.1| MFS transporter, [Talaromyces stipitatus ATCC 10500]
  misc_feature (7)..(548): NCBI GI: 212531375 Blast Desc: MFS transporter, [Penicillium marneffei ATCC 18224] gi|210071208|gb|EEA25297.1| MFS transporter, [Penicillium marneffei ATCC 18224]
  misc_feature (10)..(548): NCBI GI: 225555578 Blast Desc: conserved [Ajellomyces capsulatus G186AR]
  misc_feature (8)..(548): NCBI GI: 256730175 Blast Desc: NECHADRAFT_82900 [Nectria haematococca mpVI 77-13-4]
  misc_feature (1)..(548): NCBI GI: 240110736 Blast Desc: Major Facilitator Superfamily protein [Coccidioides posadasii C735 delta SOWgp]
  misc_feature (28)..(548): NCBI GI: 119473179 Blast Desc: MFS transporter, [Neosartorya fischeri NRRL 181] gi|119406679|gb|EAW16630.1| MFS transporter, [Neosartorya fischeri NRRL 181]
  misc_feature (1)..(548): NCBI GI: 242799759 Blast Desc: conserved [Talaromyces stipitatus ATCC 10500] gi|218716791|gb|EED16212.1| conserved [Talaromyces stipitatus ATCC 10500]
  misc_feature (13)..(548): NCBI GI: 119196943 Blast Desc: CIMG_02846 [Coccidioides immitis RS]
  misc_feature (11)..(548): NCBI GI: 256722362 Blast Desc: NECHADRAFT_94766 [Nectria haematococca mpVI 77-13-4]
MEENLDDNAIHEIEEILGTKIYPGTEIMKDVGVHHFVKSHRGNSNSNVLIPQPSDDPHDPLNWSPKWKAVAITCSIYLAFSLNLGPLALAPMFEYYIMEWDRSLADVVQFTGIAILILGFSNFFWVPIGVCFGRRPVFIFSTLICIASSIWRAKATSYDSFLGACILNGFAAGPCETLPPQVITDLIFLHDRGKYNTLYFAFYFISLTVGPIISGAMAFHVGWRSFWWFNTALLVLGLLLHVFLFPETRYTRTPPPGENAISPSKEAVETHEKVLESQETETQKVDGPNDEVHGHSQTHEDPWLGRGRPGKSNFKLEGSLWREFWVPWYLHAFPIPEFAAFVVSWTASCYLVANLTQTQAFTAPPYNYSSQTIGLFNLAILIGGLIGLFTCGPFSDWSAAYLTKKNNGVREPEMRLVAMIPYVAILIVGSVVTAVGYDYHWAWPVIVVLGYGALGIQVSALPSIASTYAIDSYKPATGSLFVMITVNKNVWGYGLSKFITEWADEVNYRAPILLNMGLTVLWCLCGIIFWFYGKRFRGLTKNSLVHKL

SEQ ID NO: 18466 - DNA, 1180 bp, Muscodor strobelii
  misc_feature: SGI EST ID NO. CUFF.43338.0
  misc_feature: Variant of the nucleotide sequence at SEQ ID NO 18464
tcgtgacgcgtaattgcagggcaaagctcttccttgctctagaaacccaccctcttctgcaacttcatttcggccgtcggtctatctgcaagcttgcggtcgcagtaattgagtgcgtaaaaactttagcacctgaacggtactcctccaacgtgatctgagcaacccaatcattgagacagcttcatcaagatggaagaaaaccttgacgacaatgcgatccatgagatcgaggagatcctcggcactaagatatatccggggacggagatcatgaaagatgtcggagttcaccacttcgtgaaatcgcatcgtggaaactcgaattcaaatgtgctcatcccacagcctagcgatgatccgcacgatcctttgaactggagcccaaaatggaaagctgttgctatcacttgctctatttatcttgccttcagcctcaatctcggaccattggctctcgcgccgatgtttggtgagcagactcttgaaaatgggtttatccagtattatataatggaatgggacagaagtctagcagacgttgtgcagtttacaggcattgctatcctaattcttggattcagcaatttcttctgggtccctataggcgtctgtttcggacgaagaccagtcttcattttcagtactcttatatgtatagcatcgtcaatctggcgagccaaggctacaagctatgactcttttcttggcgcttgcattctgaacggatttgcagctggtccttgcgagacattgcctcctcaggttatcaccgatttgatttttcttcatgatcgaggaaaatacaacacgttatattttgccttttactttatctcgttgaccgttgggcctattatatcaggggcgatggccttccatgtcggatggcgaagcttctggtggttcaatactgcactgcttgttctcggccttctgcttcacgtgtttctctttccggagacgcgttatacgaggacgcctccgccaggggaaaatgctatatcgccatcgaaagaagcagttgaaacgcatgaaaaggttctcgaatctcaagagaccgagacacagaaagttgacggccctaacgacgaagttcacggccatagccagacacacgaagatccctggctaggtagaggtagaccagggaaaagcaacttcaagctgttccagccat

SEQ ID NO: 18467 - DNA, 1257 bp, Muscodor strobelii
  misc_feature: SGI cDNA ID NO. 566194
  misc_feature: Encodes the peptide sequence at SEQ ID NO 18468
atggctagtctatcaaatcttccacctgaacttctgctcgagatcgcatcgtgtctcgtctaccacgagtctgagccgctctgccaccgtcggcctttccacgaatgggatcttgcaattaaggaacaggagcactgcatggttgattgcaacagagatctctcgtcattgagcaaaacttgccgcaagctatatcaagctataggtggcttgcggttcagcaaccttgtcatagaagagactgtgtcacgaagagctgaggactccatccgcgatgttgccaacaagccgaacctggccgcacatgtgagaaatgtccatatcgagtgtaactggaatactagcctcggcaacgatttctgtttcgtcttctcgcttccgaatctacatatgctcaccatcaacttcgtttttgtggagatgctaggtcgggacgccgaagtcgttggtcctttgattggagcttctactgtacagattctgcggttactgcgatgcggagctcgcgagataccgctcatgcagatgctcagcttcccacgtgtcctcaaggagctgtggtatgaagttgaagagtttgagttggataatgaaggcatccttgcactcgtcgatggatccgacggattcttcacctgtgctgcactggagagggcattacggagtcaatccgaccacttggaaaaactcgttttcacacggccacttgaacacgaggatttgttcccacctgatgtgctaaatcttcgtgggttctcgaaactcaaaacactatgggttaaccaggtgtttgtacgcacgtcagacttgtgggatcgccttccagccaacatcgaagagcttgaagtcttttatgacaacacgtttactcgtttcacatcaacaacttccgatgatcggagtggcccgaggtggttgattgcattgctaaggaggatatctcaccctactagagacaatgtgaggggtcgttacacgcccaaattgaagcgtattcgaattctgtcttgggaggaccatggatttgatgacttcttggacatacctgacgcaatcccaggtttcgatgagagaaggggggtaacggcgccagagtcaccatggacaccaccgtcgaccattttgaaattgtttgttgatgcaagggtgaacttcagtatatacttgaatgcgaaaacgcgctatagatacacgataaatggcgatgacgcattccgacatgtttgggaagacgactggggaatggaagatctatag

SEQ ID NO: 18468 - protein, 418 aa, Muscodor strobelii
  misc_feature: SGI Peptide ID NO. 566194
  misc_feature (1)..(390): NCBI GI: 242818299 Blast Desc: TSTA_054860 [Talaromyces stipitatus ATCC 10500] gi|218713554|gb|EED12978.1| TSTA_054860 [Talaromyces stipitatus ATCC 10500]
  misc_feature (1)..(288): NCBI GI: 255935545 Blast Desc: [Penicillium chrysogenum Wisconsin 54-1255] gi|211583419|emb|CAP91431.1| [Penicillium chrysogenum Wisconsin 54-1255]
MASLSNLPPELLLEIASCLVYHESEPLCHRRPFHEWDLAIKEQEHCMVDCNRDLSSLSKTCRKLYQAIGGLRFSNLVIEETVSRRAEDSIRDVANKPNLAAHVRNVHIECNWNTSLGNDFCFVFSLPNLHMLTINFVFVEMLGRDAEVVGPLIGASTVQILRLLRCGAREIPLMQMLSFPRVLKELWYEVEEFELDNEGILALVDGSDGFFTCAALERALRSQSDHLEKLVFTRPLEHEDLFPPDVLNLRGFSKLKTLWVNQVFVRTSDLWDRLPANIEELEVFYDNTFTRFTSTTSDDRSGPRWLIALLRRISHPTRDNVRGRYTPKLKRIRILSWEDHGFDDFLDIPDAIPGFDERRGVTAPESPWTPPSTILKLFVDARVNFSIYLNAKTRYRYTINGDDAFRHVWEDDWGMEDL

SEQ ID NO: 18469 - DNA, 1124 bp, Muscodor strobelii
  misc_feature: SGI EST ID NO. CUFF.43343.0
  misc_feature: Variant of the nucleotide sequence at SEQ ID NO 18467
gcactgcatggttgattgcaacagagatctctcgtcattgagcaaaacttgccgcaagctatatcaagctataggtggcttgcggttcagcaaccttgtcatagaagagactgtgtcacgaagagctgaggactccatccgcgatgttgccaacaagccgaacctggccgcacatgtgagaaatgtccatatcgagtgtaactggaatactagcctcggcaacgatttctgtttcgtcttctcgcttccgaatctacatatgctcaccatcaacttcgtttttgtggagatgctaggtcgggacgccgaagtcgttggtcctttgattggagcttctactgtacagattctgcggttactgcgatgcggagctcgcgagataccgctcatgcagatgctcagcttcccacgtgtcctcaaggagctgtggtatgaagttgaagagtttgagttggataatgaaggcatccttgcactcgtcgatggatccgacggattcttcacctgtgctgcactggagagggcattacggagtcaatccgaccacttggaaaaactcgttttcacacggccacttgaacacgaggatttgttcccacctgatgtgctaaatcttcgtgggttctcgaaactcaaaacactatgggttaaccaggtgtttgtacgcacgtcagacttgtgggatcgccttccagccaacatcgaagagcttgaagtcttttatgacaacacgtttactcgtttcacatcaacaacttccgatgatcggagtggcccgaggtggttgattgcattgctaaggaggatatctcaccctactagagacaatgtgaggggtcgttacacgcccaaattgaagcgtattcgaattctgtcttgggaggaccatggatttgatgacttcttggacatacctgacgcaatcccaggtttcgatgagagaaggggggtaacggcgccagagtcaccatggacaccaccgtcgaccattttgaaattgtttgttgatgcaagggtgaacttcagtatatacttgaatgcgaaaacgcgctatagatacacgataaatggcgatgacgcattccgacatgtttgggaagacgactggggaatggaagatctat

SEQ ID NO: 18470 - DNA, 1218 bp, Muscodor strobelii
  misc_feature: SGI cDNA ID NO. 566195
  misc_feature: Encodes the peptide sequence at SEQ ID NO 18471
atggtcgccactacttacgccttgacggctgccgcccttgctggcttggctgttgcccagcccgtgaagccctacagcggatctttctctgtccaccaggttcgcaacactaactacaaagcccatggtccgtcggctatggcgaaggcttacctgaagttcggtgctcctctccctgagcaccttgccaagtttgtaaaggtcccaaagacctaccgccgcgcggacaactccaccggcggcagcggcagcgcagtcactactcccgttgcaccttacgacatcgagtacttaacccccgtctcgatcggaacgcccgctcagactctcaaccttgacttcgataccggttcttcggatttgtgggtcttcagcactgagactgacccaagctctgttcaaaacaaccaggttctgtatgacccgagcaagtccagcacttctaaggaagtcagtggtgcctcgtggaagatctcctacggtgacgggagctcatccagcggtgacgtctacaccgataccgttaacattggcggtgtcagtgtttccggccaggctgttgagtctgcgaagactgtctccgacagcttcgccactggcgacagcgatgggctccttggactcgccatgagcagcatcaacactgttacccctaaccccgccaagacctggttcgacaatgccatttccggtcttgacgtcgctgccttcactgctgacctcaagtaccacactgctggtacctatgacttcggtgtcattgatgactccaagtacactggcgagatctcctatgtcgatgttgatgccagccagggattctgggacttccaggctgacgtggatggcacttcaacctcgggtattgctgacactggcaccaccctcctcctgattgacgacaagatcgtctcatcctactacagccaagtcgatggcgccaagaactctcaggccgacggtggctacgtcttctcttgcgatgccactcttcccgacttcaccttctctgccggtgacgctaagatcactgttcccggccagtacatcaactacgcccccgccgacaataccggcaccacctgcttcggtggtatccagagcagcgccggcattggtatcaacatcttcggtgatgtcgccctcaaggctgctttcgtcgtctttgaccagtccaccggttctccccgtctcggctgggccaacaaggacttgtaa

SEQ ID NO: 18471 - protein, 405 aa, Muscodor strobelii
  misc_feature: SGI Peptide ID NO. 566195
  misc_feature (96)..(403): Pfam Id: PF00026 Pfam Desc: Eukaryotic aspartyl protease
  misc_feature (12)..(405): NCBI GI: 46126795 Blast Desc: FG07775.1 [Gibberella zeae PH-1]
  misc_feature (7)..(403): NCBI GI: 416748 Blast Desc: CARP_CRYPA RecName: Full=Endothiapepsin; AltName: Full=Aspartate protease; Flags: Precursor gi|2629|emb|CAA44952.1| microbial aspartic proteinases; precursor endothiapepsin aspartic
  misc_feature (29)..(405): NCBI GI: 18448713 Blast Desc: AF462062_1 aspartic protease [Fusarium venenatum]
  misc_feature (8)..(405): NCBI GI: 1469396 Blast Desc: secreted aspartic proteinase precursor [Glomerella cingulata]
  misc_feature (16)..(405): NCBI GI: 85110723 Blast Desc: endothiapepsin precursor [Neurospora crassa OR74A] gi|28925285|gb|EAA34364.1| endothiapepsin precursor [Neurospora crassa OR74A] gi|38524232|emb|CAE75698.1| endothiapepsin crassa]
  misc_feature (6)..(403): NCBI GI: 47027997 Blast Desc: aspartyl protease [Trichoderma asperellum]
  misc_feature (21)..(405): NCBI GI: 29788116 Blast Desc: aspartyl protease [Sordaria macrospora]
  misc_feature (7)..(405): NCBI GI: 116182964 Blast Desc: CHGG_02110 [Chaetomium globosum CBS 148.51] gi|88186407|gb|EAQ93875.1| CHGG_02110 [Chaetomium globosum CBS 148.51]
  misc_feature (5)..(403): NCBI GI: 261352351 Blast Desc: endothiapepsin [Verticillium albo-atrum VaMs.102]
  misc_feature (27)..(405): NCBI GI: 171683756 Blast Desc: protein product [Podospora anserina] gi|170941838|emb|CAP67491.1| protein product [Podospora anserina]
  misc_feature (27)..(403): SWISSPROT Homolog: EC 3.4.23.22 Endothiapepsin
MVATTYALTAAALAGLAVAQPVKPYSGSFSVHQVRNTNYKAHGPSAMAKAYLKFGAPLPEHLAKFVKVPKTYRRADNSTGGSGSAVTTPVAPYDIEYLTPVSIGTPAQTLNLDFDTGSSDLWVFSTETDPSSVQNNQVLYDPSKSSTSKEVSGASWKISYGDGSSSSGDVYTDTVNIGGVSVSGQAVESAKTVSDSFATGDSDGLLGLAMSSINTVTPNPAKTWFDNAISGLDVAAFTADLKYHTAGTYDFGVIDDSKYTGEISYVDVDASQGFWDFQADVDGTSTSGIADTGTTLLLIDDKIVSSYYSQVDGAKNSQADGGYVFSCDATLPDFTFSAGDAKITVPGQYINYAPADNTGTTCFGGIQSSAGIGINIFGDVALKAAFVVFDQSTGSPRLGWANKDL

SEQ ID NO: 18472 - DNA, 1887 bp, Muscodor strobelii
  misc_feature: SGI EST ID NO. CUFF.43358.0
  misc_feature: Variant of the nucleotide sequence at SEQ ID NO 18470
ccacagccgatcctaatgatcaaattcatgtatgaatagacggttgatttgttctcgcatctacatacggatcatccctcggctgagctgcagaagctggtaggagacgagttacctaaggctccacctggtttctgaaataagcagttagttctattgccctgcctctgcatctaccaaccaggaatggagcctcacctgtggtacgtgatatgggcattgatgctcgtatgtggtggcgagcggttgttaccagtccctaatccattctctacaatgtttgtctatatatgagagccttggctcgccctcctctcgccgtatcctttcgtttctctctatcatcatcaccaacattcctttataccaccaaccacttccacatatatcccacagtcaccatggtcgccactacttacgccttgacggctgccgcccttgctggcttggctgttgcccagcccgtgaagccctacagcggatctttctctgtccaccaggttcgcaacactaactacaaagcccatggtccgtcggctatggcgaaggcttacctgaagttcggtgctcctctccctgagcaccttgccaagtttgtaaaggtcccaaagacctaccgccgcgcggacaactccaccggcggcagcggcagcgcagtcactactcccgttgcaccttacgacatcgagtacttaacccccgtctcgatcggaacgcccgctcagactctcaaccttgacttcgataccggttcttcggatttgtgggtcttcagcactgagactgacccaagctctgttcaaaacaaccaggttctgtatgacccgagcaagtccagcacttctaaggaagtcagtggtgcctcgtggaagatctcctacggtgacgggagctcatccagcggtgacgtctacaccgataccgttaacattggcggtgtcagtgtttccggccaggctgttgagtctgcgaagactgtctccgacagcttcgccactggcgacagcgatgggctccttggactcgccatgagcagcatcaacactgttacccctaaccccgccaagacctggttcgacaatgccatttccggtcttgacgtcgctgccttcactgctgacctcaagtaccacactgctggtacctatgacttcggtgtcattgatgactccaagtacactggcgagatctcctatgtcgatgttgatgccagccagggattctgggacttccaggctgacgtggatggcacttcaacctcgggtattgctgacactggcaccaccctcctcctgattgacgacaagatcgtctcatcctactacagccaagtcgatggcgccaagaactctcaggccgacggtggctacgtcttctcttgcgatgccactcttcccgacttcaccttctctgccggtgacgctaagatcactgttcccggccagtacatcaactacgcccccgccgacaataccggcaccacctgcttcggtggtatccagagcagcgccggcattggtatcaacatcttcggtgatgtcgccctcaaggctgctttcgtcgtctttgaccagtccaccggttctccccgtctcggctgggccaacaaggacttgtaagtcgggaatagcaaaggtgggagaatgtttagatgttgcgaactgtcgcagacaggcagcatcgtgtattctatgggatgatgttttgcgcatttgatacgaaccacttaatcggtggtcgcatgatatgaggacattcttagaactcgttctgcatggcaagtggttagatgatgatggccttcttgttatatagcttttacttggatagattaatccatgttcaaatacttcactttatagttcctcttccaacagtgaattatcc

SEQ ID NO: 18473 - DNA, 879 bp, Muscodor strobelii
  misc_feature: SGI cDNA ID NO. 566196
  misc_feature: Encodes the peptide sequence at SEQ ID NO 18474
atggcgactatccagctttcgttctctctccgcgtttcttccggcgtcaagtccgttcatttgcttggctcctgggacaactacgttggtcagatccccctttccaaggacaagagctcctccaagtccggatcatggaagggtactttccgctttcagggcaacctcgaggccggccagcgatactggtactactacatcatcgatggctaccacgtctcccacaaccccagtgaggcttcgaccgtcgagcccactactggccgtgaactcaacattctcgacgtccccaaggacaagtcgagcaagtcttccaagtcttctcacagctcgagcaagagctcctcgcgtcaccacagctcctcttcttcatccaaggataagcaccgatcttccaagcgtgactctcttcgcgtagacatccccaagggccgcccactctcaacctctcagatcgttgctcccaagcccatgtctccccacgctacccgccacatcctggatgctgactactgcgatgacgacactatcgaggaacttaccgcccgctttggcagcgccggtttcgaggaggaggaatacatcaccgacttcagcaactccccggtctcttcctctggctccagcctgtcttaccgctcagacagctcttctccgtcatcttccatgtccggctacagcacgcccgcctcagactgcagcaactgcacctgtgagcgctacggtatcacccgcaagggcgaccgcgtcaagatcgactgcggcggtgcgcgatgtggctacagcgactccagcagctgtgaaagctccggcgacgagtacgaagaggagtacgtctcccactccagccgccgccacggcatcgtcgtccgctcgtga

SEQ ID NO: 18474 - protein, 292 aa, Muscodor strobelii
  misc_feature: SGI Peptide ID NO. 566196
  misc_feature (1)..(292): NCBI GI: 85102444 Blast Desc: NCU03600 [Neurospora crassa OR74A] gi|18376387|emb|CAD21276.1| [Neurospora crassa] gi|28922871|gb|EAA32091.1| conserved [Neurospora crassa OR74A]
  misc_feature (5)..(292): NCBI GI: 145612275 Blast Desc: MGG_12316 [Magnaporthe grisea 70-15] gi|145019469|gb|EDK03697.1| MGG_12316 [Magnaporthe grisea 70-15]
  misc_feature (9)..(286): NCBI GI: 63087272 Blast Desc: esdC homologue [Sordaria macrospora]
  misc_feature (1)..(291): NCBI GI: 116179990 Blast Desc: CHGG_00623 [Chaetomium globosum CBS 148.51] gi|88184920|gb|EAQ92388.1| CHGG_00623 [Chaetomium globosum CBS 148.51]
  misc_feature (1)..(291): NCBI GI: 171691889 Blast Desc: protein product [Podospora anserina] gi|170945893|emb|CAP72694.1| protein product [Podospora anserina]
  misc_feature (1)..(289): NCBI GI: 46137233 Blast Desc: FG10132.1 [Gibberella zeae PH-1]
  misc_feature (1)..(291): NCBI GI: 156044252 Blast Desc: SS1G_10229 [Sclerotinia sclerotiorum 1980] gi|154694618|gb|EDN94356.1| SS1G_10229 [Sclerotinia sclerotiorum 1980]
  misc_feature (1)..(291): NCBI GI: 256731782 Blast Desc: NECHADRAFT_61239 [Nectria haematococca mpVI 77-13-4]
  misc_feature (1)..(291): NCBI GI: 154305442 Blast Desc: BC1G_08490 [Botryotinia fuckeliana B05.10] gi|150853277|gb|EDN28469.1| BC1G_08490 [Botryotinia fuckeliana B05.10]
  misc_feature (1)..(191): NCBI GI: 261351852 Blast Desc: GTP-binding protein EsdC [Verticillium albo-atrum VaMs.102]
MATIQLSFSLRVSSGVKSVHLLGSWDNYVGQIPLSKDKSSSKSGSWKGTFRFQGNLEAGQRYWYYYIIDGYHVSHNPSEASTVEPTTGRELNILDVPKDKSSKSSKSSHSSSKSSSRHHSSSSSSKDKHRSSKRDSLRVDIPKGRPLSTSQIVAPKPMSPHATRHILDADYCDDDTIEELTARFGSAGFEEEEYITDFSNSPVSSSGSSLSYRSDSSSPSSSMSGYSTPASDCSNCTCERYGITRKGDRVKIDCGGARCGYSDSSSCESSGDEYEEEYVSHSSRRHGIVVRS

SEQ ID NO: 18475 - DNA, 1881 bp, Muscodor strobelii
  misc_feature: SGI cDNA ID NO. 566197
  misc_feature: Reduced expression when VOC is produced
  misc_feature: Encodes the peptide sequence at SEQ ID NO 18476
atgacgtcttccgtgttcttcaagttcaagtcgcagaaggagccgacacgcgtggagtttgacggtaccggcatctccgtttttgagttgaagcgagatatcatccttaaaagcggccttggtgacggatccgacttcgacctcctcatctacaccgatgatggcagtgaagagtatgatgatgataccaccattattcctcgggccacgactgtagtcgctcggcgccaacccccccagaagccgggagctggccgtgctgcaagatatgtatcaggcaagatgccttccaccgccaaaaactccggtcgtagagaagcccagtcaaaagcacccaagccggttgcacccagcgtcacccaaacaggtgcccccatgaccgagcaggaaaagttgatggccatgttccagtccgaatcggatcaatggacaacacagcaagaggagatgtctcacaaaaccgctgtatacaagccaggcgcgaagaagcctgcgaatgttcccgaccacgaacccccaaatggatacatctgctatcgctgcggtcagaaaggccactggatccagttgtgcccaaccaacgacgaccccgattttgataaccgacctcgggtgaagcgtactacaggcatccctcgctcgtttctcaagacggtagacaaatcagctctacagcaaacaaacgctgatggcgaggaagtgaagcctcctcccggtctcatggtcaacgcagatggagattatgtgattcatgaacctgacaaggcaagttgggagcaatttcaggctaagactaagtcatcggcagctgcacaaaaggctgcttctgctgaagacaaggatttggaggagaaaggactgttgtgttccattgacaacaggatgttcatagacccaatgaagacaccgtgttgtgagaagacgtattgcaatgagtgcatcactaacgctctcattgaaagcgacttcgtctgccctggttgccagacagatggtgtgctcattgatgacctgcagcccgatgatgaggcttctaccaaaattaaagactttcttaaggaaaaggaagctgctaaagtaaaagaacgttctcaaagtccccctacagtcaaggcccaatcacccgccccttcggaggtcaaggaagagaagaaggagacaccacaacctgaatcggtagagagcaaatcgcctaccactgctcctgcaaaagccaaatctccaacccctccgtctgctgaagttaagcctgcctcgcccactgtaccaaagacttcaactacaccaccctccacaaccgggaccagtgagacactcaaagtagaagagcctaccaaggacaccacttccaagaaacgacccgccgaggagttgatggagaatcccaaaatacccaaagggccaaaggccatgcaacgtgcccaagaaacccaggacatgcagaacatgatgcctggaatgaatggaatgaacggcatgagcggcatgatgcccaacatgatgtttcctatgaacttcaacggcatgaatggcttcaacggaaacatgaatccaatgatgggcatgatgggcatgaaccccatgatgaaccccatgatgcccatgaacggcatgaatggattcaacccgaacatgatgaacaacatgtttggcggcaacttcggcggtatgaacggcggcggaatgggcaacatgaacggtatgaacatgaatatgaatggaggcacgaacggaatgaacggcaataacaatcatctcccaaatcgcaacttcaatgctcagagtaacgaggatgacgcatatttccgaaaacccgttaacccaggccgacaccagaatcgccagcgtcgtgtccggccgtcagactaccgcgagctataa

SEQ ID NO: 18476 - protein, 626 aa, Muscodor strobelii
  misc_feature: SGI Peptide ID NO. 566197
  misc_feature (5)..(78): Pfam Id: PF08783 Pfam Desc: DWNN domain
  misc_feature (1)..(626): NCBI GI: 261351880 Blast Desc: MPE1 [Verticillium albo-atrum VaMs.102]
  misc_feature (1)..(626): NCBI GI: 156056244 Blast Desc: SS1G_05474 [Sclerotinia sclerotiorum 1980] gi|154703258|gb|EDO02997.1| SS1G_05474 [Sclerotinia sclerotiorum 1980]
  misc_feature (1)..(470): NCBI GI: 46136753 Blast Desc: FG09892.1 [Gibberella zeae PH-1]
  misc_feature (1)..(626): NCBI GI: 154291216 Blast Desc: BC1G_15234 [Botryotinia fuckeliana B05.10] gi|150847047|gb|EDN22240.1| BC1G_15234 [Botryotinia fuckeliana B05.10]
  misc_feature (1)..(470): NCBI GI: 256732073 Blast Desc: NECHADRAFT_104433 [Nectria haematococca mpVI 77-13-4]
  misc_feature (1)..(496): NCBI GI: 116198073 Blast Desc: CHGG_07192 [Chaetomium globosum CBS 148.51] gi|88178471|gb|EAQ85939.1| CHGG_07192 [Chaetomium globosum CBS 148.51]
  misc_feature (1)..(466): NCBI GI: 39961502 Blast Desc: MGG_09536 [Magnaporthe grisea 70-15] gi|145011039|gb|EDJ95695.1| MGG_09536 [Magnaporthe grisea 70-15]
  misc_feature (1)..(507): NCBI GI: 171693927 Blast Desc: protein product [Podospora anserina] gi|170946912|emb|CAP73716.1| protein product [Podospora anserina]
  misc_feature (1)..(469): NCBI GI: 85100084 Blast Desc: NCU06718 [Neurospora crassa OR74A] gi|28922429|gb|EAA31662.1| conserved [Neurospora crassa OR74A] gi|28950275|emb|CAD71243.1| conserved [Neurospora crassa]
  misc_feature (1)..(626): NCBI GI: 115398403 Blast Desc: conserved [Aspergillus terreus NIH2624] gi|114192984|gb|EAU34684.1| conserved [Aspergillus terreus NIH2624]
  misc_feature: Useful for introducing or modulating the production of volatile compounds
MTSSVFFKFKSQKEPTRVEFDGTGISVFELKRDIILKSGLGDGSDFDLLIYTDDGSEEYDDDTTIIPRATTVVARRQPPQKPGAGRAARYVSGKMPSTAKNSGRREAQSKAPKPVAPSVTQTGAPMTEQEKLMAMFQSESDQWTTQQEEMSHKTAVYKPGAKKPANVPDHEPPNGYICYRCGQKGHWIQLCPTNDDPDFDNRPRVKRTTGIPRSFLKTVDKSALQQTNADGEEVKPPPGLMVNADGDYVIHEPDKASWEQFQAKTKSSAAAQKAASAEDKDLEEKGLLCSIDNRMFIDPMKTPCCEKTYCNECITNALIESDFVCPGCQTDGVLIDDLQPDDEASTKIKDFLKEKEAAKVKERSQSPPTVKAQSPAPSEVKEEKKETPQPESVESKSPTTAPAKAKSPTPPSAEVKPASPTVPKTSTTPPSTTGTSETLKVEEPTKDTTSKKRPAEELMENPKIPKGPKAMQRAQETQDMQNMMPGMNGMNGMSGMMPNMMFPMNFNGMNGFNGNMNPMMGMMGMNPMMNPMMPMNGMNGFNPNMMNNMFGGNFGGMNGGGMGNMNGMNMNMNGGTNGMNGNNNHLPNRNFNAQSNEDDAYFRKPVNPGRHQNRQRRVRPSDYREL

SEQ ID NO: 18477 - DNA, 7420 bp, Muscodor strobelii
  misc_feature: SGI EST ID NO. CUFF.43677.0
  misc_feature: Variant of the nucleotide sequence at SEQ ID NO 18475
cgggaagacggcagtaaccctgacgagtcaagccaaaagtgggttaaacactaccgttaaagtttggaccgcgcaaggatcaaggaggctgagggatgtcataggaatctgaccaacagaaaagtctgggaaacaaaaaataccgtgaaggttattagaatggacgtgtacttggctctacttaagctatacattccatgtcgcatcacgccaatggcgcatgccggcattttccagcgttgtctgtgtctgtgtctgtcgtctcgaggactcatctgaaaacctcatcggcgtcatcttcaaggacatcccttccgcgatttacattcatctaatatttgcatcaatacactcttttccactcatcgttaccgtctgaatcatctgaaagaacgtcggatatttgcaatttctctcgtcgccgtgcttagcatggctcgattcctcaagcacaatggcagttcgtcagatccagagaaatctggctccgtgcctgcgaatgccgatacgaagggtttagatcacgcacgcgtaaagaaattgacaagcacaagacggcatgcaattattgtagcgagtatcttctacttgctggccgtcgtattcttcatactggttgaggtcggcaataccagcggtggcaaggtgcttggagatatatacttttacaagcttgatctggcggatatttttgcgagcgccagcacttcaaccttgaccctgcagaatagcatagctcgcacgttgggacttcatgatttctacaaggtcggactttggaatttctgcgaggggtatctcactgacggtataactcactgttcaaagacaagtccgaagttctggttcgatcctgttgcgattttgcttagcgagcttttcgctggtgcctcgatagctctaccgaacgaagtgaacgagattctctactatctgcggattgtctctcacattatgttcggattcttcctcacagccttactattggactttatcctcatctttctatcgccaatcgtgctgttcacccgttggtggagcctgccaattggaatcctctcgttccttgctgcagcactggccatcatcgcggcaggtctgggaacagccgtttcttatgtgttcaagtatgccttgagctctcaacctgaccttggagtaacggcctccgtcggtgtcaaaatgctggcatttgaatggattgcagctgggttcacgctgctagcttttctcatccacgccagtttgagctgctgctgcacctcccggcgagacgtccgcactggtcgtaagggcggcaaaaacctacaatatgcagatgaatctacctagaaagtgaacattaggtaccgagcaatatctttatagatgcggtcataaccggtgagactgcgctaagatgaacataatggcaacatgattaagacaacgtatttaccaggggcatcatacttcacggcgttggcaggcatagaatcagggactaggagggcagcattgagaatcgactcacagtagaacttgcaaacattaggttgttaatatggtataagaaggcacgatgtgaaagaaacgaatgttatgacttaatgcacggattactacctggcaagctactgacaggagacaacgacgacctaacaattgaacaactgaacaatcagaattcaattgatcatctaccgttaatgatcccataagttatttgatcatctcacacttgatcacctggatgggccatggtaatcatcacattcaatgataacagagctgataatcactgttggacgactctggctgccaggcagtttcagtagtggcaggaggcaccagacacaaacagctgtcagcttagtctcacaaagctctgacagctgcaatggatggcataaaggtcatctgaccaatctgttttagccttagtgtgaccagattcgccaggtctgactaattcgcgctacccatcagcctatctccggcaggcgcctgtgcttttccccttcttcctgcttctcctcttccacactctcacttcaccacctcatctcccgacatcatctttccacacacatccctcatctcccatccatccatccatttgtatactgaccgcagccacttgcacggcttcatcaccaagtacaggtgttcttcctttcgacctcttcacccatcgaccggtcgactgtttgtggtgcagcgacggctgcgcgcccactccggcccagtgtgcatttggtctccctttgccacgtccagaaggcgcacgcgaccacgcgctgaactgtccatcgcacacccttttgtgcattgtgtaaaccaaagccagcggattggtgggaggtctcgggctaactagtagacgagattcttgcgttgctgtggtgtcgcgcggtgtggacttgctgggaaataggcatctgttgtttcctcaatcaatccacttgatcgtggctttgtacatctctcctttttcttctaccaagagtcttgagtctcattgttcgtgcgagtacaatcaagaaattgatatccatccctccatgttgccagctctataagaaacaattatcgagcaacttgcagaacttgcactcgccagtcacgcgcctcaaatactactgcaatacagacaagactgatcaacttgcgcgcgaaacatctgatcccgtacaagtgcaaatctaacaatccagcctctctctcccactgcatctctagacataccaggcattctgtgatagcaatccacctggccataccacgcccccttccctctcccatcccctgcatctcacacccacactaagcatacttcaccatgacgtcttccgtgttcttcaagttcaagtcgcagaaggagccgacacgcgtggagtttgacggtaccggcatctccgtttttgagttgaagcgagatatcatccttaaaagcggccttggtgacggatccgacttcgacctcctcatctacaccgatgatggcagtgaagagtatgatgatgataccaccattattcctcgggccacgactgtagtcgctcggcgccaacccccccagaagccgggagctggccgtgctgcaagatatgtatcaggcaagatgccttccaccgccaaaaactccggtcgtagagaagcccagtcaaaagcacccaagccggttgcacccagcgtcacccaaacaggtgcccccatgaccgagcaggaaaagttgatggccatgttccagtccgaatcggatcaatggacaacacagcaagaggagatgtctcacaaaaccgctgtatacaagccaggcgcgaagaagcctgcgaatgttcccgaccacgaacccccaaatggatacatctgctatcgctgcggtcagaaaggccactggatccagttgtgcccaaccaacgacgaccccgattttgataaccgacctcgggtgaagcgtactacaggcatccctcgctcgtttctcaagacggtagacaaatcagctctacagcaaacaaacgctgatggcgaggaagtgaagcctcctcccggtctcatggtcaacgcagatggagattatgtgattcatgaacctgacaaggcaagttgggagcaatttcaggctaagactaagtcatcggcagctgcacaaaaggctgcttctgctgaagacaaggatttggaggagaaaggactgttgtgttccattgacaacaggatgttcatagacccaatgaagacaccgtgttgtgagaagacgtattgcaatgagtgcatcactaacgctctcattgaaagcgacttcgtctgccctggttgccagacagatggtgtgctcattgatgacctgcagcccgatgatgaggcttctaccaaaattaaagactttcttaaggaaaaggaagctgctaaagtaaaagaacgttctcaaagtccccctacagtcaaggcccaatcacccgccccttcggaggtcaaggaagagaagaaggagacaccacaacctgaatcggtagagagcaaatcgcctaccactgctcctgcaaaagccaaatctccaacccctccgtctgctgaagttaagcctgcctcgcccactgtaccaaagacttcaactacaccaccctccacaaccgggaccagtgagacactcaaagtagaagagcctaccaaggacaccacttccaagaaacgacccgccgaggagttgatggagaatcccaaaatacccaaagggccaaaggccatgcaacgtgcccaagaaacccaggacatgcagaacatgatgcctggaatgaatggaatgaacggcatgagcggcatgatgcccaacatgatgtttcctatgaacttcaacggcatgaatggcttcaacggaaacatgaatccaatgatgggcatgatgggcatgaaccccatgatgaaccccatgatgcccatgaacggcatgaatggattcaacccgaacatgatgaacaacatgtttggcggcaacttcggcggtatgaacggcggcggaatgggcaacatgaacggtatgaacatgaatatgaatggaggcacgaacggaatgaacggcaataacaatcatctcccaaatcgcaacttcaatgctcagagtaacgaggatgacgcatatttccgaaaacccgttaacccaggccgacaccagaatcgccagcgtcgtgtccggccgtcagactaccgcgagctataaacaagctgccggcaacagtgtctttggtggccggcattcttgactgcgagcgatccttctctggacatgcattacttacttgtataatactcatctacgcatcattcggcgttaagggactacttacaaaactgaattacgaaacgatcaacagattacgatgatggggcgggttccacctggcgtctggcgaatatgtggcatgatcgagtcgatgagtcaagggactcaggggacctcgacgatcaaagcgcattggacttttgttttgtgtttactgcattttcgaggaatggtcgggatatagatccggactggaggaaggcccaatctcggggcgaagaacaggactcgatgatatacgcactgttgtgcaagcaaaaggctagtttgtttcatcgagccatgaatgaaatataaatcaaatgaatgttttgcccaatttcactcttgtcgtacttgtgaaagtgagattgtgacatgccatgtactgcaatgcaacagggtgcagccacacgtgttggcctctattaatgctactgtaaatgagtaaggatgtacactcgatttgactatttactacgttttgtttcctcgcaagacctcttgaactactaaaagcattcatttgacttgtagatattcgtttgttcggccaattagatccatacttaaatccttaggcttgaagttctatcagctctcacaaatcacaattttgtggtcacatgacatggatgaaccagtgtaatgggttggaagatatagattcaagcgtcatctatatatctaaatatccgatggcaaaccacgatagcagtagtttcctacttcttcccaaatccatcgtagctccatcgaataataacaatagcttagcaagtaatttaacccaaaaaatgtacttccaacttgtctttctcaagctactgagtggcagggctgtttcagtttccgaaacaggtccacggtttgacagtttaaaattaaacgagcgcacgacggcgccacccccaacgctctctgccttgccaggcagggctgagtaagtggtggcccgtcgtgggggggccgtagcatcggcccagatgggctgaacgcgctggtacgcatcacggatagactcgctaagaaagccgaaaccacaccaagaacctgcttgatgggtcctggctcctcgtttgacaatttcgagttcctatcgtgccgcgtcgcgcgaatcgcaatacaacggggcgggtcctcaagagaagaatcccgaaaaatgagcgaacggccaaaaaagcttgggatatcgcggccttcttccggttgctggtggcaagtggtgggtcagggacaacccaaaggtgaaaattaggcaagtcaattaacatcctcttcatcgtcttcgtcatctcctcagcttgggcatgtcgctcacgagcggacgacgatgccgtggcggcggctggagtgggagacgtactcctcttcgtactcgtcgccggagctttcacagctgctggagtcgctgtagccacatcgcgcaccgccgcagtcgatcttgacgcggtcgcccttgcgggtgataccgtagcgctcacaggtgcagttgctgcagtctgaggcgggcgtgctgtagccggacatggaagatgacggagaagagctgtctgagcggtaagacaggctggagccagaggaagagaccggggagttgctgaagtcggtgatgtattcctcctcctcgaaaccggcgctgccaaagcgggcggtaagttcctcgatagtgtcgtcatcgcagtagtcagcatccaggatgtggcgggtagcgtggggagacatgggcttgggagcaacgatctgagaggttgagagtgggcggcccttggggatgtctacgcgaagagagtcacgcttggaagatcggtgcttatccttggatgaagaagaggagctgtggtgacgcgaggagctcttgctcgagctgtgagaagacttggaagacttgctcgacttgtccttggggacgtcgagaatgttgagttcacggccagtagtgggctcgacggtcgaagcctcactggggttgtgggagacgtggtagccatcgatgatgtagtagtaccagtatcgctggccggcctcgaggttgccctgaaagcggaaagtacccttccatgatccggacttggaggagctcttgtccttggaaagggggatctgaccaacgtagttgtcccaggagccaagcaaatgaacggacttgacgccggaagaaacgcggagagagaacgaaagctggatagtcgccattttaattatttgaagttgatattgcgaatattgtcgtttttctgtaaatggaaaagcttcgtttgagcaaggaaaactagtttctgatttctattagagggtatatcgtaagtgattcgggggcagttgaccggcaactgtatattgtagattttgattttattggtatagtgaatattagtttgataattagatgcaagaaagagcacagctcgatcaggcgtaaagaaaaacaggggaagaggaagaaaagggaaactagttttgtgtaattgaatgcttgctgaagaaagaaagaatccaaagggaacgagaaggaggatggccggctctgttatatggttgggggcccaacgggacgacccatacggccaataccagagacctcacacgaggcggcgtcgccagcgaggtgccggc

SEQ ID NO: 18478 - DNA, 900 bp, Muscodor strobelii
  misc_feature: SGI cDNA ID NO. 566198
  misc_feature: Reduced expression when VOC is produced
  misc_feature: Encodes the peptide sequence at SEQ ID NO 18479
atggctcgattcctcaagcacaatggcagttcgtcagatccagagaaatctggctccgtgcctgcgaatgccgatacgaagggtttagatcacgcacgcgtaaagaaattgacaagcacaagacggcatgcaattattgtagcgagtatcttctacttgctggccgtcgtattcttcatactggttgaggtcggcaataccagcggtggcaaggtgcttggagatatatacttttacaagcttgatctggcggatatttttgcgagcgccagcacttcaaccttgaccctgcagaatagcatagctcgcacgttgggacttcatgatttctacaaggtcggactttggaatttctgcgaggggtatctcactgacggtataactcactgttcaaagacaagtccgaagttctggttcgatcctgttgcgattttgcttagcgagcttttcgctggtgcctcgatagctctaccgaacgaagtgaacgagattctctactatctgcggattgtctctcacattatgttcggattcttcctcacagccttactattggactttatcctcatctttctatcgccaatcgtgctgttcacccgttggtggagcctgccaattggaatcctctcgttccttgctgcagcactggccatcatcgcggcaggtctgggaacagccgtttcttatgtgttcaagtatgccttgagctctcaacctgaccttggagtaacggcctccgtcggtgtcaaaatgctggcatttgaatggattgcagctgggttcacgctgctagcttttctcatccacgccagtttgagctgctgctgcacctcccggcgagacgtccgcactggtcgtaagggcggcaaaaacctacaatatgcagatgaatctacctag

SEQ ID NO: 18479 - protein, 299 aa, Muscodor strobelii
  misc_feature: SGI Peptide ID NO. 566198
  misc_feature (3)..(287): NCBI GI: 171691877 Blast Desc: protein product [Podospora anserina] gi|170945887|emb|CAP72688.1| protein product [Podospora anserina]
  misc_feature (33)..(287): NCBI GI: 164426759 Blast Desc: NCU03601 [Neurospora crassa OR74A] gi|18376388|emb|CAD21277.1| conserved [Neurospora crassa] gi|157071466|gb|EAA32092.2| conserved [Neurospora crassa OR74A]
  misc_feature (3)..(294): NCBI GI: 169604712 Blast Desc: SNOG_05372 [Phaeosphaeria nodorum SN15] gi|111066643|gb|EAT87763.1| SNOG_05372 [Phaeosphaeria nodorum SN15]
  misc_feature (39)..(288): NCBI GI: 261351758 Blast Desc: conserved [Verticillium albo-atrum VaMs.102]
  misc_feature (10)..(296): NCBI GI: 154316727 Blast Desc: BC1G_03781 [Botryotinia fuckeliana B05.10] gi|150845393|gb|EDN20586.1| BC1G_03781 [Botryotinia fuckeliana B05.10]
  misc_feature (21)..(296): NCBI GI: 156043541 Blast Desc: SS1G_10774 [Sclerotinia sclerotiorum 1980] gi|154695161|gb|EDN94899.1| SS1G_10774 [Sclerotinia sclerotiorum 1980]
  misc_feature (41)..(287): NCBI GI: 46137309 Blast Desc: FG10170.1 [Gibberella zeae PH-1]
  misc_feature (37)..(293): NCBI GI: 256731764 Blast Desc: [Nectria haematococca mpVI 77-13-4]
  misc_feature (10)..(294): NCBI GI: 189196702 Blast Desc: integral membrane protein [Pyrenophora tritici-repentis Pt-1C-BFP] gi|187980568|gb|EDU47194.1| integral membrane protein [Pyrenophora tritici-repentis Pt-1C-BFP]
  misc_feature (15)..(299): NCBI GI: 67521748 Blast Desc: AN1331.2 [Aspergillus nidulans FGSC A4] gi|40746358|gb|EAA65514.1| AN1331.2 [Aspergillus nidulans FGSC A4] gi|259488337|tpe|CBF87703.1| TPA: conserved [Aspergillus FGSC
  misc_feature: Useful for introducing or modulating the production of volatile compounds
MARFLKHNGSSSDPEKSGSVPANADTKGLDHARVKKLTSTRRHAIIVASIFYLLAVVFFILVEVGNTSGGKVLGDIYFYKLDLADIFASASTSTLTLQNSIARTLGLHDFYKVGLWNFCEGYLTDGITHCSKTSPKFWFDPVAILLSELFAGASIALPNEVNEILYYLRIVSHIMFGFFLTALLLDFILIFLSPIVLFTRWWSLPIGILSFLAAALAIIAAGLGTAVSYVFKYALSSQPDLGVTASVGVKMLAFEWIAAGFTLLAFLIHASLSCCCTSRRDVRTGRKGGKNLQYADEST

SEQ ID NO: 18480 - DNA, 7420 bp, Muscodor strobelii; identical to SEQ ID NO: 18477
  misc_feature: SGI EST ID NO. CUFF.43677.0
  misc_feature: Variant of the nucleotide sequence at SEQ ID NO 18478

SEQ ID NO: 18481 - DNA, 1158 bp, Muscodor strobelii
  misc_feature: SGI cDNA ID NO. 566199
  misc_feature: Reduced expression when VOC is produced
  misc_feature: Encodes the peptide sequence at SEQ ID NO 18482
atgtcggaaagcacggcaacaacaaccgataatgctacagattcgcaagtggcacagacgacgagtaaaacggtcacgtacctaactggttcgggagccgcaacgagtacgtttggcaacttgacaagaacagcttcatcgacttcaccgtcgatatcggctgcggctacgagcggattagcttgtaataattatgcggagttctgtgatcggaaatacagcaacatcaccgaaatcgcctgtcacaattcacctttcatcacagccagcaacctagccgcaaatcaacaatttgatgtgacatatcaattgaatgatggtgtgcgattcttacaagctcagatacagtggccaactaatgatacggtaccacatttctgtcatacgagctgcgatatactagatgctggtcctataacagactggctcgggcaggttaaggactgggtcgctactcatcccttcgatgtcgttaccatccttttgggtaacggtaactactcgctgccctctgcatacgttccgtacatcgagcagagtggtattacccgctacgtctataccccgccgctagctcccatgaatgtcacaaactggccgactttaagtgaaatgatcctaagtggcaagagagtagtcatgttcatggactacatggccaatcagacgcaatacccgtggttgctcgatgaattctcacaaatatgggagactgccttcgatccgacgaaccagacctttccctgcgatgttcagcgacctcccgatttggatcgcaatggggctaacgcccgcatgagcttgatcaaccataacctcaatatcgaattaaatgtttacgggacacagttgttagtgccagcacggacagaactcaatgtgaccaacaatgtcacaggcttcggtagtctgggcacgacagccgataattgttctgcgaaatggggccgagctccaaatttcctcaacgtggactattacaatatgggagcttctgcaggctctgtgttcgaggttgcagcaagactcaataatgttacttacaacagacagtgctgtggtcccaatgtcagcggtgctacgaaggaactctcgagcgcgtgtacgaaattattatatgtgcctgctgttgttgctattttctggtcgttgatctag

SEQ ID NO: 18482 - protein, 385 aa, Muscodor strobelii
  misc_feature: SGI Peptide ID NO. 566199
  misc_feature (4)..(383): NCBI GI: 85102452 Blast Desc: NCU03602 [Neurospora crassa OR74A] gi|18376389|emb|CAD21278.1| conserved [Neurospora crassa] gi|28922873|gb|EAA32093.1| [Neurospora crassa OR74A]
  misc_feature (61)..(354): NCBI GI: 256732153 Blast Desc: NECHADRAFT_104485 [Nectria haematococca mpVI 77-13-4]
  misc_feature (20)..(359): NCBI GI: 171691875 Blast Desc: protein product [Podospora anserina] gi|170945886|emb|CAP72687.1| protein product [Podospora anserina]
  misc_feature (13)..(362): NCBI GI: 116179986 Blast Desc: CHGG_00621 [Chaetomium globosum CBS 148.51] gi|88184918|gb|EAQ92386.1| CHGG_00621 [Chaetomium globosum CBS 148.51]
  misc_feature (53)..(379): NCBI GI: 46137307 Blast Desc: FG10169.1 [Gibberella zeae PH-1]
  misc_feature (62)..(381): NCBI GI: 156043539 Blast Desc: SS1G_10773 [Sclerotinia sclerotiorum 1980] gi|154695160|gb|EDN94898.1| SS1G_10773 [Sclerotinia sclerotiorum 1980]
  misc_feature (26)..(362): NCBI GI: 261351757 Blast Desc: conserved [Verticillium albo-atrum VaMs.102]
  misc_feature (3)..(385): NCBI GI: 119184662 Blast Desc: CIMG_07107 [Coccidioides immitis RS]
  misc_feature (22)..(379): NCBI GI: 258568716 Blast Desc: conserved [Uncinocarpus reesii 1704] gi|237906548|gb|EEP80949.1| conserved [Uncinocarpus reesii 1704]
  misc_feature (3)..(385): NCBI GI: 240109939 Blast Desc: , conserved [Coccidioides posadasii C735 delta SOWgp]
  misc_feature: Useful for introducing or modulating the production of volatile compounds
MSESTATTTDNATDSQVAQTTSKTVTYLTGSGAATSTFGNLTRTASSTSPSISAAATSGLACNNYAEFCDRKYSNITEIACHNSPFITASNLAANQQFDVTYQLNDGVRFLQAQIQWPTNDTVPHFCHTSCDILDAGPITDWLGQVKDWVATHPFDVVTILLGNGNYSLPSAYVPYIEQSGITRYVYTPPLAPMNVTNWPTLSEMILSGKRVVMFMDYMANQTQYPWLLDEFSQIWETAFDPTNQTFPCDVQRPPDLDRNGANARMSLINHNLNIELNVYGTQLLVPARTELNVTNNVTGFGSLGTTADNCSAKWGRAPNFLNVDYYNMGASAGSVFEVAARLNNVTYNRQCCGPNVSGATKELSSACTKLLYVPAVVAIFWSLI

SEQ ID NO: 18483 - DNA, 1778 bp, Muscodor strobelii
  misc_feature: SGI EST ID NO. CUFF.43392.0
  misc_feature: Variant of the nucleotide sequence at SEQ ID NO 18481
agaaattcgagaagtttcaagtctcgctcataccttacagaaagttgacttcctcttcacctaagagccatgaatacaaacctttttcagcgagtgtgagcggttctgttctcacggactgatcgtaaagcatattgtatcacaatccattgtcgctcattccaatataatccacctgcatttattcagctctcccttgatggctctgcgtcgcggagcgtggtggcttctcgccgccacgagcatcgcggggacttgtgctcaaagcactgcgaccagtagtaatgaggcgacatcaacagtcgacacttcgtcggtgacagcaactgaagcagctacgccaactgggtcatatcagtccttttctttccaagtgtcacagaatacctccagttcgttgggaacgatgtcggaaagcacggcaacaacaaccgataatgctacagattcgcaagtggcacagacgacgagtaaaacggtcacgtacctaactggttcgggagccgcaacgagtacgtttggcaacttgacaagaacagcttcatcgacttcaccgtcgatatcggctgcggctacgagcggattagcttgtaataattatgcggagttctgtgatcggaaatacagcaacatcaccgaaatcgcctgtcacaattcacctttcatcacagccagcaacctagccgcaaatcaacaatttgatgtgacatatcaattgaatgatggtgtgcgattcttacaagctcagatacagtggccaactaatgatacggtaccacatttctgtcatacgagctgcgatatactagatgctggtcctataacagactggctcgggcaggttaaggactgggtcgctactcatcccttcgatgtcgttaccatccttttgggtaacggtaactactcgctgccctctgcatacgttccgtacatcgagcagagtggtattacccgctacgtctataccccgccgctagctcccatgaatgtcacaaactggccgactttaagtgaaatgatcctaagtggcaagagagtagtcatgttcatggactacatggccaatcagacgcaatacccgtggttgctcgatgaattctcacaaatatgggagactgccttcgatccgacgaaccagacctttccctgcgatgttcagcgacctcccgatttggatcgcaatggggctaacgcccgcatgagcttgatcaaccataacctcaatatcgaattaaatgtttacgggacacagttgttagtgccagcacggacagaactcaatgtgaccaacaatgtcacaggcttcggtagtctgggcacgacagccgataattgttctgcgaaatggggccgagctccaaatttcctcaacgtggactattacaatatgggagcttctgcaggctctgtgttcgaggttgcagcaagactcaataatgttacttacaacagacagtgctgtggtcccaatgtcagcggtgctacgaaggaactctcgagcgcgtgtacgaaattattatatgtgcctgctgttgttgctattttctggtcgttgatctagagaatcctgtagagacatggtgtctggcgatgtggactgttggcccgacatgcctccatggaaaataatgatatggttcattcatacgagcatacgtaaataaaacaatcatatatactaaattaattaattcgaataatcagtcgcgggtgttagatcctcgcaattgatgtctgttgtacaacttcgttttaagttcgtaaagtaagcgata

SEQ ID NO: 18484 - DNA, 1323 bp, Muscodor strobelii
  misc_feature: SGI cDNA ID NO. 566200
  misc_feature: Encodes the peptide sequence at SEQ ID NO 18485
atggcagaagtaggatcctggaatatagtaccggagcaaaaatccgacgaatcattcatagaggtcaaagcagccgaagcaaaagaccccagagacacagtaacgcgaggttcaagtttcatcaagcaaaaaacacgtctcacaccacctcctcccgcaccgccgccagtgcagggcaccttcggcatactcgctggtgtagcagtcgcagccttcaagtttgcagttggaccgattgcaccggcgaggtacaccgatgagaaagaaaggagaaaacgacaggcggctgaggccgaagcgcagagggttcagagagcgtttgataggtcgagagcttttgagtttgaaaatatgatcgcgcatggagttacgggtgttagttgcaagattaggattaaggcaaagagtgggaagggttcgaggtttgtggttaagagggcgtttgggagtgggcagcagtatattagggctgagaatcggatcttgagcagacttcgaggtgcagcgcatatcttgcaactatttcacattgattcaacactagacctccctttgagccagacagacgccaatacgattataaccgagtatgtcgagaatggcagtttacatgagctcttcttgagggcacctgaaggacgagcgctgccgaatcgattacttttgaagttatttcagtgctttgtcaagttttgcatagctatggcgtacccgccggaggcaaagcctgggaatgttgctgtgtcggaagagataccgacagatcccgtcagaaggcaaatgaaatatcagctcagacataacgatatgcatatgaataatgtactcgtcggcgacctcgaaataggaaacggatatgacatggagcatggtctagtcccaacattgaaactcatcgatttcgaccatgcgcgtataattccagatcctcaaggcgacgacctcggagttcgctggaacatcttcgacatcggcgaaaacatgcacgccttgatagccctcaatggcagactatacccagcgcaggatgtgcagatatatgggcccccacggcgttttactgtacggacacaggctgcggatcttcaaccggctagatttccagacacggatcccgacatattgtaccttgtcatgtggtgcatggcggaggatccgttggacagaccgtcacttgaagaattagacgcagaagttaagcgtctgatccgggaacgaacgtatgggtactatgtggggatcggtctgccgaatgctgaagacgaggaggatgatgagattatggtgcttctggagcagttgattttcgagccgccgttttaa

SEQ ID NO: 18485 - protein, 440 aa, Muscodor strobelii
  misc_feature: SGI Peptide ID NO. 566200
  misc_feature (115)..(422): NCBI GI: 85109420 Blast Desc: NCU05722 [Neurospora crassa OR74A] gi|28924551|gb|EAA33672.1| [Neurospora crassa OR74A]
  misc_feature (113)..(399): NCBI GI: 256730581 Blast Desc: NECHADRAFT_74247 [Nectria haematococca mpVI 77-13-4]
  misc_feature (93)..(309): NCBI GI: 116201425 Blast Desc: [Chaetomium globosum CBS 148.51] gi|88177115|gb|EAQ84583.1| [Chaetomium globosum CBS 148.51]
  misc_feature (112)..(307): NCBI GI: 145601223 Blast Desc: [Magnaporthe grisea 70-15] gi|145009254|gb|EDJ93965.1| [Magnaporthe grisea 70-15]
  misc_feature (151)..(400): NCBI GI: 85081014 Blast Desc: NCU05146 [Neurospora crassa OR74A] gi|28881434|emb|CAD70551.1| [Neurospora crassa] gi|28917716|gb|EAA27408.1| [Neurospora crassa OR74A]
  misc_feature (18)..(301): NCBI GI: 116201421 Blast Desc: [Chaetomium globosum CBS 148.51] gi|88177113|gb|EAQ84581.1| [Chaetomium globosum CBS 148.51]
  misc_feature (185)..(301): NCBI GI: 171695774 Blast Desc: protein product [Podospora anserina] gi|170948129|emb|CAP60293.1| protein product [Podospora anserina]
MAEVGSWNIVPEQKSDESFIEVKAAEAKDPRDTVTRGSSFIKQKTRLTPPPPAPPPVQGTFGILAGVAVAAFKFAVGPIAPARYTDEKERRKRQAAEAEAQRVQRAFDRSRAFEFENMIAHGVTGVSCKIRIKAKSGKGSRFVVKRAFGSGQQYIRAENRILSRLRGAAHILQLFHIDSTLDLPLSQTDANTIITEYVENGSLHELFLRAPEGRALPNRLLLKLFQCFVKFCIAMAYPPEAKPGNVAVSEEIPTDPVRRQMKYQLRHNDMHMNNVLVGDLEIGNGYDMEHGLVPTLKLIDFDHARIIPDPQGDDLGVRWNIFDIGENMHALIALNGRLYPAQDVQIYGPPRRFTVRTQAADLQPARFPDTDPDILYLVMWCMAEDPLDRPSLEELDAEVKRLIRERTYGYYVGIGLPNAEDEEDDEIMVLLEQLIFEPPF

SEQ ID NO: 18486 - DNA, 1393 bp, Muscodor strobelii
  misc_feature: SGI EST ID NO. CUFF.43411.1
  misc_feature: Variant of the nucleotide sequence at SEQ ID NO 18484
ctttgcgtgtagtactcgtcggcgacctcgaaataggaaacggatatgacatggagcatggtctagtcccaacattgaaactcatcgatttcgaccatgcgcgtataattccagatcctcaaggcgacgacctcggagttcgctggaacatcttcgacatcggcgaaaacatgcacgccttgatagccctcaatggcagactatacccagcgcaggatgtgcagatatatgggcccccacggcgttttactgtacggacacaggctgcggatcttcaaccggctagatttccagacacggatcccgacatattgtaccttgtcatgtggtgcatggcggaggatccgttggacagaccgtcacttgaagaattagacgcagaagttaagcgtctgatccgggaacgaacgtatgggtactatgtggggatcggtctgccgaatgctgaagacgaggaggatgatgagattatggtgcttctggagcagttgattttcgagccgccgttttaaaggtgttggaatgagtgtgcaggtactcataagaagggcgtttgttgtatataattggatgtcatccattcgaagttgtgtgtgtacttcaaatttgatggggtaatatcattattgctgattgaaaattgccagctgaagtgctggagagagtacagaattgaagagtctttacaaatatgcgaggcgaataaacgtatcttcgttacaaaattctcgactcgttcggactttgtcgattgcagtagtacctaactactccaagatacgaccagcccgatcctccgagcatcattattcataatcatacatcgtgattcctcataatcaaattttggactcatgcttcagacgaacatggcgaatgacattgtcacgtcggccttcatacgcgcaacctggaactttacacgtctctttctcagatggaatgtcgaactccacggcgtatgtggggtgtgttgaccaaagatgtctgtttaggtctcgatttgatgcaaattgctgtccgcaaagtttgcagacgtaatttttaggctgagcctgtctgtagaatattgaggttagaacttgattcgttttgtctattttctttgaatttcgagtgtgaatactttttccttttgggcttcaaatgattttccccggtcgccgaagggtgagttggtgtctgagccgcactaggcataaccgggtgagacgtaggggctagggtcgacggcagtggacaagaccccagttgcctgtaaccggggaggaagtagttaggctgacaagccgtggagaaaatgtagttgttggtagtgccgtgcccattggacgggttgtgctggagttgtccttcagggttcatgacagcttcgcccccactcatatctccg

SEQ ID NO: 18487 - DNA, 1059 bp, Muscodor strobelii
  misc_feature: SGI cDNA ID NO. 566201
  misc_feature: Elevated expression when VOC is produced
  misc_feature: Encodes the peptide sequence at SEQ ID NO 18488
atggcgtcttatacgaccgatactcacattcagattatcgactcccacatccatctgtatcctgaatctgagatccccacactcgcatggtgcacaccggataatgcactcgcaaaacagcactctgtagacgactatagagctgctgctgccaactcaccactcgccggcttcatattcatcgagacagatcgaaagaatgatctcgaatccggtgaagaaggatggaaatacccacttatggaagtttcatggctgaagcgcatcgtcactgcgcaacccaaaccaggtgaagggcatgacgagggcaaatgtgctagcttatgtaaagcctacattccctgggcaccgctaccgagtgggcccgaagtggtgaagaagtacatcgaccttgtgtttaaggaagcaggtgatagccgggataaggtaaaaggcttcagatatctactccaagacaaacctgccggaacaatgttgcaagacaacttcatcgagagcttgaaacttcttggtcgcatgaagatggtgttcgaagtgggtgttgatcatcatcggcgcggtagagctcagttagaggaacttgtcgacatgattgatcgggcacatgatggcgttcccgaggacgagaaagttgtgttcattatcaatcatatgtgtaagcctgactttggggtttatgacgctaaagatcctaagtatatcgcctggcactccaccatatacacgctcagcctatgcaagcaagtatacatgaagttctctggagggttctccgagatggatgagggactaagaggtagatcagtggactccattgtgagcgccatgggagaccacctgactgctctcttggtggcgttcaagcctgaccggttgatgttcggtagcgattggcctgtttgcaccgttggcatggaggtcggatcctgggacaagtggcacaagatcattcagcgcttccttgaccttagcagtgtctctgtatggggacagaagatgatctttggaggtacagcagcgattgcttatcgtctcgacccgctggaagacgaaaagtaa

SEQ ID NO: 18488 - protein, 352 aa, Muscodor strobelii
  misc_feature: SGI Peptide ID NO. 566201
  misc_feature (13)..(345): Pfam Id: PF04909 Pfam Desc: Amidohydrolase
  misc_feature (179)..(345): Pfam Id: PF04909 Pfam Desc: Amidohydrolase
  misc_feature (10)..(345): NCBI GI: 46137231 Blast Desc: FG10131.1 [Gibberella zeae PH-1]
  misc_feature (12)..(345): NCBI GI: 156065941 Blast Desc: SS1G_00981 [Sclerotinia sclerotiorum 1980] gi|154691840|gb|EDN91578.1| SS1G_00981 [Sclerotinia sclerotiorum 1980]
  misc_feature (3)..(345): NCBI GI: 154305546 Blast Desc: BC1G_08542 [Botryotinia fuckeliana B05.10] gi|150853329|gb|EDN28521.1| BC1G_08542 [Botryotinia fuckeliana B05.10]
  misc_feature (10)..(346): NCBI GI: 85102465 Blast Desc: NCU03605 [Neurospora crassa OR74A] gi|18376392|emb|CAD21281.1| conserved [Neurospora crassa] gi|28922876|gb|EAA32096.1| conserved [Neurospora crassa OR74A]
  misc_feature (6)..(346): NCBI GI: 39946172 Blast Desc: MGG_08206 [Magnaporthe grisea 70-15] gi|145019467|gb|EDK03695.1| MGG_08206 [Magnaporthe grisea 70-15]
  misc_feature (10)..(346): NCBI GI: 171691867 Blast Desc: protein product [Podospora anserina] gi|170945882|emb|CAP72683.1| protein product [Podospora anserina]
  misc_feature (12)..(350): NCBI GI: 261351853 Blast Desc: amidohydrolase family protein [Verticillium albo-atrum VaMs.102]
  misc_feature (12)..(346): NCBI GI: 116179978 Blast Desc: CHGG_00617 [Chaetomium globosum CBS 148.51] gi|88184914|gb|EAQ92382.1| CHGG_00617 [Chaetomium globosum CBS 148.51]
  misc_feature (12)..(343): NCBI GI: 67526565 Blast Desc: AN3740.2 [Aspergillus nidulans FGSC A4] gi|40740758|gb|EAA59948.1| AN3740.2 [Aspergillus nidulans FGSC A4] gi|259481714|tpe|CBF75493.1| TPA: conserved [Aspergillus FGSC
  misc_feature (10)..(346): NCBI GI: 238482093 Blast Desc: conserved [Aspergillus flavus NRRL3357] gi|220700335|gb|EED56673.1| conserved [Aspergillus flavus NRRL3357]
  misc_feature: Useful for introducing or modulating the production of volatile compounds
MASYTTDTHIQIIDSHIHLYPESEIPTLAWCTPDNALAKQHSVDDYRAAAANSPLAGFIFIETDRKNDLESGEEGWKYPLMEVSWLKRIVTAQPKPGEGHDEGKCASLCKAYIPWAPLPSGPEVVKKYIDLVFKEAGDSRDKVKGFRYLLQDKPAGTMLQDNFIESLKLLGRMKMVFEVGVDHHRRGRAQLEELVDMIDRAHDGVPEDEKVVFIINHMCKPDFGVYDAKDPKYIAWHSTIYTLSLCKQVYMKFSGGFSEMDEGLRGRSVDSIVSAMGDHLTALLVAFKPDRLMFGSDWPVCTVGMEVGSWDKWHKIIQRFLDLSSVSVWGQKMIFGGTAAIAYRLDPLEDEK

SEQ ID NO: 18489 - DNA, 1599 bp, Muscodor strobelii
  misc_feature: SGI EST ID NO. CUFF.43457.0
  misc_feature: Variant of the nucleotide sequence at SEQ ID NO 18487
aatgatgttgatcccgggtggagcacgacctgatattcccctgaatagtgggtgcggacagcaaccgcggggtagggcgtcaaggtacacctgccctacctctttgcttttcctaacaactgggaagtcgtagttgagggaacttctctttgagatattcatatgaaacatggtcaattgctttatacggaatttattttgatttgattatatgagcttcttttcctggttgtccttacctagaagctctgcaatccaatcgcatgtgaacggctaaacaacatacatcaattctcggtactcactgcatccgacgcgatattcaagtcgcgatggcgtcttatacgaccgatactcacattcagattatcgactcccacatccatctgtatcctgaatctgagatccccacactcgcatggtgcacaccggataatgcactcgcaaaacagcactctgtagacgactatagagctgctgctgccaactcaccactcgccggcttcatattcatcgagacagatcgaaagaatgatctcgaatccggtgaagaaggatggaaatacccacttatggaagtttcatggctgaagcgcatcgtcactgcgcaacccaaaccaggtgaagggcatgacgagggcaaatgtgctagcttatgtaaagcctacattccctgggcaccgctaccgagtgggcccgaagtggtgaagaagtacatcgaccttgtgtttaaggaagcaggtgatagccgggataaggtaaaaggcttcagatatctactccaagacaaacctgccggaacaatgttgcaagacaacttcatcgagagcttgaaacttcttggtcgcatgaagatggtgttcgaagtgggtgttgatcatcatcggcgcggtagagctcagttagaggaacttgtcgacatgattgatcgggcacatgatggcgttcccgaggacgagaaagttgtgttcattatcaatcatatgtgtaagcctgactttggggtttatgacgctaaagatcctaagtatatcgcctggcactccaccatatacacgctcagcctatgcaagcaagtatacatgaagttctctggagggttctccgagatggatgagggactaagaggtagatcagtggactccattgtgagcgccatgggagaccacctgactgctctcttggtggcgttcaagcctgaccggttgatgttcggtagcgattggcctgtttgcaccgttggcatggaggtcggatcctgggacaagtggcacaagatcattcagcgcttccttgaccttagcagtgtctctgtatggggacagaagatgatctttggaggtacagcagcgattgcttatcgtctcgacccgctggaagacgaaaagtaagttgcgcgaatgacctgagctcttttctctcaaaagtcacgaaaatcatgaatagggaatcagaagaaggggatgattgtttcccgacgggaataattctgaggggctttagtgtgtatatagaatttcgactcctggtatgaaatttccctagcagtggtctgtaaaatcagactgcgatttatctttcgattattgtgcttaaatg

SEQ ID NO: 18490 - DNA, 1017 bp, Muscodor strobelii
  misc_feature: SGI cDNA ID NO. 566202
  misc_feature: Reduced expression when VOC is produced
  misc_feature: Encodes the peptide sequence at SEQ ID NO 18491
atgtctgctgccgttgtctccgccgatgacgacgtcttcgagccgagtctgcagtctattcttgaccagacaaccttgcgatggatatttgtcgggggtaagggtggcgtaggcaagacgacgacttcatgctctctcgccatccagcttgccaaggttcgccgatccgtgctgctcatctcgacggatcctgcccacaacttgtccgatgccttctcgcaaaagttcggcaaggaggcgcgtctcgtcgagggctacacgaacttgagtgccatggagatcgaccccaatggcagtatccaggacctgctcgccggccaaggagaggaaacggacgcggcaatgggcggtatgggaggcatgatgcaggaccttgctttcgctattcccggtattgacgaggccatgtcttttgccgaagtgctcaagcaagtcaagtcgctatcctacgaagtcatcattttcgacacagcacctactggccacacacttcgtttcctccagttcccttccgtgttggagaaggccctggccaagatctcccaactctcaaaccagtacggtcctcttctcaatggctttctcggctcgcagggtcaattgcccaatggccagaatctcaacgaaatgatggagaagctagagggattgcgccagaccatttcggaagtaaacacgcagttcaaggatgagaatcttactacattcgtttgtgtctgtatagccgagttcctcagcttatacgaaacggaacgcatgatccaggagcttggcagttatggtatcgacacgcactgcatcgttgtcaatcagttattattccccaagcagggaagcgattgcgatcagtgcaatgcgagacggaagatgcaaaagaagtatcttgaccagatcgaggagctttacgacgaattcaatgtggtccggatgccactattgaccgaagaggttcgaggcaaagataggctcgagaacttcagcgatatgttgatccacccttacacgccccctgaatga

SEQ ID NO: 18491 - protein, 338 aa, Muscodor strobelii
  misc_feature: SGI Peptide ID NO. 566202
  misc_feature (26)..(332): Pfam Id: PF02374 Pfam Desc: Anion-transporting ATPase
  misc_feature (1)..(337): NCBI GI: 154304377 Blast Desc: conserved [Botryotinia fuckeliana B05.10] gi|263429147|sp|A6S7T2.1|GET3_BOTFB RecName: Full=ATPase get3; AltName: Full=Arsenite-stimulated ATPase; AltName: Full=Arsenical
  misc_feature (1)..(337): NCBI GI: 156054974 Blast Desc: SS1G_04838 [Sclerotinia sclerotiorum 1980] gi|263429637|sp|A7EHP6.1|GET3_SCLS1 RecName: Full=ATPase get3; AltName: Full=Arsenite-stimulated ATPase; AltName: Full=Arsenical
  misc_feature (9)..(338): NCBI GI: 261351881 Blast Desc: arsenical pump-driving ATPase [Verticillium albo-atrum VaMs.102]
  misc_feature (1)..(338): NCBI GI: 85100080 Blast Desc: NCU06717 [Neurospora crassa OR74A] gi|74619577|sp|Q870U4.1|GET3_NEUCR RecName: Full=ATPase get3; AltName: Full=Arsenite-stimulated ATPase; AltName: Full=Arsenical
  misc_feature (3)..(338): NCBI GI: 256731693 Blast Desc: [Nectria haematococca mpVI 77-13-4]
  misc_feature (1)..(338): NCBI GI: 46136751 Blast Desc: FG09891.1 [Gibberella zeae PH-1]
  misc_feature (1)..(337): NCBI GI: 116198075 Blast Desc: conserved [Chaetomium globosum CBS 148.51] gi|121781675|sp|Q2GXW1.1|GET3_CHAGB RecName: Full=ATPase GET3; AltName: Full=Arsenite-stimulated ATPase; AltName: Full=Arsenical
  misc_feature (1)..(338): NCBI GI: 39961494 Blast Desc: conserved [Magnaporthe grisea 70-15] gi|263429431|sp|A4QUI2.1|GET3_MAGGR RecName: Full=ATPase GET3; AltName: Full=Arsenite-stimulated ATPase; AltName: Full=Arsenical
  misc_feature (1)..(337): NCBI GI: 115396418 Blast Desc: arsenical pump-driving ATPase [Aspergillus terreus NIH2624] gi|121738722|sp|Q0CNR4.1|GET3_ASPTN RecName: Full=ATPase get3; AltName: Full=Arsenite-stimulated ATPase; AltName: ATPase;
  misc_feature (1)..(338): NCBI GI: 169770735 Blast Desc: [Aspergillus oryzae RIB40] gi|121803954|sp|Q2UKT0.1|GET3_ASPOR RecName: Full=ATPase get3; AltName: Full=Arsenite-stimulated ATPase; AltName: Full=Arsenical
  misc_feature (43)..(338): SWISSPROT Homolog: EC 3.6.3.16 Arsenite-transporting ATPase
  misc_feature: Useful for introducing or modulating the production of volatile compounds
MSAAVVSADDDVFEPSLQSILDQTTLRWIFVGGKGGVGKTTTSCSLAIQLAKVRRSVLLISTDPAHNLSDAFSQKFGKEARLVEGYTNLSAMEIDPNGSIQDLLAGQGEETDAAMGGMGGMMQDLAFAIPGIDEAMSFAEVLKQVKSLSYEVIIFDTAPTGHTLRFLQFPSVLEKALAKISQLSNQYGPLLNGFLGSQGQLPNGQNLNEMMEKLEGLRQTISEVNTQFKDENLTTFVCVCIAEFLSLYETERMIQELGSYGIDTHCIVVNQLLFPKQGSDCDQCNARRKMQKKYLDQIEELYDEFNVVRMPLLTEEVRGKDRLENFSDMLIHPYTPPE

SEQ ID NO: 18492 - DNA, 1997 bp, Muscodor strobelii
  misc_feature: SGI EST ID NO. CUFF.43460.0
  misc_feature: Variant of the nucleotide sequence at SEQ ID NO 18490
cgggggaaaaagagaaaacaaggattacgggacaatgagatgtcgtttttttactacattattacaacttgtatcacaccatacgatctcctattatccccttaagaggtgtcttatggaagcgttacacactttcgagaccattcgtctcttaggggctgaaactacctaccctaaaagacttccaaccgcgcgtatggaagcgcacagaccacgctccttctaaaacccccactatcgcgtttcgcggggcaccgacgtctgcagtgctgaggcgaagcgccacctgtgggaggatttgactggaattatctattcgattccaccgtgttgatagctgaggtagcgctgttgtttgaatacccctagcctcttcgcatttaatttccattagtccggctgcgacctcactgtgataccccgtccctagacccaggactcgtcgcttgcgcccaccatgtctgctgccgttgtctccgccgatgacgacgtcttcgagccgagtctgcagtctattcttgaccagacaaccttgcgatggatatttgtcgggggtaagggtggcgtaggcaagacgacgacttcatgctctctcgccatccagcttgccaaggttcgccgatccgtgctgctcatctcgacggatcctgcccacaacttgtccgatgccttctcgcaaaagttcggcaaggaggcgcgtctcgtcgagggctacacgaacttgagtgccatggagatcgaccccaatggcagtatccaggacctgctcgccggccaaggagaggaaacggacgcggcaatgggcggtatgggaggcatgatgcaggaccttgctttcgctattcccggtattgacgaggccatgtcttttgccgaagtgctcaagcaagtcaagtcgctatcctacgaagtcatcattttcgacacagcacctactggccacacacttcgtttcctccagttcccttccgtgttggagaaggccctggccaagatctcccaactctcaaaccagtacggtcctcttctcaatggctttctcggctcgcagggtcaattgcccaatggccagaatctcaacgaaatgatggagaagctagagggattgcgccagaccatttcggaagtaaacacgcagttcaaggatgagaatcttactacattcgtttgtgtctgtatagccgagttcctcagcttatacgaaacggaacgcatgatccaggagcttggcagttatggtatcgacacgcactgcatcgttgtcaatcagttattattccccaagcagggaagcgattgcgatcagtgcaatgcgagacggaagatgcaaaagaagtatcttgaccagatcgaggagctttacgacgaattcaatgtggtccggatgccactattgaccgaagaggttcgaggcaaagataggctcgagaacttcagcgatatgttgatccacccttacacgccccctgaatgagtaaatcgccttgaaattacaatataaatatgaagaaacaatactatgaatcggggaccgcataaagcgagcctttctattctcattgctcttctatgtgcagtgaagagaggtgtcaaagttacgtcgctagacggggtgtcgaatgagcgggaagcctctcgtctctcagtgatatctagatccgcattgtagaatattgagccgatcgcattctcgataaaagacaaattccacatgcagcgttcacaatacgtcatatcttgccatcaacgttggttcttatcctcgacgcattgcccaataggaagttaatctatccattaggtagtgacctcccagattgcctagagtgcagggggatggtgcgctctgaagagtaattgtagtactcgtagtactaagcagacaattgatctcgatcggaaatattcattgagctcctagctatcttgactcattttcctgtagatagcatcctagataatcaagaacacacaaacggccgaccacatcaccgtcc

SEQ ID NO: 18493 - DNA, 402 bp, Muscodor strobelii
  misc_feature: SGI cDNA ID NO. 566203
  misc_feature: Elevated expression when VOC is produced
  misc_feature: Encodes the peptide sequence at SEQ ID NO 18494
atggccggcgataaggactccataacttgtcacgtcctcgacacatctgttggcaagccagcaaagggcatccgtgtcaaactcgaaggcggcacgacgcctctgaagacatttgagtcgcaaactgatgacgatggccgcatcaagacatggctaccgtacagcagcgcacatgcgtccggcgatgtaccaacctatactctcgaagaggtcttaggtgtgctcggcgaaatcgacgacacgtccacatggaccctacgcttcgacacaggatcttactttggcgagggaaatacgttcttcccagaagtggttgtcacatttaccgtcaataagggtcaaaattatcacgtgccactgttgctcgcgccttactcttattcaacctatcgcggaagttga

SEQ ID NO: 18494 - protein, 133 aa, Muscodor strobelii
  misc_feature: SGI Peptide ID NO. 566203
  misc_feature (7)..(132): Pfam Id: PF00576 Pfam Desc: HIUase/Transthyretin family
  misc_feature (86)..(132): Pfam Id: PF00576 Pfam Desc: HIUase/Transthyretin family
  misc_feature (7)..(52): Pfam Id: PF00576 Pfam Desc: HIUase/Transthyretin family
  misc_feature (5)..(133): NCBI GI: 85077215 Blast Desc: NCU01428 [Neurospora crassa OR74A] gi|28917027|gb|EAA26752.1| conserved [Neurospora crassa OR74A]
  misc_feature (5)..(133): NCBI GI: 39961486 Blast Desc: MGG_09534 [Magnaporthe grisea 70-15] gi|145011037|gb|EDJ95693.1| MGG_09534 [Magnaporthe grisea 70-15]
  misc_feature (5)..(133): NCBI GI: 261351885 Blast Desc: transthyretin [Verticillium albo-atrum VaMs.102]
  misc_feature (5)..(133): NCBI GI: 256732072 Blast Desc: NECHADRAFT_69304 [Nectria haematococca mpVI 77-13-4]
  misc_feature (5)..(133): NCBI GI: 171693931 Blast Desc: protein product [Podospora anserina] gi|170946914|emb|CAP73718.1| protein product [Podospora anserina]
  misc_feature (5)..(133): NCBI GI: 46136749 Blast Desc: FG09890.1 [Gibberella zeae PH-1]
  misc_feature (3)..(133): NCBI GI: 156054976 Blast Desc: SS1G_04839 [Sclerotinia sclerotiorum 1980] gi|154702624|gb|EDO02363.1| SS1G_04839 [Sclerotinia sclerotiorum 1980]
  misc_feature (4)..(133): NCBI GI: 238486808 Blast Desc: transthyretin domain protein [Aspergillus flavus NRRL3357] gi|220699521|gb|EED55860.1| transthyretin domain protein [Aspergillus flavus NRRL3357]
  misc_feature (5)..(133): NCBI GI: 115396416 Blast Desc: conserved [Aspergillus terreus NIH2624] gi|114193416|gb|EAU35116.1| conserved [Aspergillus terreus NIH2624]
  misc_feature (5)..(133): NCBI GI: 121705742 Blast Desc: transthyretin domain protein [Aspergillus clavatus NRRL 1] gi|119399280|gb|EAW09708.1| transthyretin domain protein [Aspergillus clavatus NRRL 1]
  misc_feature (7)..(133): SWISSPROT Homolog: EC 3.5.2.17 Hydroxyisourate hydrolase
  misc_feature: Useful for introducing or modulating the production of volatile compounds
MAGDKDSITCHVLDTSVGKPAKGIRVKLEGGTTPLKTFESQTDDDGRIKTWLPYSSAHASGDVPTYTLEEVLGVLGEIDDTSTWTLRFDTGSYFGEGNTFFPEVVVTFTVNKGQNYHVPLLLAPYSYSTYRGS

SEQ ID NO: 18495 - DNA, 1149 bp, Muscodor strobelii
  misc_feature: SGI EST ID NO. CUFF.43417.0
  misc_feature: Variant of the nucleotide sequence at SEQ ID NO 18493
gtcgtgtttagcatagggattgctgcatggtaaagagtcaagccccatcagctgcatctattgctacgtgactgcatatattttttcagatagtcctcgaattcgccgttcttggacgcgttgcacatctgcacctgcagtcactgcctcacgggaaaagcttcgccccggtctgttcaacctcaagtcagtctgatcctcgtgacactatcacctcttcgtcggtctgagactgaatcagccgagtgtcattcgagtgagatcacagagtgagatcgggtagcggcatcgccatcatcgcattttccatcacagcagtataagatacgggctcccaactccttgcctcacctagcttgggacttcttactgtgacgccacaacccaaatcattcgtcataagaccatacttgcgcaggcgcatcacctccatcatggccggcgataaggactccataacttgtcacgtcctcgacacatctgttggcaagccagcaaagggcatccgtgtcaaactcgaaggcggcacgacgcctctgaagacatttgagtcgcaaactgatgacgatggccgcatcaagacatggctaccgtacagcagcgcacatgcgtccggcgatgtaccaacctatactctcgaagaggtcttaggtgtgctcggcgaaatcgacgacacgtccacatggaccctacgcttcgacacaggatcttactttggcgagggaaatacgttcttcccagaagtggttgtcacatttaccgtcaataagggtcaaaattatcacgtgccactgttgctcgcgccttactcttattcaacctatcgcggaagttgagaaaccgcagggactatttgatgaatgcacggatcaataagcaacgacggtgactgtggaggtcggagagcgattttgagtaggtactgcttgaggattaaaagccggtaatcattaagcaaccggtgaagatggtgtgcagtggtaatgacgagcagagagcatagttggggacttagggaatgagtgcacattctgctatttaagcggagggtgtcttgcgacaagtcacaactcatcctagtaatttctacaaccaaaaaataattcaatcaagtgttcagagtcttctgaagccgttctcacaatgtgt

SEQ ID NO: 18496 - DNA, 342 bp, Muscodor strobelii
  misc_feature: SGI cDNA ID NO. 566204
  misc_feature: Encodes the peptide sequence at SEQ ID NO 18497
atgaatgacatgagtcacattgtcaagtaccgactgaaagaactctttggtaaaacgctactgattaccggcgacgactgctatggcgtagctgtcgacggtgtggaagacggcgacgttgttattctacctcctgaaatcaaacatccagtgatcttgagaagagacaagtcaccagagggacacgagacggaatactacaggatggtggggactgctattattgacaaagtcatggagaaggagctctatgacgcaaagagccgcgtgttactatacggcgaactgaacgactctaaagactggtctccaccgaactctacagcgatcatggcctcgtga

SEQ ID NO: 18497 - protein, 113 aa, Muscodor strobelii
  misc_feature: SGI Peptide ID NO. 566204
MNDMSHIVKYRLKELFGKTLLITGDDCYGVAVDGVEDGDVVILPPEIKHPVILRRDKSPEGHETEYYRMVGTAIIDKVMEKELYDAKSRVLLYGELNDSKDWSPPNSTAIMAS

SEQ ID NO: 18498 - DNA, 2964 bp, Muscodor strobelii
  misc_feature: SGI cDNA ID NO. 566205
  misc_feature: Elevated expression when VOC is produced
  misc_feature: Encodes the peptide sequence at SEQ ID NO 18499
atggagacgcttgcagccataggcttagctggcaatatcctgagtttcgttgatttttcggccaagcttctggtgtcggcacgcgccatttacaaatctgctgccgatgcatcgccagagaatcacgtcctccaaatcatagctcgggacgtgcaatttcacgtcgagaacatcaccgctaccagcgatgttgatcagcatttgaggtccctcgccgatgagagccgaaagatcgccgaagagctgcttgacttgatacatcaagtcagcgctcgtaacaagaagtcaaaatatgattgtttcttgtcggcgttaagagaagtggccaagaagaatgaaatcgctacgttatccaaccgactctccatactccaatcgcaaatgagcaaccatgtgcagttcacgttattaagtcagcacaaaacaagtctggataatatccaagcagatctgaaaggatctgacgcaaatctggagcattatctgtctaagctacgcgctgaaaatcgagatctagcagagtccacgagactccgagacgtggaaataaaggacagcttagctcgctgcagcgatgaattggccaaacttgacagcagtggtttgcgtttctttatccgccgtaggaaggcattaccttcggagatttttaacctcgaactaccagccttgaggaatacaggagacgtatctactcttcagctgaagaacggaatcctggagtattttaataatcttcagaatgaaactacagctctcgatcttcggtatcgaatcatccaaagtctgagattcaaggccagcgcccagcgcgaacagcaaattgacagagcctacgaggacacattcaaatgggttttggacaagtcgcaagaagacattgggtttgtgaattggctagaacgcagcgattcaattttttggatacgaggaaaagcgggctcagggaaatcgactctgatgaaatacatctgcagacaaccagagacatatgactatcttcgagtatgggcaggatcatgttccttgactgtcttgaagttctttctatggaactcgggttcgaaactccaaaactcacaggagggattgttgcgatccttactcgcacaaatttttcagttgtacccgcatttagcagatggtcttggtcctacggaactatgtctctttgacagcgctctccagagcggcggttgggacatagaagatctctcaatgatgatacaaaatgtcgtacagagaacacccactgtacgatactgtttcttcatagatggtctggacgagtttggaggcgatccgcatacactgataaatcttatcaacagcatttcagctaacaagaacatcaaattttgtgtatcgagccgcccagaagttcagtttgacaatgcatacctgcatggaaaagcacaactattaaagatagaagatttgacagcaaaagatattcggatttacgcttcggggacgctcgaacaacacgataattttcagcgcctcaacaaagagtctcggtatgaccaattaataaagaatattgttgaaagagcacaaggggtcttcctgtgggtggtgttgattgtgaagtcgttgatcgaaggtcttgattacggggaggatcttccagctttgcaacgacgactccgagagctgccaagtgagctcagtgatttgtttctaaaaataatcatgtctatacccaaaagatatcgggtgaagacaggtcgaatttttcagattgccctagcaacgggctggagcgatcgagatcccactaatatccctccactcgcattcgcagtcctcgacgagatgaacggcaatctagcatggccacttcgccatgacgtgcaagaacttagtaaagaaggtcatatccaacatcgagaaaaataccagaatattttggcacggtgtaaaggcttgctctacagatcatcccccgcgcctatcagctatgtaggtggcgaagtctgctggctacatcgatcagtgagggacttcttcctcgcctctcaggaggtccacgaagtcttccacatagatttcaatgacataatccaaggaacactggccctatgcgccgcatttgtcggatcccagaaatggaagcatgaaacagctaaatacgcgctccgtgtgttcttacctgtggtggactcgttttttcgtgccaaggaagcagggcctgttgactcgcaagcaactaatgatgagtgcaaaatcatgttcgcattgctcgacgattatgatgatcagattgagcttaaggagagtcaacagtccgtggtccttattaaagctatagattggggttggttcagctaccttgagcgtaggctacgaagacactcgtctttagtcctcaaacaccaacttgtatggaacgaggccatcaagaagcctgcggccatgaaactgttgttcgagtatggtgcgatgcccaatcaactcggaacttggcaaataggcgttggaccggggtacgaaaagtatcgcccggacaaagacacttctatctggcagtttctggtgcaagcatttgatttcgtgacaccgacaggtactaacgcagaacgaccgacggtaataaaagttactcggaattacctgatccaaaatatcttaactgctgtggaatttggagcggatcctggcgcgatagtcctttgggatgatgctcctcagacagctcgtcagttccttgagtcatgcacggatgcctttcccgaattcaaggatatcagatgggcatttaccgaaacaccttccctcggccaagttgaacaaccatcatctatccacgaagccacggaagcaaaagctctgtctggcgatgaagatgcctctccgccaacaccaaagggtgctccggctccgagaaaccgagggcttctacactgggccggatcttttctcggactgacgaatgataagtcacctgcggttacaagataa

SEQ ID NO: 18499 - protein, 987 aa, Muscodor strobelii
  misc_feature: SGI Peptide ID NO. 566205
  misc_feature (1)..(704): NCBI GI: 225684243 Blast Desc: conserved [Paracoccidioides brasiliensis Pb03]
  misc_feature (1)..(704): NCBI GI: 226293863 Blast Desc: conserved [Paracoccidioides brasiliensis Pb18]
  misc_feature (2)..(671): NCBI GI: 255956529 Blast Desc: Pc21g20270 [Penicillium chrysogenum Wisconsin 54-1255] gi|211590728|emb|CAP96924.1| Pc21g20270 [Penicillium chrysogenum Wisconsin 54-1255]
  misc_feature (2)..(586): NCBI GI: 169616506 Blast Desc: SNOG_11426 [Phaeosphaeria nodorum SN15] gi|160703200|gb|EAT81134.2| SNOG_11426 [Phaeosphaeria nodorum SN15]
  misc_feature (1)..(704): NCBI GI: 46111055 Blast Desc: FG02409.1 [Gibberella zeae PH-1]
  misc_feature (1)..(670): NCBI GI: 46116306 Blast Desc: FG03995.1 [Gibberella zeae PH-1]
  misc_feature (2)..(671): NCBI GI: 256730066 Blast Desc: NECHADRAFT_82694 [Nectria haematococca mpVI 77-13-4]
  misc_feature (1)..(671): NCBI GI: 261190024 Blast Desc: conserved [Ajellomyces dermatitidis SLH14081] gi|239591250|gb|EEQ73831.1| conserved [Ajellomyces dermatitidis SLH14081]
  misc_feature (1)..(681): NCBI GI: 154293653 Blast Desc: BC1G_14084 [Botryotinia fuckeliana B05.10] gi|150845240|gb|EDN20433.1| BC1G_14084 [Botryotinia fuckeliana B05.10]
  misc_feature (1)..(606): NCBI GI: 169606622 Blast Desc: SNOG_06357 [Phaeosphaeria nodorum SN15] gi|160707042|gb|EAT86188.2| SNOG_06357 [Phaeosphaeria nodorum SN15]
  misc_feature: Useful for introducing or modulating the production of volatile compounds
METLAAIGLAGNILSFVDFSAKLLVSARAIYKSAADASPENHVLQIIARDVQFHVENITATSDVDQHLRSLADESRKIAEELLDLIHQVSARNKKSKYDCFLSALREVAKKNEIATLSNRLSILQSQMSNHVQFTLLSQHKTSLDNIQADLKGSDANLEHYLSKLRAENRDLAESTRLRDVEIKDSLARCSDELAKLDSSGLRFFIRRRKALPSEIFNLELPALRNTGDVSTLQLKNGILEYFNNLQNETTALDLRYRIIQSLRFKASAQREQQIDRAYEDTFKWVLDKSQEDIGFVNWLERSDSIFWIRGKAGSGKSTLMKYICRQPETYDYLRVWAGSCSLTVLKFFLWNSGSKLQNSQEGLLRSLLAQIFQLYPHLADGLGPTELCLFDSALQSGGWDIEDLSMMIQNVVQRTPTVRYCFFIDGLDEFGGDPHTLINLINSISANKNIKFCVSSRPEVQFDNAYLHGKAQLLKIEDLTAKDIRIYASGTLEQHDNFQRLNKESRYDQLIKNIVERAQGVFLWVVLIVKSLIEGLDYGEDLPALQRRLRELPSELSDLFLKIIMSIPKRYRVKTGRIFQIALATGWSDRDPTNIPPLAFAVLDEMNGNLAWPLRHDVQELSKEGHIQHREKYQNILARCKGLLYRSSPAPISYVGGEVCWLHRSVRDFFLASQEVHEVFHIDFNDIIQGTLALCAAFVGSQKWKHETAKYALRVFLPVVDSFFRAKEAGPVDSQATNDECKIMFALLDDYDDQIELKESQQSVVLIKAIDWGWFSYLERRLRRHSSLVLKHQLVWNEAIKKPAAMKLLFEYGAMPNQLGTWQIGVGPGYEKYRPDKDTSIWQFLVQAFDFVTPTGTNAERPTVIKVTRNYLIQNILTAVEFGADPGAIVLWDDAPQTARQFLESCTDAFPEFKDIRWAFTETPSLGQVEQPSSIHEATEAKALSGDEDASPPTPKGAPAPRNRGLLHWAGSFLGLTNDKSPAVTR

SEQ ID NO: 18500 - DNA, 3372 bp, Muscodor strobelii
  misc_feature: SGI EST ID NO. CUFF.43433.0
  misc_feature: Variant of the nucleotide sequence at SEQ ID NO 18498
gttagctgcaagcacacatggacagccaatgagagacacgatgcctaaaatccctcccttcctacacacgatgtcacctcgcactacactgccacttgtctatgatcgtatgcagagcgttgtcgttgggaagcagtgtaacacctcacgaatacctaatagctaggcggcagctgctcgtaggccgagttctacattttcgaacctcatgtgtcattaacctcgtgatatctaactgcgaattgagagtgttcttatactgtggtcatggagacgcttgcagccataggcttagctggcaatatcctgagtttcgttgatttttcggccaagcttctggtgtcggcacgcgccatttacaaatctgctgccgatgcatcgccagagaatcacgtcctccaaatcatagctcgggacgtgcaatttcacgtcgagaacatcaccgctaccagcgatgttgatcagcatttgaggtccctcgccgatgagagccgaaagatcgccgaagagctgcttgacttgatacatcaagtcagcgctcgtaacaagaagtcaaaatatgattgtttcttgtcggcgttaagagaagtggccaagaagaatgaaatcgctacgttatccaaccgactctccatactccaatcgcaaatgagcaaccatgtgcagttcacgttattaagtcagcacaaaacaagtctggataatatccaagcagatctgaaaggatctgacgcaaatctggagcattatctgtctaagctacgcgctgaaaatcgagatctagcagagtccacgagactccgagacgtggaaataaaggacagcttagctcgctgcagcgatgaattggccaaacttgacagcagtggtttgcgtttctttatccgccgtaggaaggcattaccttcggagatttttaacctcgaactaccagccttgaggaatacaggagacgtatctactcttcagctgaagaacggaatcctggagtattttaataatcttcagaatgaaactacagctctcgatcttcggtatcgaatcatccaaagtctgagattcaaggccagcgcccagcgcgaacagcaaattgacagagcctacgaggacacattcaaatgggttttggacaagtcgcaagaagacattgggtttgtgaattggctagaacgcagcgattcaattttttggatacgaggaaaagcgggctcagggaaatcgactctgatgaaatacatctgcagacaaccagagacatatgactatcttcgagtatgggcaggatcatgttccttgactgtcttgaagttctttctatggaactcgggttcgaaactccaaaactcacaggagggattgttgcgatccttactcgcacaaatttttcagttgtacccgcatttagcagatggtcttggtcctacggaactatgtctctttgacagcgctctccagagcggcggttgggacatagaagatctctcaatgatgatacaaaatgtcgtacagagaacacccactgtacgatactgtttcttcatagatggtctggacgagtttggaggcgatccgcatacactgataaatcttatcaacagcatttcagctaacaagaacatcaaattttgtgtatcgagccgcccagaagttcagtttgacaatgcatacctgcatggaaaagcacaactattaaagatagaagatttgacagcaaaagatattcggatttacgcttcggggacgctcgaacaacacgataattttcagcgcctcaacaaagagtctcggtatgaccaattaataaagaatattgttgaaagagcacaaggggtcttcctgtgggtggtgttgattgtgaagtcgttgatcgaaggtcttgattacggggaggatcttccagctttgcaacgacgactccgagagctgccaagtgagctcagtgatttgtttctaaaaataatcatgtctatacccaaaagatatcgggtgaagacaggtcgaatttttcagattgccctagcaacgggctggagcgatcgagatcccactaatatccctccactcgcattcgcagtcctcgacgagatgaacggcaatctagcatggccacttcgccatgacgtgcaagaacttagtaaagaaggtcatatccaacatcgagaaaaataccagaatattttggcacggtgtaaaggcttgctctacagatcatcccccgcgcctatcagctatgtaggtggcgaagtctgctggctacatcgatcagtgagggacttcttcctcgcctctcaggaggtccacgaagtcttccacatagatttcaatgacataatccaaggaacactggccctatgcgccgcatttgtcggatcccagaaatggaagcatgaaacagctaaatacgcgctccgtgtgttcttacctgtggtggactcgttttttcgtgccaaggaagcagggcctgttgactcgcaagcaactaatgatgagtgcaaaatcatgttcgcattgctcgacgattatgatgatcagattgagcttaaggagagtcaacagtccgtggtccttattaaagctatagattggggttggttcagctaccttgagcgtaggctacgaagacactcgtctttagtcctcaaacaccaacttgtatggaacgaggccatcaagaagcctgcggccatgaaactgttgttcgagtatggtgcgatgcccaatcaactcggaacttggcaaataggcgttggaccggggtacgaaaagtatcgcccggacaaagacacttctatctggcagtttctggtgcaagcatttgatttcgtgacaccgacaggtactaacgcagaacgaccgacggtaataaaagttactcggaattacctgatccaaaatatcttaactgctgtggaatttggagcggatcctggcgcgatagtcctttgggatgatgctcctcagacagctcgtcagttccttgagtcatgcacggatgcctttcccgaattcaaggatatcagatgggcatttaccgaaacaccttccctcggccaagttgaacaaccatcatctatccacgaagccacggaagcaaaagctctgtctggcgatgaagatgcctctccgccaacaccaaagggtgctccggctccgagaaaccgagggcttctacactgggccggatcttttctcggactgacgaatgataagtcacctgcggttacaagataagcagcgttcctctttcttagatctggtgtttgggcagtaatatgtattcttgatgaattagcatgtcaattcgttcatttagtgtatcttcgtcaaattccatacaagaatgaatactacgcactaaaaacagcattggtg

SEQ ID NO: 18501 - DNA, 960 bp, Muscodor strobelii
  misc_feature: SGI cDNA ID NO. 566206
  misc_feature: Encodes the peptide sequence at SEQ ID NO 18502
atggcggtcattgcaattgctggtggttcgggcaggatgggtagaacgctcgtcgaagaactggttgcttctaggaaacatgatgtgaaaatcttagcacggaagcccaatccagtgatcgaagtcgagttgcgtgtccctgttatagcagtcgactataccaatgtggaggcactgaagaatactctcgaagctaataaaatcgacaccgtcatctcagctatcttgatgttccccggtcccaatggagagcaacctcccgagattgagttgatccgcgcagctgacgcgtcgaagactacgaagaggatgattctcagtgattggagtttcccgcacactagagagcgcgtcctacacatcccaatgcttggatcagtggcaccaaaatttgccgccttagacgttgcgaagactgtcactgatcttcaaactacatctgtgcaatgcggactattcctcgattactggggaattccagtagtgaagtctcacctacttccaacaagcctggtgatagatatggcgaacaacgaggccgcgattcccggcgacggcaatcaacctatcatcttcactcattctttcgatgtcgcaaagctcgtcgtggcgatgttagatacgcaggaatgggatcccgtcacttacacagtgggcgacaaagtcacctggaatgagtttctacgactcgccgaagaggtcaaaggcaagaaattcagcaccacctacgacagcattgagaagctgaagcagggagaaaccactgagctccctgcgcacgtggccgcatactccatattcccgaagaagcaattgcagcgtttagctgccacttttggtctatttttcgctggaggagactttgactatacgccgaagaggttgttgaatgaccaatttcccgagatcaaaatgatgaaagtgaaggatctcttggagcgcgcgtggcagaagtcttga

SEQ ID NO: 18502 - protein, 319 aa, Muscodor strobelii
  misc_feature: SGI Peptide ID NO. 566206
  misc_feature (4)..(241): Pfam Id: PF05368 Pfam Desc: NmrA-like family
  misc_feature (4)..(39): Pfam Id: PF05368 Pfam Desc: NmrA-like family
  misc_feature (1)..(319): NCBI GI: 116204097 Blast Desc: CHGG_09932 [Chaetomium globosum CBS 148.51] gi|88176060|gb|EAQ83528.1| CHGG_09932 [Chaetomium globosum CBS 148.51]
  misc_feature (1)..(313): NCBI GI: 261357174 Blast Desc: conserved [Verticillium albo-atrum VaMs.102]
  misc_feature (1)..(313): NCBI GI: 256725155 Blast Desc: NECHADRAFT_73228 [Nectria haematococca mpVI 77-13-4]
  misc_feature (1)..(318): NCBI GI: 256723448 Blast Desc: NECHADRAFT_42269 [Nectria haematococca mpVI 77-13-4]
  misc_feature (2)..(317): NCBI GI: 261353740 Blast Desc: conserved [Verticillium albo-atrum VaMs.102]
  misc_feature (4)..(316): NCBI GI: 256725502 Blast Desc: NECHADRAFT_70763 [Nectria haematococca mpVI 77-13-4]
  misc_feature (1)..(317): NCBI GI: 256721577 Blast Desc: NECHADRAFT_92336 [Nectria haematococca mpVI 77-13-4]
  misc_feature (2)..(317): NCBI GI: 256723616 Blast Desc: NECHADRAFT_52062 [Nectria haematococca mpVI 77-13-4]
  misc_feature (15)..(317): NCBI GI: 256723537 Blast Desc: NECHADRAFT_42193 [Nectria haematococca mpVI 77-13-4]
  misc_feature (1)..(319): NCBI GI: 256722358 Blast Desc: NECHADRAFT_44399 [Nectria haematococca mpVI 77-13-4]
MAVIAIAGGSGRMGRTLVEELVASRKHDVKILARKPNPVIEVELRVPVIAVDYTNVEALKNTLEANKIDTVISAILMFPGPNGEQPPEIELIRAADASKTTKRMILSDWSFPHTRERVLHIPMLGSVAPKFAALDVAKTVTDLQTTSVQCGLFLDYWGIPVVKSHLLPTSLVIDMANNEAAIPGDGNQPIIFTHSFDVAKLVVAMLDTQEWDPVTYTVGDKVTWNEFLRLAEEVKGKKFSTTYDSIEKLKQGETTELPAHVAAYSIFPKKQLQRLAATFGLFFAGGDFDYTPKRLLNDQFPEIKMMKVKDLLERAWQKS

SEQ ID NO: 18503 - DNA, 890 bp, Muscodor strobelii
  misc_feature: SGI EST ID NO. CUFF.43444.0
  misc_feature: Variant of the nucleotide sequence at SEQ ID NO 18501
tctacgacgggatgtgggacggcataattgaagtgcagagattgaagcctcacggagaaagagctgacattgagtttgaaagtattcctcgattactggggaattccagtagtgaagtctcacctacttccaacaagcctggtgatagatatggcgaacaacgaggccgcgattcccggcgacggcaatcaacctatcatcttcactcattctttcgatgtcgcaaagctcgtcgtggcgatgttagatacgcaggaatgggatcccgtcacttacacagtgggcgacaaagtcacctggaatgagtttctacgactcgccgaagaggtcaaaggcaagaaattcagcaccacctacgacagcattgagaagctgaagcagggagaaaccactgagctccctgcgcacgtggccgcatactccatattcccgaagaagcaattgcagcgtttagctgccacttttggtctatttttcgctggaggagactttgactatacgccgaagaggttgttgaatgaccaatttcccgagatcaaaatgatgaaagtgaaggatctcttggagcgcgcgtggcagaagtcttgatcgaggttgaagaggacaagtaggtttgcttctatcgcaaatcgcaagcatgcagcctgccaacttagcgatgttcaaaatgcaagatatatgtggaaaaggatcctaccagaattcaactttggtttaaagagttatctttctggaagggcaggtggtggagaggcgtttcctaattgtgacctgtctgttactgaagctgtaaccaaccgctccggcaccggctcccgtgttactgtcttcaccaggtcacctctcaagaaatagactcgacaggagaacgacgaactattaaatctgca

SEQ ID NO: 18504 - DNA, 309 bp, Muscodor strobelii
  misc_feature: SGI cDNA ID NO. 566207
  misc_feature: Encodes the peptide sequence at SEQ ID NO 18505
atggagccaaacgagacaaccgatacctatctacctctttcatacatcaagctctggccggtgatctacaccttcggcactatcttctgggcaggtattattgtaatctctgtctttgtggtcgccgggtgtgtgatcgagtatatcgagtcaaacgggaaacaaggcatcatcagtcgcctagagagacgtctgtacgagttattttcaatcgagaacatgctacagaggactctcgagctgaaggagaagtgtgagattgcgcagaaagctattgccgaagcaaaggcaaaggagcagaagcattga

SEQ ID NO: 18505 - protein, 102 aa, Muscodor strobelii
  misc_feature: SGI Peptide ID NO. 566207
MEPNETTDTYLPLSYIKLWPVIYTFGTIFWAGIIVISVFVVAGCVIEYIESNGKQGIISRLERRLYELFSIENMLQRTLELKEKCEIAQKAIAEAKAKEQKH

SEQ ID NO: 18506 - DNA, 150 bp, Muscodor strobelii
  misc_feature: SGI EST ID NO. CUFF.43450.0
  misc_feature: Variant of the nucleotide sequence at SEQ ID NO 18504
ctcgagctgaaggagaagtgtgagattgcgcagaaagctattgccgaagcaaaggcaaaggagcagaagcattgagatggatgccacgcacatggtggtggtggacactgcgtcgtcgattcaagctggtgttgctgagatggatcactt

SEQ ID NO: 18507 - DNA, 1506 bp, Muscodor strobelii
  misc_feature: SGI cDNA ID NO. 566208
  misc_feature: Encodes the peptide sequence at SEQ ID NO 18508
atgccgtggttaagccagcttaagcagtttctgtcgggagccaaaacggatccctcagcaaaacctccctacctgctgtcgtttcgatcttcgaccttgtttatagtggtcactgtgaatcttgccgtattcacggatatcttcttctatggcttaattgcgcctgtgcttccattcgcactacatgctcaggtcggaatacctgacagtcaagtacaacactgggtcgccattcttctcgcagcttacagcgcagctctgcttgtcgcaagtccagtttctgggatatatgcagaccacacatcttcaagacgatggcctatgattctgggtctactcgccttggccggctcaacctttctccttgcttttggcaggacgccggccctatttgttttaggtaggatattgcaggggctgacctcggccgtggtttggagtgtgggctgcgctctgttggtcgatactctaggaaataatgttggtgttgctatgggctatgtcaatatctccatgagcattggccttctgctttcacctcttattggcggctcggtctatcatgcagttggataccagccagtgtattacgttgcttttgctatcgtaggtttagacattgcgcttcggcttctgatgatcgagaagaaggtcgctcagcaatggatcgtggaacatagcagcacgtcgggagccaacgagggtgcccaggacaatgtcgagaagaccaccactgcagtcgatggaagcgacgccgcaccgacggatgcgacgacacccgttgttccaacagagcgagactctgacgagccacaagtttctgaggcaaatcaaaataaacgagtgcgccatccagttcttgttcttctaaagtcgaccaggctgctcgccgctctgtatggcgtggtagtagaatcaggaattctgctcggcttcgatgctgtcctcgcaattttttgcaagaacacatttggatggaattcgctagacgtgagcatcctcttcctggcgcttttcctccccggcttcatcgcaccattggcgggctggctagcagacagatacggcaccaaatggccatcgttcggcggtttcgtggtgaccgtgcctctcatgatctctcttcgtttcgtcacacaaaacaccctgcagcacaaagcacttctcgcagtcctcttagccttgctcggtgtttcgctgccattctccatgacgccattaatggcggaggtaagctacatgatcgaggctgaggaagcaaagagtccggggatcttcggaaaaaagggtgtctacggtctaggatatggtctgttcaatgtcgcatttgcattaggaggtatcgtgggacctgtatgggctgggtatgtggttgatgaagccggctggggcactttgacctggagcttcgcggtctgggcggcttcagctgcagcagttgtgctgatatggttggatagtggagtgaggaagcaagccgattctacggttggcgaggatgcatga

SEQ ID NO: 18508 - protein, 501 aa, Muscodor strobelii
  misc_feature: SGI Peptide ID NO. 566208
  misc_feature (39)..(451): Pfam Id: PF07690 Pfam Desc: Major Facilitator Superfamily
  misc_feature (2)..(492): NCBI GI: 171691783 Blast Desc: protein product [Podospora anserina] gi|170945840|emb|CAP72641.1| protein product [Podospora anserina]
  misc_feature (29)..(485): NCBI GI: 154296677 Blast Desc: BC1G_12366 [Botryotinia fuckeliana B05.10] gi|150843205|gb|EDN18398.1| BC1G_12366 [Botryotinia fuckeliana B05.10]
  misc_feature (16)..(485): NCBI GI: 189197113 Blast Desc: conserved [Pyrenophora tritici-repentis Pt-1C-BFP] gi|187980842|gb|EDU47468.1| conserved [Pyrenophora tritici-repentis Pt-1C-BFP]
  misc_feature (14)..(501): NCBI GI: 119471697 Blast Desc: MFS transporter, [Neosartorya fischeri NRRL 181] gi|119406356|gb|EAW16307.1| MFS transporter, [Neosartorya fischeri NRRL 181]
  misc_feature (19)..(481): NCBI GI: 169775961 Blast Desc: [Aspergillus oryzae RIB40] gi|83771182|dbj|BAE61314.1| protein product [Aspergillus oryzae]
  misc_feature (21)..(496): NCBI GI: 145243000 Blast Desc: An11g00450 [Aspergillus niger] gi|134078716|emb|CAK48278.1| protein product [Aspergillus niger]
  misc_feature (26)..(492): NCBI GI: 242813423 Blast Desc: MFS amine transporter, [Talaromyces stipitatus ATCC 10500] gi|218714504|gb|EED13927.1| MFS amine transporter, [Talaromyces stipitatus ATCC 10500]
  misc_feature (21)..(472): NCBI GI: 256729926 Blast Desc: NECHADRAFT_47268 [Nectria haematococca mpVI 77-13-4]
  misc_feature (26)..(492): NCBI GI: 212544772 Blast Desc: MFS amine transporter, [Penicillium marneffei ATCC 18224] gi|210065509|gb|EEA19603.1| MFS amine transporter, [Penicillium marneffei ATCC 18224]
  misc_feature (17)..(485): NCBI GI: 169772587 Blast Desc: [Aspergillus oryzae RIB40] gi|83768623|dbj|BAE58760.1| protein product [Aspergillus oryzae]
MPWLSQLKQFLSGAKTDPSAKPPYLLSFRSSTLFIVVTVNLAVFTDIFFYGLIAPVLPFALHAQVGIPDSQVQHWVAILLAAYSAALLVASPVSGIYADHTSSRRWPMILGLLALAGSTFLLAFGRTPALFVLGRILQGLTSAVVWSVGCALLVDTLGNNVGVAMGYVNISMSIGLLLSPLIGGSVYHAVGYQPVYYVAFAIVGLDIALRLLMIEKKVAQQWIVEHSSTSGANEGAQDNVEKTTTAVDGSDAAPTDATTPVVPTERDSDEPQVSEANQNKRVRHPVLVLLKSTRLLAALYGVVVESGILLGFDAVLAIFCKNTFGWNSLDVSILFLALFLPGFIAPLAGWLADRYGTKWPSFGGFVVTVPLMISLRFVTQNTLQHKALLAVLLALLGVSLPFSMTPLMAEVSYMIEAEEAKSPGIFGKKGVYGLGYGLFNVAFALGGIVGPVWAGYVVDEAGWGTLTWSFAVWAASAAAVVLIWLDSGVRKQADSTVGEDA

SEQ ID NO: 18509 - DNA, 2161 bp, Muscodor strobelii
  misc_feature: SGI EST ID NO. CUFF.43454.0
  misc_feature: Variant of the nucleotide sequence at SEQ ID NO 18507
ttcatccatcgccaatataaaataattccactggttctccctgccttcgcgaaaagcggtattcgagtatcgaacctcaccaaatcgatccacacgttagtggcatttatagtgattacttgctttgcgagtacgagtcattggagttatagtcgaacatccatgtgtgcaatatgcggtcctgcttacacgaactcattatgaaacatcaagccaagagctacaacctgcatcttcattaccagatcaatcgatgacaagatctttttggagatgccccccaactgcccaaagtgactcaaccggcgtcggctccatccgcacttggcgggcgggcgccgcggacgtcgacaacgggaataacccactattaaatcctcgccaatgacgatatatatctctgaccgtcattttgcatatatgtgctcgcgttgtgttctgcggaattggatgcgaaccatggagcgttgtttgtcttgatcgttagtgatgatatttagcctcttgtattagcattgcgaattcaccatgccgtggttaagccagcttaagcagtttctgtcgggagccaaaacggatccctcagcaaaacctccctacctgctgtcgtttcgatcttcgaccttgtttatagtggtcactgtgaatcttgccgtattcacggatatcttcttctatggcttaattgcgcctgtgcttccattcgcactacatgctcaggtcggaatacctgacagtcaagtacaacactgggtcgccattcttctcgcagcttacagcgcagctctgcttgtcgcaagtccagtttctgggatatatgcagaccacacatcttcaagacgatggcctatgattctgggtctactcgccttggccggctcaacctttctccttgcttttggcaggacgccggccctatttgttttaggtaggatattgcaggggctgacctcggccgtggtttggagtgtgggctgcgctctgttggtcgatactctaggaaataatgttggtgttgctatgggctatgtcaatatctccatgagcattggccttctgctttcacctcttattggcggctcggtctatcatgcagttggataccagccagtgtattacgttgcttttgctatcgtaggtttagacattgcgcttcggcttctgatgatcgagaagaaggtcgctcagcaatggatcgtggaacatagcagcacgtcgggagccaacgagggtgcccaggacaatgtcgagaagaccaccactgcagtcgatggaagcgacgccgcaccgacggatgcgacgacacccgttgttccaacagagcgagactctgacgagccacaagtttctgaggcaaatcaaaataaacgagtgcgccatccagttcttgttcttctaaagtcgaccaggctgctcgccgctctgtatggcgtggtagtagaatcaggaattctgctcggcttcgatgctgtcctcgcaattttttgcaagaacacatttggatggaattcgctagacgtgagcatcctcttcctggcgcttttcctccccggcttcatcgcaccattggcgggctggctagcagacagatacggcaccaaatggccatcgttcggcggtttcgtggtgaccgtgcctctcatgatctctcttcgtttcgtcacacaaaacaccctgcagcacaaagcacttctcgcagtcctcttagccttgctcggtgtttcgctgccattctccatgacgccattaatggcggaggtaagctacatgatcgaggctgaggaagcaaagagtccggggatcttcggaaaaaagggtgtctacggtctaggatatggtctgttcaatgtcgcatttgcattaggaggtatcgtgggacctgtatgggctgggtatgtggttgatgaagccggctggggcactttgacctggagcttcgcggtctgggcggcttcagctgcagcagttgtgctgatatggttggatagtggagtgaggaagcaagccgattctacggttggcgaggatgcatgagcacacagtttacgatgttacgatctctcgaagcacataaaaagaaaatcccccgtgtacatatacgtgtttcgataaaagaagatctctccttggaaactcatgatgcttgcaagtctaatgaatc

SEQ ID NO: 18510 - DNA, 942 bp, Muscodor strobelii
  misc_feature: SGI cDNA ID NO. 566209
  misc_feature: Encodes the peptide sequence at SEQ ID NO 18511
atggctgagaaatcgacgtccgccgacgattttgctaccttgcccatctcgatccccccactaccgtcatatcctgttcccgccacgcactatgtctatctgcgacgaaatacccctaagatagcgactccagatgactctcggagcttatacttagccaacgtgcctacagatagcaccgaggcgcactttcgcgctatctttgcaagtctagtgggcgccggtcgcttcgagagcatcgcctttgaacaggacaagaagagcgcaaacgtctcacacgagcctgcgcaagcggaaagattagcgaatcaccacaaaaagagaaaacgtgaggaccaagagatacagaaccgaaaggaacaggcagctgcagaactgccagagatatggccgcgggcgctgcaccgaagcggcagctcggccgtagctctgcttgccgatgagaagagtgtcgactcagtgttaaaggcgatcaaaaagcttcagaagtcgaaaaagtacccagtgtggggagagggagtcaaagatcgagccccgcccttggggtcatcgtggcttaaagcgcataacaaactatcctatccaggcaatgctacagtgcaggatgctgtagacgcctatttcgttgttttcaaccgcaaagaggaggaagcgattcaactggcaaaacgattgcgcaacgaaccagacgaagatggatttgtcacagtcactcgcggtggccgtagtgctccggcaagacgagacgaggcagaagaatccaaacagaagatgctcaataagcaacagaagaagaaggacgagatgcaagacttctaccgcttccagcatcgcgagagaaagaaggccgagcagctggagctcctcaagaagttcgacgacgacaggaagagggtccaggctatgaaagagaaacgcggcaagttcaggcccgagacgtga

SEQ ID NO: 18511 - protein, 313 aa, Muscodor strobelii
  misc_feature: SGI Peptide ID NO. 566209
  misc_feature (1)..(312): NCBI GI: 85090963 Blast Desc: NCU04571 [Neurospora crassa OR74A] gi|28920049|gb|EAA29434.1| conserved [Neurospora crassa OR74A] gi|28950010|emb|CAD70765.1| conserved [Neurospora crassa]
  misc_feature (1)..(313): NCBI GI: 46137493 Blast Desc: FG10262.1 [Gibberella zeae PH-1]
  misc_feature (1)..(312): NCBI GI: 171691785 Blast Desc: protein product [Podospora anserina] gi|170945841|emb|CAP72642.1| protein product [Podospora anserina]
  misc_feature (6)..(312): NCBI GI: 39974179 Blast Desc: MGG_00764 [Magnaporthe grisea 70-15] gi|145018302|gb|EDK02581.1| MGG_00764 [Magnaporthe grisea 70-15]
  misc_feature (8)..(312): NCBI GI: 156065969 Blast Desc: SS1G_00995 [Sclerotinia sclerotiorum 1980] gi|154691854|gb|EDN91592.1| SS1G_00995 [Sclerotinia sclerotiorum 1980]
  misc_feature (5)..(312): NCBI GI: 154305504 Blast Desc: BC1G_08521 [Botryotinia fuckeliana B05.10] gi|150853308|gb|EDN28500.1| BC1G_08521 [Botryotinia fuckeliana B05.10]
  misc_feature (1)..(312): NCBI GI: 242824538 Blast Desc: ribosomal small subunit assembly protein, [Talaromyces stipitatus ATCC 10500] gi|218713200|gb|EED12625.1| ribosomal small subunit assembly protein, [Talaromyces stipitatus ATCC
  misc_feature (7)..(312): NCBI GI: 225562589 Blast Desc: meiotic recombination protein DMC1 [Ajellomyces capsulatus G186AR]
  misc_feature (7)..(310): NCBI GI: 154279520 Blast Desc: conserved [Ajellomyces capsulatus NAm1] gi|150412516|gb|EDN07903.1| conserved [Ajellomyces capsulatus NAm1]
  misc_feature (7)..(312): NCBI GI: 240280983 Blast Desc: meiotic recombination protein [Ajellomyces capsulatus H143]
MAEKSTSADDFATLPISIPPLPSYPVPATHYVYLRRNTPKIATPDDSRSLYLANVPTDSTEAHFRAIFASLVGAGRFESIAFEQDKKSANVSHEPAQAERLANHHKKRKREDQEIQNRKEQAAAELPEIWPRALHRSGSSAVALLADEKSVDSVLKAIKKLQKSKKYPVWGEGVKDRAPPLGSSWLKAHNKLSYPGNATVQDAVDAYFVVFNRKEEEAIQLAKRLRNEPDEDGFVTVTRGGRSAPARRDEAEESKQKMLNKQQKKKDEMQDFYRFQHRERKKAEQLELLKKFDDDRKRVQAMKEKRGKFRPET

SEQ ID NO: 18512 - DNA, 1825 bp, Muscodor strobelii
  misc_feature: SGI EST ID NO. CUFF.43546.0
  misc_feature: Variant of the nucleotide sequence at SEQ ID NO 18510
cattcttcgactgccactactatatcctcgcaggcttgtcctccttgtacgaaaacgagctgggaagggagtaatcgaatcgcgagattagagaatacgataccggatcacacacaacgacctctagcgaagcgcaatggctgagaaatcgacgtccgccgacgattttgctaccttgcccatctcgatccccccactaccgtcatatcctgttcccgccacgcactatgtctatctgcgacgaaatacccctaagatagcgactccagatgactctcggagcttatacttagccaacgtgcctacagatagcaccgaggcgcactttcgcgctatctttgcaagtctagtgggcgccggtcgcttcgagagcatcgcctttgaacaggacaagaagagcgcaaacgtctcacacgagcctgcgcaagcggaaagattagcgaatcaccacaaaaagagaaaacgtgaggaccaagagatacagaaccgaaaggaacaggcagctgcagaactgccagagatatggccgcgggcgctgcaccgaagcggcagctcggccgtagctctgcttgccgatgagaagagtgtcgactcagtgttaaaggcgatcaaaaagcttcagaagtcgaaaaagtacccagtgtggggagagggagtcaaagatcgagccccgcccttggggtcatcgtggcttaaagcgcataacaaactatcctatccaggcaatgctacagtgcaggatgctgtagacgcctatttcgttgttttcaaccgcaaagaggaggaagcgattcaactggcaaaacgattgcgcaacgaaccagacgaagatggatttgtcacagtcactcgcggtggccgtagtgctccggcaagacgagacgaggcagaagaatccaaacagaagatgctcaataagcaacagaagaagaaggacgagatgcaagacttctaccgcttccagcatcgcgagagaaagaaggccgagcagctggagctcctcaagaagttcgacgacgacaggaagagggtccaggctatgaaagagaaacgcggcaagttcaggcccgagacgtgatatttcgacttcagagctcgagcttcttaactactggttctccgtgtgtgtgatgggatgatatctgccgtcttcctacaagatttcggtgcactgctaagagggtaagtagatctcgcattgattagattcataacccatctgctatatgatgacgtacgcggggccagcaaagtgctgttcagctgagtgactttagagtctcttagttttgagtagtttatgccgaaagaaaccgcgaattcatatcttctcaccttatctgaaagtatcaggacttctctcgtcgtttcaatgccgtattatgtccaatgctaaagagattttacgcaggggctcgaagactagctcagaatgcgttacgtttagtcgcgatcacattgtggtctcggggcaacaggcattcagtaatcctcgagcagccaagcttgcagagctcaaacgcaacgaacccaaattacgagctaataccagtttactcactcacaaggtagaatgttgtctctcaatagcactcgcataatggccaatgattcattctcagatagagacgaccgtgattgtcccgatacgtgataggcgttgagagagagctgggagaagggcggttcttgaaaacaggcagacactacttgttgacgtgtaaatagtctcagtatgagacaagttgctgttgagtactatcaacaccatactgaacataatctttaccaaaagtaaatactaacacccatatatctattgtcc

SEQ ID NO: 18513 - DNA, 3414 bp, Muscodor strobelii
  misc_feature: SGI cDNA ID NO. 566210
  misc_feature: Encodes the peptide sequence at SEQ ID NO 18514
atggggacgatagctgtagggcggtggaagaagtcgataccacgatatccttctggcaagcttgtgagaatatgggttctcagctgcttattgaactttgcgaccctcacattagcgacgccgacctcttatttcccgatcaactcccagctaccgcctgtcgcaagagtcgcaaagcccttttcgttcgtcttctcgccacttaccttctccgccgacacggcgataacatattccctgggcaaaggatccccttcatggttatctcttgatagttcagcgagacgtctttcaggtattccggatgaaaagtctgtgccgaagggcgatactctcgtagggacgcacgttctgctagttgcgacggacgatactggttcgacgacggcaaacgtgacactcgtagtttcgcgaggttcagaacccgcggtccgaataccgctcgaagaacaaatcgagaaatttggcccttattccgcaccaagctcggttctgttatatccatcgaagaaatttgaattcgcgtttgatcagaatacattcggtcccagtgatatcggcgaaaatccaattcctaaaccacgcattagggagagagaaaacgacgagaatggcaacggtggcgacaagggtacaccaagcccgagtttcaactactacgcagtttcaggcgacaatgctcctctgccctcatgggtgaaattcagtgcagagacactctccttttcggggaaaacaccaccttttgaatctttgatacaaccacctcaaacattcgacttccaactcgtggcctcggacgttgtgggattttcatctgtcgctatcgacttttcgatcgttgtcgggacgcatgagctcactgccgacgaaccagtagtcgaaatcaacgcaacgcgtggcacgaagtttacatatactgatcttcccaatatcttgaaaatcgacaagaagcctctcaaggctgatgacatcaactcgattactgcgcaaaacctcccgaaatgggcttcattcgatgagaagaactgggaattgagcggcacgccagactcaacagccaagccagtgaatatcaccatagcagtcgtcgacaagatttctgatacactgaatgtgacactatccatactatttactaaggatctgtttgtgtccgatataccacctatgaatgtcatagcgggtgacaacttctcgctagatctaaagagatatctttttgatcctcagaacactagagtcacgatcaagactgagcctgatagctcctggcttcacattgacggctcgaatatcctttctggaacagtaccgaaaccgcagtctgatgggcttacaggtgaaatacgtttgactctcgacgcgacgcagaaacgtactagtgagcacgaaactaaatatcttcgccttcaggtgaaagtacaatcaactacgtccgcaatcacggccgcaaccacgtcaacgcccgcacccggtccgacatctacttcatcaccgggaacagaaggcggcggctctcatagaaacatgcttggccttctagccctcgcatttcttcctcttctaatcgcgctcatagtaattctgctttgtgtccggaaacgccggcaacaacggcctaagaaactagattttacggatatatcagccccagaaccaggaagcttcatagtcaacagctctgcggacggctcaatgcatgatatgaggaagatgctcgacattggaccagcaggctccatagattcagtgccagcactaccatcgaatctccgagtctctcaaacgacttccaatcctagtatagaaagcgaccatctcactccccacgccatgactatgcactcaggcgcgatcagacctagtaaccagggccagccgattttagaaagcagaaagagctggcttgcaggtcaaaggtcacgtccgtctcctctgaacacagacgaagtgtcacttctatcagacactagcgtcggagaaggccaatcccacattataatcgactctctctcgcaccacccctctcaaacatccaactctacagtccattatggaggacagagaatgctggacgtgcccatatcgtccgagcccttcagtatacaagcaacccctgaactagcctacacagccgggcgaaactacaactacgtctccgacgacgagttaccgccctcagcaggctacgctgcccgtcgtcgctctacacaaaagaataataacggcggactccgggacagattatccaaagcctggaaacgcggctccgcatccagattactagacgacttaaagcggaatagcaacctttcaacatcaacagacataacaacacgtacctcaatcctcacctcaggcttcacggaagaagccacaacaacaagcacacacatcgccaaaccaaccgtaatacacatccccagccgaccaggcgaagcacgacaagtcagtcgacgaacagaagacagtgcaacattcttcggaagtcggacgaaatcccaacgaaactatgggttccaaagttccgtccccgagatgccatctccatctcccttcgactcccctctccccgtacaagaagcaggcttcgtccgggactcaagcgcgcgagaaagcgatacatcatgggatcgcatagcacgcaattcattgggaatagcatacaaagacctagtccgcacctccacccgacgccccgtaaaagtaagcgaaaactggaaaacgcatcacacatcacaagacctaatttcgccctcaaaatggccactgcccactccatacatgaaaacaaccaccaccaccacacgcccgggagtatcagtatcacacagcacagatctacggagtaaatccgaaccaccccaatctcaatctcagtctcaccacgcacaacacaatcaagtcatagaaataaactcagactcagactcagatctccacgtagcacccctagcaacaccaaaatccaaaggaaaacgcaaaatctccccatcttctaattcccaaacctcagcaccttccctccccagacgagtcccagaagtagaagaagagcaattccgcctaagccgtatccgcgaagcacaagcactagccgaattcaaagccatgatgtcagggccaccctctccattaactgcccacccggcgcgcatcttaccggaaactccgcagactccgacgccggctggcagggcgccgttgggtgaacggggaggaaacgggataaggaatgggataaggagtgcggtttcgaagaggagtgctaagagtgtgggcgggaagagtatgggtgggagtgtttgggaagacgatgatgatgcttgggaggatatacgaccccctgagtcgacggttggtggatgggagccggaggagagtgaggggagttttgaggtttttatatag

SEQ ID NO: 18514 - protein, 1137 aa, Muscodor strobelii
  misc_feature: SGI Peptide ID NO. 566210
  misc_feature (77)..(139): Pfam Id: PF05345 Pfam Desc: Ig domain
  misc_feature (21)..(473): NCBI GI: 256732205 Blast Desc: NECHADRAFT_40623 [Nectria haematococca mpVI 77-13-4]
  misc_feature (26)..(580): NCBI GI: 46137443 Blast Desc: FG10237.1 [Gibberella zeae PH-1]
  misc_feature (33)..(563): NCBI GI: 171691699 Blast Desc: protein product [Podospora anserina] gi|170945798|emb|CAP72598.1| protein product [Podospora anserina]
  misc_feature (22)..(577): NCBI GI: 39951415 Blast Desc: MGG_01350 [Magnaporthe grisea 70-15] gi|145020826|gb|EDK04955.1| MGG_01350 [Magnaporthe grisea 70-15]
  misc_feature (37)..(570): NCBI GI: 116179786 Blast Desc: CHGG_00521 [Chaetomium globosum CBS 148.51] gi|88184818|gb|EAQ92286.1| CHGG_00521 [Chaetomium globosum CBS 148.51]
  misc_feature (33)..(560): NCBI GI: 85091320 Blast Desc: NCU04601 [Neurospora crassa OR74A] gi|28920232|gb|EAA29608.1| NCU04601 [Neurospora crassa OR74A] gi|28950041|emb|CAD70796.1| related to Bud10 protein [Neurospora
  misc_feature (22)..(543): NCBI GI: 145239103 Blast Desc: An08g00800 [Aspergillus niger] gi|134076701|emb|CAK45232.1| protein product [Aspergillus niger]
  misc_feature (43)..(538): NCBI GI: 119496127 Blast Desc: transmembrane glycoprotein, [Neosartorya fischeri NRRL 181] gi|119412999|gb|EAW22940.1| transmembrane glycoprotein, [Neosartorya fischeri NRRL 181]
  misc_feature (36)..(536): NCBI GI: 212528114 Blast Desc: transmembrane glycoprotein, [Penicillium marneffei ATCC 18224] gi|210073612|gb|EEA27699.1| transmembrane glycoprotein, [Penicillium marneffei ATCC 18224]
  misc_feature (39)..(537): NCBI GI: 242767268 Blast Desc: transmembrane glycoprotein, [Talaromyces stipitatus ATCC 10500] gi|218724532|gb|EED23949.1| transmembrane glycoprotein, [Talaromyces stipitatus ATCC 10500]
MGTIAVGRWKKSIPRYPSGKLVRIWVLSCLLNFATLTLATPTSYFPINSQLPPVARVAKPFSFVFSPLTFSADTAITYSLGKGSPSWLSLDSSARRLSGIPDEKSVPKGDTLVGTHVLLVATDDTGSTTANVTLVVSRGSEPAVRIPLEEQIEKFGPYSAPSSVLLYPSKKFEFAFDQNTFGPSDIGENPIPKPRIRERENDENGNGGDKGTPSPSFNYYAVSGDNAPLPSWVKFSAETLSFSGKTPPFESLIQPPQTFDFQLVASDVVGFSSVAIDFSIVVGTHELTADEPVVEINATRGTKFTYTDLPNILKIDKKPLKADDINSITAQNLPKWASFDEKNWELSGTPDSTAKPVNITIAVVDKISDTLNVTLSILFTKDLFVSDIPPMNVIAGDNFSLDLKRYLFDPQNTRVTIKTEPDSSWLHIDGSNILSGTVPKPQSDGLTGEIRLTLDATQKRTSEHETKYLRLQVKVQSTTSAITAATTSTPAPGPTSTSSPGTEGGGSHRNMLGLLALAFLPLLIALIVILLCVRKRRQQRPKKLDFTDISAPEPGSFIVNSSADGSMHDMRKMLDIGPAGSIDSVPALPSNLRVSQTTSNPSIESDHLTPHAMTMHSGAIRPSNQGQPILESRKSWLAGQRSRPSPLNTDEVSLLSDTSVGEGQSHIIIDSLSHHPSQTSNSTVHYGGQRMLDVPISSEPFSIQATPELAYTAGRNYNYVSDDELPPSAGYAARRRSTQKNNNGGLRDRLSKAWKRGSASRLLDDLKRNSNLSTSTDITTRTSILTSGFTEEATTTSTHIAKPTVIHIPSRPGEARQVSRRTEDSATFFGSRTKSQRNYGFQSSVPEMPSPSPFDSPLPVQEAGFVRDSSARESDTSWDRIARNSLGIAYKDLVRTSTRRPVKVSENWKTHHTSQDLISPSKWPLPTPYMKTTTTTTRPGVSVSHSTDLRSKSEPPQSQSQSHHAQHNQVIEINSDSDSDLHVAPLATPKSKGKRKISPSSNSQTSAPSLPRRVPEVEEEQFRLSRIREAQALAEFKAMMSGPPSPLTAHPARILPETPQTPTPAGRAPLGERGGNGIRNGIRSAVSKRSAKSVGGKSMGGSVWEDDDDAWEDIRPPESTVGGWEPEESEGSFEVFI

SEQ ID NO: 18515 - DNA, 923 bp, Muscodor strobelii
  misc_feature: SGI EST ID NO. CUFF.43480.0
  misc_feature: Variant of the nucleotide sequence at SEQ ID NO 18513
ccaccacacgcccgggagtatcagtatcacacagcacagatctacggagtaaatccgaaccaccccaatctcaatctcagtctcaccacgcacaacacaatcaagtcatagaaataaactcagactcagactcagatctccacgtagcacccctagcaacaccaaaatccaaaggaaaacgcaaaatctccccatcttctaattcccaaacctcagcaccttccctccccagacgagtcccagaagtagaagaagagcaattccgcctaagccgtatccgcgaagcacaagcactagccgaattcaaagccatgatgtcagggccaccctctccattaactgcccacccggcgcgcatcttaccggaaactccgcagactccgacgccggctggcagggcgccgttgggtgaacggggaggaaacgggataaggaatgggataaggagtgcggtttcgaagaggagtgctaagagtgtgggcgggaagagtatgggtgggagtgtttgggaagacgatgatgatgcttgggaggatatacgaccccctgagtcgacggttggtggatgggagccggaggagagtgaggggagttttgaggtttttatatagaggtttcttttgtttggcggatgagttatatgtaggtcatggcttgggtgtattgcaggatatggtgtggtatttaatttatttagtctactgatgctgagatgctatcttgtgaaaacagctactagacaatattgactaaattatagtgtgtttgtccttattcgaaatacgtacgaaatgcgtgcgcatgacagaattgactaagttactcatggattattccaatatccgttagctctagcgcacttcataaggctgtgtctactatcggacgctcgatactcttctgtgcgtcatggctcagtgaga

SEQ ID NO: 18516 - DNA, 1395 bp, Muscodor strobelii
  misc_feature: SGI cDNA ID NO. 566211
  misc_feature: Encodes the peptide sequence at SEQ ID NO 18517
atgggtcaaaccctctcagagcccgttgtcgagaagacatcggacaaaggcgaggatgaccggttgctgtatggcgtctcggccatgcagggctggcggatcagcatggaagatgctcacaccaccgttctcgacctcttgactccacaaggcgacgaccagaagtcgcatccctcgcgactgtccttctttggcgtttttgatggccacggcggagacaaggtcgcccagtttgccggcaagaacatcaccgatattctcgtcaagcaagacacattcaaagctggcaactacgagcagtccttaaaggattgtttccttgccaccgatcgcgctatacttagcgacccccagtacgaagaggaggtctctggctgcactgcttgctgtggactgatcaactctgacaaaatcttcatcgccaatgctggtgactccagaagtgtcttgggagttaagggtcgcgccaagccactctccttcgaccacaagccgcagaacgaaggcgaaaaggctcgaatcactgctgccggtggcttcgttgattttggtcgcgtcaatggaaaccttgctctgtcccgtgccattggtgacttcgaattcaagaagagcgccgagctggctccggaacagcagatagtcaccgcctatcccgatgtagtcatgcacgagctcagcgatgatgacgagtttttagttattgcgtgtgacggtatttgggattgccagtcctcgcaggcagtgaccgaatttgtgcgaagaggcatcgcagccaagcaagatctagacaagatctgcgagaacatgatggacaactgtctggcctccaactcggagacgggcggcgtggggtgcgacaacatgaccatggtcatcatcgggttcctccgcggcaagtccaaggaggagtggtatgaagaggttgccagccgcgtggccaaaggcgacggcccctgcgcccctccggaatacgcggagttccggggacctggtgttcaccacaactacgacgacagcgacagcggctacgatgtcgacagcacggaaaacaagactcggtctttcggtatcggtgggtacaagggccgcatcatatttcttggagatggtactgaagtgcttacggactcggacgacaccgaaatgttcgacaactcggaggaggacaaagacctggcgagccaggtgtccaagaactcatcggcagacgaggacggcgcgagcggaccgccgccccgagcaccgtcgccgccaccccgcggaaccaagaagccggcggagacgagcaaggcagacagtgatgaaacaacaacgaaaaaagataccccagcagtggatgtggtgaacgaggcagtcaaggacgagggtacaggtgcggactcgacagcggcttag

SEQ ID NO: 18517 - protein, 464 aa, Muscodor strobelii
  misc_feature: SGI Peptide ID NO. 566211
  misc_feature (22)..(282): Pfam Id: PF00481 Pfam Desc: Protein phosphatase 2C
  misc_feature (1)..(442): NCBI GI: 171691697 Blast Desc: protein product [Podospora anserina] gi|170945797|emb|CAP72597.1| protein product [Podospora anserina]
  misc_feature (1)..(402): NCBI GI: 85091318 Blast Desc: NCU04600 [Neurospora crassa OR74A] gi|28920231|gb|EAA29607.1| NCU04600 [Neurospora crassa OR74A] gi|28950040|emb|CAD70795.1| protein phosphatase 2C [Neurospora
  misc_feature (1)..(444): NCBI GI: 116179784 Blast Desc: CHGG_00520 [Chaetomium globosum CBS 148.51] gi|88184817|gb|EAQ92285.1| CHGG_00520 [Chaetomium globosum CBS 148.51]
  misc_feature (1)..(441): NCBI GI: 46137447 Blast Desc: FG10239.1 [Gibberella zeae PH-1]
  misc_feature (1)..(428): NCBI GI: 256732204 Blast Desc: [Nectria haematococca mpVI 77-13-4]
  misc_feature (1)..(396): NCBI GI: 261351870 Blast Desc: protein phosphatase 1G [Verticillium albo-atrum VaMs.102]
  misc_feature (1)..(441): NCBI GI: 33087518 Blast Desc: serine/threonine phosphatase 2C ptc2 [Hypocrea jecorina]
  misc_feature (1)..(430): NCBI GI: 242767278 Blast Desc: protein phosphatase 2C, [Talaromyces stipitatus ATCC 10500] gi|218724534|gb|EED23951.1| protein phosphatase 2C, [Talaromyces stipitatus ATCC 10500]
  misc_feature (1)..(436): NCBI GI: 242767273 Blast Desc: protein phosphatase 2C, [Talaromyces stipitatus ATCC 10500] gi|218724533|gb|EED23950.1| protein phosphatase 2C, [Talaromyces stipitatus ATCC 10500]
  misc_feature (1)..(417): NCBI GI: 156048921 Blast Desc: SS1G_08167 [Sclerotinia sclerotiorum 1980] gi|154692566|gb|EDN92304.1| SS1G_08167 [Sclerotinia sclerotiorum 1980]
  misc_feature (1)..(330): SWISSPROT Homolog: EC 3.1.3.16 Phosphoprotein phosphatase
MGQTLSEPVVEKTSDKGEDDRLLYGVSAMQGWRISMEDAHTTVLDLLTPQGDDQKSHPSRLSFFGVFDGHGGDKVAQFAGKNITDILVKQDTFKAGNYEQSLKDCFLATDRAILSDPQYEEEVSGCTACCGLINSDKIFIANAGDSRSVLGVKGRAKPLSFDHKPQNEGEKARITAAGGFVDFGRVNGNLALSRAIGDFEFKKSAELAPEQQIVTAYPDVVMHELSDDDEFLVIACDGIWDCQSSQAVTEFVRRGIAAKQDLDKICENMMDNCLASNSETGGVGCDNMTMVIIGFLRGKSKEEWYEEVASRVAKGDGPCAPPEYAEFRGPGVHHNYDDSDSGYDVDSTENKTRSFGIGGYKGRIIFLGDGTEVLTDSDDTEMFDNSEEDKDLASQVSKNSSADEDGASGPPPRAPSPPPRGTKKPAETSKADSDETTTKKDTPAVDVVNEAVKDEGTGADSTAA

SEQ ID NO: 18518 - DNA, 3105 bp, Muscodor strobelii
  misc_feature: SGI EST ID NO. CUFF.43830.0
  misc_feature: Variant of the nucleotide sequence at SEQ ID NO 18516
cttgccctgcatttgatccttcgccaaccccgccttcgtctgcggatggatggaatcaatgcaatacacgtacccagatcaatactccgtagaaagaaccttgcctctgtcacgataccactgtccactgtccactgtctgctctactgcgcacgccctaacccaagaagcctctgtgatgaccacattgaccctgcagccacagttgattaccatcctgactgcctgaacatacctgattactgtcgcccctgcccgcatcattgtatgtcaaccggttgccctggctgctaccttgcgaccttgtctggcttggtgttgtattttcttcctcagtcttctccgccgctctgcacagatcggacagaaaagttgagagacatacaccatccacatacattcaggtcattctcgatattctttgataaagtcgtttctagttgctgctgcatgctatatacatgtatacgtactctacttgtcttagcactcactcgtagcccgcggctgacccgttttctctctcgtcggttgtcgtggttcttgtctccggttcctgctagctcctgcgctctgctcctgtagatacacgcagatatcggtagtctccagactatcaccacccgatcttttcttcgcgcgacaccctctctatacctacccacctgctcactcactcacactcactctcctacacctctcctccgcacaacacaacacaacacaacacactcgcggccagcacattcctctcgcctctcctctccgcgtgccatcgtctgcctttgccgctgctgctgctgttgtcgttggcctgtccccaccgtgccaccaccccggctcgcgagctttgtcaccacgtctctctcccaccggcgacccaaccccaaccggcctgcccctccttcgcggcaacccactcgtcctccaacccgcccgccacgacatcaccactctaacgatctctgccgacctctgcgtccttgttcgtcatgggtcaaaccctctcagagcccgttgtcgagaagacatcggacaaaggcgaggatgaccggttgctgtatggcgtctcggccatgcagggctggcggatcagcatggaagatgctcacaccaccgttctcgacctcttgactccacaaggcgacgaccagaagtcgcatccctcgcgactgtccttctttggcgtttttgatggccacggcggagacaaggtcgcccagtttgccggcaagaacatcaccgatattctcgtcaagcaagacacattcaaagctggcaactacgagcagtccttaaaggattgtttccttgccaccgatcgcgctatacttagcgacccccagtacgaagaggaggtctctggctgcactgcttgctgtggactgatcaactctgacaaaatcttcatcgccaatgctggtgactccagaagtgtcttgggagttaagggtcgcgccaagccactctccttcgaccacaagccgcagaacgaaggcgaaaaggctcgaatcactgctgccggtggcttcgttgattttggtcgcgtcaatggaaaccttgctctgtcccgtgccattggtgacttcgaattcaagaagagcgccgagctggctccggaacagcagatagtcaccgcctatcccgatgtagtcatgcacgagctcagcgatgatgacgagtttttagttattgcgtgtgacggtatttgggattgccagtcctcgcaggcagtgaccgaatttgtgcgaagaggcatcgcagccaagcaagatctagacaagatctgcgagaacatgatggacaactgtctggcctccaactcggagacgggcggcgtggggtgcgacaacatgaccatggtcatcatcgggttcctccgcggcaagtccaaggaggagtggtatgaagaggttgccagccgcgtggccaaaggcgacggcccctgcgcccctccggaatacggtatgccttcttaagcgtccgggatgtgatctcctggatcatcatgcaactgactcgcggtgcctcagcggagttccggggacctggtgttcaccacaactacgacgacagcgacagcggctacgatgtcgacagcacggaaaacaagactcggtctttcggtatcggtgggtacaagggccgcatcatatttcttggagatggtactgaagtgcttacggactcggacgacaccgaaatgttcgacaactcggaggaggacaaagacctggcgagccaggtgtccaagaactcatcggcagacgaggacggcgcgagcggaccgccgccccgagcaccgtcgccgccaccccgcggaaccaagaagccggcggagacgagcaaggcagacagtgatgaaacaacaacgaaaaaagataccccagcagtggatgtggtgaacgaggcagtcaaggacgagggtacaggtgcggactcgacagcggcttagtttgacaggtaggcgcgatgctaccggcggcggcgtccaggacggctccgccgagatatttcgttacatggtgtggagtcaaaggacgatgtgcactgaatgattagacgcaacgaggctacagatataggagtctatggtattcattggacgctgccagtacagagaccacacgggaccctttgcattgtgacatggaccttggcgtctctatgaatccgaatcgacggacggctgttatgccttatcgacggacggatgttggtggtgtgggctgcggccggagtgcagaatgagcgtcaagccgatccgagtggacactgtcgtctggagagaagacacagcatgatttccctaaaatcccagcccagctgtgggaggggttttgtgagtagctttttgcgatatcttcaggtgtctggtagcatacggacgggagtcatgtatcaaaaacgagttgacatattctacctggttcccctatctcattcatggtcaaatgccggctaagtgcgcatagttgggttgggcgaagttttgtgtgcaacgtaacgtggtaacaaactgttgacgcccccggaggtaagtatgacgtctgttacttgccttcagcaattgcccagttaatttatttgaaaacgcgaatcgtc

SEQ ID NO: 18519 - DNA, 2346 bp, Muscodor strobelii
  misc_feature: SGI cDNA ID NO. 566212
  misc_feature: Reduced expression when VOC is produced
  misc_feature: Encodes the peptide sequence at SEQ ID NO 18520
atgtcccttcgactcgcttcgctccgtggcgcccagtcgtaccgcggcaatggccttgttcgacagcccagatggcaaattctgtgtaatgctgggccatgtttgcagcgatggctcgtctcaacctcaacctcgacctcgaccgcaaccactgctgtgcccaacccgtcagagtcccaggccgtcgacacgagcaatgctatcactactgaagtcgaaccaatcgtgagacggctgcctttcgtgatcagagccaggaccaggaaatctgcaataccacaaaaacacgagctgaaaccaaaagtacaggcggccaaggcacatctgaagtcatctaagtcgtcacaacgcgtcctaatcaagcagccagtcgactatgccgccccatacgcacgcaagcaaagctatcgcaaacacgacaagagcgttggaaaacaggcatggaatgccgcggtccgccagaccggccccaaagctaccacgcccatgtccacctggcaggagacgctcgacttcatgcggcgacacacgcccaagtacggcgaatctctggatctcaagatcgccgtcggccgcgactcggctgatcacgcgctccagacgctctctcagctcgacaccaacctctaccagatacagcggagacaccagtgcagaatctccatatactcgggccgccttgcccacgaaaatctggtcttcagtctgtccggccccaccgtctcggtgcgcaatgccctgctagaggtcgtaggcgctgttggcaaggttgccgctatcaggatccacgatgccaacttgaacctctcacccggagatctgccccaaaccctcagtccaggctcagaacctgtcgccatctaccatatcgatggggcgggaagaggagctcccggcccgtcgaatgaccaaacactcaatatattcagccacaatagcttcagaatagtatcgagcgaggtggaacctagtcaagatctgtacagcttggagatgcgtgccgatgagattcatcttcctaccgagtggtcgcggttcgaattcgtcaggtacgtcaccaaattgacctgtggcagagtacctaggcacttgcatgcgtctttgtatccctcaggccccgaccacgaccacgatgcgacggtcgcacgactacttgttaaactcttcgacacggacgacttgcggcctcatatgacggcaacctcactcaggctcgcacttcatttcctgaccgcgccagggcctcgattcagacctgaggtccgggccatctgggctcaagccatcaagttacaagtgctcttagatgccccggttttttatcagttcgttcgatcggcttcccacgctggcgacctcgaaggattctatgatattctacgtgaaatggttcgaagaggtcattacatgcagccagatacctggagggctttcctgctaatgattcacgaccctggggccaagcaacaaatcataactaaatggaaatcgatgggtgcatctcatctccaagtaggctacatggacatggtgagacagatcgtcttgtcagaattccaagccgtccaggaccatcaaatgtctgtggagcaatttatagaaaaacaagatcatgactacggtcccaactggctcaataccatgacagccaatcagctcatctatcaactgggatctcaaggcaacctgaaagaatgctacgaagtgctagatgcgatgggagaaggcatcagagaggcagccgaaccaaatatcttcacactcggtaccatgttgacacacaccaggtccatcttgggcaaggccgacatagtcgaaagattctccacaattgaacctgacgagacctgttataacttgctgttccaagcgccgttccgtcgaggtttgcccaacactctaagagtggtctggcgttatgccgtattttccgggaatgcctcgtcacacatactctatagcctatccaaactgatgagaaacagtctcgacgaaagtctcgacggcggccggctgagagccctcctcctgtctttccaggacacgatcttgggtcgcgatgagctcgcggccgcaagacttgctcccgatgccggccctaagtggctgatgaacaaatatctcctcgacgcgggggataagagaccatctgtcccactcgcgactatgctgagtgaggcttacaagatggatatggagattcgaacactcttcagagaaggccgggaaataacgcccgaaatgcgggaggagctcacgattgagattcctatggacatcccctcgctaccggaggaacagctcaagagggggtatattgttagaaagatatataaacattactga

SEQ ID NO: 18520 - protein, 781 aa, Muscodor strobelii
  misc_feature: SGI Peptide ID NO. 566212
  misc_feature (105)..(673): NCBI GI: 85091336 Blast Desc: NCU04609 [Neurospora crassa OR74A] gi|21622502|emb|CAD37049.1| [Neurospora crassa] gi|28920240|gb|EAA29616.1| [Neurospora crassa OR74A]
  misc_feature (109)..(641): NCBI GI: 116179794 Blast Desc: CHGG_00525 [Chaetomium globosum CBS 148.51] gi|88184822|gb|EAQ92290.1| CHGG_00525 [Chaetomium globosum CBS 148.51]
  misc_feature (320)..(654): NCBI GI: 171691769 Blast Desc: protein product [Podospora anserina] gi|170945833|emb|CAP72634.1| protein product [Podospora anserina]
  misc_feature (332)..(663): NCBI GI: 225679042 Blast Desc: conserved [Paracoccidioides brasiliensis Pb03]
  misc_feature (107)..(659): NCBI GI: 256731810 Blast Desc: NECHADRAFT_69568 [Nectria haematococca mpVI 77-13-4]
  misc_feature (133)..(679): NCBI GI: 39951419 Blast Desc: MGG_01352 [Magnaporthe grisea 70-15] gi|145020824|gb|EDK04953.1| MGG_01352 [Magnaporthe grisea 70-15]
  misc_feature (340)..(563): NCBI GI: 261351869 Blast Desc: conserved [Verticillium albo-atrum VaMs.102]
  misc_feature (43)..(659): NCBI GI: 46137449 Blast Desc: FG10240.1 [Gibberella zeae PH-1]
  misc_feature (208)..(671): NCBI GI: 239610953 Blast Desc: conserved [Ajellomyces dermatitidis ER-3]
  misc_feature (208)..(671): NCBI GI: 261206158 Blast Desc: conserved [Ajellomyces dermatitidis SLH14081] gi|239592875|gb|EEQ75456.1| conserved [Ajellomyces dermatitidis SLH14081]
  misc_feature: Useful for introducing or modulating the production of volatile compounds
MSLRLASLRGAQSYRGNGLVRQPRWQILCNAGPCLQRWLVSTSTSTSTATTAVPNPSESQAVDTSNAITTEVEPIVRRLPFVIRARTRKSAIPQKHELKPKVQAAKAHLKSSKSSQRVLIKQPVDYAAPYARKQSYRKHDKSVGKQAWNAAVRQTGPKATTPMSTWQETLDFMRRHTPKYGESLDLKIAVGRDSADHALQTLSQLDTNLYQIQRRHQCRISIYSGRLAHENLVFSLSGPTVSVRNALLEVVGAVGKVAAIRIHDANLNLSPGDLPQTLSPGSEPVAIYHIDGAGRGAPGPSNDQTLNIFSHNSFRIVSSEVEPSQDLYSLEMRADEIHLPTEWSRFEFVRYVTKLTCGRVPRHLHASLYPSGPDHDHDATVARLLVKLFDTDDLRPHMTATSLRLALHFLTAPGPRFRPEVRAIWAQAIKLQVLLDAPVFYQFVRSASHAGDLEGFYDILREMVRRGHYMQPDTWRAFLLMIHDPGAKQQIITKWKSMGASHLQVGYMDMVRQIVLSEFQAVQDHQMSVEQFIEKQDHDYGPNWLNTMTANQLIYQLGSQGNLKECYEVLDAMGEGIREAAEPNIFTLGTMLTHTRSILGKADIVERFSTIEPDETCYNLLFQAPFRRGLPNTLRVVWRYAVFSGNASSHILYSLSKLMRNSLDESLDGGRLRALLLSFQDTILGRDELAAARLAPDAGPKWLMNKYLLDAGDKRPSVPLATMLSEAYKMDMEIRTLFREGREITPEMREELTIEIPMDIPSLPEEQLKRGYIVRKIYKHY

SEQ ID NO: 18521 - DNA, 2854 bp, Muscodor strobelii
  misc_feature: SGI EST ID NO. CUFF.43833.0
  misc_feature: Variant of the nucleotide sequence at SEQ ID NO 18519
ccgtagataaaagttttgcggtgccatgtcattcccgactcgtcccgtcaggagcagggagacgctggcctgtcgcgccaagaattttaggtacatgaagctacctagcgttacatacatatgcctgtcgaccctgctcgcttgtgtcgcaaactgcgttttctacgccgaagatacgaatttacttccttggaaaagtgcatgcacatccttcttttcggtgcctagccgagcaagcttgtgctatcatgccgacgtgataactcatgtcccttcgactcgcttcgctccgtggcgcccagtcgtaccgcggcaatggccttgttcgacagcccagatggcaaattctgtgtaatgctgggccatgtttgcagcgatggctcgtctcaacctcaacctcgacctcgaccgcaaccactgctgtgcccaacccgtcagagtcccaggccgtcgacacgagcaatgctatcactactgaagtcgaaccaatcgtgagacggctgcctttcgtgatcagagccaggaccaggaaatctgcaataccacaaaaacacgagctgaaaccaaaagtacaggcggccaaggcacatctgaagtcatctaagtcgtcacaacgcgtcctaatcaagcagccagtcgactatgccgccccatacgcacgcaagcaaagctatcgcaaacacgacaagagcgttggaaaacaggcatggaatgccgcggtccgccagaccggccccaaagctaccacgcccatgtccacctggcaggagacgctcgacttcatgcggcgacacacgcccaagtacggcgaatctctggatctcaagatcgccgtcggccgcgactcggctgatcacgcgctccagacgctctctcagctcgacaccaacctctaccagatacagcggagacaccagtgcagaatctccatatactcgggccgccttgcccacgaaaatctggtcttcagtctgtccggccccaccgtctcggtgcgcaatgccctgctagaggtcgtaggcgctgttggcaaggttgccgctatcaggatccacgatgccaacttgaacctctcacccggagatctgccccaaaccctcagtccaggctcagaacctgtcgccatctaccatatcgatggggcgggaagaggagctcccggcccgtcgaatgaccaaacactcaatatattcagccacaatagcttcagaatagtatcgagcgaggtggaacctagtcaagatctgtacagcttggagatgcgtgccgatgagattcatcttcctaccgagtggtcgcggttcgaattcgtcaggtacgtcaccaaattgacctgtggcagagtacctaggcacttgcatgcgtctttgtatccctcaggccccgaccacgaccacgatgcgacggtcgcacgactacttgttaaactcttcgacacggacgacttgcggcctcatatgacggcaacctcactcaggctcgcacttcatttcctgaccgcgccagggcctcgattcagacctgaggtccgggccatctgggctcaagccatcaagttacaagtgctcttagatgccccggttttttatcagttcgttcgatcggcttcccacgctggcgacctcgaaggattctatgatattctacgtgaaatggttcgaagaggtcattacatgcagccagatacctggagggctttcctgctaatgattcacgaccctggggccaagcaacaaatcataactaaatggaaatcgatgggtgcatctcatctccaagtaggctacatggacatggtgagacagatcgtcttgtcagaattccaagccgtccaggaccatcaaatgtctgtggagcaatttatagaaaaacaagatcatgactacggtcccaactggctcaataccatgacagccaatcagctcatctatcaactgggatctcaaggcaacctgaaagaatgctacgaagtgctagatgcgatgggagaaggcatcagagaggcagccgaaccaaatatcttcacactcggtaccatgttgacacacaccaggtccatcttgggcaaggccgacatagtcgaaagattctccacaattgaacctgacgagacctgttataacttgctgttccaagcgccgttccgtcgaggtttgcccaacactctaagagtggtctggcgttatgccgtattttccgggaatgcctcgtcacacatactctatagcctatccaaactgatgagaaacagtctcgacgaaagtctcgacggcggccggctgagagccctcctcctgtctttccaggacacgatcttgggtcgcgatgagctcgcggccgcaagacttgctcccgatgccggccctaagtggctgatgaacaaatatctcctcgacgcgggggataagagaccatctgtcccactcgcgactatgctgagtgaggcttacaagatggatatggagattcgaacactcttcagagaaggccgggaaataacgcccgaaatgcgggaggagctcacgattgagattcctatggacatcccctcgctaccggaggaacagctcaagagggggtatattgttagaaagatatataaacattactgaacacgctcacatgtttctgtctattgcggcagagtgtatatactatactctcttttcctgtaattatatggggatatacttagatacggggaggactcagtgcccatggtatgggtgcaggcgtatgtggagttgtgtatatcaaaagcattgtatagtatgggtattgtacattaaaatacttgatgacgtctaccacgatcatccaactccgtttctctcccaaaatggttattcttatc

SEQ ID NO: 18522 - DNA, 1014 bp, Muscodor strobelii
  misc_feature: SGI cDNA ID NO. 566213
  misc_feature: Encodes the peptide sequence at SEQ ID NO 18523
atgatatctgtcaaaataatagccaagaaaatgatgagctggttactgaaccttcccttggaaccaaatgatatcggagggctttattatcttgcctttaacgcggttctcgacggcagcacgcgaacattgcgatttggtgatgttttgggtcgacatcccaccttgttacaactgagtactggagagtggaactcaccggagcccattttcatcaatcggcgggatgtggtaggagaaagggcaatcgccaccgatgatcctgagcttttagccccagtgaacgatgatcattccgagtcaaatgaggttctccttagctgcttcccacctgcatatgatttgatggagataatcaagcctaattgcgcctgtttcaactgcggagagaatggttctattgatgcctcaaagcccggatgtctccgctattatgccttcgtagaactgttcactctgattgcgcatggtattgtcgatggccttggagcacaagacgtgcctgggctgccacatccagaagaagtcgtacagtctatcaagagaatctttcaaaggttattgtcagatcgtgcggcggtggtttttgatgacttcgtggctttgtttggtattgtggtgtgtggcatgccgttcacgttgttcgaccatgaggaggatacgagcgatataaccccttctagtggtacctatcccggggcctcgtcaatagttgccgttcaaaacggtgctcttgtagcggtcgtaccatggatcgatctcggatcgaaagttagtctcaagggatgtttcattttacacaccttcgaaggttgcttcgatgggattcatgaggaaatagccatactacggagcgaacgtagcacagaactcaatgatagcccgggggctcgcaagacatttgaagaaattagattctcggatgacgaagaacttcgatgttcggaaggagaagaagattcgacagagcaccatagttcgaatgctatcttccgcgtgagcactatcgactaa

SEQ ID NO: 18523 - protein, 337 aa, Muscodor strobelii
  misc_feature: SGI Peptide ID NO. 566213
  misc_feature (6)..(271): NCBI GI: 170940180 Blast Desc: protein product [Podospora anserina]
MISVKIIAKKMMSWLLNLPLEPNDIGGLYYLAFNAVLDGSTRTLRFGDVLGRHPTLLQLSTGEWNSPEPIFINRRDVVGERAIATDDPELLAPVNDDHSESNEVLLSCFPPAYDLMEIIKPNCACFNCGENGSIDASKPGCLRYYAFVELFTLIAHGIVDGLGAQDVPGLPHPEEVVQSIKRIFQRLLSDRAAVVFDDFVALFGIVVCGMPFTLFDHEEDTSDITPSSGTYPGASSIVAVQNGALVAVVPWIDLGSKVSLKGCFILHTFEGCFDGIHEEIAILRSERSTELNDSPGARKTFEEIRFSDDEELRCSEGEEDSTEHHSSNAIFRVSTID

SEQ ID NO: 18524 - DNA, 78 bp, Muscodor strobelii
  misc_feature: SGI EST ID NO. CUFF.43498.0
  misc_feature: Variant of the nucleotide sequence at SEQ ID NO 18522
cacgagcattcgagtttcaaccctctaggacttatccccacccctccattaagcaggtcaaacatgatatctgtcaaa

SEQ ID NO: 18525 - DNA, 6474 bp, Muscodor strobelii
  misc_feature: SGI cDNA ID NO. 566214
  misc_feature: Encodes the peptide sequence at SEQ ID NO 18526
atgcagatcccacagtctctcgagccatggccgtcaacgaaagggacaagaaaagctgtcgttaataattttggtagcggaggcacaaatgcccaatgtgtgctggagtccgtagagactttctctcctcttacgaatggtcagctctatattgtccttctgctgtctagctacaagtatgagaaaccgaatggaaatactgtttattcgaatacaaatcatagttctgcagatattatgaaactatctgctcgctccaagtactctgccagcaaaggattatctgatctcctccagtggttaaaacgacgaggagacgattctctgccagttgacttggatgatctttcatacaccttatccgcacggagatcgcatttccagtggcgatctggtgtcttagctccagacttgaactccttgatcgctaagttagagcgaggtgaagtcgtgccctctaaatcttcatcacgtcggacgaatgtctttgtattcactggtcaaggtgcccaatatttccagatgggacatgaactcataggtaaagaagcaatatttaccgaatctgttcagaagtccgatgctgtacttagagagcttggcgcctcatggagtctgattgacgaactttgcaaagaagagtcgcaaagtctactcaataagagtgcctatggtcaaccagctaccaccgctatccaagtggcgatagttgatatgcttagaaattggggtgttagcccatcggcagtagttggtcattctagcggtgaggttgcggccgcgtatgcagcgggtatactcacacatgaaactgcaatcagagttgctttcgagcgcagctttctagcaagcgcagctattaaaaaaagtaaacatcgaggagcaatgatggccgtcggtctaggtgcaactgaagtgcaagagatcatcgattctttgcctcacaacgatgcacaagttatagttgcttgtattaacagtccatcaagtaccacagtctccggcgatgagccggccgtctctatgctacaggacaaattacaggaaaacggaacatttgcccgtcttctgaaagtggacactgcttatcattcgcaccatatgcaagctgtcggttacgagtatttggctcgactgggagaagtcccatgtgaatctttcagcaatagtttacccgtgcgtttcttctcgtccgtctccggcgaagaaaaactggacggtttcggggcttcatactgggttgacaatcttgtctctccggttaagttttcccagacgatagaatctctgtgccaccgtatgggaacccaagatcccttcaacttcatcgaaattggcccacacaaggcactgagcggacccattcgacagtcgatagctcatatcaatagtgacgggtctctcgcgtatcgttacattccgacactcgtgcgaggccaagatgactatatgtcaatgatggatacaggatctgctctttattcatcaggaacaaggatcaagattgatacggtcgcatctctaggattctcagggaaactgaaacgattcgtaaaggacttacctccttatgcctgggaccatactcagatttactggcgcgagccgcgcctgaaccgcgactaccgattcaggccacaccctcaccacgacttgttgggattgaagactctcacgtctacagtcactgaccctagctggcgtataatgctcaacatacagtcattgccctggttgagagaccacgtgatagatcaattcatattatttccgggcgcaggttatatgactatggcaattcaagctgtaacgcaacttacgcatgatcaacaatctaatctggaaatcaaatcctaccgtttaacaaacgtagctttcaagaggacgttgtctattcccgaagatcctacaggcgtcgaagttattctaaatctcagacaatctgagactcgtcatggatacgaattcttcgtatcgagtaacccggatggcgataaatggttagaacactgcagtggacatattgctatcgaggctcagactgagcttgacgaagtcgagggtggccgggccgcagaagtacggttgatgaattatcgcaacagagttacagatgctcgtgcctcatgtagcgaactagtcaccaaagaggagctttatactgaactcacaaaggccggaaatcattatgggtccaatttcagtctcatcgaggacgtcaggatgtcgacttctgaagccaaatctctgggatccttggtgctgcctgacttcagagcggcaatgccctcagggttcatgcagccgcatgtcgtacatcccgcagttctagatgcactattacatatcggttgcttattattccagcgcaatgagaagactggcacaggttctgtggttcctaccttctttggggaggttgtcatctcatcagacatcccgagcaatccaggcgaaaggtttgaagttctttccgcccttcagacattagtaaagacatcgtcgcgtttcgaggtcgcggctttgacagttgacggcgagtcaatattacccgtgatcactatgtccggtggcgagtttcgtctaatcggcgactctcaagcagactcatcaggcgatgggagtccacaaagtgtatttgcagtgcagcacggcttggatgtgtcttcaataaccgcggcgcatcttgaatctatgaatgtgtgccaccaggctgatgaagcaggtaccggcactaaggagaaaatcttcctcctacaacaagcaaccgcttattacattcacagggccgtccgagacattgaagagggcaatctgaaagtcaaagacgagtacacgagccaatttgcctggatgtcgcagtatgcaacttccgaagaatgcgagcaacatctttctgcgagtttttttgcttcaaaagaaatcattcaagagaagctgtctaatctcggagctgaaggtgatctaacaacaatgattggaagtcatttgacatcaattctcactggagagatggactctgcgagtctattccaagatgcacatattctggaaaagctggacaatttcgattcttcaacccgtactaacgcttacatggccgaatatgtgaagcatctcacattccagcgtcgtgatcttcgcattcttgaaatgggcacggacactggcgcctcgacactggctttgctgcagcaatgcagtccgacaagggcaccattctgttcagaatacgttttaaccaacacttctgcagatttgctcggaaatgttcaagatcataagctcaaagattggaaacaactgataaccttcaaaattctggatcttgaaacggacccgatttggcagggcttcgaagagcatgcttacgatcttgtcctcgtcccgaacgcacttggtgctacgaagtcgagtaagaactatttaggtaacattcacaagttactaaagactggcggtaccctcggtctctgcgagccaatggcatctagcacttggctgaacatgatttctaccgttttcctgcatgccaatgggccattccagaccgttatacagtggcatgatgatctccttaaatcgtcattctccggtggagaccaagtagcatacgactttcctcagccagactcccaatctgcttttcttctttccacatcattagccaaatcactgatgaatggcaatggacatcatcatgcaagcaaaaagctcaagatcatctatacctctgccgaagccgagtcatcggggcagctcgtcattaccgatctatacgaaaatctcgaagagaatgacttcgagattacaattcagcaatggcagccaggcaacgtggaagatatcaccgacgaaataacttacatcgttatcgagtcatcttctcatcctttcctaatccatgcatcgtccacacaattcgaggagctaatgtcgatcatgacaaagagctcatcagtatactggatgacactctctccaaatcttggacctctgcctaagttcacgacgtcaccaagccatggtgtgatcctggggttggcacgttcagcggtgaatgaaactggtggtcttaagttcgtcactatcgacgtacaagatgatcttgaaactggaaatgccaaacatgtggcgaagacactttcgaaactaattgcttccaagcttctggagaagagcacccagacctcagaagacatcgagtacgtcttgaagggaggaaagcttcacataagtagggtcgtaccagagatccaactcgcgaacacattttcaaacagcggtgccaacgagtcgaagatagaagacgcactattccaccaaaccgatcgcccactggtgatgcaactatctcaaccaggaatattgagcagtatgcggttcgttgacaacaagacaatagcgcaagacgatgaaatcgatcctgacgatgttgagattgagatgcacgccttatcaatgaacttcaaagacgtatacgtcgctttaggtcagagtgaagccactcagaccatggccggcgagggagcaggtttggtcactcgggtcggatctaacttcgccaacactttctctgcaggccaaagagtcacagtcactacaagcaggtcaccatatgcaaatcggacgagggcaaacggaaaccttgtataccccataccatcttcaatgtcattcaacgacgcctcgacgatcccagtatcttttgtgacagcatgctacggccttatcgacatcgcgagactaagcaagggccagagtgttctcatccacgcagcatctggagcacttggtcaagccgccattcaaatcgcccgacatgttggagccacgatcttcgctacagttggaagtaccgccaaactccagcttttgactgaaaagttcggcatcccagaaagccacatcttcagtacgcggacaacagattttaaaatcaacattatggagatgacgaacgggaatggtgtcgatgtagccctaaactcgttgtcaggagatgctctacgagcgacttgggactgtattgcacccctaggaacatttgttgaagtcggcaaaacagatatctacaacaaggcaactctagatatggagcacttcgacaaaaatgtcacattcgcttcggtcgatctgaaattgctttcagagcgtcgtccaaagactgttcagggtctgttaagcagaatcttcgaaggcatcgcggctggtcattttgcacctttgccagtgaacgcgatgcctatctcagagctagaatctgcgttcagattcattcaatcccgcaagcacacagggaagatcgtgctcgaggctggccccgaggccatggtcaaagcgactgtacccgagctccgtctacatcgagacggcacatatgtcattgcaggtggtctaggtagtatcggcagacacctttgcaagcatctacaaattcacggagcaagacatattgctcttttgacgcgacgagactttgacgtaacgtctagaacacatctcgagcgggagctcactgaaatacctgacgcgaaggtcgaaatcttgactggtgatgctatgaatgcggaggaagtagctcaagccgcaaagaaactcaacgccgaatcgcctgtgaaaggcgtgatacaggctgcgatggtagtaagagaccacactctagcccaaatgtcactctcagaattccacgcagcacttggggtaaaatatcacgggaccctcaatctcgcctctgccttcacttccccgaatctcgacttcttcgtctgtctctcatcagtgaccggaatcatgggactcccaggtgtatcgaactacgtagcaggaaacgtatttgaagacacgttcgtcgagagccaggtctctcacggaaacacacaattcttttctatcaacttaccattagtctccgaaacagagctgaagagcatgaaacaaactgctgggctagtcacaagacatggcagcgaggtaatgtctatcgacgccgtgatcccggttatcgactatatcatctctggacaagcacgcaaagacgggaataaccgtatcgttatgggtctttctgcttcctcaatcgcataccgcgcttccaacggcgtggaagttccgcctctgctctcacatctctatgccatgagtcaacagggtgcccttactgctgctgccggttccgagatacgattagaagactctatcgcgcaagcatccactaaagaagctgccgaagaactaatcgtgtcagcaattcgtcagaaagtatctggtctaatacttatcgatgcaaacgaaatcagtttggatcaaccgatggcagtgttgggactagattctctagttgccattgagttgaagaattggttggcaagaacgctccaggctcctatgcagactacggatatcatggatgccgccagtttgaagtcatttgccacgcttgttgcgcagaaatcggctctggtgaccaactga

SEQ ID NO: 18526 - protein, 2157 aa, Muscodor strobelii
  misc_feature: SGI Peptide ID NO. 566214
  misc_feature (162)..(500): Pfam Id: PF00698 Pfam Desc: Acyl transferase domain
  misc_feature (1792)..(1959): Pfam Id: PF00106 Pfam Desc: short chain dehydrogenase
  misc_feature (1585)..(1733): Pfam Id: PF00107 Pfam Desc: Zinc-binding dehydrogenase
  misc_feature (1792)..(1973): Pfam Id: PF08659 Pfam Desc: KR domain
  misc_feature (162)..(482): Pfam Id: PF00698 Pfam Desc: Acyl transferase domain
  misc_feature (1050)..(1156): Pfam Id: PF08242 Pfam Desc: Methyltransferase domain
  misc_feature (1)..(2156): NCBI GI: 156053511 Blast Desc: SS1G_06923 [Sclerotinia sclerotiorum 1980] gi|154704701|gb|EDO04440.1| SS1G_06923 [Sclerotinia sclerotiorum 1980]
  misc_feature (15)..(2156): NCBI GI: 154319269 Blast Desc: BC1G_02586 [Botryotinia fuckeliana B05.10] gi|150857017|gb|EDN32209.1| BC1G_02586 [Botryotinia fuckeliana B05.10]
  misc_feature (15)..(2154): NCBI GI: 212543173 Blast Desc: polyketide synthase, [Penicillium marneffei ATCC 18224] gi|210066648|gb|EEA20741.1| polyketide synthase, [Penicillium marneffei ATCC 18224]
  misc_feature (15)..(1884): NCBI GI: 40787328 Blast Desc: polyketide synthase [Botryotinia fuckeliana]
  misc_feature (1)..(2157): NCBI GI: 46122833 Blast Desc: FG05794.1 [Gibberella zeae PH-1]
  misc_feature (1)..(2157): NCBI GI: 189200591 Blast Desc: mycocerosic acid synthase [Pyrenophora tritici-repentis Pt-1C-BFP] gi|187983731|gb|EDU49219.1| mycocerosic acid synthase [Pyrenophora tritici-repentis
  misc_feature (1)..(1884): NCBI GI: 256723827 Blast Desc: NECHADRAFT_37058 [Nectria haematococca mpVI 77-13-4]
  misc_feature (1)..(2155): NCBI GI: 242796603 Blast Desc: polyketide synthase, [Talaromyces stipitatus ATCC 10500] gi|218719421|gb|EED18841.1| polyketide synthase, [Talaromyces stipitatus ATCC 10500]
  misc_feature (1)..(2155): NCBI GI: 171688048 Blast Desc: protein product [Podospora anserina] gi|170943986|emb|CAP70096.1| protein product [Podospora anserina]
  misc_feature (1)..(2152): NCBI GI: 242809371 Blast Desc: polyketide synthase, [Talaromyces stipitatus ATCC 10500] gi|218715980|gb|EED15402.1| polyketide synthase, [Talaromyces stipitatus ATCC 10500]
  misc_feature: Useful for fungicidal and/or biocontrol applications
MQIPQSLEPWPSTKGTRKAVVNNFGSGGTNAQCVLESVETFSPLTNGQLYIVLLLSSYKYEKPNGNTVYSNTNHSSADIMKLSARSKYSASKGLSDLLQWLKRRGDDSLPVDLDDLSYTLSARRSHFQWRSGVLAPDLNSLIAKLERGEVVPSKSSSRRTNVFVFTGQGAQYFQMGHELIGKEAIFTESVQKSDAVLRELGASWSLIDELCKEESQSLLNKSAYGQPATTAIQVAIVDMLRNWGVSPSAVVGHSSGEVAAAYAAGILTHETAIRVAFERSFLASAAIKKSKHRGAMMAVGLGATEVQEIIDSLPHNDAQVIVACINSPSSTTVSGDEPAVSMLQDKLQENGTFARLLKVDTAYHSHHMQAVGYEYLARLGEVPCESFSNSLPVRFFSSVSGEEKLDGFGASYWVDNLVSPVKFSQTIESLCHRMGTQDPFNFIEIGPHKALSGPIRQSIAHINSDGSLAYRYIPTLVRGQDDYMSMMDTGSALYSSGTRIKIDTVASLGFSGKLKRFVKDLPPYAWDHTQIYWREPRLNRDYRFRPHPHHDLLGLKTLTSTVTDPSWRIMLNIQSLPWLRDHVIDQFILFPGAGYMTMAIQAVTQLTHDQQSNLEIKSYRLTNVAFKRTLSIPEDPTGVEVILNLRQSETRHGYEFFVSSNPDGDKWLEHCSGHIAIEAQTELDEVEGGRAAEVRLMNYRNRVTDARASCSELVTKEELYTELTKAGNHYGSNFSLIEDVRMSTSEAKSLGSLVLPDFRAAMPSGFMQPHVVHPAVLDALLHIGCLLFQRNEKTGTGSVVPTFFGEVVISSDIPSNPGERFEVLSALQTLVKTSSRFEVAALTVDGESILPVITMSGGEFRLIGDSQADSSGDGSPQSVFAVQHGLDVSSITAAHLESMNVCHQADEAGTGTKEKIFLLQQATAYYIHRAVRDIEEGNLKVKDEYTSQFAWMSQYATSEECEQHLSASFFASKEIIQEKLSNLGAEGDLTTMIGSHLTSILTGEMDSASLFQDAHILEKLDNFDSSTRTNAYMAEYVKHLTFQRRDLRILEMGTDTGASTLALLQQCSPTRAPFCSEYVLTNTSADLLGNVQDHKLKDWKQLITFKILDLETDPIWQGFEEHAYDLVLVPNALGATKSSKNYLGNIHKLLKTGGTLGLCEPMASSTWLNMISTVFLHANGPFQTVIQWHDDLLKSSFSGGDQVAYDFPQPDSQSAFLLSTSLAKSLMNGNGHHHASKKLKIIYTSAEAESSGQLVITDLYENLEENDFEITIQQWQPGNVEDITDEITYIVIESSSHPFLIHASSTQFEELMSIMTKSSSVYWMTLSPNLGPLPKFTTSPSHGVILGLARSAVNETGGLKFVTIDVQDDLETGNAKHVAKTLSKLIASKLLEKSTQTSEDIEYVLKGGKLHISRVVPEIQLANTFSNSGANESKIEDALFHQTDRPLVMQLSQPGILSSMRFVDNKTIAQDDEIDPDDVEIEMHALSMNFKDVYVALGQSEATQTMAGEGAGLVTRVGSNFANTFSAGQRVTVTTSRSPYANRTRANGNLVYPIPSSMSFNDASTIPVSFVTACYGLIDIARLSKGQSVLIHAASGALGQAAIQIARHVGATIFATVGSTAKLQLLTEKFGIPESHIFSTRTTDFKINIMEMTNGNGVDVALNSLSGDALRATWDCIAPLGTFVEVGKTDIYNKATLDMEHFDKNVTFASVDLKLLSERRPKTVQGLLSRIFEGIAAGHFAPLPVNAMPISELESAFRFIQSRKHTGKIVLEAGPEAMVKATVPELRLHRDGTYVIAGGLGSIGRHLCKHLQIHGARHIALLTRRDFDVTSRTHLERELTEIPDAKVEILTGDAMNAEEVAQAAKKLNAESPVKGVIQAAMVVRDHTLAQMSLSEFHAALGVKYHGTLNLASAFTSPNLDFFVCLSSVTGIMGLPGVSNYVAGNVFEDTFVESQVSHGNTQFFSINLPLVSETELKSMKQTAGLVTRHGSEVMSIDAVIPVIDYIISGQARKDGNNRIVMGLSASSIAYRASNGVEVPPLLSHLYAMSQQGALTAAAGSEIRLEDSIAQASTKEAAEELIVSAIRQKVSGLILIDANEISLDQPMAVLGLDSLVAIELKNWLARTLQAPMQTTDIMDAASLKSFATLVAQKSALVTN

SEQ ID NO: 18527 - DNA, 592 bp, Muscodor strobelii
  misc_feature: SGI EST ID NO. CUFF.43514.0
  misc_feature: Variant of the nucleotide sequence at SEQ ID NO 18525
tcggcagacacctttgcaagcatctacaaattcacggagcaagacatattgctcttttgacgcgacgagactttgacgtaacgtctagaacacatctcgagcgggagctcactgaaatacctgacgcgaaggtcgaaatcttgactggtgatgctatgaatgcggaggaagtagctcaagccgcaaagaaactcaacgccgaatcgcctgtgaaaggcgtgatacaggctgcgatggtagtaagagaccacactctagcccaaatgtcactctcagaattccacgcagcacttggggtaaaatatcacgggaccctcaatctcgcctctgccttcacttccccgaatctcgacttcttcgtctgtctctcatcagtgaccggaatcatgggactcccaggtgtatcgaactacgtagcaggaaacgtatttgaagacacgttcgtcgagagccaggtctctcacggaaacacacaattcttttctatcaacttaccattagtctccgaaacagagctgaagagcatgaaacaaactgctgggctagtcacaagacatggcagcgaggtaatgtctatcgacgccgtgatccc

SEQ ID NO: 18528 - DNA, 1218 bp, Muscodor strobelii
  misc_feature: SGI cDNA ID NO. 566215
  misc_feature: Encodes the peptide sequence at SEQ ID NO 18529
atgtcttccgctgatttagactctattgccattattggcttgggatgccgatatgccggaggagcaaatgggccagaggctctctggaagatgctagtggacggtcgagatggctactctgaagttccaaaagaccggttcaactggtatagttttcatcatcccgaccaagcaattcgcggtacaatagttcagagaggaggacacttcctcaaccaacacttgggagcatttgatgctggattcttcggcatatcgcctttagaagcggagcatttggatcctctacaacgactgctcctcgaagttacttgggaagccatcgagaatgcgggcatatcgatggaagattttaaaggctcagagaccggtgtcttcatggctatgtttggacatgactgggaggtaatgacgatgaaagacccgatgatgtttacatactaccacactactggcgtcactcgaacagtgctctcgaacagactgtcttacgtattcgacctgcacggtccatcgatgacaattgacacaggttgctctggtagtctggtcgctttgaatttggcatgtcaaagcttacgaaatggcgagacgaacatggcgttggttggaggtgccggcgtgatattttctcctgaacagctaagtctaatgacgcagcttggtatttcaattagtattttcaacaaagacgggcgctcctactcttttgactcacgcggaagtggatatggccgcgctgaaggagttggtgtcgttgcactgaagaggctcaaagatgctatccgggatggagatgagatccgcagtattattcgcaacacgaacgcaaatcaggacggaaaaacaaacggtattacaatgccaagtctagacggtcaaaagcaccttgcggcaaaggtgttcgagaaacttagtatttcacctcaagacattcaatacgttgaagcgcacggtacagggacaatggctggagatgtagcagaagtcggagccatctataccatgttttgcgaagggcgcgatagcaacagcccccttctcgttggatcgtcaaaaccgaacataggtcattctgaagctgctagcggtgtcgctggacttatcaaaactgtgctggcaatggagaaggggttcatacctcctaacatattattagagaagatgaagcccggcatagcacatactactagaagtattaaggtggatcattcttga

SEQ ID NO: 18529 - protein, 405 aa, Muscodor strobelii
  misc_feature: SGI Peptide ID NO. 566215
  misc_feature (7)..(261): Pfam Id: PF00109 Pfam Desc: Beta-ketoacyl synthase, N-terminal domain
  misc_feature (269)..(387): Pfam Id: PF02801 Pfam Desc: Beta-ketoacyl synthase, C-terminal domain
  misc_feature (1)..(393): NCBI GI: 156063378 Blast Desc: SS1G_01807 [Sclerotinia sclerotiorum 1980] gi|154697141|gb|EDN96879.1| SS1G_01807 [Sclerotinia sclerotiorum 1980]
  misc_feature (1)..(393): NCBI GI: 154319269 Blast Desc: BC1G_02586 [Botryotinia fuckeliana B05.10] gi|150857017|gb|EDN32209.1| BC1G_02586 [Botryotinia fuckeliana B05.10]
  misc_feature (1)..(393): NCBI GI: 40787328 Blast Desc: polyketide synthase [Botryotinia fuckeliana]
  misc_feature (9)..(381): NCBI GI: 256723827 Blast Desc: NECHADRAFT_37058 [Nectria haematococca mpVI 77-13-4]
  misc_feature (9)..(393): NCBI GI: 156053511 Blast Desc: SS1G_06923 [Sclerotinia sclerotiorum 1980] gi|154704701|gb|EDO04440.1| SS1G_06923 [Sclerotinia sclerotiorum 1980]
  misc_feature (1)..(402): NCBI GI: 67526305 Blast Desc: AN3610.2 [Aspergillus nidulans FGSC A4] gi|40740628|gb|EAA59818.1| AN3610.2 [Aspergillus nidulans FGSC A4]
  misc_feature (1)..(402): NCBI GI: 259481863 Blast Desc: TPA: polyketide synthase, (JCVI) [Aspergillus nidulans FGSC A4]
  misc_feature (9)..(401): NCBI GI: 156046691 Blast Desc: SS1G_09446 [Sclerotinia sclerotiorum 1980] gi|154693841|gb|EDN93579.1| SS1G_09446 [Sclerotinia sclerotiorum 1980]
  misc_feature (1)..(401): NCBI GI: 156051382 Blast Desc: SS1G_07098 [Sclerotinia sclerotiorum 1980] gi|154704876|gb|EDO04615.1| SS1G_07098 [Sclerotinia sclerotiorum 1980]
  misc_feature (1)..(402): NCBI GI: 256721575 Blast Desc: NECHADRAFT_78513 [Nectria haematococca mpVI 77-13-4]
  misc_feature (7)..(402): SWISSPROT Homolog: EC 2.3.1.161 Lovastatin nonaketide synthase
  misc_feature: Useful for fungicidal and/or biocontrol applications
MSSADLDSIAIIGLGCRYAGGANGPEALWKMLVDGRDGYSEVPKDRFNWYSFHHPDQAIRGTIVQRGGHFLNQHLGAFDAGFFGISPLEAEHLDPLQRLLLEVTWEAIENAGISMEDFKGSETGVFMAMFGHDWEVMTMKDPMMFTYYHTTGVTRTVLSNRLSYVFDLHGPSMTIDTGCSGSLVALNLACQSLRNGETNMALVGGAGVIFSPEQLSLMTQLGISISIFNKDGRSYSFDSRGSGYGRAEGVGVVALKRLKDAIRDGDEIRSIIRNTNANQDGKTNGITMPSLDGQKHLAAKVFEKLSISPQDIQYVEAHGTGTMAGDVAEVGAIYTMFCEGRDSNSPLLVGSSKPNIGHSEAASGVAGLIKTVLAMEKGFIPPNILLEKMKPGIAHTTRSIKVDHS

SEQ ID NO: 18530 - DNA, 337 bp, Muscodor strobelii
  misc_feature: SGI EST ID NO. CUFF.43532.0
  misc_feature: Variant of the nucleotide sequence at SEQ ID NO 18528
agatccgcagtattattcgcaacacgaacgcaaatcaggacggaaaaacaaacggtattacaatgccaagtctagacggtcaaaagcaccttgcggcaaaggtgttcgagaaacttagtatttcacctcaagacattcaatacgttgaagcgcacggtacagggacaatggctggagatgtagcagaagtcggagccatctataccatgttttgcgaagggcgcgatagcaacagcccccttctcgttggatcgtcaaaaccgaacataggtcattctgaagctgctagcggtgtcgctggacttatcaaaactgtgctggcaatggagaaggggtt

SEQ ID NO: 18531 - DNA, 777 bp, Muscodor strobelii
  misc_feature: SGI cDNA ID NO. 566216
  misc_feature: Reduced expression when VOC is produced
  misc_feature: Encodes the peptide sequence at SEQ ID NO 18532
atgcaacgaagggtagatcgggagtctcgccgtccgatatatcaccgtattgatgactcgattgacaacgatcggttagtcaagggtacaacctggggtttcgtggtataccgtacatcatatggtaacgaggatgcatggcaagaaatgttgcaggtactgcacaatgatatcaagaacgcgcttctctttgtgcaggaacctgatctgtacgaataccatgagttgatcctgatggacgacaaggacaagtttgacggcgcaagttcccacgacatcagggaccattttcgagaatttgtagcgaatgagttaccctccaagatgtcagacacaacaacctcaccgacagaagctgacggggaaacttctaaagtggatctcgatgccatgcgcgaagtgcttatacagagcgctgccgacaaacctggtccagaacggtccctgggcacacgatggaatttctgccttatcgttgacgatatctgcttggagtcccttgatgagatgtggctaccagttgtaaggctgttgcgaaaaaactggggtcctctggagcctagtaaaaggaattatgtcgtgcatgaggattggcatgatggagaaacgggtgtcaaggatgaggatgtgggctggatgtatatgtataccggcgagtatgtagatacgtatgaaggactgatagagccagatcagtggtataaggactataagcgtccgccgattgtggaagacttgtgttctgggacgatgcctggttcttggaggacgagttga

SEQ ID NO: 18532 - protein, 258 aa, Muscodor strobelii
  misc_feature: SGI Peptide ID NO. 566216
  misc_feature (16)..(252): NCBI GI: 238844942 Blast Desc: conserved [Microsporum canis CBS 113480]
  misc_feature (17)..(256): NCBI GI: 226277866 Blast Desc: conserved [Paracoccidioides brasiliensis Pb01]
  misc_feature (17)..(256): NCBI GI: 225683776 Blast Desc: PABG_04271 [Paracoccidioides brasiliensis Pb03]
  misc_feature (17)..(256): NCBI GI: 226293140 Blast Desc: conserved [Paracoccidioides brasiliensis Pb18]
  misc_feature (17)..(256): NCBI GI: 261189217 Blast Desc: conserved [Ajellomyces dermatitidis SLH14081] gi|239591805|gb|EEQ74386.1| conserved [Ajellomyces dermatitidis SLH14081]
  misc_feature (17)..(256): NCBI GI: 239614722 Blast Desc: conserved [Ajellomyces dermatitidis ER-3]
  misc_feature (14)..(256): NCBI GI: 115398462 Blast Desc: [Aspergillus terreus NIH2624] gi|114191703|gb|EAU33403.1| [Aspergillus terreus NIH2624]
  misc_feature (38)..(256): NCBI GI: 239607158 Blast Desc: conserved [Ajellomyces dermatitidis ER-3]
  misc_feature (38)..(255): NCBI GI: 261200985 Blast Desc: conserved [Ajellomyces dermatitidis SLH14081] gi|239593965|gb|EEQ76546.1| conserved [Ajellomyces dermatitidis SLH14081]
  misc_feature (50)..(258): NCBI GI: 115401030 Blast Desc: [Aspergillus terreus NIH2624] gi|114190044|gb|EAU31744.1| [Aspergillus terreus NIH2624]
  misc_feature: Useful for introducing or modulating the production of volatile compounds
MQRRVDRESRRPIYHRIDDSIDNDRLVKGTTWGFVVYRTSYGNEDAWQEMLQVLHNDIKNALLFVQEPDLYEYHELILMDDKDKFDGASSHDIRDHFREFVANELPSKMSDTTTSPTEADGETSKVDLDAMREVLIQSAADKPGPERSLGTRWNFCLIVDDICLESLDEMWLPVVRLLRKNWGPLEPSKRNYVVHEDWHDGETGVKDEDVGWMYMYTGEYVDTYEGLIEPDQWYKDYKRPPIVEDLCSGTMPGSWRTS

SEQ ID NO: 18533 - DNA, 1174 bp, Muscodor strobelii
  misc_feature: SGI EST ID NO. CUFF.43543.0
  misc_feature: Variant of the nucleotide sequence at SEQ ID NO 18531
tcctcttctccccgtctctctatattctgctcccttcttcttcttgaccagcaagtctattgctgcagaattttgcccagattcgaaacaacgaggctgactagtcctctcagttgttctgacctatatttgtctacccatacacttttagggtcgttggagcctgggtcattttcagcaccaaagcaagactttgccgccacgcctccatattcatccctacgattcgcaaaatgcaacgaagggtagatcgggagtctcgccgtccgatatatcaccgtattgatgactcgattgacaacgatcggttagtcaagggtacaacctggggtttcgtggtataccgtacatcatatggtaacgaggatgcatggcaagaaatgttgcaggtactgcacaatgatatcaagaacgcgcttctctttgtgcaggaacctgatctgtacgaataccatgagttgatcctgatggacgacaaggacaagtttgacggcgcaagttcccacgacatcagggaccattttcgagaatttgtagcgaatgagttaccctccaagatgtcagacacaacaacctcaccgacagaagctgacggggaaacttctaaagtggatctcgatgccatgcgcgaagtgcttatacagagcgctgccgacaaacctggtccagaacggtccctgggcacacgatggaatttctgccttatcgttgacgatatctgcttggagtcccttgatgagatgtggctaccagttgtaaggctgttgcgaaaaaactggggtcctctggagcctagtaaaaggaattatgtcgtgcatgaggattggcatgatggagaaacgggtgtcaaggatgaggatgtgggctggatgtatatgtataccggcgagtatgtagatacgtatgaaggactgatagagccagatcagtggtataaggactataagcgtccgccgattgtggaagacttgtgttctgggacgatgcctggttcttggaggacgagttgaatggttaaaggtcaatattaaaatgagattatgcctttgaatcgtataatccactactatagatcagaggagggttgagtgcgcacgcatttcgaataaggactgaaaacctgtgagaccttcatgcatccggaaaaaagggggcctaaaggaaagaaggaaag

SEQ ID NO: 18534 - DNA, 1431 bp, Muscodor strobelii
  misc_feature: SGI cDNA ID NO. 566217
  misc_feature: Encodes the peptide sequence at SEQ ID NO 18535
atggcccctcaactcgacagctactttgccgaggtggacaagctgtccgaccacttcatcgaccgtctcgccaaggccgttgccattccttccatctccgccgaggatgcccgccgccccgacgtcgtccgtatgggcgagtggttaggcgcagagctaaagtctctcggcgccgaggttgaactgcgacctctgggcaaggagcccggcagaccacaccttgatctgcctccttgtgtccttgctcgctatggcaacgacaagaacaagcgcaccatacttgtatacggccactacgacgtccagcccgccgagaagagcgacggttggaacactgagcccttcactttgtctgtcggtgaagatggccgtatgttcggccgtggaagcactgatgacaagggcccagttctcggctggttaaatgccatcgacgcccaccagaaagctggcgtcgacttccctgtcaacctgctcatgtgcttcgagggtatggaggagtacggttccgagggtctggatgagcttatcgagaaggagggtaagggctattttgctgatgccgatgctgtctgtatcagtgataactactggcttggtaccgagaagccttgcctgacgtatggtctacgaggatgcaactactacagcgtcgagatctccggccccggcgctgatctgcacagtggtgtctttggcggcaccgcccaggagccaatgacagatctagttcgtgtcttgggtagcctggttgctacagatggaaagatccagatccctggtatctacgagcaagttgcacccgtatcgtcagacgaggagggcctctatgactccatcgcattcacaatggagactctgcatgagtccctcggctccaagacaaccatttttgaggacaagaagcctactttgatggctcgttggcgaaatccctcgctttccgtccacggtatcgagggcgcctactctgcacctggcgccaagactgttatacccgctaaggttattggcaagttctccattcgcaccgtaccggacatggatatcgacaagacaaatgaggctgtatacagctacgtcaaggaggtgttctccaaacttggctcaaagaatacactgaaggtatacgcgcagcatactggcaagtggtgggtcgctagcccgaaccactggaacttccgcgctgcttcaaaggccaccgagcgcgtttggggtgtgcagcccgacttcacgagagagggtggaagtatccccgtgacgttgactttcgagcaagctacgggaaagaatgttctcttgctgcccatgggtagctcgacggatggcgcacactctatcaacgagaaactggacaagaagaactacattgagggcatcaagcttctaggtgcttatctccactatgttgctgaggaggagcagtcgtaa

SEQ ID NO: 18535 - protein, 476 aa, Muscodor strobelii
  misc_feature: SGI Peptide ID NO. 566217
  misc_feature (208)..(369): Pfam Id: PF07687 Pfam Desc: Peptidase dimerisation domain
  misc_feature (94)..(469): Pfam Id: PF01546 Pfam Desc: Peptidase family M20/M25/M40
  misc_feature (1)..(476): NCBI GI: 46136755 Blast Desc: FG09893.1 [Gibberella zeae PH-1]
  misc_feature (1)..(476): NCBI GI: 256731694 Blast Desc: [Nectria haematococca mpVI 77-13-4]
  misc_feature (1)..(475): NCBI GI: 261351879 Blast Desc: cytosolic non-specific dipeptidase [Verticillium albo-atrum VaMs.102]
  misc_feature (1)..(473): NCBI GI: 85084815 Blast Desc: NCU07153 [Neurospora crassa OR74A] gi|28918469|gb|EAA28142.1| NCU07153 [Neurospora crassa OR74A] gi|28950250|emb|CAD71116.1| conserved [Neurospora crassa]
  misc_feature (1)..(476): NCBI GI: 171676471 Blast Desc: protein product [Podospora anserina] gi|170936302|emb|CAP60960.1| protein product [Podospora anserina]
  misc_feature (1)..(473): NCBI GI: 116197407 Blast Desc: conserved [Chaetomium globosum CBS 148.51] gi|88178138|gb|EAQ85606.1| conserved [Chaetomium globosum CBS 148.51]
  misc_feature (1)..(473): NCBI GI: 39975195 Blast Desc: conserved [Magnaporthe grisea 70-15] gi|145018876|gb|EDK03155.1| conserved [Magnaporthe grisea 70-15]
  misc_feature (1)..(473): NCBI GI: 154300886 Blast Desc: conserved [Botryotinia fuckeliana B05.10] gi|150856329|gb|EDN31521.1| conserved [Botryotinia fuckeliana B05.10]
  misc_feature (1)..(473): NCBI GI: 156043053 Blast Desc: conserved [Sclerotinia sclerotiorum 1980] gi|154694917|gb|EDN94655.1| conserved [Sclerotinia sclerotiorum 1980]
  misc_feature (1)..(473): NCBI GI: 261195815 Blast Desc: glutamate carboxypeptidase [Ajellomyces dermatitidis SLH14081] gi|239587444|gb|EEQ70087.1| glutamate carboxypeptidase [Ajellomyces dermatitidis SLH14081] gi|239614396|gb|EEQ91383.1|
  misc_feature (5)..(472): SWISSPROT Homolog: EC 3.4.13.3 Xaa-His dipeptidase
MAPQLDSYFAEVDKLSDHFIDRLAKAVAIPSISAEDARRPDVVRMGEWLGAELKSLGAEVELRPLGKEPGRPHLDLPPCVLARYGNDKNKRTILVYGHYDVQPAEKSDGWNTEPFTLSVGEDGRMFGRGSTDDKGPVLGWLNAIDAHQKAGVDFPVNLLMCFEGMEEYGSEGLDELIEKEGKGYFADADAVCISDNYWLGTEKPCLTYGLRGCNYYSVEISGPGADLHSGVFGGTAQEPMTDLVRVLGSLVATDGKIQIPGIYEQVAPVSSDEEGLYDSIAFTMETLHESLGSKTTIFEDKKPTLMARWRNPSLSVHGIEGAYSAPGAKTVIPAKVIGKFSIRTVPDMDIDKTNEAVYSYVKEVFSKLGSKNTLKVYAQHTGKWWVASPNHWNFRAASKATERVWGVQPDFTREGGSIPVTLTFEQATGKNVLLLPMGSSTDGAHSINEKLDKKNYIEGIKLLGAYLHYVAEEEQS

SEQ ID NO: 18536 - DNA, 1999 bp, Muscodor strobelii
  misc_feature: SGI EST ID NO. CUFF.43555.0
  misc_feature: Variant of the nucleotide sequence at SEQ ID NO 18534
gtaattgtagcctgtttgccttagtttgcatgtataagacccctccttttcaagtagcttctacctcgttttcccgtcccaatgccccgcacactcctcatgcgcctgccttcttactcgggcgttgcgacatcacgagcacagttgacggccagctcttgccgcatctttaattctcattctcggtcgcgtaatttctcttctgcatacctcccgttctcccgtgcatctccgttaccacttccatttgtctcttttcatcgccaatccacacgaacctatctctctcctgccatccaagcccaccaagctcgtaagatggcccctcaactcgacagctactttgccgaggtggacaagctgtccgaccacttcatcgaccgtctcgccaaggccgttgccattccttccatctccgccgaggatgcccgccgccccgacgtcgtccgtatgggcgagtggttaggcgcagagctaaagtctctcggcgccgaggttgaactgcgacctctgggcaaggagcccggcagaccacaccttgatctgcctccttgtgtccttgctcgctatggcaacgacaagaacaagcgcaccatacttgtatacggccactacgacgtccagcccgccgagaagagcgacggttggaacactgagcccttcactttgtctgtcggtgaagatggccgtatgttcggccgtggaagcactgatgacaagggcccagttctcggctggttaaatgccatcgacgcccaccagaaagctggcgtcgacttccctgtcaacctgctcatgtgcttcgagggtatggaggagtacggttccgagggtctggatgagcttatcgagaaggagggtaagggctattttgctgatgccgatgctgtctgtatcagtgataactactggcttggtaccgagaagccttgcctgacgtatggtctacgaggatgcaactactacagcgtcgagatctccggccccggcgctgatctgcacagtggtgtctttggcggcaccgcccaggagccaatgacagatctagttcgtgtcttgggtagcctggttgctacagatggaaagatccagatccctggtatctacgagcaagttgcacccgtatcgtcagacgaggagggcctctatgactccatcgcattcacaatggagactctgcatgagtccctcggctccaagacaaccatttttgaggacaagaagcctactttgatggctcgttggcgaaatccctcgctttccgtccacggtatcgagggcgcctactctgcacctggcgccaagactgttatacccgctaaggttattggcaagttctccattcgcaccgtaccggacatggatatcgacaagacaaatgaggctgtatacagctacgtcaaggaggtgttctccaaacttggctcaaagaatacactgaaggtatacgcgcagcatactggcaagtggtgggtcgctagcccgaaccactggaacttccgcgctgcttcaaaggccaccgagcgcgtttggggtgtgcagcccgacttcacgagagagggtggaagtatccccgtgacgttgactttcgagcaagctacgggaaagaatgttctcttgctgcccatgggtagctcgacggatggcgcacactctatcaacgagaaactggacaagaagaactacattgagggcatcaagcttctaggtgcttatctccactatgttgctgaggaggagcagtcgtaagtataggcgaataggaagtgatgtactcatcagaagattggcatgaaagacatgcacttccacgcgcgatctgagtcgattgtatacctacataggcgcgagatatttgcatgatgattggcgggtgcatgtcgcattgcccatgatgtcagccatcacggatttggtacgataggacaaatataccaggaacaaccatttcatgtttctgtacacacagtgaatcttacatcgtgcgtatccattgtat

SEQ ID NO: 18537 - DNA, 924 bp, Muscodor strobelii
  misc_feature: SGI cDNA ID NO. 566218
  misc_feature: Encodes the peptide sequence at SEQ ID NO 18538
atgacctcgatagcagacaccaaggagcccatgctcaaagttgcagtgacggaacttccggtctcagcggcatcatctgcacctgcttcggccacctcacccgttgccgtcatcatgcccaccgccacctcacctctgtccggaaatgcacaggagacttcgcaaccagacacaacctcagacacagaatctgaaaaagaattctcacccctctctctagcacaagactatacgccgttaccgcaatataaagatgccggaacgacggaaacggatttcggcggcttgttacaaggcccgaagctgaagctccacgaggacctcaaggatgggtgtggaggccaactctggccggctggtatggtgcttgctaggtggttgttacggtatcatgggaagggagaggaagcaaagggtgggctgagggatgcgaagatactcgagctcggtgcaggaggtggactcgtcgggcttgctgtggcagcgggttgcgatctagggcaatcacccaagaaattgatcatgacggaccagatggagatgtattccctcatgcagcacaacatcggactcaatggcttgggaaataaagccgaggcgcaggtcctgaactggggcgaaccactcccaccaaacatcgtcgccaacccgccaggcgtcatacttgcagcggaatgtgtatactttgagccagcctttcccttgctccagcagacgctctgcgatttgctagagttatgtccagacgccgtgatctacttctgtttcaagaagcggagacgggcggatatggggtttgtcaaacaggcacggaagaagtttacggttaccgatcttgaggatgttgatagaccgatctggtctcgacaaggacttcatttgttcagttttactagtaagaggaagggacagctgggaagctag

SEQ ID NO: 18538 - protein, 307 aa, Muscodor strobelii
  misc_feature: SGI Peptide ID NO. 566218
  misc_feature (58)..(301): NCBI GI: 116179788 Blast Desc: CHGG_00522 [Chaetomium globosum CBS 148.51] gi|88184819|gb|EAQ92287.1| CHGG_00522 [Chaetomium globosum CBS 148.51]
  misc_feature (64)..(300): NCBI GI: 171691701 Blast Desc: protein product [Podospora anserina] gi|170945799|emb|CAP72599.1| protein product [Podospora anserina]
  misc_feature (64)..(300): NCBI GI: 28950042 Blast Desc: conserved [Neurospora crassa]
  misc_feature (68)..(303): NCBI GI: 145613802 Blast Desc: MGG_01349 [Magnaporthe grisea 70-15] gi|145020827|gb|EDK04956.1| MGG_01349 [Magnaporthe grisea 70-15]
  misc_feature (70)..(300): NCBI GI: 46137441 Blast Desc: FG10236.1 [Gibberella zeae PH-1]
  misc_feature (70)..(297): NCBI GI: 256731811 Blast Desc: [Nectria haematococca mpVI 77-13-4]
  misc_feature (64)..(300): NCBI GI: 164425345 Blast Desc: NCU04602 [Neurospora crassa OR74A] gi|157070890|gb|EAA29609.2| conserved [Neurospora crassa OR74A]
  misc_feature (67)..(284): NCBI GI: 261351872 Blast Desc: conserved [Verticillium albo-atrum VaMs.102]
  misc_feature (71)..(300): NCBI GI: 121706430 Blast Desc: conserved [Aspergillus clavatus NRRL 1] gi|119399625|gb|EAW10051.1| conserved [Aspergillus clavatus NRRL 1]
  misc_feature (62)..(298): NCBI GI: 225560384 Blast Desc: conserved [Ajellomyces capsulatus G186AR]
MTSIADTKEPMLKVAVTELPVSAASSAPASATSPVAVIMPTATSPLSGNAQETSQPDTTSDTESEKEFSPLSLAQDYTPLPQYKDAGTTETDFGGLLQGPKLKLHEDLKDGCGGQLWPAGMVLARWLLRYHGKGEEAKGGLRDAKILELGAGGGLVGLAVAAGCDLGQSPKKLIMTDQMEMYSLMQHNIGLNGLGNKAEAQVLNWGEPLPPNIVANPPGVILAAECVYFEPAFPLLQQTLCDLLELCPDAVIYFCFKKRRRADMGFVKQARKKFTVTDLEDVDRPIWSRQGLHLFSFTSKRKGQLGS

SEQ ID NO: 18539 - DNA, 1549 bp, Muscodor strobelii
  misc_feature: SGI EST ID NO. CUFF.43576.0
  misc_feature: Variant of the nucleotide sequence at SEQ ID NO 18537
gtgagaacggaggctacgaagttaagcgcccagttttttattttatgtgtgagatattgataagtgatttgatatcaaatagacgtgattgtctctgtgaaacatcaagtcccggattgagtgtgaccgttacacgaccacttcgagtaaacctcagcttagatttcaacgccaacgactcattcgcagatccttcacgccatttcagttcgacgtcacgcagagtctcactgaccacttcaaagcacaacacacaagatgacctcgatagcagacaccaaggagcccatgctcaaagttgcagtgacggaacttccggtctcagcggcatcatctgcacctgcttcggccacctcacccgttgccgtcatcatgcccaccgccacctcacctctgtccggaaatgcacaggagacttcgcaaccagacacaacctcagacacagaatctgaaaaagaattctcacccctctctctagcacaagactatacgccgttaccgcaatataaagatgccggaacgacggaaacggatttcggcggcttgttacaaggcccgaagctgaagctccacgaggacctcaaggatgggtgtggaggccaactctggccggctggtatggtgcttgctaggtggttgttacggtatcatgggaagggagaggaagcaaagggtgggctgagggatgcgaagatgtaagtttgctactccatctatcttggcgggcatgcagtgtcagttgaatacataggtctgaatctgtgagcatggatattttttgatgagacaaaacagactcgagctcggtgcaggaggtggactcgtcgggcttgctgtggcagcgggttgcgatctagggcaatcacccaagaaattgatcatgacggaccagatggagatgtattccctcatgcagcacaacatcggactcaatggcttgggaaataaagccgaggcgcaggtcctgaactggggcgaaccactcccaccaaacatcgtcgccaacccgccaggcgtcatacttgcagcggaatgtgtatactttgagccagcctttcccttgctccagcagacgctctgcgatttgctagagttatgtccagacgccgtgatctacttctgtttcaagaagcggagacgggcggatatggggtttgtcaaacaggcacggaagaagtttacggttaccgatcttgaggatgttgatagaccgatctggtctcgacaaggacttcatttgttcagttttactagtaagaggaagggacagctgggaagctaggaagaaaaaaacacttgcggcatagtgagaaacaagaaacgaaggtttatgaggagtcggaagtgatcatgatgtttaggcgcgcgcatcgcaatcattactagacgcatagacgcatagataatacagctcatcaattgctcaatgtgtttatgcagaggtgggtgggattatgtgctccatgcaacccgaagtgtgattcgctaccactctgcatcctgctgactgatgtaacccaacgtttgttttccaagcggtatcggtcgt

SEQ ID NO: 18540 - DNA, 624 bp, Muscodor strobelii
  misc_feature: SGI cDNA ID NO. 566219
  misc_feature: Reduced expression when VOC is produced
  misc_feature: Encodes the peptide sequence at SEQ ID NO 18541
gctggccgcgcagttcgcgggccagctggggcagaacacgttttcaagagcgtcgagcagaacgtcaaccggtggatcaacttcggcgcgctcaagcactacttcaacgtcaccaacggctacgtcgtcaacaagctcttcctcgtcctcttcccctggcgccacaagccctggagccgcaagcacggcgtcggccccagcggccaggagggctggtacctgcccccccgcgacgacatcaacagcccggacatgtacatccccgtcatggccctcgtcacctacatcctgctgagcaccctgctggccggcctgcgcggccagttccagcccgagctgctgggctacaccgcctccaaggccggcgccgtcgtcgtcctcgagatcctgctgctcaagctcggctgctacttcctcagcatctccaacgagtcccagctgctcgacctcgtcgcctactcgggctacaagttcgtcggcatcatcgccaccgtcgccatcgccgagctcgtcaacgccggcaagggcaccggcggctgggccggctggtcccatcttcctctacaccttcctcgccaactccctcttcctgatgcgctcgttgagatatgtcttgctccctga

SEQ ID NO: 18541 - protein, 207 aa, Muscodor strobelii
  misc_feature: SGI Peptide ID NO. 566219
  misc_feature (4)..(206): Pfam Id: PF03878 Pfam Desc: YIF1
  misc_feature (18)..(165): Pfam Id: PF03878 Pfam Desc: YIF1
  misc_feature (18)..(184): NCBI GI: 85074793 Blast Desc: NCU00624 [Neurospora crassa OR74A] gi|28927577|gb|EAA36528.1| NCU00624 [Neurospora crassa OR74A]
  misc_feature (7)..(184): NCBI GI: 156055400 Blast Desc: SS1G_05052 [Sclerotinia sclerotiorum 1980] gi|154702836|gb|EDO02575.1| SS1G_05052 [Sclerotinia sclerotiorum 1980]
  misc_feature (7)..(172): NCBI GI: 154302573 Blast Desc: BC1G_09863 [Botryotinia fuckeliana B05.10] gi|150855352|gb|EDN30544.1| BC1G_09863 [Botryotinia fuckeliana B05.10]
  misc_feature (18)..(184): NCBI GI: 116193089 Blast Desc: CHGG_06262 [Chaetomium globosum CBS 148.51] gi|88182175|gb|EAQ89643.1| CHGG_06262 [Chaetomium globosum CBS 148.51]
  misc_feature (7)..(172): NCBI GI: 261353151 Blast Desc: transport protein yif1 [Verticillium albo-atrum VaMs.102]
  misc_feature (7)..(172): NCBI GI: 46128870 Blast Desc: FG08784.1 [Gibberella zeae PH-1]
  misc_feature (7)..(172): NCBI GI: 256733508 Blast Desc: NECHADRAFT_67285 [Nectria haematococca mpVI 77-13-4]
  misc_feature (18)..(184): NCBI GI: 149209829 Blast Desc: MGCH7_ch7g396 [Magnaporthe grisea 70-15] gi|86196351|gb|EAQ70989.1| MGCH7_ch7g396 [Magnaporthe grisea 70-15]
  misc_feature (18)..(184): NCBI GI: 145610181 Blast Desc: MGG_12628 [Magnaporthe grisea 70-15] gi|145017542|gb|EDK01905.1| MGG_12628 [Magnaporthe grisea 70-15]
  misc_feature (9)..(183): NCBI GI: 70984358 Blast Desc: ER to Golgi transport protein Yif1 [Aspergillus fumigatus Af293] gi|66845320|gb|EAL85655.1| ER to Golgi transport protein Yif1 [Aspergillus fumigatus Af293] ER to Golgi transport
  misc_feature: Useful for introducing or modulating the production of volatile compounds
AGRAVRGPAGAEHVFKSVEQNVNRWINFGALKHYFNVTNGYVVNKLFLVLFPWRHKPWSRKHGVGPSGQEGWYLPPRDDINSPDMYIPVMALVTYILLSTLLAGLRGQFQPELLGYTASKAGAVVVLEILLLKLGCYFLSISNESQLLDLVAYSGYKFVGIIATVAIAELVNAGKGTGGWAGWSHLPLHLPRQLPLPDALVEICLAP

SEQ ID NO: 18542 - DNA, 2580 bp, Muscodor strobelii
  misc_feature: SGI EST ID NO. CUFF.43583.1
  misc_feature: Variant of the nucleotide sequence at SEQ ID NO 18540
ttttcaagagcgtcgagcagaacgtcaaccggtggatcaacttcggcgcgctcaagcactacttcaacgtcaccaacggctacgtcgtcaacaagctcttcctcgtcctcttcccctggcgccacaagccctggagccgcaagcacggcgtcggccccagcggccaggagggctggtacctgcccccccgcgacgacatcaacagcccggacatgtacatccccgtcatggccctcgtcacctacatcctgctgagcaccctgctggccggcctgcgcggccagttccagcccgagctgctgggctacaccgcctccaaggccggcgccgtcgtcgtcctcgagatcctgctgctcaagctcggctgctacttcctcagcatctccaacgagtcccagctgctcgacctcgtcgcctactcgggctacaagttcgtcggcatcatcgccaccgtcgccatcgccgagctcgtcaacgccggcaagggcaccggcggctgggccggctggtcccatcttcctctacaccttcctcgccaactccctcttcctgatgcgctcgttgagatatgtcttgctccctgagagctctggcggcgacgcacgggggcccatgcagaccgactcgaggacgaaacgcaaccagcggacacagttcctctttgcctattcctacgttgtacaattcaccttcatgttgatattatgctagaaaaacacgtggcctggctgcttcgagattcgagccaagccactccgaccaccgaaggcacttgcattaacggcgtggaaaagggaaatagacatatttgcatcaaatattgagcgtgaaaacttcgcatgagacacgatggccttgattgactttgcctgttcaattttgagacgaatatcagaacgaaaccctatgatagctggaatctgattatgcatgtgtaaccccctttgccccactaccgctttactatcgattcgactgttacacgccaaacgatgctggtcttcgtgagatgtgggccacaaactatatgagagtgacgatatcctcatcttatgtaactagaaaaggcgttgtttttcatcgttgcttatcattctgtcaaaagttgtgagtgccgtacgagcgggtttgatcgttgcgacttgcttggccgtaatgcggatgacgcagtagttgctccgcaccactatggccttccggctttttcccaaccttcgttgcatcgctcgacctggccggagacgcatgtgggatagcgacatgcacaatcttaaacacgccttattccgctgaccaacatctttctttcacttgcattgatgccacgttttaataacctatatccttggatacctggactcattaggcacccattctcgccttcagatacttgaggtatgcttgcacatacatggtatagcgtacattatcctatcctttttataccctcgatgctaccgtagaccttagtgaacaaagcccgtgcatcgacaaagatatcgtagcgacttacacctaatacttatcacctggcccatctcagatctcagccaactttgcacacattcgtatacccattctatcccgatccagatcatgccttcgcccatcgtcactgcgacgcttcagtcggccgttttagctgcgacgtccaatatcttggcgcagtgcctcgttgcttaccggaatgatacgccgttcgtcttcgacgcagtacctatattccagtttgtgctttacgccttcctgaatgtgccgccaaatttcttatggcaagacttcctggagacgacatttccagcatactccatatcgccaactccacaagccgtcgcatcggccgctaaaaatgacgagaaagaactcgacgatgaagcaaagaaaggcaaactcgtcgaggagaaactcgacgtcaagaatactgtcatcaaattgcttctagaccagacgataggcgcagctgtcaacacattcctgttcagtctgttcattcactcgatccaggctgcgatgcccagacctttgggcacacctctaagtaatcccgataagagtctacagtatcttgtgtctcgtggtgcaattgattataacagggtagactggactcaagtcgtagcgaacagccaggccgaattctacgacatactcgttgctggttggaagctctggcccatagtcagtttgattaactttgcgttcatcaagactatccagggccgtaacctcaccgctagtctcgctggggtcgcttgggggatttacatgagtcttgtcgctgctagatgagtgtcgattgggccagcgctgagggcaatgtgacttgtcacactggccaccaatgattgcagcgttcgacctctggattttcccggcatggctattagatcacggaatgaatacaagcggtgaacgtcagaggatggaaagactaacacgattcccgcatatgtctcttcgctcgcaatcgctcgcaagtgcggttatagtagatgctcatagttcgagacgccgccatttacaatacaatagactagattttataagagtacgacgcgacatacttatattatttcattt

SEQ ID NO: 18543 - DNA, 693 bp, Muscodor strobelii
  misc_feature: SGI cDNA ID NO. 566220
  misc_feature: Encodes the peptide sequence at SEQ ID NO 18544
atgccttcgcccatcgtcactgcgacgcttcagtcggccgttttagctgcgacgtccaatatcttggcgcagtgcctcgttgcttaccggaatgatacgccgttcgtcttcgacgcagtacctatattccagtttgtgctttacgccttcctgaatgtgccgccaaatttcttatggcaagacttcctggagacgacatttccagcatactccatatcgccaactccacaagccgtcgcatcggccgctaaaaatgacgagaaagaactcgacgatgaagcaaagaaaggcaaactcgtcgaggagaaactcgacgtcaagaatactgtcatcaaattgcttctagaccagacgataggcgcagctgtcaacacattcctgttcagtctgttcattcactcgatccaggctgcgatgcccagacctttgggcacacctctaagtaatcccgataagagtctacagtatcttgtgtctcgtggtgcaattgattataacagggtagactggactcaagtcgtagcgaacagccaggccgaattctacgacatactcgttgctggttggaagctctggcccatagtcagtttgattaactttgcgttcatcaagactatccagggccgtaacctcaccgctagtctcgctggggtcgcttgggggatttacatgagtcttgtcgctgctagatga

SEQ ID NO: 18544 - protein, 230 aa, Muscodor strobelii
  misc_feature: SGI Peptide ID NO. 566220
  misc_feature (2)..(230): NCBI GI: 85074791 Blast Desc: NCU00623 [Neurospora crassa OR74A] gi|28927576|gb|EAA36527.1| conserved [Neurospora crassa OR74A]
  misc_feature (4)..(230): NCBI GI: 261353152 Blast Desc: conserved [Verticillium albo-atrum VaMs.102]
  misc_feature (4)..(229): NCBI GI: 149209829 Blast Desc: MGCH7_ch7g396 [Magnaporthe grisea 70-15] gi|86196351|gb|EAQ70989.1| MGCH7_ch7g396 [Magnaporthe grisea 70-15]
  misc_feature (3)..(229): NCBI GI: 171683957 Blast Desc: protein product [Podospora anserina] gi|170941939|emb|CAP67591.1| protein product [Podospora anserina]
  misc_feature (4)..(229): NCBI GI: 145610179 Blast Desc: MGG_12627 [Magnaporthe grisea 70-15] gi|145017541|gb|EDK01904.1| MGG_12627 [Magnaporthe grisea 70-15]
  misc_feature (1)..(230): NCBI GI: 256733508 Blast Desc: NECHADRAFT_67285 [Nectria haematococca mpVI 77-13-4]
  misc_feature (4)..(230): NCBI GI: 46128868 Blast Desc: FG08783.1 [Gibberella zeae PH-1]
  misc_feature (1)..(227): NCBI GI: 156055902 Blast Desc: SS1G_05303 [Sclerotinia sclerotiorum 1980] gi|154703087|gb|EDO02826.1| SS1G_05303 [Sclerotinia sclerotiorum 1980]
  misc_feature (1)..(230): NCBI GI: 261354986 Blast Desc: Mpv17 / PMP22 family protein [Verticillium albo-atrum VaMs.102]
  misc_feature (1)..(230): NCBI GI: 256729613 Blast Desc: [Nectria haematococca mpVI 77-13-4]
MPSPIVTATLQSAVLAATSNILAQCLVAYRNDTPFVFDAVPIFQFVLYAFLNVPPNFLWQDFLETTFPAYSISPTPQAVASAAKNDEKELDDEAKKGKLVEEKLDVKNTVIKLLLDQTIGAAVNTFLFSLFIHSIQAAMPRPLGTPLSNPDKSLQYLVSRGAIDYNRVDWTQVVANSQAEFYDILVAGWKLWPIVSLINFAFIKTIQGRNLTASLAGVAWGIYMSLVAAR

SEQ ID NO: 18545 - DNA, 2580 bp, Muscodor strobelii; identical to SEQ ID NO: 18542
  misc_feature: SGI EST ID NO. CUFF.43583.1
  misc_feature: Variant of the nucleotide sequence at SEQ ID NO 18543

SEQ ID NO: 18546 - DNA, 510 bp, Muscodor strobelii
  misc_feature: SGI cDNA ID NO. 566221
  misc_feature: Encodes the peptide sequence at SEQ ID NO 18547
atgtctaccaacctcacagcatcacctacccagccatccctaaccacgatgtccacttcgcgatgggttcccttatcatcgccaaatcctctccaacacgccgcactccacggtaaacccagtgttccattgacacccgatcaatggcgcaacatccactccaggatcttgaagactgtcgatataatcctcgcgcatgacttcatatttcgcggtcctggacctcaatccattgagctacacgcgaacctaggcgttgcccttgtggttgaaaatatcattcgtcccattggaattccttgtagtatttccgctccagcaattcagaagaagatccgtgccatggccgctgatctcaaacatcccgccttccgccacacgtatgttggtggtcgtgtttggttttcttttaacatgcttgatgccgagcaggctgtgctgcccaccggcaattcaccgaaggactacaagagtactgaagcgagcgaggaatgctgcagaagtgaatag

SEQ ID NO: 18547 - protein, 169 aa, Muscodor strobelii
  misc_feature: SGI Peptide ID NO. 566221
MSTNLTASPTQPSLTTMSTSRWVPLSSPNPLQHAALHGKPSVPLTPDQWRNIHSRILKTVDIILAHDFIFRGPGPQSIELHANLGVALVVENIIRPIGIPCSISAPAIQKKIRAMAADLKHPAFRHTYVGGRVWFSFNMLDAEQAVLPTGNSPKDYKSTEASEECCRSE

SEQ ID NO: 18548 - DNA, 123 bp, Muscodor strobelii
  misc_feature: SGI EST ID NO. CUFF.43561.0
  misc_feature: Variant of the nucleotide sequence at SEQ ID NO 18546
cggccatcagatatagatctagatactatctagatcacctgccgtatctcaaatgtctaccaacctcacagcatcacctacccagccatccctaaccacgatgtccacttcgcgatgggttcc

SEQ ID NO: 18549 - DNA, 1119 bp, Muscodor strobelii
  misc_feature: SGI cDNA ID NO. 566222
  misc_feature: Reduced expression when VOC is produced
  misc_feature: Encodes the peptide sequence at SEQ ID NO 18550
atgactaccatggatctacgggtcggtaacaagtaccgcatcggccgcaagatcggctccggctccttcggcgatatctacctcggaaccaacatcatctcgggcgaggagatcgccatcaagctcgagtcggtcaaggccaagcacccccagctcgaatacgaggcccgcgtctacaagtctctggcaggcggcgtcggcatccccttcgtccgctggttcggcactgagtgcgactacaacgccatggtcctcgacctgctcggccccagtctcgaggatctcttcaacttctgcaaccgcaagttctccctcaagacggtgctgctgctggccgaccagctcatctcccgcatcgagtacatccacgccaagtcgttcatccaccgcgacatcaagcccgacaacttcctcatgggcatcggcaagcgcggcaaccaggtcaacgtcatcgatttcggtctcgccaagaagtaccgcgaccccaagactcacttccacattccctaccgtgagaacaagaacttgaccggcacagcccgttatgcctccatcaacacccacttgggtgtcgagcaatctcgccgtgacgacatggagtccctgggctacgtgatgctctacttctgccgaggatctctcccctggcagggcctgaaggctgccaccaagaagcagaagtacgaccgtatcatggagaagaagatgacaacccccaccgaggtgctctgccgcggcttccccaacgagttcgccatctacctcaactacactcgatccctgcgcttcgacgacaagcccgactacagctatctgcgcaagatcttccgcgacctgttcgtccgtgagggtttccagtacgactatgtctttgattggaccgtctacaagtaccagaagaacgcccaggccatcgcccaggccgctggccagggtgccgaggaggacgacaagcgtgcaggccgcaccacggccgccactgccggccagacgccccaggcgaccgctgttaagcccaatgcgatccccagctctcgccgcaaggtcatcgagcgcggagccccaggcgttgacactcccgaaaccaaccgagccgtcggaggaagcgacaggatgtga

SEQ ID NO: 18550 - protein, 372 aa, Muscodor strobelii
  misc_feature: SGI Peptide ID NO. 566222
  misc_feature (12)..(281): Pfam Id: PF00069 Pfam Desc: Protein kinase domain
  misc_feature (12)..(235): Pfam Id: PF00069 Pfam Desc: Protein kinase domain
  misc_feature (12)..(30): Pfam Id: PF07714 Pfam Desc: Protein tyrosine kinase
  misc_feature (1)..(372): NCBI GI: 46128707 Blast Desc: FG08731.1 [Gibberella zeae PH-1]
  misc_feature (1)..(372): NCBI GI: 256734001 Blast Desc: [Nectria haematococca mpVI 77-13-4]
  misc_feature (1)..(372): NCBI GI: 225560782 Blast Desc: casein kinase I [Ajellomyces capsulatus G186AR]
  misc_feature (1)..(372): NCBI GI: 240280676 Blast Desc: casein kinase I [Ajellomyces capsulatus H143]
  misc_feature (1)..(372): NCBI GI: 226278510 Blast Desc: casein kinase I [Paracoccidioides brasiliensis Pb01]
  misc_feature (10)..(371): NCBI GI: 261353633 Blast Desc: casein kinase I [Verticillium albo-atrum VaMs.102]
  misc_feature (1)..(372): NCBI GI: 226293471 Blast Desc: casein kinase I isoform delta [Paracoccidioides brasiliensis Pb18]
  misc_feature (1)..(372): NCBI GI: 225684076 Blast Desc: casein kinase I [Paracoccidioides brasiliensis Pb03]
  misc_feature (1)..(372): NCBI GI: 239608814 Blast Desc: casein kinase I [Ajellomyces dermatitidis ER-3]
  misc_feature (1)..(372): NCBI GI: 238496273 Blast Desc: casein kinase I, [Aspergillus flavus NRRL3357] gi|220694252|gb|EED50596.1| casein kinase I, [Aspergillus flavus NRRL3357]
  misc_feature (3)..(295): SWISSPROT Homolog: EC 2.7.11.1 Non-specific serine/threonine protein kinase
  misc_feature: Useful for introducing or modulating the production of volatile compounds
MTTMDLRVGNKYRIGRKIGSGSFGDIYLGTNIISGEEIAIKLESVKAKHPQLEYEARVYKSLAGGVGIPFVRWFGTECDYNAMVLDLLGPSLEDLFNFCNRKFSLKTVLLLADQLISRIEYIHAKSFIHRDIKPDNFLMGIGKRGNQVNVIDFGLAKKYRDPKTHFHIPYRENKNLTGTARYASINTHLGVEQSRRDDMESLGYVMLYFCRGSLPWQGLKAATKKQKYDRIMEKKMTTPTEVLCRGFPNEFAIYLNYTRSLRFDDKPDYSYLRKIFRDLFVREGFQYDYVFDWTVYKYQKNAQAIAQAAGQGAEEDDKRAGRTTAATAGQTPQATAVKPNAIPSSRRKVIERGAPGVDTPETNRAVGGSDRM

SEQ ID NO: 18551 - DNA, 2974 bp, Muscodor strobelii
  misc_feature: SGI EST ID NO. CUFF.44477.1
  misc_feature: Variant of the nucleotide sequence at SEQ ID NO 18549
gctcccttggcctctgtgggcttggcctgggcgaatcccgagtgccaacctgaagtctccttcgctccctcctccctcgcccagccagtccctccctcctctccttcccagttgccctcctcaacgcaagcgtgatctgccacctgaggcgttgtggattccatacctcgtcgtcaccaccgccctctgcgcccttcacgcccttcacctccctcatcttccgctctgcaccgctccgacgagttcctgactgtcctcgcccgtgcccgtgcagcagcccgtttgcacttctccggcgttgccaccagcttcgtcttcgattgcactcaaatccctccctcttccgagaccacacggcacccactgcttctggccgctgtcgaagcaccaccaacagctcatccagcttcgggaggcagctttaagctccacccaccttcaatatgactaccatggatctacgggtcggtaacaagtaccgcatcggccgcaagatcggctccggctccttcggcgatatctacctcggaaccaacatcatctcgggcgaggagatcgccatcaagctcgagtcggtcaaggccaagcacccccagctcgaatacgaggcccgcgtctacaagtctctggcaggcggcgtcggcatccccttcgtccgctggttcggcactgagtgcgactacaacgccatggtcctcgacctgctcggccccagtctcgaggatctcttcaacttctgcaaccgcaagttctccctcaagacggtgctgctgctggccgaccagctcatctcccgcatcgagtacatccacgccaagtcgttcatccaccgcgacatcaagcccgacaacttcctcatgggcatcggcaagcgcggcaaccaggtcaacgtcatcgatttcggtctcgccaagaagtaccgcgaccccaagactcacttccacattccctaccgtgagaacaagaacttgaccggcacagcccgttatgcctccatcaacacccacttgggtgtcgagcaatctcgccgtgacgacatggagtccctgggctacgtgatgctctacttctgccgaggatctctcccctggcagggcctgaaggctgccaccaagaagcagaagtacgaccgtatcatggagaagaagatgacaacccccaccgaggtgctctgccgcggcttccccaacgagttcgccatctacctcaactacactcgatccctgcgcttcgacgacaagcccgactacagctatctgcgcaagatcttccgcgacctgttcgtccgtgagggtttccagtacgactatgtctttgattggaccgtctacaagtaccagaagaacgcccaggccatcgcccaggccgctggccagggtgccgaggaggacgacaagcgtgcaggccgcaccacggccgccactgccggccagacgccccaggcgaccgctgttaagcccaatgcgatccccagctctcgccgcaaggtcatcgagcgcggagccccaggcgttgacactcccgaaaccaaccgagccgtcggaggaagcgacaggattctacggtaataggctgcgatcagcttccaagggtcaaggcaatggttccgggtatgcgtctgcctcgtatcgaccaaaatgatttgtcccccagccgctttgaactcgcccctcgctttatggaggttgttccggatcccagccgcctccgtaaaaaagtctcccctccccgtggccgtcccatcatcgtcatcctcaccccgtattggagcaccgccgagctcccccgaggacggcgggtgcagataaggtgatgagatggccacgcactatcctgtttcatagtgtctgggttgttttagtttctgttcttcgacgattctcggtttacgactagtccatggctcggacaggctgagcgcccacgacagatgtgatttgcaggtgctttcaccaatatgcaattcaccagttcgtgggtgttctgatcctatctgaacggcacttccggcattctggatcagctgggatgtccatcgccatgcgtcttggccaatcatgacgattttaccgttaatgcaggcttacgacctacaacagtggtacaatcgaaccgagtagagagcactggatgtgagagcagaatcggtctgatccgtccagttgtcttcgatgcgatacaacaatcttgcgatgtggccaggcacggggtttcctagttttcatttgcttctatttctttcttttctttcctaagcatgtcatgttgagttgttccgctcgcagaggtcttctgttcaccaaccgaactctttgatagtcccaatgttctggtacacgattgatccgttccctgaatatacatctcgacagcaaactcggtcgttatttggccagaatggtacaaagcgtctggaggaccaaggggaagcaagtcagactggctgcgtagcacaatgatgattttccgtgtcggctacggccagcatatagtcattgacaagatctcgtgttaccgcagtgtggatgggacctacttcgacttccaagcgacggtcatcagaatggtcatggttgatgcatttgatgactaggctggacaggggatggggttatgcacgaccgctcaaccatcatgactggcatgacctgatgacgtagctagtagttggtggccagccacagtggccaccggctcagcatggattcagggcgactggcatacaaggacacagacaaagctggggaataccgattccaatctgtctttgatgcttgcggcttccaaatatcctcgagtgggatggtgagactacatgttgacaatacacgttaggtaataacaagaatgcctcttttactttcaaatacttacacgacgccctactgtgacatgcataggtgaggagaacggttacgtaaaaagacagtgaggatatccctactaaggacggaagggaaaaaggcggaaagct

SEQ ID NO: 18552 - DNA, 1422 bp, Muscodor strobelii
  misc_feature: SGI cDNA ID NO. 566223
  misc_feature: Reduced expression when VOC is produced
  misc_feature: Encodes the peptide sequence at SEQ ID NO 18553
atggcgtcctccaatgagtccttcgccgacatcgacacctttattctcaccttcaatgccgggaaggccaagatcaacacggccgttttcggtcaacatctctacgatgtcttctcagaaagactcatcctcccggagcttattatcttctgcctccaagaaatggctcccctcgcagacgcattcatcggttcttatatgatcagcccttatttctcaagatatgagcaggctgtcaacatggcggccgccaatttcgtggctgagcaggccgcttcacccgagcaaatccccaaggaccctatttttgctctcgtgactagccgtaatgtcggtatgactggcattatgctcttcgctcgggatccttcagccttacgcaagacaaaagacaccgaagtcgggtttggtgccggccaaatggggaacaagggcgctgttggtgtgaggtcgctttttgtgcgtcagaatgctaagggcatctccaaggctacggagttgacattcgtggctacgcacctacaagcttttgagtggaatttggaaaagaggaatcagaattggcagactatcgtgtctggtttactttttgatgatcccaaaaaactccatgatgcttcatctgaacatccgatccaagcagatgagacggaaactctgcttccccaggatgatcaaagtgtcagacgacacaacgccaccatctacaagcctggatctcatcttttcctgggtggggatttgaattatcggatctccacaaggtctcctacccaagactccatttttccgagtctagatccggagagtccttactattttacacatttcctaagccgagaccaattaacgagcgagagacaggcaggaaggactcttcatggtctcgacgaggctgagatcacattcccaccgacttataagcttaagatggtaaaagagccggttgcgccggaatcgcagtgccaggaacctcctcatcgagatgtgagattctcggccgatcctgtcacatgggaatgggcgcaacatcgatggccgtcgtggtgtgatcgcatcttatatctcaacgctccgagctgggtttcttctgagaataagatcaaggtcctagcgtacgatgcattgccagccgtgaggacgagcgatcaccgggccgtgtatctccgcgtccacattcctatcattgagccggctgagctagccccgactgatgcggctcgtcgtcgctttgatacggacccgagggtcaaacttcctttctcgatcgatttgcacagctgggaaaacagaaagaaggtcaaggagtgggagtactacgtgggctggctgatgaaagtggctgaaagcaagtacagcatcggattcgtcacaggcatgtgtgttctggggctgggatattggtggttcagaagtcaatag

SEQ ID NO: 18553 - protein, 473 aa, Muscodor strobelii
  misc_feature: SGI Peptide ID NO. 566223
  misc_feature (13)..(391): Pfam Id: PF03372 Pfam Desc: Endonuclease/Exonuclease/phosphatase family
  misc_feature (11)..(470): NCBI GI: 46128705 Blast Desc: FG08730.1 [Gibberella zeae PH-1]
  misc_feature (11)..(470): NCBI GI: 85074913 Blast Desc: NCU00684 [Neurospora crassa OR74A] gi|28927637|gb|EAA36588.1| conserved [Neurospora crassa OR74A]
  misc_feature (7)..(470): NCBI GI: 171684805 Blast Desc: protein product [Podospora anserina] gi|170942363|emb|CAP68015.1| protein product [Podospora anserina]
  misc_feature (11)..(470): NCBI GI: 149210217 Blast Desc: MGCH7_ch7g586 [Magnaporthe grisea 70-15] gi|86196541|gb|EAQ71179.1| MGCH7_ch7g586 [Magnaporthe grisea 70-15]
  misc_feature (11)..(466): NCBI GI: 156042151 Blast Desc: SS1G_11626 [Sclerotinia sclerotiorum 1980] gi|154696009|gb|EDN95747.1| SS1G_11626 [Sclerotinia sclerotiorum 1980]
  misc_feature (11)..(470): NCBI GI: 39970729 Blast Desc: MGG_02831 [Magnaporthe grisea 70-15] gi|145017355|gb|EDK01718.1| MGG_02831 [Magnaporthe grisea 70-15]
  misc_feature (14)..(468): NCBI GI: 145250611 Blast Desc: An15g02810 [Aspergillus niger] gi|134082341|emb|CAK42356.1| protein product [Aspergillus niger]
  misc_feature (11)..(470): NCBI GI: 255949340 Blast Desc: Pc22g15190 [Penicillium chrysogenum Wisconsin 54-1255] gi|211592454|emb|CAP98807.1| Pc22g15190 [Penicillium chrysogenum Wisconsin 54-1255]
  misc_feature (14)..(472): NCBI GI: 259484114 Blast Desc: TPA: inositol 5-phosphatase, (AFU_orthologue; AFUA_5G07600) [Aspergillus nidulans FGSC A4]
  misc_feature (14)..(468): NCBI GI: 238495282 Blast Desc: inositol 5-phosphatase, [Aspergillus flavus NRRL3357] gi|220695527|gb|EED51870.1| inositol 5-phosphatase, [Aspergillus flavus NRRL3357]
  misc_feature (134)..(395): SWISSPROT Homolog: EC 3.1.3.56 Inositol-polyphosphate 5-phosphatase
  misc_feature: Useful for introducing or modulating the production of volatile compounds
MASSNESFADIDTFILTFNAGKAKINTAVFGQHLYDVFSERLILPELIIFCLQEMAPLADAFIGSYMISPYFSRYEQAVNMAAANFVAEQAASPEQIPKDPIFALVTSRNVGMTGIMLFARDPSALRKTKDTEVGFGAGQMGNKGAVGVRSLFVRQNAKGISKATELTFVATHLQAFEWNLEKRNQNWQTIVSGLLFDDPKKLHDASSEHPIQADETETLLPQDDQSVRRHNATIYKPGSHLFLGGDLNYRISTRSPTQDSIFPSLDPESPYYFTHFLSRDQLTSERQAGRTLHGLDEAEITFPPTYKLKMVKEPVAPESQCQEPPHRDVRFSADPVTWEWAQHRWPSWCDRILYLNAPSWVSSENKIKVLAYDALPAVRTSDHRAVYLRVHIPIIEPAELAPTDAARRRFDTDPRVKLPFSIDLHSWENRKKVKEWEYYVGWLMKVAESKYSIGFVTGMCVLGLGYWWFRSQ

SEQ ID NO: 18554 - DNA, 2012 bp, Muscodor strobelii
  misc_feature: SGI EST ID NO. CUFF.43848.1
  misc_feature: Variant of the nucleotide sequence at SEQ ID NO 18552
cttcctctcatgtgttcttcgggattcaactaatacgtcgttttcttgtcagttttggagcttaatacttggagttcttagtcaatacgtcaatacattccttcagataagtgggcttctatcccatacaacccctccatacataatcacccctgcacgaaccagagaccgccagagttcggtcaagagctcgctatggcgtcctccaatgagtccttcgccgacatcgacacctttattctcaccttcaatgccgggaaggccaagatcaacacggccgttttcggtcaacatctctacgatgtcttctcagaaagactcatcctcccggagcttattatcttgtaagtctcagagcccagggagaggcctcaaaagctgaaactacccagctgcctccaagaaatggctcccctcgcagacgcattcatcggttcttatatgatcagcccttatttctcaagatatgagcaggctgtcaacatggcggccgccaatttcgtggctgagcaggccgcttcacccgagcaaatccccaaggaccctatttttgctctcgtgactagccgtaatgtcggtatgactggcattatgctcttcgctcgggatccttcagccttacgcaagacaaaagacaccgaagtcgggtttggtgccggccaaatggggaacaagggcgctgttggtgtgaggtcgctttttgtgcgtcagaatgctaagggcatctccaaggctacggagttgacattcgtggctacgcacctacaagcttttgagtggaatttggaaaagaggaatcagaattggcagactatcgtgtctggtttactttttgatgatcccaaaaaactccatgatgcttcatctgaacatccgatccaagcagatgagacggaaactctgcttccccaggatgatcaaagtgtcagacgacacaacgccaccatctacaagcctggatctcatcttttcctgggtggggatttgaattatcggatctccacaaggtctcctacccaagactccatttttccgagtctagatccggagagtccttactattttacacatttcctaagccgagaccaattaacgagcgagagacaggcaggaaggactcttcatggtctcgacgaggctgagatcacattcccaccgacttataagcttaagatggtaaaagagccggttgcgccggaatcgcagtgccaggaacctcctcatcgagatgtgagattctcggccgatcctgtcacatgggaatgggcgcaacatcgatggccgtcgtggtgtgatcgcatcttatatctcaacgctccgagctgggtttcttctgagaataagatcaaggtcctagcgtacgatgcattgccagccgtgaggacgagcgatcaccgggccgtgtatctccgcgtccacattcctatcattgagccggctgagctagccccgactgatgcggctcgtcgtcgctttgatacggacccgagggtcaaacttcctttctcgatcgatttgcacagctgggaaaacagaaagaaggtcaaggagtgggagtactacgtgggctggctgatgaaagtggctgaaagcaagtacagcatcggattcgtcacaggcatgtgtgttctggggctgggatattggtggttcagaagtcaatagggaccggcttttgggcatttgagcaaaggcctcgccaagggacgtgcaactgcgttggtgtttgctggatcagtcttggctgggtcgcagaagggcgagaaatgggatgatggagatgtcgactagacgctatggctcggtggttgaggaattatggcatttgctgcttggcattgttatcagtggttttggaacgcctatggaggccaactatacgtggcggttatacccttagtctaatgtagaacttaggtcggctcggctacaggtcgctcactaatagaactaatacgaccaataatacaacgaataacaggtcacagacttttctgataccaatgcggata

SEQ ID NO: 18555 - DNA, 2154 bp, Muscodor strobelii
  misc_feature: SGI cDNA ID NO. 566224
  misc_feature: Encodes the peptide sequence at SEQ ID NO 18556
atgtacgacgactacgaccccaactacgaccaccgctctcgtggtagcggcggcggcggcggcggcagtggcagtggcagtggcgaccgcgaccgcgaccgacactatcgatcccggcatgacgcctctaggtctcccgtgagagcatcgccatcgcgggggggcggccactacggtgcccagcacgacaagcacgacaggcacgacaagcagcactacgacaacaacaaccgccgcgactaccgctccagccgtggccacagagaccgagacagggactacgacgactactacgacgattaccacgacgaccgagaagacggccaggcctcgggtccctcctcgccgcgccgctcgcctggccgcgatggtcaccaccgtgatgccgcctaccaccacgggcccggccggccgcaccacaccctgaagctggacgatgttccggactgggttgactatcaagatatcgacgatgctatgcgcgacatgggcgcaagggggctcgtccaggtccgcaccagattcgacgacagagccgaccgtcgcggctacgcctttgctgagttcaagtacgagagcgacgccgtagactttctcgagcgatactacccctctatcaccgtccaggaccgatctggttcttccgcaaagatctacatggaatacagccgcgagcgtcgacagcccgtcagcatggacgactggaaatgcactctttgccatttcgacaacttttcccgccgcaccacgtgcaagcagtgcaaagccccacgatcttccgagaacacggccgagatgaagttggatggccagagcgacgagtgcccccagcagacgccctcgcagttcatggtcatccgcgggcttgcgtcgtccaccaacgagaatgtcctcgcggctggcatcaagaagctctatctgtccaaagaagatgagtcgaagcagtcttcggccacaccgtccaagctgaagagcaccgcccccatcggtaacactcatggtctcggtgctaaatccggctcgctcgtgcgtgttttcatggtccgtgataaggcatccgacatcagctgtaattacggcttcgccgagttttctaccttagacgacgctcgagcagccatggccaagtacaatgcccacccgcaattcaccatctcatcgaggcccgtcaccgttacctacatccactctggcgtcttcatcccctatctgcatcccgtgcaagatcaggaccgcaagtttaccttttcagccacccacaacccctcgctacgactcagctattggaacccttcggtctacgtcagtgagctactgactttcgacgaatccctctatgaagacaatggccagagaaccggagagaagcaagacgcggttcagccggccggcaaagagtcgaagaagcgcaaagcggacaaggatctcgtggcgcccggcagtaagaagggcatcgctatggctccgcagctacagatgtgggcgaacaagcatgcggagcttcacaattctaaggaatcaagcgatatgacagctgccaaagatccactcacaggacccaatgccattggggtcaccgctccttcttcactacctccttcaatctcatacgccgacctcgagcaaatgtgctgccttctgtgcagacgtaagttcagtaacgagccgtctcttcggaggcatgagcagatcagcgatatgcacaaatcaaatgcagaggatgaggctctcatcgctaaagccacgcaagacctcaaggctctcggcaaagagcccacgaccatttaccgagacagagcgaaggagcggcgccaggcccacaatcagccgacgaaaccaaagacgcatctcccaaagaagcagacccatgatcccactcctgtcaaggaaccggcgaagcccactgtttcaaagggtgccggactgctggccaagatgggttggacgtcaggtgagggactgggcgctgaggctggcggaaggacagagattatcgagacgattgcctatacaccaggcgtcgggctcggagcagagggaggcaagctaggtgatgctacggaagaagctgcgagggctacaaagaacgactacaaggatttcgtgtcccgagccaaggacaaggccagggaacgctatgagaagatgggataa

SEQ ID NO: 18556 - protein, 717 aa, Muscodor strobelii
  misc_feature: SGI Peptide ID NO. 566224
  misc_feature (635)..(679): Pfam Id: PF01585 Pfam Desc: G-patch domain
  misc_feature (231)..(260): Pfam Id: PF00641 Pfam Desc: Zn-finger in Ran binding protein and others
  misc_feature (40)..(716): NCBI GI: 156046070 Blast Desc: SS1G_09311 [Sclerotinia sclerotiorum 1980] gi|154693707|gb|EDN93445.1| SS1G_09311 [Sclerotinia sclerotiorum 1980]
  misc_feature (162)..(717): NCBI GI: 154319796 Blast Desc: BC1G_02379 [Botryotinia fuckeliana B05.10] gi|150856037|gb|EDN31229.1| BC1G_02379 [Botryotinia fuckeliana B05.10]
  misc_feature (131)..(717): NCBI GI: 159127876 Blast Desc: G-patch domain protein, [Aspergillus fumigatus A1163]
  misc_feature (131)..(717): NCBI GI: 146323335 Blast Desc: G-patch domain protein [Aspergillus fumigatus Af293] gi|129558341|gb|EAL92824.2| G-patch domain protein, [Aspergillus fumigatus Af293]
  misc_feature (182)..(716): NCBI GI: 225682141 Blast Desc: conserved [Paracoccidioides brasiliensis Pb03]
  misc_feature (131)..(716): NCBI GI: 119492754 Blast Desc: rna-binding protein [Neosartorya fischeri NRRL 181] gi|119411856|gb|EAW21799.1| rna-binding protein [Neosartorya fischeri NRRL 181]
  misc_feature (182)..(716): NCBI GI: 226280060 Blast Desc: rna-binding protein [Paracoccidioides brasiliensis Pb01]
  misc_feature (165)..(716): NCBI GI: 212544406 Blast Desc: G-patch domain protein, [Penicillium marneffei ATCC 18224] gi|210065326|gb|EEA19420.1| G-patch domain protein, [Penicillium marneffei ATCC 18224]
  misc_feature (136)..(716): NCBI GI: 121705018 Blast Desc: rna-binding protein [Aspergillus clavatus NRRL 1] gi|119398918|gb|EAW09346.1| rna-binding protein [Aspergillus clavatus NRRL 1]
  misc_feature (165)..(716): NCBI GI: 242812334 Blast Desc: G-patch domain protein, [Talaromyces stipitatus ATCC 10500] gi|218714275|gb|EED13698.1| G-patch domain protein, [Talaromyces stipitatus ATCC 10500]
MYDDYDPNYDHRSRGSGGGGGGSGSGSGDRDRDRHYRSRHDASRSPVRASPSRGGGHYGAQHDKHDRHDKQHYDNNNRRDYRSSRGHRDRDRDYDDYYDDYHDDREDGQASGPSSPRRSPGRDGHHRDAAYHHGPGRPHHTLKLDDVPDWVDYQDIDDAMRDMGARGLVQVRTRFDDRADRRGYAFAEFKYESDAVDFLERYYPSITVQDRSGSSAKIYMEYSRERRQPVSMDDWKCTLCHFDNFSRRTTCKQCKAPRSSENTAEMKLDGQSDECPQQTPSQFMVIRGLASSTNENVLAAGIKKLYLSKEDESKQSSATPSKLKSTAPIGNTHGLGAKSGSLVRVFMVRDKASDISCNYGFAEFSTLDDARAAMAKYNAHPQFTISSRPVTVTYIHSGVFIPYLHPVQDQDRKFTFSATHNPSLRLSYWNPSVYVSELLTFDESLYEDNGQRTGEKQDAVQPAGKESKKRKADKDLVAPGSKKGIAMAPQLQMWANKHAELHNSKESSDMTAAKDPLTGPNAIGVTAPSSLPPSISYADLEQMCCLLCRRKFSNEPSLRRHEQISDMHKSNAEDEALIAKATQDLKALGKEPTTIYRDRAKERRQAHNQPTKPKTHLPKKQTHDPTPVKEPAKPTVSKGAGLLAKMGWTSGEGLGAEAGGRTEIIETIAYTPGVGLGAEGGKLGDATEEAARATKNDYKDFVSRAKDKARERYEKMG

SEQ ID NO: 18557 - DNA, 2645 bp, Muscodor strobelii
  misc_feature: SGI EST ID NO. CUFF.43689.1
  misc_feature: Variant of the nucleotide sequence at SEQ ID NO 18555
gctgttgtggccgaacagcattctcgtttaccatactacactccgaaacagtctttcatggcccagctgtcgtcggccaattaagctagaattaagcatctgagttgcttgcacaaggagcagagtgggacagtgcgagcgacggtcgctgacgacatgtacgacgactacgaccccaactacgaccaccgctctcgtggtagcggcggcggcggcggcggcagtggcagtggcagtggcgaccgcgaccgcgaccgacactatcgatcccggcatggtaaaaatgctacagcatcagagggcctgatgacactagagtctttgctgaccatgcgccgagggaagacgcctctaggtctcccgtgagagcatcgccatcgcgggggggcggccactacggtgcccagcacgacaagcacgacaggcacgacaagcagcactacgacaacaacaaccgccgcgactaccgctccagccgtggccacagagaccgagacagggactacgacgactactacgacgattaccacgacgaccgagaagacggccaggcctcgggtccctcctcgccgcgccgctcgcctggccgcgatggtcaccaccgtgatgccgcctaccaccacgggcccggccggccgcaccacaccctgaagctggacgatgttccggactgggttgactatcaagatgtacctctatactgctgctatccatccaccacccccgacatctgagacgctcacattctctttgcttgccagatcgacgatgctatgcgcgacatgggcgcaagggggctcgtccaggtccgcaccagattcgacgacagagccggtacgttgcttcgagccatcttcacacgcgaatcccgtgcgctgacacgacccgagcagaccgtcgcggctacgcctttgctgagttcaagtacgagagcgacgccgtagactttctcgagcgatactacccctctatcaccgtccaggaccgatctggttcttccgcaaagatctacatggaatacagccgcgagcgtcgacagcccgtcagcatggacgactggaaatgcactctttgccatttcgacaacttttcccgccgcaccacgtgcaagcagtgcaaagccccacgatcttccgagaacacggccgagatgaagttggatggccagagcgacgagtgcccccagcagacgccctcgcagttcatggtcatccgcgggcttgcgtcgtccaccaacgagaatgtcctcgcggctggcatcaagaagctctatctgtccaaagaagatgagtcgaagcagtcttcggccacaccgtccaagctgaagagcaccgcccccatcggtaacactcatggtctcggtgctaaatccggctcgctcgtgcgtgttttcatggtccgtgataaggcatccgacatcagctgtaattacggcttcgccgagttttctaccttagacgacgctcgagcagccatggccaagtacaatgcccacccgcaattcaccatctcatcgaggcccgtcaccgttacctacatccactctggcgtcttcatcccctatctgcatcccgtgcaagatcaggaccgcaagtttaccttttcagccacccacaacccctcgctacgactcagctattggaacccttcggtctacgtcagtgagctactgactttcgacgaatccctctatgaagacaatggccagagaaccggagagaagcaagacgcggttcagccggccggcaaagagtcgaagaagcgcaaagcggacaaggatctcgtggcgcccggcagtaagaagggcatcgctatggctccgcagctacagatgtgggcgaacaagcatgcggagcttcacaattctaaggaatcaagcgatatgacagctgccaaagatccactcacaggacccaatgccattggggtcaccgctccttcttcactacctccttcaatctcatacgccgacctcgagcaaatgtgctgccttctgtgcagacgtaagttcagtaacgagccgtctcttcggaggcatgagcagatcagcgatatgcacaaatcaaatgcagaggatgaggctctcatcgctaaagccacgcaagacctcaaggctctcggcaaagagcccacgaccatttaccgagacagagcgaaggagcggcgccaggcccacaatcagccgacgaaaccaaagacgcatctcccaaagaagcagacccatgatcccactcctgtcaaggaaccggcgaagcccactgtttcaaagggtgccggactgctggccaagatgggttggacgtcaggtgagggactgggcgctgaggctggcggaaggacagagattatcgagacgattgcctatacaccaggcgtcgggctcggagcagagggaggcaagctaggtgatgctacggaagaagctgcgagggctacaaagaacgactacaaggatttcgtgtcccgagccaaggacaaggccagggaacgctatgagaagatgggataatgtggtaatgatactcatcaaattacgtgtacattatgtagcgaagaacatggcggcgattccgggattactaattgatttgtgacaagagtgacttaaaaactggcgaacatgaaactctcaaacccagtatcgc

SEQ ID NO: 18558 - DNA, 522 bp, Muscodor strobelii
  misc_feature: SGI cDNA ID NO. 566225
  misc_feature: Encodes the peptide sequence at SEQ ID NO 18559
atggatgctcaagcctcagagcttagcgaggatgcatgttacgtagccctcactcatgactatctcaacgtccaggacatcatggatcgtgtacgcagccctgccgccggagctatcgtcttgttcgccggcaccaccagggataactttgctggcaagcccgtcaaggaactccactactccgcctaccatgaaatggccctgcgcaccatgctgtccatctgcaaggctatcctcgcccgacatggtctccaggccatcgccatggtccaccgtttgggcgtcgtccctatcggccaggaaagtatcctcatcgccgtctccgctcctcatcgtcaggcggcctggtccgctggcgaggaggctcttgaagactgcaagaaccgcgtcgagatatggaagagagaagagttcgaaggcgaggagggcgtttggagagctaatcgagatggcttacccggtgtgaaattccaaccagactctctagactcggcacaacgtctccaacaagaacatgaatga

SEQ ID NO: 18559 - protein, 173 aa, Muscodor strobelii
  misc_feature: SGI Peptide ID NO. 566225
  misc_feature (14)..(130): Pfam Id: PF02391 Pfam Desc: MoaE protein
  misc_feature (4)..(157): NCBI GI: 39971103 Blast Desc: MGG_03018 [Magnaporthe grisea 70-15] gi|149210661|ref|XP_001522705.1| MGCH7_ch7g803 [Magnaporthe grisea 70-15] gi|121793856|sp|Q2KF83.1|MOC2B_MAGGR RecName: 2B; 2
  misc_feature (7)..(154): NCBI GI: 46128407 Blast Desc: FG08581.1 [Gibberella zeae PH-1]
  misc_feature (3)..(173): NCBI GI: 85113744 Blast Desc: NCU03170 [Neurospora crassa OR74A] gi|74618281|sp|Q7SEW2.1|MOC2B_NEUCR RecName: Full=Molybdenum cofactor synthesis protein 2B; Short=MOCS2B; AltName: cofactor 2
  misc_feature (5)..(160): NCBI GI: 154319794 Blast Desc: BC1G_02378 [Botryotinia fuckeliana B05.10] gi|150856036|gb|EDN31228.1| BC1G_02378 [Botryotinia fuckeliana B05.10]
  misc_feature (3)..(160): NCBI GI: 156046072 Blast Desc: SS1G_09312 [Sclerotinia sclerotiorum 1980] gi|226707497|sp|A7EVF4.1|MOC2B_SCLS1 RecName: Full=Molybdenum cofactor synthesis protein 2B; Short=MOCS2B; AltName: cofactor 2
  misc_feature (6)..(158): NCBI GI: 171680081 Blast Desc: protein product [Podospora anserina] gi|170939667|emb|CAP64893.1| protein product [Podospora anserina]
  misc_feature (9)..(158): NCBI GI: 189202246 Blast Desc: molybdopterin-converting factor subunit 2 [Pyrenophora tritici-repentis Pt-1C-BFP] gi|226707496|sp|B2WBW4.1|MOC2B_PYRTR RecName: Full=Molybdenum cofactor synthesis protein 2B; AltName:
  misc_feature (4)..(153): NCBI GI: 226707548 Blast Desc: molybdopterin-converting factor subunit 2 [Pyrenophora tritici-repentis Pt-1C-BFP] gi|226707496|sp|B2WBW4.1|MOC2B_PYRTR RecName: Full=Molybdenum cofactor synthesis protein 2B; AltName:
  misc_feature (4)..(153): NCBI GI: 119185256 Blast Desc: CIMG_07334 [Coccidioides immitis RS]
  misc_feature (4)..(153): NCBI GI: 240106595 Blast Desc: molybdopterin converting factor, subunit 2 family protein [Coccidioides posadasii C735 delta SOWgp]
MDAQASELSEDACYVALTHDYLNVQDIMDRVRSPAAGAIVLFAGTTRDNFAGKPVKELHYSAYHEMALRTMLSICKAILARHGLQAIAMVHRLGVVPIGQESILIAVSAPHRQAAWSAGEEALEDCKNRVEIWKREEFEGEEGVWRANRDGLPGVKFQPDSLDSAQRLQQEHE

SEQ ID NO: 18560 - DNA, 2030 bp, Muscodor strobelii
  misc_feature: SGI EST ID NO. CUFF.43586.1
  misc_feature: Variant of the nucleotide sequence at SEQ ID NO 18558
ccgccgcccttactgtcccctcactcatcaagtctaatatcttacatctgggtacatgtaggtaggaagccgcaacggtaaagtatgtagacgtgcacatctgtctacagcaccacctctatgccaagaacatgggtcgagtatatcttccagtgtaactcacttcaacttgaaatctctactcgctctctgatacctccatactgtatatgtacagtatttccctaaagctacccttgatcatctatctttcttcccctcagaatagctcgtcatggatgctcaagcctcagagcttagcgaggatgcatgttacgtagccctcactcatgactatctcaacgtccaggacatcatggatcgtgtacgcagccctgccgccggagctatcgtcttgttcgccggcaccaccagggataactttgctggcaagcccgtcaaggaactccactactccgcctaccatgaaatggccctgcgcaccatgctgtccatctgcaaggctatcctcgcccgacatggtctccaggccatcgccatggtccaccgtttgggcgtcgtccctatcggccaggaaagtatcctcatcgccgtctccgctcctcatcgtcaggcggcctggtccgctggcgaggaggctcttgaagactgcaagaaccgcgtcgagatatggaagagagaagagttcgaaggcgaggagggcgtttggagagctaatcgagatggcttacccggtgtgaaattccaaccagactctctagactcggcacaacgtctccaacaagaacatgaatgattcgtgcccatattggcgttatattcctgacaaacatgaaacacgaaatttcgcctatgaccaaatatttgaactgcttgacaacgccattgggatcagcagtgatttatcttactcgagcctccgatggcctatcattggcggccttgctagcattggaatagacagcctttcaacgagacccgaccaatgagacgttttgtcagacttcctcctgcctcgccaggggttggccaacggatgcaagaatagtagtacctgtgagaccagagaggggtcccagccccgcatcatgcggagctgatcaattgcatgttgtccctaaggcggcagtatagtgcggaaaggctactcagctgaacgtcgtgccacagaatcacatgatgtcttccttcgcggtcattaacccgttggaacttcgctttccgggtttatgatgcacaaaactgaatacaagcctgcattcgccaccgcgtgggatgctcctcacttggtcaatattgtgagacgtggggtcgcaggcacaatgcatttcggactggtattgagagactctagagagacactggggatgagtggataaaaaggcatcactgcgggctgcaaagtataaaccccgtcgcccaccttagcccagccgaggtcaactgcatgtttcgttccagaaggacaagatgtgcacatagattcaatgtttccgtatatgactcgagagctctcgaatgaatgagcacgtgaccagtttccaccagacagcatatccccttaaggattaaacaatacgccgtattacagattcccgtatcccattaacacggaaaaggtcgggctatgtgccgtcggatgggcatacattacaagactgcataatctcacagtggcccttggttggcgaggctggtcagttggctcgcgtaaatacacgacgcagccattgagctagaaatcgagtggatctatgagatatcgtagggtgcttgtttctcctgctatcgaatgatcgtccaaagaggaaggacattgatgccaagacctgccctcttagggttggagaagccggtctactgcgaagctaagatgtgcatctaggatggagacttcatgtccaacaacatcgtgaaaggtcgcaaggtggtctgttccttcactaattaatgtggctcagcaagtatcgaaatttacgagcatgatctttgacacgctatcagagacgccatctacaagtgtcattaat

SEQ ID NO: 18561 - DNA, 1563 bp, Muscodor strobelii
  misc_feature: SGI cDNA ID NO. 566226
  misc_feature: Reduced expression when VOC is produced
  misc_feature: Encodes the peptide sequence at SEQ ID NO 18562
atgccgcgacgtcctggtcgcgctgccgctaggcgcgccgcagcgaaaatggatgccacacctaagacttttgacgacctcgaagacgaagtcatgcctgacgctgatgcgggcgcgtccgacgccgacgcccagcctgacgaccccgccgacgccgaggaccaggagaatgattcagatgcagaggaggagaaagaagaggacaaccaggagtccgatgcgccgtcgcccaagtctcccacacccccagtacagcccgtcatccggagacgacgcctgggccgcccgcctaagaaccggcctcccgactgggacactcttcccatcgagccaccccagcgggatcccaatgacccccctagacgtcgtggccgcggaggttggagaggtcgcggcggccgcaagggagcctcgtatcagcccactcagcaggctatcgacaaggagggcactgtcgtcgatattgtcgatgacgagctcgccctgcccgaggaccccgagggtgaggccaaagtcgacaagatgggccacctgcaagagggccgcgagtaccgctgccgcacattcaccgtggccggccgcggagagaggctctacatgttatccaccgaacccgcccgctgtgtcggcttcagggactcttatctgttcttcaccaagcacaagcgtttgtacaagatcattattgatgaggaggagaaacgtgacatgattgagcgcgagatcattccccactcctacaagggccgtgccataggtatcgtcacggcccgatcagtgtttcgggagtttggcgccctgattatagtgggtggcaagaggatcatggacgattacgaggtcaccaaagccagattcgagggtgttgtggacggcgaaatcgccgatcccaacgacaagttcatccccggccaagaatacaacaggaatcagtacgtggcctggcacggtgcgagtgccgtctaccattccaacacgccggctggcattcccgtccagaacggcaaggtcgacatcaagaagcgtcgtgttaatgtcacagacgtgaattggcagctcgaacacgctcgcgaagcaagccgtttcaatgcagagctagctgccgtgcgccgattgaacgcaaacggtgtttatgatgtaaacaccaacatgaagcaatatcccgccatcatgcaacccacccatgcgcgaatcgagcagattcccatctcggtggactcggaagagtcgactgataaccctctattccctcctcttgacccacgaatcccccgtaacttcacagtcgtcgacacgtacatggagactccgcctaccggcatcgcccaagctacttacgagcagcgcgaggttccctcttttcttgcagacttccagggcctgggagctatctccagtgacatcctagacgatctgccgcccgactgccgagacgcgttcgactcggcgctgaagaaagagaaggcttggaaagcgacgtggggatcggagagcgtggcaacgcatcgacgagagcccattatcgatgctgctatagtgccgtacagcaagatcaacttatag

SEQ ID NO: 18562 - protein, 520 aa, Muscodor strobelii
  misc_feature: SGI Peptide ID NO. 566226
  misc_feature (172)..(272): Pfam Id: PF08624 Pfam Desc: Chromatin remodelling complex subunit
  misc_feature (1)..(516): NCBI GI: 85068257 Blast Desc: NCU07290 [Neurospora crassa OR74A] gi|28923741|gb|EAA32908.1| NCU07290 [Neurospora crassa OR74A]
  misc_feature (1)..(504): NCBI GI: 116195682 Blast Desc: CHGG_04439 [Chaetomium globosum CBS 148.51] gi|88180352|gb|EAQ87820.1| CHGG_04439 [Chaetomium globosum CBS 148.51]
  misc_feature (2)..(516): NCBI GI: 256734373 Blast Desc: [Nectria haematococca mpVI 77-13-4]
  misc_feature (14)..(516): NCBI GI: 46108622 Blast Desc: FG01193.1 [Gibberella zeae PH-1]
  misc_feature (18)..(515): NCBI GI: 170940167 Blast Desc: protein product [Podospora anserina]
  misc_feature (78)..(518): NCBI GI: 145615095 Blast Desc: MGG_05378 [Magnaporthe grisea 70-15] gi|145022011|gb|EDK06031.1| MGG_05378 [Magnaporthe grisea 70-15]
  misc_feature (62)..(516): NCBI GI: 261357833 Blast Desc: chromatin structure-remodeling complex protein RSC7 [Verticillium albo-atrum VaMs.102]
  misc_feature (1)..(513): NCBI GI: 156062018 Blast Desc: SS1G_01123 [Sclerotinia sclerotiorum 1980] gi|154696461|gb|EDN96199.1| SS1G_01123 [Sclerotinia sclerotiorum 1980]
  misc_feature (1)..(513): NCBI GI: 154292126 Blast Desc: BC1G_14872 [Botryotinia fuckeliana B05.10] gi|150846299|gb|EDN21492.1| BC1G_14872 [Botryotinia fuckeliana B05.10]
  misc_feature (21)..(514): NCBI GI: 115389308 Blast Desc: ATEG_02981 [Aspergillus terreus NIH2624] gi|114194555|gb|EAU36255.1| ATEG_02981 [Aspergillus terreus NIH2624]
  misc_feature: Useful for introducing or modulating the production of volatile compounds
MPRRPGRAAARRAAAKMDATPKTFDDLEDEVMPDADAGASDADAQPDDPADAEDQENDSDAEEEKEEDNQESDAPSPKSPTPPVQPVIRRRRLGRPPKNRPPDWDTLPIEPPQRDPNDPPRRRGRGGWRGRGGRKGASYQPTQQAIDKEGTVVDIVDDELALPEDPEGEAKVDKMGHLQEGREYRCRTFTVAGRGERLYMLSTEPARCVGFRDSYLFFTKHKRLYKIIIDEEEKRDMIEREIIPHSYKGRAIGIVTARSVFREFGALIIVGGKRIMDDYEVTKARFEGVVDGEIADPNDKFIPGQEYNRNQYVAWHGASAVYHSNTPAGIPVQNGKVDIKKRRVNVTDVNWQLEHAREASRFNAELAAVRRLNANGVYDVNTNMKQYPAIMQPTHARIEQIPISVDSEESTDNPLFPPLDPRIPRNFTVVDTYMETPPTGIAQATYEQREVPSFLADFQGLGAISSDILDDLPPDCRDAFDSALKKEKAWKATWGSESVATHRREPIIDAAIVPYSKINL

SEQ ID NO: 18563 - DNA, 2239 bp, Muscodor strobelii
  misc_feature: SGI EST ID NO. CUFF.43593.0
  misc_feature: Variant of the nucleotide sequence at SEQ ID NO 18561
accaaaacggcctatccaccatctgcaccggcgcattgcattgcgacagacgaccacttgcgccaggcgagccagactagacgagagccgctctgcatactttggtaaattaatacagttatcttgtatcactcggtggctccttcctcaatccactttgtgaacagcacgagaagaactcggcctcgctccgtctgcaggccttgcggaccgccctcagcgtttgcgtttgtgtctgcatctgcattctgctctcccatcataaacatcccctcagcttcagcatattatctggaaccgcaatgccgcgacgtcctggtcgcgctgccgctaggcgcgccgcagcgaaaatggatgccacacctaagacttttgacgacctcgaagacgaagtcatgcctgacgctgatgcgggcgcgtccgacgccgacgcccagcctgacgaccccgccgacgccgaggaccaggagaatgattcagatgcagaggaggagaaagaagaggacaaccaggagtccgatgcgccgtcgcccaagtctcccacacccccagtacagcccgtcatccggagacgacgcctgggccgcccgcctaagaaccggcctcccgactgggacactcttcccatcgagccaccccagcgggatcccaatgacccccctagacgtcgtggccgcggaggttggagaggtcgcggcggccgcaagggagcctcgtatcagcccactcagcaggctatcgacaaggagggcactgtcgtcgatattgtcgatgacgagctcgccctgcccgaggaccccgagggtgaggccaaagtcgacaagatgggccacctgcaagagggccgcgagtaccgctgccgcacattcaccgtggccggccgcggagagaggctctacatgttatccaccgaacccgcccgctgtgtcggcttcagggactcttatctgttcttcaccaagcacaagcgtttgtacaagatcattattgatgaggaggagaaacgtgacatgattgagcgcgagatcattccccactcctacaagggccgtgccataggtatcgtcacggcccgatcagtgtttcgggagtttggcgccctgattatagtgggtggcaagaggatcatggacgattacgaggtcaccaaagccagattcgagggtgttgtggacggcgaaatcgccgatcccaacgacaagttcatccccggccaagaatacaacaggaatcagtacgtggcctggcacggtgcgagtgccgtctaccattccaacacgccggctggcattcccgtccagaacggcaaggtcgacatcaagaagcgtcgtgttaatgtcacagacgtgaattggcagctcgaacacgctcgcgaagcaagccgtttcaatgcagagctagctgccgtgcgccgattgaacgcaaacggtgtttatgatgtaaacaccaacatgaagcaatatcccgccatcatgcaacccacccatgcgcgaatcgagcagattcccatctcggtggactcggaagagtcgactgataaccctctattccctcctcttgacccacgaatcccccgtaacttcacagtcgtcgacacgtacatggagactccgcctaccggcatcgcccaagctacttacgagcagcgcgaggttccctcttttcttgcagacttccagggcctgggagctatctccagtgacatcctagacgatctgccgcccgactgccgagacgcgttcgactcggcgctgaagaaagagaaggcttggaaagcgacgtggggatcggagagcgtggcaacgcatcgacgagagcccattatcgatgctgctatagtgccgtacagcaagatcaacttatagtgttctggtccttgagttgtgcggtagctgggtgcgcaattgcctttccgtcattatgagattcaaaacgagggaaggattttatgggatgggcaagcaatggcgtttgatgtgagattattgtatgagtagctcgtagatgggatggtgctcgtccgggttagcaacgaggcgattacttcgcttcgcaagtttgctctcgaggttattacggggttacaatgccccgacggattaacagggtgatatcctagataattaaaggaaggctatgtgtaaaatcattcgaaaccacttgtcgtgatttgtgctgtggtatgtggcgggagagaataatgtcatgctgatgagaagcattgaggccttgatgctcg

SEQ ID NO: 18564 - DNA, 1578 bp, Muscodor strobelii
  misc_feature: SGI cDNA ID NO. 566227
  misc_feature: Encodes the peptide sequence at SEQ ID NO 18565
atgccgcgacgtcctggtcgcgctgccgctaggcgcgccgcagcgaaaatggtgccatcccactcagatgccacacctaagacttttgacgacctcgaagacgaagtcatgcctgacgctgatgcgggcgcgtccgacgccgacgcccagcctgacgaccccgccgacgccgaggaccaggagaatgattcagatgcagaggaggagaaagaagaggacaaccaggagtccgatgcgccgtcgcccaagtctcccacacccccagtacagcccgtcatccggagacgacgcctgggccgcccgcctaagaaccggcctcccgactgggacactcttcccatcgagccaccccagcgggatcccaatgacccccctagacgtcgtggccgcggaggttggagaggtcgcggcggccgcaagggagcctcgtatcagcccactcagcaggctatcgacaaggagggcactgtcgtcgatattgtcgatgacgagctcgccctgcccgaggaccccgagggtgaggccaaagtcgacaagatgggccacctgcaagagggccgcgagtaccgctgccgcacattcaccgtggccggccgcggagagaggctctacatgttatccaccgaacccgcccgctgtgtcggcttcagggactcttatctgttcttcaccaagcacaagcgtttgtacaagatcattattgatgaggaggagaaacgtgacatgattgagcgcgagatcattccccactcctacaagggccgtgccataggtatcgtcacggcccgatcagtgtttcgggagtttggcgccctgattatagtgggtggcaagaggatcatggacgattacgaggtcaccaaagccagattcgagggtgttgtggacggcgaaatcgccgatcccaacgacaagttcatccccggccaagaatacaacaggaatcagtacgtggcctggcacggtgcgagtgccgtctaccattccaacacgccggctggcattcccgtccagaacggcaaggtcgacatcaagaagcgtcgtgttaatgtcacagacgtgaattggcagctcgaacacgctcgcgaagcaagccgtttcaatgcagagctagctgccgtgcgccgattgaacgcaaacggtgtttatgatgtaaacaccaacatgaagcaatatcccgccatcatgcaacccacccatgcgcgaatcgagcagattcccatctcggtggactcggaagagtcgactgataaccctctattccctcctcttgacccacgaatcccccgtaacttcacagtcgtcgacacgtacatggagactccgcctaccggcatcgcccaagctacttacgagcagcgcgaggttccctcttttcttgcagacttccagggcctgggagctatctccagtgacatcctagacgatctgccgcccgactgccgagacgcgttcgactcggcgctgaagaaagagaaggcttggaaagcgacgtggggatcggagagcgtggcaacgcatcgacgagagcccattatcgatgctgctatagtgccgtacagcaagatcaacttatag

SEQ ID NO: 18565 - protein, 525 aa, Muscodor strobelii
  misc_feature: SGI Peptide ID NO. 566227
  misc_feature (177)..(277): Pfam Id: PF08624 Pfam Desc: Chromatin remodelling complex subunit
  misc_feature (20)..(521): NCBI GI: 46108622 Blast Desc: FG01193.1 [Gibberella zeae PH-1]
  misc_feature (23)..(509): NCBI GI: 116195682 Blast Desc: CHGG_04439 [Chaetomium globosum CBS 148.51] gi|88180352|gb|EAQ87820.1| CHGG_04439 [Chaetomium globosum CBS 148.51]
  misc_feature (22)..(520): NCBI GI: 170940167 Blast Desc: protein product [Podospora anserina]
  misc_feature (23)..(521): NCBI GI: 85068257 Blast Desc: NCU07290 [Neurospora crassa OR74A] gi|28923741|gb|EAA32908.1| NCU07290 [Neurospora crassa OR74A]
  misc_feature (83)..(523): NCBI GI: 145615095 Blast Desc: MGG_05378 [Magnaporthe grisea 70-15] gi|145022011|gb|EDK06031.1| MGG_05378 [Magnaporthe grisea 70-15]
  misc_feature (67)..(521): NCBI GI: 261357833 Blast Desc: chromatin structure-remodeling complex protein RSC7 [Verticillium albo-atrum VaMs.102]
  misc_feature (1)..(518): NCBI GI: 156062018 Blast Desc: SS1G_01123 [Sclerotinia sclerotiorum 1980] gi|154696461|gb|EDN96199.1| SS1G_01123 [Sclerotinia sclerotiorum 1980]
  misc_feature (1)..(518): NCBI GI: 154292126 Blast Desc: BC1G_14872 [Botryotinia fuckeliana B05.10] gi|150846299|gb|EDN21492.1| BC1G_14872 [Botryotinia fuckeliana B05.10]
  misc_feature (26)..(519): NCBI GI: 115389308 Blast Desc: ATEG_02981 [Aspergillus terreus NIH2624] gi|114194555|gb|EAU36255.1| ATEG_02981 [Aspergillus terreus NIH2624]
  misc_feature (26)..(519): NCBI GI: 169768982 Blast Desc: [Aspergillus oryzae RIB40] gi|238501408|ref|XP_002381938.1| nuclear localization protein NPL6, [Aspergillus flavus NRRL3357] gi|83766819|dbj|BAE56959.1|
MPRRPGRAAARRAAAKMVPSHSDATPKTFDDLEDEVMPDADAGASDADAQPDDPADAEDQENDSDAEEEKEEDNQESDAPSPKSPTPPVQPVIRRRRLGRPPKNRPPDWDTLPIEPPQRDPNDPPRRRGRGGWRGRGGRKGASYQPTQQAIDKEGTVVDIVDDELALPEDPEGEAKVDKMGHLQEGREYRCRTFTVAGRGERLYMLSTEPARCVGFRDSYLFFTKHKRLYKIIIDEEEKRDMIEREIIPHSYKGRAIGIVTARSVFREFGALIIVGGKRIMDDYEVTKARFEGVVDGEIADPNDKFIPGQEYNRNQYVAWHGASAVYHSNTPAGIPVQNGKVDIKKRRVNVTDVNWQLEHAREASRFNAELAAVRRLNANGVYDVNTNMKQYPAIMQPTHARIEQIPISVDSEESTDNPLFPPLDPRIPRNFTVVDTYMETPPTGIAQATYEQREVPSFLADFQGLGAISSDILDDLPPDCRDAFDSALKKEKAWKATWGSESVATHRREPIIDAAIVPYSKINL

SEQ ID NO: 18566 - DNA, 2239 bp, Muscodor strobelii; identical to SEQ ID NO: 18563
  misc_feature: SGI EST ID NO. CUFF.43593.0
  misc_feature: Variant of the nucleotide sequence at SEQ ID NO 18564

SEQ ID NO: 18567 - DNA, 1191 bp, Muscodor strobelii
  misc_feature: SGI cDNA ID NO. 566228
  misc_feature: Elevated expression when VOC is produced
  misc_feature: Encodes the peptide sequence at SEQ ID NO 18568
atggacgaacaaagttcatcacaagaagagggcaacggtcaaaccagcgacccgctcaaggtccggctcagagaccgcgttgcacacttcacatgggcaaacttcgtgtgcacacaatccacaggtggcattgcgatcctcttgtccgtgacgccttaccagtttcacggcttacagaccgctggcgtggtggtgttcattttcaatatcgtcctcttccttcttttttgcgcggccatacttactcgattcattttacacccttatacccttagacgatctttcataaatccccccgagtccttcttcttcggttcattcttactgtctatcgcaacgttcatcatatgcatgcagaggtttggtgtaatgcacactggcccatggctgatagtcgtgatacgcgtgctgttctggatatacgcagctattagtctgttattttcgacttccatttgggtattgctcggtgtcaagtcttccgccaaaatggcgccgcttcagccgcctatattcctcatagttttcaatgctatgctcacaggtaccgtggcgggtgctattgcaccgacacagccgccaagcgagcgcctgtccataatcgtggcaggaatagcgtaccagggtctgggttgggtacttgcgatgcttctccttggatggtatcttggaagccttgtggaaaaaggaccaggcccgccaaacattcgtcttggcttgttcataccggtggggtcatcaggatacactatcgtggctctgatcggctgtgcacggtatgtcccacaagaatatggttactttgcatcacacccgaacgctgcagagatcgtccaagttgttgctttgtgggcttctatcttcttgtggctggtctcgttttggatttttgccgtcgctttaattgcctgcctcccacttctttggccttttcaaagtgggcggtttcagccgcgcatggcgtttacactctcgtggtggagtatcatctttcccaatgttggtttcacgatcggaacagcctatatcggggaggagctggaatcaccagcgattcagtgggttgctaccgccatggccattctcctcgttgtcttctggctcatggacttgactctacatttcaaagcgctcctcacaggccagataatgtatccggggaaggatgaggatgctgtcaagtctgactaa

SEQ ID NO: 18568 - protein, 396 aa, Muscodor strobelii
  misc_feature: SGI Peptide ID NO. 566228
  misc_feature (32)..(339): Pfam Id: PF03595 Pfam Desc: C4-dicarboxylate transporter/malic acid transport protein
  misc_feature (2)..(391): NCBI GI: 169623676 Blast Desc: SNOG_15082 [Phaeosphaeria nodorum SN15] gi|111056505|gb|EAT77625.1| SNOG_15082 [Phaeosphaeria nodorum SN15]
  misc_feature (3)..(391): NCBI GI: 46137545 Blast Desc: FG10288.1 [Gibberella zeae PH-1]
  misc_feature (4)..(391): NCBI GI: 256731833 Blast Desc: NECHADRAFT_93755 [Nectria haematococca mpVI 77-13-4]
  misc_feature (83)..(349): NCBI GI: 46137877 Blast Desc: FG10454.1 [Gibberella zeae PH-1]
  misc_feature (3)..(396): NCBI GI: 154290673 Blast Desc: BC1G_15595 [Botryotinia fuckeliana B05.10] gi|150847447|gb|EDN22640.1| BC1G_15595 [Botryotinia fuckeliana B05.10]
  misc_feature (3)..(391): NCBI GI: 116208756 Blast Desc: CHGG_03671 [Chaetomium globosum CBS 148.51] gi|88184268|gb|EAQ91736.1| CHGG_03671 [Chaetomium globosum CBS 148.51]
  misc_feature (5)..(394): NCBI GI: 121719747 Blast Desc: C4-dicarboxylate transporter/malic acid transport protein, [Aspergillus clavatus NRRL 1] gi|119404784|gb|EAW15146.1| C4-dicarboxylate transporter/malic 1]
  misc_feature (2)..(392): NCBI GI: 154322012 Blast Desc: BC1G_01153 [Botryotinia fuckeliana B05.10] gi|150850400|gb|EDN25593.1| BC1G_01153 [Botryotinia fuckeliana B05.10]
  misc_feature (4)..(394): NCBI GI: 119484216 Blast Desc: C4-dicarboxylate transporter/malic acid transport protein, [Neosartorya fischeri NRRL 181] gi|119410167|gb|EAW20114.1| C4-dicarboxylate transporter/malic
  misc_feature (5)..(394): NCBI GI: 70983484 Blast Desc: C4-dicarboxylate transporter/malic acid transport protein, [Aspergillus fumigatus Af293] gi|66844895|gb|EAL85231.1| C4-dicarboxylate transporter/malic acid transport protein, Af293]
  misc_feature: Useful for introducing or modulating the production of volatile compounds
MDEQSSSQEEGNGQTSDPLKVRLRDRVAHFTWANFVCTQSTGGIAILLSVTPYQFHGLQTAGVVVFIFNIVLFLLFCAAILTRFILHPYTLRRSFINPPESFFFGSFLLSIATFIICMQRFGVMHTGPWLIVVIRVLFWIYAAISLLFSTSIWVLLGVKSSAKMAPLQPPIFLIVFNAMLTGTVAGAIAPTQPPSERLSIIVAGIAYQGLGWVLAMLLLGWYLGSLVEKGPGPPNIRLGLFIPVGSSGYTIVALIGCARYVPQEYGYFASHPNAAEIVQVVALWASIFLWLVSFWIFAVALIACLPLLWPFQSGRFQPRMAFTLSWWSIIFPNVGFTIGTAYIGEELESPAIQWVATAMAILLVVFWLMDLTLHFKALLTGQIMYPGKDEDAVKSD

SEQ ID NO: 18569 - DNA, 3203 bp, Muscodor strobelii
  misc_feature: SGI EST ID NO. CUFF.43595.0
  misc_feature: Variant of the nucleotide sequence at SEQ ID NO 18567
gtctctttgctcggcttctgcaccggtgtctgactcctggggtttgattcgtgccccgactctcattaatacctcaagtgtgtcaatggcagcgaataccgcgcgggtatagcaacggccttgattcaatgtctacccgccgtccacagtatccaaagggtcagatgcaggatataagtgtcggcgtggacatgaaaccgtggacagatactgatcttcccccggaaacggaatattgatcatggacgaacaaagttcatcacaagaagagggcaacggtcaaaccagcgacccgctcaaggtccggctcagagaccgcgttgcacacttcacatgggcaaacttcgtgtgcacacaatccacaggtggcattgcgatcctcttgtccgtgacgccttaccagtttcacggcttacagaccgctggcgtggtggtgttcattttcaatatcgtcctcttccttcttttttgcgcggccatacttactcgattcattttacacccttatacccttagacgatctttcataaatccccccgagtccttcttcttcggttcattcttactgtctatcgcaacgttcatcatatgcatgcagaggtttggtgtaatgcacactggcccatggctgatagtcgtgatacgcgtgctgttctggatatacgcagctattagtctgttattttcgacttccatttgggtattgctcggtgtcaagtcttccgccaaaatggcgccgcttcagccgcctatattcctcatagttttcaatgctatgctcacaggtaccgtggcgggtgctattgcaccgacacagccgccaagcgagcgcctgtccataatcgtggcaggaatagcgtaccagggtctgggttgggtacttgcgatgcttctccttggatggtatcttggaagccttgtggaaaaaggaccaggcccgccaaacattcgtcttggcttgttcataccggtggggtcatcaggatacactatcgtggctctgatcggctgtgcacggtatgtcccacaagaatatggttactttgcatcacacccgaacgctgcagagatcgtccaagttgttgctttgtgggcttctatcttcttgtggctggtctcgttttggatttttgccgtcgctttaattgcctgcctcccacttctttggccttttcaaagtgggcggtttcagccgcgcatggcgtttacactctcgtggtggagtatcatctttcccaatgttggtttcacgatcggaacagcctatatcggggaggagctggaatcaccagcgattcagtgggttgctaccgccatggccattctcctcgttgtcttctggctcatggacttgactctacatttcaaagcgctcctcacaggccagataatgtatccggggaaggatgaggatgctgtcaagtctgactaacaaatgatgcgatgacatgtattctagaatatagatctactaccgcaccttggccggactagctcgtttctccccggcaattgcgcaaggtttgcatcaacctacttacaatcgatcagtagtgctttcgtgctacattcggatcatcgttcctagaggtcacctctgtcgagcgtttatctcacgtcttcgtcttgttaacaaaatgcaagtcgatcgacacgcgaatacaacctttttagtcctcatttttcacctcagtgtgaataatgtataggttatacagcacgacatctccagcttcgtaattacgctacagtaccgtcagcgataagcacgttttgaagccagcctcgcataagcgctcggattgtcctaccaagtctcaactttggtgcattacggtccatccaaccacctatttccttatttctcatcatcacaaagttcgacggccagtcttgagaaatcgtcttcatatttctggcctgtatcgtgagacttttcgagatacgtcagcccgcctcggtgcagctcaatgtcgcctaccagcacccacgatgtaatactcgtgagcaggccggcacacaggggtatctggtcatagtgtcgcaatgcactggcgtgttctcgccccggggcacggaacagcataacaatgagcgaggtaggcaccataaatcctcaaagttacttagtatcgcaacgaatggctctgtggctctgatgtaagcctgcagcactattggagagtgatctgtcatcaaatgactattcatctccgaagtcaatggcatgtgtctgcttctggaccgctgccatgtccaaggatcctcggcgggataaaagttggttcgaaataggggcttcagcaagttcagagacttacccaaaaccacaagacattctccgagatcttaaagcttacatcggatatccataactgagataaaaacaccgatcttaaaattttgagagaaggaaaggggatcgcacttgtattgcaagttccccagatatgcccttgtgctttcttgtagaagtcccacataaggttgaaaagctttgagccacactaagaatgtttgtgtgtgctcggcgcgcgaaaggccgtttatttcgaaggccgcaaagagtactgagccaaggtcaagtacatacacaggtgtttccctaacaagacattgacccctgactttagaagtgcaagtctggaggagggtattcgcccatacccactagctactggtagtgcatctagtcttcattgttgatgtactttacccatagagtcttcgatgttggctggattgcacagttgatgaaggtcctccagtcaccggaatactagcttctcattgtatcgcggttgattctcgctcgatattcgaggcttaaatggcagcaattggatacatgtactcaccatccaggtggattacaagggagggactctggatggccatgagccaacaattcgcattttgaattgtcttgcccttactatatatcatacagctcatcagggttttgcttccttatcattaacatatggtacctgaatcgatatctggtagtataacaaatatcacctaaaacaagatagaacagggtcaatgaggtgagctacccgtacgcaggtgcttacgtactgtatatttactaaatttgcactgtaataatactgtagagtgtgcatcgaatccaccactgcaaaagagtgggcctcttgactccattctggcccgtgcagcttccctgccgagtgctg

SEQ ID NO: 18570 - DNA, 1281 bp, Muscodor strobelii
  misc_feature: SGI cDNA ID NO. 566229
  misc_feature: Encodes the peptide sequence at SEQ ID NO 18571
atgtctgaaacctggatccagtcgtacgcggtgacagccatccgccacgttctgacgggcatcaaacacggagagctgagaatagtatccaagtataagggccagaacgccccttcagaggtctttggctcacggaacaaggacgatggcactagccatagtgtaacagtcacgatcaatgatccgaatgcctgggttcggatggctcaaagttttgatctggggttcggggaagcatacatgcgacaagagattgactgcgaggacctcgttggggttttttctgttcgtcgagttttacttcccctaactagagctgtcctgctaactagtttcactggaaagctgtacataactaattccgagagtcttggttcctctggcggtggcatcctttaccaactgataccgcgactttcacatatcctcttcaggcccgtcaatgacgtgtcgcgtgctcgacagcatgcgtcatttcactacgacacgtccaacgtgctcttctccaactttctctctcctgacatgaactattcttgtgcgctctggtcacgaaacccagatgaatcactagaaacggcgcagcaacgaaaggtggacagcatcattaacaaggctcgcctgtcccagtctgaccatgtgctggagatcggatgcggttggggctatcttgccattgaggcggtcaggaaggcgggctgtcgcctcaccggcttgacgctgtctaaggagcaaaaatcacttgccgaagagcggatcaaagcagcagggctatcgaaacgcatcaccatccttctttgcgactatcgccaggccccggtgcccgatgggggttatgatcggatcatctcggtggggatgctcgaacatgttggtgataagtttatgaaccagtatttcggctgtatctctggcctgctcaagaaaaaagggggcgtggtggtcattgatggtatgacgagtactaatcagcagttccgcgatagccgtccgagcctcgacactttcatggatcgatacgtcttcccgggagcatatcttccgacgataaatcagctcgtaacctcaattcacactgggtccagaggcacgcttgaggtggaaaccgtccaaagccttgggccgcactatgccaagacgttcaaagtctggcatgaaaatttcctacgtaattggcagacaaccagggccagcttttctgaacaacatcctgatgctagcgaagaggccatagaggcgttcagacagagatggctgaactccagaacaggcgatctatag

SEQ ID NO: 18571 - protein, 426 aa, Muscodor strobelii
  misc_feature: SGI Peptide ID NO. 566229
  misc_feature (148)..(422): Pfam Id: PF02353 Pfam Desc: Cyclopropane-fatty-acyl-phospholipid synthase
  misc_feature (215)..(315): Pfam Id: PF08241 Pfam Desc: Methyltransferase domain
  misc_feature (215)..(314): Pfam Id: PF08242 Pfam Desc: Methyltransferase domain
  misc_feature (148)..(401): Pfam Id: PF02353 Pfam Desc: Cyclopropane-fatty-acyl-phospholipid synthase
  misc_feature (4)..(419): NCBI GI: 242822019 Blast Desc: methyltransferase, [Talaromyces stipitatus ATCC 10500] gi|218712719|gb|EED12144.1| methyltransferase, [Talaromyces stipitatus ATCC 10500]
  misc_feature (4)..(419): NCBI GI: 156062724 Blast Desc: SS1G_01478 [Sclerotinia sclerotiorum 1980] gi|154696814|gb|EDN96552.1| SS1G_01478 [Sclerotinia sclerotiorum 1980]
  misc_feature (4)..(419): NCBI GI: 212546937 Blast Desc: 2-heptaprenyl-1,4-naphthoquinone methyltransferase, [Penicillium marneffei ATCC 18224] gi|210065142|gb|EEA19237.1| 2-heptaprenyl-1,4-naphthoquinone methyltransferase, [Penicillium
  misc_feature (68)..(419): NCBI GI: 154313047 Blast Desc: BC1G_05525 [Botryotinia fuckeliana B05.10] gi|150849610|gb|EDN24803.1| BC1G_05525 [Botryotinia fuckeliana B05.10]
  misc_feature (6)..(419): NCBI GI: 145234909 Blast Desc: An03g02040 [Aspergillus niger] gi|134057779|emb|CAK38174.1| protein product [Aspergillus niger]
  misc_feature (81)..(419): NCBI GI: 169763564 Blast Desc: [Aspergillus oryzae RIB40] gi|83770710|dbj|BAE60843.1| protein product [Aspergillus oryzae]
  misc_feature (142)..(419): NCBI GI: 238489499 Blast Desc: methyltransferase, [Aspergillus flavus NRRL3357] gi|220698375|gb|EED54715.1| methyltransferase, [Aspergillus flavus NRRL3357]
  misc_feature (2)..(418): NCBI GI: 261359797 Blast Desc: cyclopropane-fatty-acyl-phospholipid synthase [Verticillium albo-atrum VaMs.102]
  misc_feature (2)..(418): NCBI GI: 256725967 Blast Desc: NECHADRAFT_42914 [Nectria haematococca mpVI 77-13-4]
  misc_feature (2)..(418): NCBI GI: 169621468 Blast Desc: SNOG_13944 [Phaeosphaeria nodorum SN15] gi|111057449|gb|EAT78569.1| SNOG_13944 [Phaeosphaeria nodorum SN15]
  misc_feature (52)..(402): SWISSPROT Homolog: EC 2.1.1.79 Cyclopropane-fatty-acyl-phospholipid synthase
MSETWIQSYAVTAIRHVLTGIKHGELRIVSKYKGQNAPSEVFGSRNKDDGTSHSVTVTINDPNAWVRMAQSFDLGFGEAYMRQEIDCEDLVGVFSVRRVLLPLTRAVLLTSFTGKLYITNSESLGSSGGGILYQLIPRLSHILFRPVNDVSRARQHASFHYDTSNVLFSNFLSPDMNYSCALWSRNPDESLETAQQRKVDSIINKARLSQSDHVLEIGCGWGYLAIEAVRKAGCRLTGLTLSKEQKSLAEERIKAAGLSKRITILLCDYRQAPVPDGGYDRIISVGMLEHVGDKFMNQYFGCISGLLKKKGGVVVIDGMTSTNQQFRDSRPSLDTFMDRYVFPGAYLPTINQLVTSIHTGSRGTLEVETVQSLGPHYAKTFKVWHENFLRNWQTTRASFSEQHPDASEEAIEAFRQRWLNSRTGDL

SEQ ID NO: 18572 - DNA, 1314 bp, Muscodor strobelii
  misc_feature: SGI cDNA ID NO. 566230
  misc_feature: Encodes the peptide sequence at SEQ ID NO 18573
atgggattgaatagcgagaagcagcttatacgcgtgggcattattggcgcaggcattgctggatgttgcctagccatcggcttgcttcagaacccttcacttgacgtgcagctctacgaagcatatccagaggtcaaagttcgcggagctggactagccttgcatggcaatgccattagatcaatggacttcatctcttccagaatcaagacagcgtatttcaagaaatctcactacatggcaaatgaaaaggacatcgagatggcaacacaattcatcatttctagcggtgaacatgctggtgagttagggagagcaaaaggacgaagaaccgttcatcgtgctcatttcattgaagggcttctggaagaggcgattcccatctcgcgaattcatttcgcgaagcgtgttaatagcctccaggaagatgctgcaagcggtaaagtcacagccactttcgaggacggagcccaagagatattcgatgtgctgtttggcggggaaggggtcaatagtccgacgaggaaatttattctcggccatgaccatccagctgcgaaccctgtcaatcatgatcgttggcgccagttccataggaatgtaccaatggaaatcgctaaaaacgtagtatcgaaggaacagacggagaaggttgtatcgtattgcacaccagtaggattcatcaatggtcttcaagtcgatctcgggaaaacttttggtgtagcatttgctgttatcaaagagacagcaaatgtcctgaagaggggctgcctttcaatcctaagctctggatcggatacctcccaggactggatgctcttatctcgctcttggaagaagacgcaagggaagaatgggtacttcaaggtcagagccgatgtctttttctctctttcttgcatgtcttggctcctaagcatcttagctcatgaccatgaccacgcgccaacgtactataagggccgcatcgctatgatcggcgacgcagctcacgctacactcccacacgctggtaatggtgcggcacaagccatcgaggactgtgctatacttactggagttttctctcgagtaaattcatgtgcagacattgaacctgcattgaaggcatttgatgagatccggaggccgcgaagtcagaaggttatcgacattacgagacttttcagcaagctctatagcaaagacccggaggagatagacttggccacaatgagagctcaaatgaaagagggcggtatgtacactaatggcgttgatatggatgttcaggtccaaactgctcttgatgctttcgagaagtacaaagcatga

SEQ ID NO: 18573 - protein, 437 aa, Muscodor strobelii
  misc_feature: SGI Peptide ID NO. 566230
  misc_feature (9)..(386): Pfam Id: PF01494 Pfam Desc: FAD binding domain
  misc_feature (11)..(41): Pfam Id: PF01266 Pfam Desc: FAD dependent oxidoreductase
  misc_feature (3)..(433): NCBI GI: 171678427 Blast Desc: protein product [Podospora anserina] gi|170937283|emb|CAP61940.1| protein product [Podospora anserina]
  misc_feature (7)..(428): NCBI GI: 154319498 Blast Desc: BC1G_02230 [Botryotinia fuckeliana B05.10] gi|150855888|gb|EDN31080.1| BC1G_02230 [Botryotinia fuckeliana B05.10]
  misc_feature (7)..(433): NCBI GI: 156061635 Blast Desc: SS1G_02963 [Sclerotinia sclerotiorum 1980] gi|154700364|gb|EDO00103.1| SS1G_02963 [Sclerotinia sclerotiorum 1980]
  misc_feature (10)..(433): NCBI GI: 46137629 Blast Desc: FG10330.1 [Gibberella zeae PH-1]
  misc_feature (4)..(393): NCBI GI: 46115630 Blast Desc: FG03657.1 [Gibberella zeae PH-1]
  misc_feature (23)..(432): NCBI GI: 115399700 Blast Desc: conserved [Aspergillus terreus NIH2624] gi|114191116|gb|EAU32816.1| conserved [Aspergillus terreus NIH2624]
  misc_feature (5)..(393): NCBI GI: 70989613 Blast Desc: salicylate hydroxylase [Aspergillus fumigatus Af293] gi|66847287|gb|EAL87618.1| salicylate hydroxylase, [Aspergillus fumigatus Af293] gi|159129063|gb|EDP54177.1| salicylate fumigatus
  misc_feature (3)..(425): NCBI GI: 145243986 Blast Desc: An11g05130 [Aspergillus niger] gi|134079190|emb|CAK48412.1| protein product [Aspergillus niger]
  misc_feature (5)..(393): NCBI GI: 119480247 Blast Desc: salicylate hydroxylase, [Neosartorya fischeri NRRL 181] gi|119408306|gb|EAW18255.1| salicylate hydroxylase, [Neosartorya fischeri NRRL 181]
  misc_feature (3)..(431): NCBI GI: 169770145 Blast Desc: [Aspergillus oryzae RIB40] gi|83767401|dbj|BAE57540.1| protein product [Aspergillus oryzae]
  misc_feature (3)..(397): SWISSPROT Homolog: EC 1.14.13.1 Salicylate 1-monooxygenase
MGLNSEKQLIRVGIIGAGIAGCCLAIGLLQNPSLDVQLYEAYPEVKVRGAGLALHGNAIRSMDFISSRIKTAYFKKSHYMANEKDIEMATQFIISSGEHAGELGRAKGRRTVHRAHFIEGLLEEAIPISRIHFAKRVNSLQEDAASGKVTATFEDGAQEIFDVLFGGEGVNSPTRKFILGHDHPAANPVNHDRWRQFHRNVPMEIAKNVVSKEQTEKVVSYCTPVGFINGLQVDLGKTFGVAFAVIKETANVLKRGCLSILSSGSDTSQDWMLLSRSWKKTQGKNGYFKVRADVFFSLSCMSWLLSILAHDHDHAPTYYKGRIAMIGDAAHATLPHAGNGAAQAIEDCAILTGVFSRVNSCADIEPALKAFDEIRRPRSQKVIDITRLFSKLYSKDPEEIDLATMRAQMKEGGMYTNGVDMDVQVQTALDAFEKYKA

SEQ ID NO: 18574 - DNA, 597 bp, Muscodor strobelii
  misc_feature: SGI EST ID NO. CUFF.43616.0
  misc_feature: Variant of the nucleotide sequence at SEQ ID NO 18572
taagctctggatcggatacctcccaggactggatgctcttatctcgctcttggaagaagacgcaagggaagaatgggtacttcaagaccatgaccacgcgccaacgtactataagggccgcatcgctatgatcggcgacgcagctcacgctacactcccacacgctggtaatggtgcggcacaagccatcgaggactgtgctatacttactggagttttctctcgagtaaattcatgtgcagacattgaacctgcattgaaggcatttgatgagatccggaggccgcgaagtcagaaggttatcgacattacgagacttttcagcaagctctatagcaaagacccggaggagatagacttggccacaatgagagctcaaatgaaagagggcggtatgtacactaatggcgttgatatggatgttcaggtccaaactgctcttgatgctttcgagaagtacaaagcatgaacaatttggcgcgtgggtaatgtagttgtgcagctattataagccaagagtgttagtgtttatacgaggatccatacatccacccaaagtataggtagtacatgacatcttgcaaatgtaccaagtta

SEQ ID NO: 18575 - DNA, 615 bp, Muscodor strobelii
  misc_feature: SGI cDNA ID NO. 566231
  misc_feature: Encodes the peptide sequence at SEQ ID NO 18576
atgacttccgagacaagctacatgtctacaaacgtggacgaaatgattatcgacgtcagcagcacacctgcaaacattaatgagactacactcgacgaattcactgaacccgaagtaccagccgtagtcttatcctcagatggcgttatgattcccacgacagtgaaaacggttatgcaagcgaatgctatgcgcactatgtacggggatctgactaaagagaacgccgacgtacccatcccttggatggaggtgatagaaccgacctgccgtttggtcctagcatggtgtgaacatcaccgcaacgacaaaacaatcgatgccgacggactcgacattcctcagcaccgagaaccggtcaaaattggtggtgtaccggactgggacaagaatttcaccgataaactagatgatgttgaccgcatactgcttgccaacgctgctgactatctcgaaatcccggacctcatgtcttacattgctgtcgccatagctgaactattgataggccgttcgacacaggaaatgagggacatcttaggtatcgaaaatgattgggcacctggagaagaagaagccctacgcaaacaaaatgcgtgggcaatggattgctaa

SEQ ID NO: 18576 - protein, 204 aa, Muscodor strobelii
  misc_feature: SGI Peptide ID NO. 566231
  misc_feature (125)..(203): Pfam Id: PF01466 Pfam Desc: Skp1 family, dimerisation domain
  misc_feature (45)..(203): NCBI GI: 39940524 Blast Desc: MGG_04978 [Magnaporthe grisea 70-15] gi|145010784|gb|EDJ95440.1| MGG_04978 [Magnaporthe grisea 70-15]
  misc_feature (45)..(203): NCBI GI: 169765209 Blast Desc: [Aspergillus oryzae RIB40] gi|238503494|ref|XP_002382980.1| sulfur metabolism regulator SkpA, [Aspergillus flavus NRRL3357] gi|57157146|dbj|BAD83607.1| C
  misc_feature (38)..(203): NCBI GI: 116207500 Blast Desc: CHGG_03043 [Chaetomium globosum CBS 148.51] gi|88183640|gb|EAQ91108.1| CHGG_03043 [Chaetomium globosum CBS 148.51]
  misc_feature (19)..(203): NCBI GI: 190346838 Blast Desc: conserved [Pichia guilliermondii ATCC 6260]
  misc_feature (42)..(203): NCBI GI: 240109240 Blast Desc: sulphur metabolism negative regulator, [Coccidioides posadasii C735 delta SOWgp]
  misc_feature (35)..(203): NCBI GI: 146418840 Blast Desc: conserved [Pichia guilliermondii ATCC 6260]
  misc_feature (43)..(201): NCBI GI: 119182323 Blast Desc: CIMG_06200 [Coccidioides immitis RS]
  misc_feature (39)..(203): NCBI GI: 261358189 Blast Desc: S-phase kinase-associated protein 1A [Verticillium albo-atrum VaMs.102]
  misc_feature (42)..(203): NCBI GI: 126138408 Blast Desc: PICST_32591 [Pichia stipitis CBS 6054] gi|126093005|gb|ABN67698.1| [Pichia stipitis CBS 6054]
  misc_feature (35)..(203): NCBI GI: 50425747 Blast Desc: DEHA0F27555g [Debaryomyces hansenii CBS767] gi|49657139|emb|CAG89889.1| DEHA2F26004p [Debaryomyces hansenii]
MTSETSYMSTNVDEMIIDVSSTPANINETTLDEFTEPEVPAVVLSSDGVMIPTTVKTVMQANAMRTMYGDLTKENADVPIPWMEVIEPTCRLVLAWCEHHRNDKTIDADGLDIPQHREPVKIGGVPDWDKNFTDKLDDVDRILLANAADYLEIPDLMSYIAVAIAELLIGRSTQEMRDILGIENDWAPGEEEALRKQNAWAMDC

SEQ ID NO: 18577 - DNA, 655 bp, Muscodor strobelii
  misc_feature: SGI EST ID NO. CUFF.43644.0
  misc_feature: Variant of the nucleotide sequence at SEQ ID NO 18575
gcactatgtacggggatctgactaaagagaacgccgacgtacccatcccttggatggaggtgatagaaccgacctgccgtttggtcctagcatggtgtgaacatcaccgcaacgacaaaacaatcgatgccgacggactcgacattcctcagcaccgagaaccggtcaaaattggtggtgtaccggactgggacaagaatttcaccgataaactagatgatgttgaccgcatactgcttgccaacgctgctgactatctcgaaatcccggacctcatgtcttacattgctgtcgccatagctgaactattgataggccgttcgacacaggaaatgagggacatcttaggtatcgaaaatgattgggcacctggagaagaagaagccctacgcaaacaaaatgcgtgggcaatggattgctaagatagtcgtccaacgatttcacacctggtggtctctgactgcttgatgatgctctctcggcgccactatgacttttcgtctagatagagccccatatgcatgctttgaaagtgatgaagtctttactgtcgttatttcccgggaccgaaggaaaaggattagactgaagtgatcaaggtttactgctagaaacttggattaggcttgattctagatttacagaagctgcattc

SEQ ID NO: 18578 - DNA, 765 bp, Muscodor strobelii
  misc_feature: SGI cDNA ID NO. 566232
  misc_feature: Encodes the peptide sequence at SEQ ID NO 18579
atggcacaaaacagcatcatggccctaaaagacaaagtcttcctaatcacaggaggcacgcaaggcatcgggcgcgcaatcgcccagcgcgtcgcccgcgacggggcaaaagtcgtcatatcctactcgcgcgacacctcagcagcagattctttagtggccgaactgggcgggcccgagaaagtcctcgccgtaaaagcagatgccggaaaactctccgagatcgaggctctcgttaaagcgacagccgatcgcttcggacgcatcgacgtgttggtaccaaatgctgggatactggaccacatgccgctggcggacatcacggaggaggcgttcgaccggtcttataccctaaacgtcaaaggtcctcttttcctcgctcagaaagcagtaccacacataccacgcggcggcaaaataatcttcatctcttctggtactgtgaaaggcagtacagtgccgaacacttattatctgtacacgtcgaccaagggcgccgttgagcaaatcgtacgggttatgtcgaaagagttgggcgcgaccaagggcatcacggttaatgctgttgctcctggaccgacgggtacggaattcttcttgaggggaaaacccgaggcgcttgtcaagggaattagctcgcagagcccgtttcagagacttgggacgccggaggaggccgcggcggtcgttgctcttgtcgcctctcccgaggccagttggatttccggtcagattattggggcgaacggggcgagttttgtgtag

SEQ ID NO: 18579 - protein, 254 aa, Muscodor strobelii
  misc_feature: SGI Peptide ID NO. 566232
  misc_feature (12)..(179): Pfam Id: PF00106 Pfam Desc: short chain dehydrogenase
  misc_feature (14)..(249): Pfam Id: PF01370 Pfam Desc: NAD dependent epimerase/dehydratase family
  misc_feature (13)..(192): Pfam Id: PF08659 Pfam Desc: KR domain
  misc_feature (12)..(146): Pfam Id: PF00106 Pfam Desc: short chain dehydrogenase
  misc_feature (15)..(114): Pfam Id: PF08659 Pfam Desc: KR domain
  misc_feature (7)..(254): NCBI GI: 256728447 Blast Desc: NECHADRAFT_87890 [Nectria haematococca mpVI 77-13-4]
  misc_feature (7)..(254): NCBI GI: 171695662 Blast Desc: protein product [Podospora anserina] gi|170948073|emb|CAP60237.1| protein product [Podospora anserina]
  misc_feature (7)..(250): NCBI GI: 242798352 Blast Desc: oxidoreductase, short-chain dehydrogenase/reductase family, [Talaromyces stipitatus ATCC 10500] gi|218716497|gb|EED15918.1| oxidoreductase, short-chain family,
  misc_feature (7)..(251): NCBI GI: 212541544 Blast Desc: oxidoreductase, short-chain dehydrogenase/reductase family, [Penicillium marneffei ATCC 18224] gi|210068226|gb|EEA22318.1| oxidoreductase, short-chain family,
  misc_feature (7)..(250): NCBI GI: 67540560 Blast Desc: AN6450.2 [Aspergillus nidulans FGSC A4] gi|40739282|gb|EAA58472.1| AN6450.2 [Aspergillus nidulans FGSC A4] gi|259479321|tpe|CBF69447.1| TPA: oxidoreductase, short-chain
  misc_feature (7)..(237): NCBI GI: 115390965 Blast Desc: 60S ribosomal protein L40 [Aspergillus terreus NIH2624] gi|114193911|gb|EAU35611.1| 60S ribosomal protein L40 [Aspergillus terreus NIH2624]
  misc_feature (7)..(254): NCBI GI: 145252868 Blast Desc: An16g06450 [Aspergillus niger] gi|134083502|emb|CAK46979.1| protein product [Aspergillus niger]
  misc_feature (6)..(250): NCBI GI: 156040457 Blast Desc: Brn1 [Sclerotinia sclerotiorum 1980] gi|154696301|gb|EDN96039.1| Brn1 [Sclerotinia sclerotiorum 1980]
  misc_feature (7)..(254): NCBI GI: 119499345 Blast Desc: oxidoreductase, short-chain dehydrogenase/reductase family, [Neosartorya fischeri NRRL 181] gi|119414594|gb|EAW24533.1| oxidoreductase, short-chain family,
  misc_feature (8)..(250): NCBI GI: 116183006 Blast Desc: CHGG_02131 [Chaetomium globosum CBS 148.51] gi|88186428|gb|EAQ93896.1| CHGG_02131 [Chaetomium globosum CBS 148.51]
  misc_feature (8)..(254): SWISSPROT Homolog: EC 1.1.1.252 Tetrahydroxynaphthalene reductase
MAQNSIMALKDKVFLITGGTQGIGRAIAQRVARDGAKVVISYSRDTSAADSLVAELGGPEKVLAVKADAGKLSEIEALVKATADRFGRIDVLVPNAGILDHMPLADITEEAFDRSYTLNVKGPLFLAQKAVPHIPRGGKIIFISSGTVKGSTVPNTYYLYTSTKGAVEQIVRVMSKELGATKGITVNAVAPGPTGTEFFLRGKPEALVKGISSQSPFQRLGTPEEAAAVVALVASPEASWISGQIIGANGASFV

SEQ ID NO: 18580 - DNA, 1023 bp, Muscodor strobelii
  misc_feature: SGI cDNA ID NO. 566233
  misc_feature: Encodes the peptide sequence at SEQ ID NO 18581
atgtggggtctacctgtcattgcgacggcctatctctcctcatggcttgtaacatcgtccacgactcaaattgccaagaacctgattatagacaccgatctatatagcgacgttgacgatgccggagctctcctcctcgcagcgacatcaccacatgtgaatctcctaggtgtaaatatcaacgtcgcatcgtcctactcagcgctcgccgcatcagcgatcctagcacattacggcaaaccattctcagaagtaccggtgggcatcaagcgtccgctaacagatgaccatttcttcgattcgtgggagtttgaactcggcgagtacgccagtaaagtcgcatatcgctattctgatcctgagcgcggtagtctcgcctggggaaaagcggatgaagcttgggatccggtgacgctatatcgaaagctacttgcggatgcggaggacgggagtgtgataattgtcagtattggattcttcgagaatctctcggatcttctcaattcgacagcagaccatatatctaccttatctggtccggatcttatcgctgcaaaagttaatgagctcgtcgttatgggaggtcaatatccctctggccgtgagttcaatttctggggggacgatccgcttctgacagcccacgttatcaataactggaaagggaaaataacattctccggctacgagatgggcgcggaagtgctgactgggtgtgagctgatgggccatggcccgctcgacgatccggtgcgacgcgcttatatgtggtatacctacgggcagccacgggagtcatgggaccctctcacagtgttatatgcgatgaatgggttgggtgatatctttgaatacggaaatgagtttgggtataatcatgtttacccgaatggctccaacgagtgggtttgggatgacacggtcactaatcagcacttcttgaggctaaaagtcagtgacatcacagctgcagcgagattggaccagctattcttgaacggtgcacgatcgattgcaagatga

SEQ ID NO: 18581 - protein, 340 aa, Muscodor strobelii
  misc_feature: SGI Peptide ID NO. 566233
  misc_feature (25)..(331): Pfam Id: PF01156 Pfam Desc: Inosine-uridine preferring nucleoside hydrolase
  misc_feature (13)..(335): NCBI GI: 261361672 Blast Desc: inosine/uridine-preferring nucleoside hydrolase [Verticillium albo-atrum VaMs.102]
  misc_feature (6)..(339): NCBI GI: 39975303 Blast Desc: [Magnaporthe grisea 70-15] gi|145018938|gb|EDK03217.1| [Magnaporthe grisea 70-15]
  misc_feature (40)..(335): NCBI GI: 115399756 Blast Desc: conserved [Aspergillus terreus NIH2624] gi|114191133|gb|EAU32833.1| conserved [Aspergillus terreus NIH2624]
  misc_feature (25)..(340): NCBI GI: 169772543 Blast Desc: [Aspergillus oryzae RIB40] gi|83768601|dbj|BAE58738.1| protein product [Aspergillus oryzae]
  misc_feature (8)..(340): NCBI GI: 189192572 Blast Desc: conserved [Pyrenophora tritici-repentis Pt-1C-BFP] gi|187974231|gb|EDU41730.1| conserved [Pyrenophora tritici-repentis Pt-1C-BFP]
  misc_feature (60)..(340): NCBI GI: 238490454 Blast Desc: conserved [Aspergillus flavus NRRL3357] gi|220696877|gb|EED53218.1| conserved [Aspergillus flavus NRRL3357]
  misc_feature (26)..(316): NCBI GI: 116200760 Blast Desc: CHGG_10925 [Chaetomium globosum CBS 148.51] gi|88175639|gb|EAQ83107.1| CHGG_10925 [Chaetomium globosum CBS 148.51]
  misc_feature (27)..(338): NCBI GI: 150008286 Blast Desc: nucleoside hydrolase [Parabacteroides distasonis ATCC 8503] gi|255015440|ref|ZP_05287566.1| nucleoside hydrolase [Bacteroides sp. 2_1_7] gi|256839428|ref|ZP_05544937.1| conserved
  misc_feature (21)..(305): NCBI GI: 154492689 Blast Desc: PARMER_02326 [Parabacteroides merdae ATCC 43184] gi|154086994|gb|EDN86039.1| PARMER_02326 [Parabacteroides merdae ATCC 43184]
  misc_feature (27)..(303): NCBI GI: 262384599 Blast Desc: conserved [Bacteroides sp. 2_1_33B] gi|262293892|gb|EEY81826.1| conserved [Bacteroides sp. 2_1_33B]
MWGLPVIATAYLSSWLVTSSTTQIAKNLIIDTDLYSDVDDAGALLLAATSPHVNLLGVNINVASSYSALAASAILAHYGKPFSEVPVGIKRPLTDDHFFDSWEFELGEYASKVAYRYSDPERGSLAWGKADEAWDPVTLYRKLLADAEDGSVIIVSIGFFENLSDLLNSTADHISTLSGPDLIAAKVNELVVMGGQYPSGREFNFWGDDPLLTAHVINNWKGKITFSGYEMGAEVLTGCELMGHGPLDDPVRRAYMWYTYGQPRESWDPLTVLYAMNGLGDIFEYGNEFGYNHVYPNGSNEWVWDDTVTNQHFLRLKVSDITAAARLDQLFLNGARSIAR

SEQ ID NO: 18582 - DNA, 2422 bp, Muscodor strobelii
  misc_feature: SGI EST ID NO. CUFF.43650.0
  misc_feature: Variant of the nucleotide sequence at SEQ ID NO 18580
cgacaatgtcaggtgccggacgttgacaataagtcactattgcctcgcgctctcattcccaaaatatcgcagaaaaatgtggggtctacctgtcattgcgacggcctatctctcctcatggcttgtaacatcgtccacgactcaaattgccaagaacctgattatagacaccgatctatatagcgacgttgacgatgccggagctctcctcctcgcagcgacatcaccacatgtgaatctcctaggtgtaaatatcaacgtcgcatcgtcctactcagcgctcgccgcatcagcgatcctagcacattacggcaaaccattctcagaagtaccggtgggcatcaagcgtccgctaacagatgaccatttcttcgattcgtgggagtttgaactcggcgagtacgccagtaaagtcgcatatcgctattctgatcctgagcgcggtagtctcgcctggggaaaagcggatgaagcttgggatccggtgacgctatatcgaaagctacttgcggatgcggaggacgggagtgtgataattgtcagtattggattcttcgagaatctctcggatcttctcaattcgacagcagaccatatatctaccttatctggtccggatcttatcgctgcaaaagttaatgagctcgtcgttatgggaggtcaatatccctctggccgtgagttcaatttctggggggacgatccgcttctgacagcccacgttatcaataactggaaagggaaaataacattctccggctacgagatgggcgcggaagtgctgactgggtgtgagctgatgggccatggcccgctcgacgatccggtgcgacgcgcttatatgtggtatacctacgggcagccacgggagtcatgggaccctctcacagtgttatatgcgatgaatgggttgggtgatatctttgaatacggaaatgagtttgggtataatcatgtttacccgaatggctccaacgagtgggtttgggatgacacggtcactaatcagcacttcttgaggctaaaagtcagtgacatcacagctgcagcgagattggaccagctattcttgaacggtgcacgatcgattgcaagatgaaaagcctgtttgcatttgaggatttggacctatacactattgtgtatttatcgagagtgatcgacacttggcacttgaccttctacacaaaactcgccccgttcgccccaataatctgaccggaaatccaactggcctcgggagaggcgacaagagcaacgaccgccgcggcctcctccggcgtcccaagtctctgaaacgggctctgcgagctaattcccttgacaagcgcctcgggttttcccctcaagaagaattccgtacccgtcggtccaggagcaacagcattaaccgtgatgcccttggtcgcgcccaactctttcgacataacccgtacgatttgctcaacggcgcccttggtcgacgtgtacagataataagtgttcggcactgtactgcctttcacagtaccagaagagatgaagattattttgccgccgcgtggtatgtgtggtactgctttctgagcgaggaaaagaggacctttgacgtttagggtataagaccggtcgaacgcctcctccgtgatgtccgccagcggcatgtggtccagtatcccagcatttggtaccaacacgtcgatgcgtccgaagcgatcggctgtcgctttaacgagagcctcgatctcggagagttttccggcatctgcttttacggcgaggactttctcgggcccgcccagttcggccactaaagaatctgctgctgaggtgtcgcgcgagtaggatatgacgacttttgccccgtcgcgggcgacgcgctgggcgattgcgcgcccgatgccttgcgtgcctcctgtgattaggaagactttgtcttttagggccatgatgctgttttgtgccattttgaaagtgttgactcgcgtgtcactagctacgtgataaataaacttagatagtgttggacttattgttcaatgattcgcactttcgagttgcaaagcgttgccatatgccatatatatgtaaataataaattcaaacgtcatatcgtctatatatagagttaccatcaatacagcctcagctgggaactgggaactttcaagagactaaagtccgccaaagtgccgatgaatcctgttaccgcgtcacccttctccatggccgatcagcctcacgacatcatcgcgtcgggtctatatccgtgcatgctgtcgggataagcattcgcttagttcggccacgtttttccatgattgagattgggtccgaaaggggcgccgtatcgggaatattgaagacagaggattattccgagacacactaggcggcacttttgaagatggagtagggtcaagatctacaaagggaactttca

SEQ ID NO: 18583 - DNA, 297 bp, Muscodor strobelii
  misc_feature: SGI cDNA ID NO. 566234
  misc_feature: Reduced expression when VOC is produced
  misc_feature: Encodes the peptide sequence at SEQ ID NO 18584
atgcagtacaccatcgctatcaccgcactcttcgccagccttgccctcgcggctcctgctgagctagactcccgccaatacgttccctgctcgggtctctacggcactgctcagtgctgtgctaccgacgtgctcggcgtcgctgatctcgactgcgcagtccctacattcgtccccacggatgctgccagcttcgagtccggctgtgctgcgggcggccagcgagctcgctgctgtgtcttgcctgtcctcggccaggatgtcctctgccagactcctgctggcatcaccccctaa

SEQ ID NO: 18584 - protein, 98 aa, Muscodor strobelii
  misc_feature: SGI Peptide ID NO. 566234
  misc_feature (29)..(93): Pfam Id: PF06766 Pfam Desc: Fungal hydrophobin
  misc_feature (1)..(96): NCBI GI: 164425836 Blast Desc: NCU08192 [Neurospora crassa OR74A] gi|157071084|gb|EAA30046.2| NCU08192 [Neurospora crassa OR74A]
  misc_feature (1)..(98): NCBI GI: 39950019 Blast Desc: MGG_01173 [Magnaporthe grisea 70-15] gi|4337063|gb|AAD18059.1| magnaporin [Magnaporthe grisea] gi|145021037|gb|EDK05166.1| MGG_01173 [Magnaporthe grisea 70-15]
  misc_feature (1)..(96): NCBI GI: 46109898 Blast Desc: FG01831.1 [Gibberella zeae PH-1] gi|91221408|gb|ABE27986.1| hydrophobin 5 precursor [Fusarium culmorum]
  misc_feature (1)..(96): NCBI GI: 37724083 Blast Desc: hydrophobin [Gibberella moniliformis]
  misc_feature (1)..(98): NCBI GI: 171685270 Blast Desc: protein product [Podospora anserina] gi|170942596|emb|CAP68248.1| protein product [Podospora anserina]
  misc_feature (1)..(85): NCBI GI: 11359587 Blast Desc: protein product [Podospora anserina] gi|170942596|emb|CAP68248.1| protein product [Podospora anserina]
  misc_feature (1)..(96): NCBI GI: 256722079 Blast Desc: NECHADRAFT_51212 [Nectria haematococca mpVI 77-13-4]
  misc_feature (1)..(96): NCBI GI: 148888523 Blast Desc: cerato-ulmin [Ophiostoma quercus]
  misc_feature (1)..(82): NCBI GI: 209570340 Blast Desc: [Glomerella graminicola]
  misc_feature (1)..(96): NCBI GI: 1706154 Blast Desc: CRYP_CRYPA RecName: Full=Cryparin; Flags: Precursor gi|305085|gb|AAA19638.1| cryparin [Cryphonectria parasitica]
  misc_feature: Useful for introducing or modulating the production of volatile compounds
MQYTIAITALFASLALAAPAELDSRQYVPCSGLYGTAQCCATDVLGVADLDCAVPTFVPTDAASFESGCAAGGQRARCCVLPVLGQDVLCQTPAGITP

SEQ ID NO: 18585 - DNA, 1020 bp, Muscodor strobelii
  misc_feature: SGI EST ID NO. CUFF.43652.0
  misc_feature: Variant of the nucleotide sequence at SEQ ID NO 18583
gccaagtcggtcaaagcataaacatgtcttagtgatgatcgacattagttatctcctttctagaagagcatctatatcgcaagatctcttaagatcggccatcctatcagatcaccggtaccatttgcgcgtacaggccgtaccagggtcacagcctcgtagtatccccaggaaacagggcagcgtaatgctgaagcttttggatatgttcgtcatcggcttcacggcggcctctaacgacgtaagtccctttgctggaaggtgtataggctgacggaagatggcattgaatacaccggttctgacgaccagccggtctataaagtcctgagatgtcccgcgtagatttgactcgattctggatagatcatcagcatcaccaaagctaaagcctcatcatctactatcaaacattcgcttattaaaaagccatactatccaccaaactcaaaaacataaatcaaaccatcaccaaaatgcagtacaccatcgctatcaccgcactcttcgccagccttgccctcgcggctcctgctgagctagactcccgccaatacgttccctgctcgggtctctacggcactgctcagtgctgtgctaccgacgtgctcggcgtcgctgatctcgactgcgcagtccctacattcgtccccacggatgctgccagcttcgagtccggctgtgctgcgggcggccagcgagctcgctgctgtgtcttgcctgtcctcggccaggatgtcctctgccagactcctgctggcatcaccccctaaatacccaacgctttatacaactgtataaaaacgataataaaacggacataggggggacgacttacgcatactagacggtacggcacacgcatggaattccggtatcacggtacggagagggctatgtatattacgagtaatggctttcaggcttagaactgtataatagctagaggggaatgaaaagtaattacattgcaatgatgtatactgctcacggtgtcggtgattaataacgtattctctt

SEQ ID NO: 18586 - DNA, 1389 bp, Muscodor strobelii
  misc_feature: SGI cDNA ID NO. 566235
  misc_feature: Reduced expression when VOC is produced
  misc_feature: Encodes the peptide sequence at SEQ ID NO 18587
atgtcgagcacacaagatatggaggggcttgagcgccgaggctccgatgacgacaaggataagaagaacgacggcaagggcgataacaacactcaggccgccgacggtgatgcagagatggaggatgcccagcccgaagtagaggagatcctcgacgaagagatcctcagcctcagcacgcaggacctgcagacgaggaagcgcttgctggagaacgatgccaggatcatgaagagcgagtaccagcgcctgtcccacgagaaggctaccatgggcgagaagatcaaggagaacatggagaagatcgcaaacaaccgacagctgccctaccttgtcggcaacgtcgtcgagcttctcgacctcgaccccaccgccgagtcgtccgaagaaggcgccaacatcgacctcgacgccacgcgcgtgggcaagtcggccgtcatcaagacatccaccagacagactatcttcctacccctcatcggtctcgtcgacccggaggccctaaagccgggtgacctcattggtgtgaataaggattcctacctcatcctcgacacattgcccgccgagtacgacagccgcgtgaaggccatggaagtcgatgagaagcccacagaaaaatacaccgacgtcggaggcctggacaagcagatagaggaattggtcgaggctatcgtatggcccatgaaggaggccgagcggttcaagaagatcggcatcaaggcgccaaaaggtgccctcatgtacggtcctcccggtaccggaaagactctactcgcacgagcctgtgcggcacagaccgatgccacgtttttgaagctcgccggcccccagctcgtacagatgttcataggtgacggcgccaagttagtacgagattgcttcgcgctagccaaagaaaaagcacccgccatcatcttcattgacgagctcgatgccgtcggtaccaagcgtttcgacagcgagaagagtggtgacagagaagtacagcggaccatgttggagctgctcaaccagctggacggttttgcatcagatgaccgtatcaaagtcctagccgccacgaatcgcgtcgatgtcctcgaccccgccctgttgcgatctggccgtctcgaccgaaagattgagtttcccctgccgaatgaggaggcccgtgcgcagattctgaagattcactcgcggaaaatgacggtagacaacggtgttaactggagcgagttggcacgcagtaccgacgagtttggtggtgcgatgctgaaggctgtttgtgtcgaggctggtatgattgctctgcgtatgggcaagaacaagatcagccatgagcactacgtggacgccattgctgaggtccaggcaaagaagaaagatacggtcaatttctatgcatag

SEQ ID NO: 18587 - protein, 462 aa, Muscodor strobelii
  misc_feature: SGI Peptide ID NO. 566235
  misc_feature (245)..(432): Pfam Id: PF00004 Pfam Desc: ATPase family associated with various cellular activities (AAA)
  misc_feature (1)..(462): NCBI GI: 156062042 Blast Desc: SS1G_01135 [Sclerotinia sclerotiorum 1980] gi|154696473|gb|EDN96211.1| SS1G_01135 [Sclerotinia sclerotiorum 1980]
  misc_feature (1)..(462): NCBI GI: 256721980 Blast Desc: [Nectria haematococca mpVI 77-13-4]
  misc_feature (1)..(462): NCBI GI: 164429437 Blast Desc: NCU04414 [Neurospora crassa OR74A] gi|157073478|gb|EAA28255.2| conserved [Neurospora crassa OR74A]
  misc_feature (1)..(462): NCBI GI: 154292106 Blast Desc: 26S protease regulatory subunit 6A [Botryotinia fuckeliana B05.10] gi|150846289|gb|EDN21482.1| 26S protease regulatory subunit 6A [Botryotinia fuckeliana B05.10]
  misc_feature (31)..(462): NCBI GI: 145602125 Blast Desc: proteasome regulatory particle subunit Rpt5 [Magnaporthe grisea 70-15] gi|145010562|gb|EDJ95218.1| proteasome regulatory particle subunit Rpt5 [Magnaporthe grisea 70-15]
  misc_feature (1)..(462): NCBI GI: 40882206 Blast Desc: 26S proteasome regulatory particle chain RPT5 [Neurospora crassa]
  misc_feature (1)..(462): NCBI GI: 46140165 Blast Desc: FG11597.1 [Gibberella zeae PH-1]
  misc_feature (1)..(462): NCBI GI: 171690992 Blast Desc: protein product [Podospora anserina] gi|170945444|emb|CAP71556.1| protein product [Podospora anserina]
  misc_feature (55)..(462): NCBI GI: 169610313 Blast Desc: SNOG_08255 [Phaeosphaeria nodorum SN15] gi|111063411|gb|EAT84531.1| SNOG_08255 [Phaeosphaeria nodorum SN15]
  misc_feature (1)..(457): NCBI GI: 225556569 Blast Desc: 26S protease regulatory subunit [Ajellomyces capsulatus G186AR]
  misc_feature (165)..(432): SWISSPROT Homolog: EC 3.6.1.3 Adenosinetriphosphatase
  misc_feature: Useful for introducing or modulating the production of volatile compounds
MSSTQDMEGLERRGSDDDKDKKNDGKGDNNTQAADGDAEMEDAQPEVEEILDEEILSLSTQDLQTRKRLLENDARIMKSEYQRLSHEKATMGEKIKENMEKIANNRQLPYLVGNVVELLDLDPTAESSEEGANIDLDATRVGKSAVIKTSTRQTIFLPLIGLVDPEALKPGDLIGVNKDSYLILDTLPAEYDSRVKAMEVDEKPTEKYTDVGGLDKQIEELVEAIVWPMKEAERFKKIGIKAPKGALMYGPPGTGKTLLARACAAQTDATFLKLAGPQLVQMFIGDGAKLVRDCFALAKEKAPAIIFIDELDAVGTKRFDSEKSGDREVQRTMLELLNQLDGFASDDRIKVLAATNRVDVLDPALLRSGRLDRKIEFPLPNEEARAQILKIHSRKMTVDNGVNWSELARSTDEFGGAMLKAVCVEAGMIALRMGKNKISHEHYVDAIAEVQAKKKDTVNFYA

SEQ ID NO: 18588 - DNA, 2208 bp, Muscodor strobelii
  misc_feature: SGI EST ID NO. CUFF.43671.0
  misc_feature: Variant of the nucleotide sequence at SEQ ID NO 18586
cccggtgagacctatggacctgattacgcgccaatgcctgcctgccttggagctttgcggctcacgcctgcgcaactgcacaccaacatccagaggtacctattgtagctccgtctggtgttctgttcatcgtcacttccgccaacaacaccactgtgtcactgtcactgactttcgcctggcacttctcccctgccgacacctcctcttctatcctcgcgacaagacataagccatccctttacatccaacgcatcttaagccaaagtctccgtctcagcgcacccacgcctcccatcttcgacccgattccgccccaccgctcaccagaccgcatctgcatctacatctacatacatatctgacgctctctcttttccacacacatcacaccccacatcccacatccccacgccatgtcgagcacacaagatatggaggggcttgagcgccgaggctccgatgacgacaaggataagaagaacgacggcaagggcgataacaacactcaggccgccgacggtgatgcagagatggaggatgcccagcccgaagtagaggagatcctcgacgaagagatcctcagcctcagcacgcaggacctgcagacgaggaagcgcttgctggagaacgatgccaggatcatgaagagcgagtaccagcgcctgtcccacgagaaggctaccatgggcgagaagatcaaggagaacatggagaagatcgcaaacaaccgacagctgccctaccttgtcggcaacgtcgtcgagcttctcgacctcgaccccaccgccgagtcgtccgaagaaggcgccaacatcgacctcgacgccacgcgcgtgggcaagtcggccgtcatcaagacatccaccagacagactatcttcctacccctcatcggtctcgtcgacccggaggccctaaagccgggtgacctcattggtgtgaataaggattcctacctcatcctcgacacattgcccgccgagtacgacagccgcgtgaaggccatggaagtcgatgagaagcccacagaaaaatacaccgacgtcggaggcctggacaagcagatagaggaattggtcgaggctatcgtatggcccatgaaggaggccgagcggttcaagaagatcggcatcaaggcgccaaaaggtgccctcatgtacggtcctcccggtaccggaaagactctactcgcacgagcctgtgcggcacagaccgatgccacgtttttgaagctcgccggcccccagctcgtacagatgttcataggtgacggcgccaagttagtacgagattgcttcgcgctagccaaagaaaaagcacccgccatcatcttcattgacgagctcgatgccgtcggtaccaagcgtttcgacagcgagaagagtggtgacagagaagtacagcggaccatgttggagctgctcaaccagctggacggttttgcatcagatgaccgtatcaaagtcctagccgccacgaatcgcgtcgatgtcctcgaccccgccctgttgcgatctggccgtctcgaccgaaagattgagtttcccctgccgaatgaggaggcccgtgcgcagattctgaagattcactcgcggaaaatgacggtagacaacggtgttaactggagcgagttggcacgcagtaccgacgagtttggtggtgcgatgctgaaggctgtttgtgtcgaggctggtatgattgctctgcgtatgggcaagaacaagatcagccatgagcactacgtggacgccattgctgaggtccaggcaaagaagaaagatacggtcaatttctatgcatagttggtgtcgggttgtggtatgatttggagtatttgggctggcagaagacaaaatcaaccaatatccccaaaatagcacgggtagactgctcacaatagacgccaacagcacaattgtactagtaatccaatactcgcaaagccctgctattgatctaaatattggtcttgtttgtactatgcacccatgccgacagatgagagtgtcttcaataggaccgattgtgttcttatccccatagtccttttactgttcgctacccctacgacaacactatcagctttctagtaagagaagccttaagagtatgatgaggcatcacaaacaggtcactgtatccctttgagtgctagttcagcatcagtatatgcaaggttaacttatcgacatatttcgtcaatca

SEQ ID NO: 18589 - DNA, 594 bp, Muscodor strobelii
  misc_feature: SGI cDNA ID NO. 566236
  misc_feature: Encodes the peptide sequence at SEQ ID NO 18590
atgaccgccgaaccctccaccacgccgaccactctgacaccacagttctgctttaccactgttgctttgagggatttccttcgcatatcgcgcagcagcatagacgattccatcacacaaaacctcaatgccctcgtgaccccggcccaggaggggtttgacccagcctcgacatctgtcagagcttcccgaagacaccacaggcagatagactctcgctcgtgccaggccttcaaagatcaggtcttatttccttcgtggcaagccaggtccgatgtgttgacctactgtgcctacgtggctaccagcccagaccccgaagatcccgagctagctctgagggctgcggagacggaaaagaacagggaaaaggtcgtagacgagcgtttagacccgtattcagcccgattcttcccacgtgagtcccgaacagaacaactcatcacgctcttaaggcaggagcgaaatgtcgagaaaatcgtgagatctcggacatgggagctcgtccaggaaagatgcggcaacgacaagttcctggaggccgatgctgctctcaaccattggcgcctcaacagagagcgtcgctcgtcatga

SEQ ID NO: 18590 - protein, 197 aa, Muscodor strobelii
  misc_feature: SGI Peptide ID NO. 566236
  misc_feature (3)..(194): NCBI GI: 154318139 Blast Desc: BC1G_03237 [Botryotinia fuckeliana B05.10] gi|150842760|gb|EDN17953.1| BC1G_03237 [Botryotinia fuckeliana B05.10]
  misc_feature (5)..(189): NCBI GI: 258567826 Blast Desc: conserved [Uncinocarpus reesii 1704] gi|237906103|gb|EEP80504.1| conserved [Uncinocarpus reesii 1704]
  misc_feature (5)..(189): NCBI GI: 240105290 Blast Desc: CPC735_048530 [Coccidioides posadasii C735 delta SOWgp]
  misc_feature (4)..(192): NCBI GI: 85107803 Blast Desc: NCU11378 [Neurospora crassa OR74A] gi|28924057|gb|EAA33215.1| NCU11378 [Neurospora crassa OR74A]
  misc_feature (3)..(194): NCBI GI: 156062144 Blast Desc: SS1G_01187 [Sclerotinia sclerotiorum 1980] gi|154696524|gb|EDN96262.1| SS1G_01187 [Sclerotinia sclerotiorum 1980]
  misc_feature (4)..(189): NCBI GI: 171677000 Blast Desc: protein product [Podospora anserina] gi|170936567|emb|CAP61227.1| protein product [Podospora anserina]
  misc_feature (1)..(192): NCBI GI: 121708172 Blast Desc: caffeine-induced death protein Cid2, [Aspergillus clavatus NRRL 1] gi|119400198|gb|EAW10624.1| caffeine-induced death protein Cid2, [Aspergillus clavatus NRRL 1]
  misc_feature (11)..(197): NCBI GI: 145602163 Blast Desc: MGG_05150 [Magnaporthe grisea 70-15] gi|145010593|gb|EDJ95249.1| MGG_05150 [Magnaporthe grisea 70-15]
  misc_feature (11)..(195): NCBI GI: 239613482 Blast Desc: caffeine-induced death protein Cid2 [Ajellomyces dermatitidis ER-3]
  misc_feature (11)..(195): NCBI GI: 261194589 Blast Desc: caffeine-induced death protein Cid2 [Ajellomyces dermatitidis SLH14081] gi|239588237|gb|EEQ70880.1| caffeine-induced death protein Cid2 [Ajellomyces dermatitidis
MTAEPSTTPTTLTPQFCFTTVALRDFLRISRSSIDDSITQNLNALVTPAQEGFDPASTSVRASRRHHRQIDSRSCQAFKDQVLFPSWQARSDVLTYCAYVATSPDPEDPELALRAAETEKNREKVVDERLDPYSARFFPRESRTEQLITLLRQERNVEKIVRSRTWELVQERCGNDKFLEADAALNHWRLNRERRSS

SEQ ID NO: 18591 - DNA, 1286 bp, Muscodor strobelii
  misc_feature: SGI EST ID NO. CUFF.43673.0
  misc_feature: Variant of the nucleotide sequence at SEQ ID NO 18589
ctacagctctggtccatgacgacttggctcatattctaatcacttggctgctttacgataacgccatctctttcgcaatttgccatgaaaacttaatacgataaactcaactggcagctgaatcatattgaatgccaacattgatagcattcaccagtattttctttcaagtagtaatcaatcaaacacgccgtcacgctggatcgactactgtggtcctcttctaaaccagctcccggcgcggatgctgctaagcctgtcccccataaaattatgaccgccgaaccctccaccacgccgaccactctgacaccacagttctgctttaccactgttgctttgagggatttccttcgcatatcgcgcagcagcatagacgattccatcacacaaaacctcaatgccctcgtgaccccggcccaggaggggtttgacccagcctcgacatctgtcagagcttcccgaagacaccacaggcagatagactctcgctcgtgccaggccttcaaagatcaggtcttatttccttcgtggcaagccaggtccgatgtgttgacctactgtgcctacgtggctaccagcccagaccccgaagatcccgagctagctctgagggctgcggagacggaaaagaacagggaaaaggtcgtagacgagcgtttagacccgtattcagcccgattcttcccacgtgagtcccgaacagaacaactcatcacgctcttaaggcaggagcgaaatgtcgagaaaatcgtgagatctcggacatgggagctcgtccaggaaagatgcggcaacgacaagttcctggaggccgatgctgctctcaaccattggcgcctcaacagagagcgtcgctcgtcatgacataggagagagttgagaacattgcatgttgcccctgcctatcttactggactgggacaactacgcggtgttgtgtataattatgtttggataaagtggtctcattgctgggaaaaatcgggatagacataatcacctctcccatgattaaatgtgtataaaagagtgaagagaggccacgctacgcagattttctggattcgccttgagagaacctagtcaaacaatgcatgttgggcagtatgagatatacaggtctataaaacaacctgagttggtggcgcacttggggttataatcaagttattatcatctacataatgtttttgatgtgttgacttatttgacatttttcatcatcagaaagagcatacaatcggccaaactctgcagtagtagttcaagttcatataacctcg

SEQ ID NO: 18592 - DNA, 2511 bp, Muscodor strobelii
  misc_feature: SGI cDNA ID NO. 566237
  misc_feature: Reduced expression when VOC is produced
  misc_feature: Encodes the peptide sequence at SEQ ID NO 18593
atgccgcagcctctgagctcgaaggagaacgctctctttcggcaggtcatccgcaactatgaggacaagcagtacaagcgcggtctccgcgccgccgagcagatcctgaagaagaaccccaagaatggcgacacgctcgccatgaaggccctcatcatcaattctttagggaggaccgacgaggccttcgctctaagcaaggaggccctcaccgccgacatgaaatcccacatatgttggcacgtctatggcctgctatatcgccaccagaagaactgggaggaggccagcaaggcctacaagtttgccctgaagctggagcccggctcccagcagattcagagagacttggcctacctgcaggtccagatgcgcgacttccagggctacgttgcgagccgcactgccatgctgcaggccaagccgatggtcagacagaattggaccgctctcgccatcgcccaccacctcgatggcgagctcgaccaggccgagaaggtcttgactacctacgaagagtcggtcaaggtcccaccgtccaagggcgactacgaaaactcagaagccgtcatgtataaaaactctatcatcgccgaacagggcgactatcagagggctctcgaccacctcaattccatcgccaaagacaacctcgatcgcctagctgttttggaactacgcgccgagtatttggccaagctggacaaaaaggaggaggccattaaggcttaccgcgcgctactagaccgcaacccggaccacgcagaatattacactaagcttgcagatatcatgggtctggatgccaatgacgtcgaggctcgcaaagctctttacaatgaatatgccaagacgaatccacgctgcgatgcggccaagcgcttgcctcttgactttatcagcggcgaccaattccgcgagtccgcaaagtcatacttgaccttcatgttagacaaaggggtgccatccacatttgccaaccttaaacatctatactcggacacatttaaaaaggagaccttggagtcattggcacatgaatacgtcgcgtctaaagagtctgaatcgaaaatcgagtcctctgcctcctgggatgcgttgaaggggttaccggccggactctactatcttgctcaacactacaactaccgcctgtcccgagacctgtccaaagctttggagttcgttgagaagggactcgaagtggcgcccgaaaacgtcgagtttcatatgacgaaagcccgaatctggaaacactttggtaacacagacaaggccgccgagatcatggagaaggcacgcaacttggatttgaaagatcgctatatcaacaccaaaactgcaaaataccagctgcgcaataatgagagtgggaaagccttgaagacgatgtcactcttcaccaggaatgactcgcctggtggtcccgtatccgatctgatcgacatgcaaagcatatggttcctgacggaggacggcgaggcatctgtacgcaacggtctgatcggtctggctctgaagcgtttccatgctgtttacaacattttcgatgtttggcaagaagatcaattcgatttccacagcttttctttgaggaaaggccagatccgtgcctacatagacatggtccgttgggaagacaagcttcgagatcatcctttctacacacgtgcggcgcttggtgccatcgccgcatacttaggtctccacgacagcaaagctatgtcaaacggagttaatggtgccgctaatggaaacgccgagacagatcccgaagtaaaaaaggcgcttaagaaggccaaaaaggacgcacagaaggccgaacgagaggcggcggagcaggcggcgaaacaggaccctaacaaggcaaagtctgcgggtgcagcccccgtgaagagagatgacgatccccttggcttaaagctggctggaactgcagaaccgctcgtggaggccactaaatttcttgctccgatcttgcaattcagccctaaaaacattgacgggcagatcgctggattcgaggtctatttcagacgagagaaatacttgctggcactcaagtgcgtcaatgcttctattgccattgatccagccagtccgaccgtgcatgagcagacgatacgactccgtcaagcactagacgcgaagcttggttctttgccagccaaggtggccgatgttatcaagtccgactttaccgccattgagccctcaacggatttgaagaagtacaatgcagagtttctacagaaacacaaaggtagcgccccgcatgttgtagctgcagtcaagatccagaagatcttgggagaggacctgaagaaatgcgagcaagatctacttggcatcctaaaaatcaagaccgccgattgggaaccagctgctgaggctttgggtcttcttgcccagtggcgcagtgaggaggtagaggccttcaagaaagcagcacatgaaacatggccggaggtcagcttattcgcgccgcctcccgcaaagagcacatcatag

SEQ ID NO: 18593 - protein, 836 aa, Muscodor strobelii
  misc_feature: SGI Peptide ID NO. 566237
  misc_feature (77)..(110): Pfam Id: PF07719 Pfam Desc: Tetratricopeptide repeat
  misc_feature (221)..(254): Pfam Id: PF07719 Pfam Desc: Tetratricopeptide repeat
  misc_feature (84)..(110): Pfam Id: PF00515 Pfam Desc: Tetratricopeptide repeat
  misc_feature (3)..(828): NCBI GI: 39940178 Blast Desc: MGG_05151 [Magnaporthe grisea 70-15] gi|145010592|gb|EDJ95248.1| MGG_05151 [Magnaporthe grisea 70-15]
  misc_feature (1)..(828): NCBI GI: 256721973 Blast Desc: [Nectria haematococca mpVI 77-13-4]
  misc_feature (1)..(828): NCBI GI: 46111785 Blast Desc: FG02774.1 [Gibberella zeae PH-1]
  misc_feature (1)..(733): NCBI GI: 156062142 Blast Desc: SS1G_01186 [Sclerotinia sclerotiorum 1980] gi|154696523|gb|EDN96261.1| SS1G_01186 [Sclerotinia sclerotiorum 1980]
  misc_feature (1)..(736): NCBI GI: 154318137 Blast Desc: BC1G_03236 [Botryotinia fuckeliana B05.10] gi|150842759|gb|EDN17952.1| BC1G_03236 [Botryotinia fuckeliana B05.10]
  misc_feature (1)..(827): NCBI GI: 238486130 Blast Desc: N-terminal acetyltransferase catalytic subunit Nat1, [Aspergillus flavus NRRL3357] gi|220699182|gb|EED55521.1| N-terminal acetyltransferase catalytic subunit Nat1, [Aspergillus
  misc_feature (1)..(735): NCBI GI: 85107807 Blast Desc: NCU11379 [Neurospora crassa OR74A] gi|28924058|gb|EAA33216.1| NCU11379 [Neurospora crassa OR74A]
  misc_feature (1)..(827): NCBI GI: 145229671 Blast Desc: An01g07200 [Aspergillus niger] gi|134055253|emb|CAK43839.1| protein product [Aspergillus niger]
  misc_feature (1)..(827): NCBI GI: 115391093 Blast Desc: conserved [Aspergillus terreus NIH2624] gi|114193975|gb|EAU35675.1| conserved [Aspergillus terreus NIH2624]
  misc_feature (1)..(733): NCBI GI: 171676998 Blast Desc: protein product [Podospora anserina] gi|170936566|emb|CAP61226.1| protein product [Podospora anserina]
  misc_feature: Useful for introducing or modulating the production of volatile compounds
MPQPLSSKENALFRQVIRNYEDKQYKRGLRAAEQILKKNPKNGDTLAMKALIINSLGRTDEAFALSKEALTADMKSHICWHVYGLLYRHQKNWEEASKAYKFALKLEPGSQQIQRDLAYLQVQMRDFQGYVASRTAMLQAKPMVRQNWTALAIAHHLDGELDQAEKVLTTYEESVKVPPSKGDYENSEAVMYKNSIIAEQGDYQRALDHLNSIAKDNLDRLAVLELRAEYLAKLDKKEEAIKAYRALLDRNPDHAEYYTKLADIMGLDANDVEARKALYNEYAKTNPRCDAAKRLPLDFISGDQFRESAKSYLTFMLDKGVPSTFANLKHLYSDTFKKETLESLAHEYVASKESESKIESSASWDALKGLPAGLYYLAQHYNYRLSRDLSKALEFVEKGLEVAPENVEFHMTKARIWKHFGNTDKAAEIMEKARNLDLKDRYINTKTAKYQLRNNESGKALKTMSLFTRNDSPGGPVSDLIDMQSIWFLTEDGEASVRNGLIGLALKRFHAVYNIFDVWQEDQFDFHSFSLRKGQIRAYIDMVRWEDKLRDHPFYTRAALGAIAAYLGLHDSKAMSNGVNGAANGNAETDPEVKKALKKAKKDAQKAEREAAEQAAKQDPNKAKSAGAAPVKRDDDPLGLKLAGTAEPLVEATKFLAPILQFSPKNIDGQIAGFEVYFRREKYLLALKCVNASIAIDPASPTVHEQTIRLRQALDAKLGSLPAKVADVIKSDFTAIEPSTDLKKYNAEFLQKHKGSAPHVVAAVKIQKILGEDLKKCEQDLLGILKIKTADWEPAAEALGLLAQWRSEEVEAFKKAAHETWPEVSLFAPPPAKSTS

SEQ ID NO: 18594 - DNA, 3384 bp, Muscodor strobelii
  misc_feature: SGI EST ID NO. CUFF.43742.0
  misc_feature: Variant of the nucleotide sequence at SEQ ID NO 18592
ctccagttaattagccccccagtcccaattaatctgtccagctgtgaatgcgggcgtacgccttgacggctatgcgacaaagcttcggtgaagctattctgttaacaccgaaagaacaactcgactttctgctcgtagacgacctccctcgactcccccctccgcctcctttcgcatgccaccctccttctcttctcctcttccggcagtcactcagtaggcgaccatccgtgcaaggtattgtctgttgctgggtgtcaggtgtttgcatcatacccctccccgactcccgcttgcaaaacccgcctggtgcaattgtgcaggtcactcctggagagccgcgctccgccgttgcgcgtctatgacacagcacacagccctgtcttcacaaccacctcccgcctgccgccatagccattgcctgtgacgctctcccgaattcatagttctcagccatgccgcagcctctgagctcgaaggagaacgctctctttcggcaggtcatccgcaactatgaggacaagcagtacaagcgcggtctccgcgccgccgagcagatcctgaagaagaaccccaagaatggcgacacgctcgccatgaaggccctcatcatcaattctttagggaggaccgacgaggccttcgctctaagcaaggaggccctcaccgccgacatgaaatcccacatatgttggcacgtctatggcctgctatatcgccaccagaagaactgggaggaggccagcaaggcctacaagtttgccctgaagctggagcccggctcccagcagattcagagagacttggcctacctgcaggtccagatgcgcgacttccagggctacgttgcgagccgcactgccatgctgcaggccaagccgatggtcagacagaattggaccgctctcgccatcgcccaccacctcgatggcgagctcgaccaggccgagaaggtcttgactacctacgaagagtcggtcaaggtcccaccgtccaagggcgactacgaaaactcagaagccgtcatgtataaaaactctatcatcgccgaacagggcgactatcagagggctctcgaccacctcaattccatcgccaaagacaacctcgatcgcctagctgttttggaactacgcgccgagtatttggccaagctggacaaaaaggaggaggccattaaggcttaccgcgcgctactagaccgcaacccggaccacgcagaatattacactaagcttgcagatatcatgggtctggatgccaatgacgtcgaggctcgcaaagctctttacaatgaatatgccaagacgaatccacgctgcgatgcggccaagcgcttgcctcttgactttatcagcggtatgtatataaacgatatcgaagccaacaggatctgacagctttcccaggcgaccaattccgcgagtccgcaaagtcatacttgaccttcatgttagacaaaggggtgccatccacatttgccaaccttaaacatctatactcggacacatttaaaaaggagaccttggagtcattggcacatgaatacgtcgcgtctaaagagtctgaatcgaaaatcgagtcctctgcctcctgggatgcgttgaaggggttaccggccggactctactatcttgctcaacactacaactaccgcctgtcccgagacctgtccaaagctttggagttcgttgagaagggactcgaagtggcgcccgaaaacgtcgagtttcatatgacgaaagcccgaatctggaaacactttggtaacacagacaaggccgccgagatcatggagaaggcacgcaacttggatttgaaagatcgctatatcaacaccaaaactgcaaaataccagctgcgcaataatgagagtgggaaagccttgaagacgatgtcactcttcaccaggaatgactcgcctggtggtcccgtatccgatctgatcgacatgcaaagcatatggttcctgacggaggacggcgaggcatctgtacgcaacggtctgatcggtctggctctgaagcgtttccatgctgtttacaacattttcgatgtttggcaagaagatcaattcgatttccacagcttttctttgaggaaaggccagatccgtgcctacatagacatggtccgttgggaagacaagcttcgagatcatcctttctacacacgtgcggcgcttggtgccatcgccgcatacttaggtctccacgacagcaaagctatgtcaaacggagttaatggtgccgctaatggaaacgccgagacagatcccgaagtaaaaaaggcgcttaagaaggccaaaaaggacgcacagaaggccgaacgagaggcggcggagcaggcggcgaaacaggaccctaacaaggcaaagtctgcgggtgcagcccccgtgaagagagatgacgatccccttggcttaaagctggctggaactgcagaaccgctcgtggaggccactaaatttcttgctccgatcttgcaattcagccctaaaaacattgacgggcagatcgctggattcgaggtctatttcagacgagagaaatacttgctggcactcaagtgcgtcaatgcttctattgccattgatccagccagtccgaccgtgcatgagcagacgatacgactccgtcaagcactagacgcgaagcttggttctttgccagccaaggtggccgatgttatcaagtccgactttaccgccattgagccctcaacggatttgaagaagtacaatgcagagtttctacagaaacacaaaggtagcgccccgcatgttgtagctgcagtcaagatccagaagatcttgggagaggacctgaagaaatgcgagcaagatctacttggcatcctaaaaatcaagaccgccgattgggaaccagctgctgaggctttgggtcttcttgcccagtggcgcagtgaggaggtagaggccttcaagaaagcagcacatgaaacatggccggaggtcagcttattcgcgccgcctcccgcaaagagcacatcatagggtcatcggcttgtgtgtcgcatgtctaaatggatgtccttgggggggtaaagtaagggaacgacttatgagccatggctgtagatgagaggccaaaatagtgggcgcaagcttgttgggcacgggctatggatgggcatggttatagaaaaatgtacagttaagataaaacgaacgtgctccatcgaaaagtagatgcttgaatatcatatccactaacatgtaagccctcgttctgacggcccatcgtcaaaacgagtcgcttaaaattaccttgcaatcattgtctcatagttgccagaagatgaagcatattctcccttcctgttttcgtatggtccgtagtaaatcagatgccaacattgacc

SEQ ID NO: 18595 - DNA, 477 bp, Muscodor strobelii
  misc_feature: SGI cDNA ID NO. 566238
  misc_feature: Encodes the peptide sequence at SEQ ID NO 18596
atgcgggaagccatgcctctcatggctggtacactgggattgggccttcctggcctgtgggagtcgtctgtgacgacgtccctggagaactggttcgcgttgcgatacctgctcccttttatttcgttcgtctgcgttggattggagggttggtgcttcttcgacctgctgcgcaagacggtcggtcagcgtgccaggcgcgctgccctgtctcttggcgcgcgggatgaggatgatgatgaggagctcgagatggattttgagtacgatgttgtgaaggacttcccccgtgggggcttcgaaccatcgaataaccagctgtgtattcatggattattgggcataaagctccaggccaagaggacgacatcttcttcaaactctacaaacatcggccgctacttagtcatcgccaaaccacagtcagaagcgcgcaagaagcgcagacgggagatgatggcttatattgctatatga

SEQ ID NO: 18596 - protein, 158 aa, Muscodor strobelii
  misc_feature: SGI Peptide ID NO. 566238
MREAMPLMAGTLGLGLPGLWESSVTTSLENWFALRYLLPFISFVCVGLEGWCFFDLLRKTVGQRARRAALSLGARDEDDDEELEMDFEYDVVKDFPRGGFEPSNNQLCIHGLLGIKLQAKRTTSSSNSTNIGRYLVIAKPQSEARKKRRREMMAYIAI

SEQ ID NO: 18597 - DNA, 1891 bp, Muscodor strobelii
  misc_feature: SGI EST ID NO. CUFF.43679.0
  misc_feature: Variant of the nucleotide sequence at SEQ ID NO 18595
catcaaattgccgactaattggtattatctcccttctcatggctggacacttgttcaatggaccactatgcattggctaatgctccaagaccgtctcctcctcttctcaggcggacacgcggagtaggtacaccgaatcagtattgccgctaatcatcatctgtcactccttcacggcaaaaaagagcagaacgagacatctaccgcaactcgtctttccaagggacacgcaatcatatgctcccttccagtccatgagatgccagcaggtagctcggaattacctactgagtcaacttccctttcgtgggtcaaaatctcacgataagcgatcctggcccgcccaggtgtgagtcttggcaacggtccggaccgcgtcgtggccacggaggtcacgttattagtcagagaagcagacgaggttgggcacacatgcgcacatgccacattccctccaatgcagtacacggaacacgcgaccactttgcaaacttcccactgaaccgcgcgatgagagcgtgcgaacaggtcagacatatgtacacggtctccggttctcaaactattttcttctgacagagagattttgaaacggacaattttcaagcgcgtggagtggacacggcgctgattgacgtggtggtagatggctggggagaagactctaagataggggtctgtatccaccgcgatttgagcggtgaaggtcacaccaccccagcttgttcgtggccgctagctccgcggccattcagcggcatcgcttcccatgccagcccctaccggatccgtccttcaccgatccactgttgggttggcggtggccgttaggtatgtacgcacaggggccggggggaagatggggaaaataagggccatgcgtatcgcgaaactatcgaattgtccaccaccgcttttttgctcgttcgccatactactcaaatcagtctgaagggatggggatgggagaaagtataagatagcgggtacaacccactagtctcctactttccctctcttttctcattctccatgcgggaagccatgcctctcatggctggtacactgggattgggccttcctggcctgtgggagtcgtctgtgacgacgtccctggagaactggttcgcgttgcgatacctgctcccttttatttcgttcgtctgcgttggattggagggttggtgcttcttcgacctgctgcgcaagacggtcggtcagcgtgccaggcgcgctgccctgtctcttggcgcgcgggatgaggatgatgatgaggagctcgagatggattttgagtacgatgttgtgaaggacttcccccgtgggggcttcgaaccatcgaataaccagctgtgtattcatggattattgggcataaagctccaggccaagaggacgacatcttcttcaaactctacaaacatcggccgctacttagtcatcgccaaaccacagtcagaagcgcgcaagaagcgcagacgggagatgatggcttatattgctatatgacgacacgagtaagctgcatggcagcattgaacgataaacgatcacagctacgagatcacacttacgacttttcactttcgccgcttcgagccacgcacaaccagtcgcatagaacgaggtggagaaagtaccattctttgagaatttcctttgtcgacaaaaccagcatcaaatcgaaccggcgtattcatgatcacgagtcaacgagccctgcattagatcgagattggatatgaaaagagaaaagcatatgttttgcattggcatcttggaatgataccgggtgtctggtgtttttgtcttttgggaatggaagcatttgggtgtttagcatgagaaaattataattattcggaaatcaaagaattcttgaattactact

SEQ ID NO: 18598 - DNA, 1443 bp, Muscodor strobelii
  misc_feature: SGI cDNA ID NO. 566239
  misc_feature: Reduced expression when VOC is produced
  misc_feature: Encodes the peptide sequence at SEQ ID NO 18599
atggaggctgcgcaagaggacttgagacccgccctcggggatctggcaccagccgagccaagtgcaacggcgaaggcaatgccagtgactgccccgagtccggctctaagctcaactagctcgtcaggacggcgaccatacgtgcctcaattctctgcagccacagacatgatactttcgcgcataagaagcaagcccggaagcctgtctgaagctctatcatcagcagcttccgttgcgaagaatatcgataagtcagcactcgaggacgctagaagacgactcgttatgggcatgaacacctctacgatgccaatatcggaatctaacccagtgtcaaaacttttacaatctcggttagacgcaccaactatccccacacaggaagcattcacgcccagaaccacagcaccactacccccttcagccatgctcatgcccacgcctgcaaagccaaccactacgatgtccgcttcgagcaagatcaaagtcaagagagaaaagggagttaagagaaaacgaggcagggacggcaatgagacgtcgtcaagcttgagtgagctctctgatagtgatttcgagccttcagcaaagagcacgaccgctgccaccatgaccaaatcaggtcgtcaggttcaaaagccaacgacgtacaatccttcagaagcgacgggcacgaagcgcaaacattacggtaaacgtacggcagaacaagctctttgcaaggtgtgcaccagaggtcttagcccaaacacgaatcaaattgtgttttgcgacggctgcaatttctgctggcatcagctctgccatgatccctacatcgatgacgacttcgttagagacgaaagtcagtcttggttgtgtagccgctgcatggcaaagcgtgagagagcattggcgaagaagaagacgattgatgggttcaaaggagtgagctgggcatcaaagaatgcaagccagagacgaacgtaccttaccaatgtcacacacgctcaattggtaaatattattatgtattgtacggagcttcacccagaccttcccatttttcctggtcaggaatcaggatctgggaagcgtggaccccaaccaatgcctacagtgtcaacatcatcaactgctctgcctcgcgctgaagcaaaacccatcggacctgcgaacttcattggcatcgatcttgcacttgaagcaaatggcagctctaccgatcctcccgccggcaagtccagcgtcaaacctaagattcagggtcaagcagaccgtgaatcctctgtcgaatcagttccaccagcatggccgaaagttggtgaaggagtactgaaaggtctggacttgaacgaggacgacttgcgagacgacaacgatttcgaagccttcagtgtcacgacttatgacgggaaaggaaggaaagttatggagaatggaatacctattgagaaataa

SEQ ID NO: 18599 - protein, 480 aa, Muscodor strobelii
  misc_feature: SGI Peptide ID NO. 566239
  misc_feature (240)..(294): Pfam Id: PF00628 Pfam Desc: PHD-finger
  misc_feature (25)..(478): NCBI GI: 170940160 Blast Desc: protein product [Podospora anserina]
  misc_feature (15)..(470): NCBI GI: 154315005 Blast Desc: BC1G_04844 [Botryotinia fuckeliana B05.10] gi|150848382|gb|EDN23575.1| BC1G_04844 [Botryotinia fuckeliana B05.10]
  misc_feature (47)..(470): NCBI GI: 156052801 Blast Desc: SS1G_06568 [Sclerotinia sclerotiorum 1980] gi|154704346|gb|EDO04085.1| SS1G_06568 [Sclerotinia sclerotiorum 1980]
  misc_feature (200)..(478): NCBI GI: 85068271 Blast Desc: NCU07297 [Neurospora crassa OR74A] gi|28923748|gb|EAA32915.1| [Neurospora crassa OR74A]
  misc_feature (170)..(475): NCBI GI: 145615101 Blast Desc: MGG_13031 [Magnaporthe grisea 70-15] gi|145022015|gb|EDK06035.1| MGG_13031 [Magnaporthe grisea 70-15]
  misc_feature (206)..(350): NCBI GI: 213403081 Blast Desc: PHD finger containing protein Phf1 [Schizosaccharomyces japonicus yFS275] gi|212000360|gb|EEB06020.1| PHD finger containing protein Phf1
  misc_feature (157)..(350): NCBI GI: 19075331 Blast Desc: PHD finger containing protein Phf1 [Schizosaccharomyces pombe 972h-] gi|74627114|sp|P87233.1|PHF1_SCHPO RecName: Full=SWM histone phf1
  misc_feature (113)..(350): NCBI GI: 213408593 Blast Desc: PHD finger protein [Schizosaccharomyces japonicus yFS275] gi|212003114|gb|EEB08774.1| PHD finger protein [Schizosaccharomyces japonicus yFS275]
  misc_feature (134)..(351): NCBI GI: 239606952 Blast Desc: PHD finger domain-containing protein [Ajellomyces dermatitidis ER-3]
  misc_feature (134)..(351): NCBI GI: 261194132 Blast Desc: PHD finger domain-containing protein [Ajellomyces dermatitidis SLH14081] gi|239588485|gb|EEQ71128.1| PHD finger domain-containing protein [Ajellomyces dermatitidis SLH14081]
  misc_feature: Useful for introducing or modulating the production of volatile compounds
MEAAQEDLRPALGDLAPAEPSATAKAMPVTAPSPALSSTSSSGRRPYVPQFSAATDMILSRIRSKPGSLSEALSSAASVAKNIDKSALEDARRRLVMGMNTSTMPISESNPVSKLLQSRLDAPTIPTQEAFTPRTTAPLPPSAMLMPTPAKPTTTMSASSKIKVKREKGVKRKRGRDGNETSSSLSELSDSDFEPSAKSTTAATMTKSGRQVQKPTTYNPSEATGTKRKHYGKRTAEQALCKVCTRGLSPNTNQIVFCDGCNFCWHQLCHDPYIDDDFVRDESQSWLCSRCMAKRERALAKKKTIDGFKGVSWASKNASQRRTYLTNVTHAQLVNIIMYCTELHPDLPIFPGQESGSGKRGPQPMPTVSTSSTALPRAEAKPIGPANFIGIDLALEANGSSTDPPAGKSSVKPKIQGQADRESSVESVPPAWPKVGEGVLKGLDLNEDDLRDDNDFEAFSVTTYDGKGRKVMENGIPIEK

SEQ ID NO: 18600 - DNA, 3315 bp, Muscodor strobelii
  misc_feature: SGI EST ID NO. CUFF.43749.1
  misc_feature: Variant of the nucleotide sequence at SEQ ID NO 18598
tggagatctaggtgctgagattataaaaattgaacaccctactcgtggagatgacacccgcgcatggggtccgccctatgccccttaccgggaagggtcgactcaaagcggtcctggagagtctgcttatttcttgggtgtaaaccgaaacaaaaagtctctcggtctttcttttcagcatcaggagggcgtagaaatcttacacaagcttgcggccaagtgtgacatacttgttgaaaattatcttccgggaagcctgaagaagtatggaatggactacgacacaatacacaaaattaacccgtctctcatctatgcttcgattacaggatatggccagactggtccatatgctaatcgtgccggttacgacgttatggttgaggcggaattcgggctgatgcatatcacgggcaaccgggacggcccgccagtcaaagttggtgtcgctgtaacggacctcacaacaggtctgtacacaagcaacagcatcatggcagctttgctttcgagggccaagactggtcgcggtcagcatattgatgttgcactgagcgattgccagactgctacacttgccaatattgccagcagctgtctcattagtggaaagaaagacactgggcgatggggcacagctcatccttctattgtcccatataagtcatttaagaccaaggatggagatgttcttttcggaggtggaaatgacaggctttttggtattttatgtgatggcttaggccgcccaaactggaagacggactcaagatacaacgtcaattcccagagagttgcaaaccgagtccaactcgaggaagaaatcgagaagatcagtgttcagaagacaacgcaagagtggctcgaggttttcgaaggcaaaggcatgccctacgctgccgtcaatgacgtccaaggaacattgaatcatgagcacacaaaggcaaggaacatggtggtcgaggttgaacatgaacagtgcggttcaatcaagttggtcaacactccagtgaaatacagcgagagcaaaccaagcatccgcacagcaccccctaccctaggacagcacacagacgcggtacttagcgacatattagacatggacaacagcatcatctcttcgcttagggagaagggcgcaatcagttgaataccttacataatagaacatagaacaatagatctccaaaccccgcgtgcatgatcaaaatcgacacgatgcaggattgtacagatactgaggtagagctttgggtgaaggtacttcttgatagtgattgatcacgtgatcgtcacgtgctgaacctccacctctttatcccatgtcgaaaggtaacaatgccggctaagtattttgaacataacaagtatacttaatctaattcagtacttgatcttgttattctgttgacttataggtgatgagggcaccattaatgtggttgcccgggcattcgcgataagcattgccgctgagttgatcctctctacgcgcaagcaaggttaaaaagggcgttctgtgcgtgcactctggcttaagtacgataatcttctcgcgatggaggctgcgcaagaggacttgagacccgccctcggggatctggcaccagccgagccaagtgcaacggcgaaggcaatgccagtgactgccccgagtccggctctaagctcaactagctcgtcaggacggcgaccatacgtgcctcaattctctgcagccacagacatgatactttcgcgcataagaagcaagcccggaagcctgtctgaagctctatcatcagcagcttccgttgcgaagaatatcgataagtcagcactcgaggacgctagaagacgactcgttatgggcatgaacacctctacgatgccaatatcggaatctaacccagtgtcaaaacttttacaatctcggttagacgcaccaactatccccacacaggaagcattcacgcccagaaccacagcaccactacccccttcagccatgctcatgcccacgcctgcaaagccaaccactacgatgtccgcttcgagcaagatcaaagtcaagagagaaaagggagttaagagaaaacgaggcagggacggcaatgagacgtcgtcaagcttgagtgagctctctgatagtgatttcgagccttcagcaaagagcacgaccgctgccaccatgaccaaatcaggtcgtcaggttcaaaagccaacgacgtacaatccttcagaagcgacgggcacgaagcgcaaacattacggtaaacgtacggcagaacaagctctttgcaaggtgtgcaccagaggtcttagcccaaacacgaatcaaattgtgttttgcgacggctgcaatttctgctggcatcagctctgccatgatccctacatcgatgacgacttcgttagagacgaaagtcagtcttggttgtgtagccgctgcatggcaaagcgtgagagagcattggcgaagaagaagacgattgatgggttcaaaggagtgagctgggcatcaaagaatgcaagccagagacgaacgtaccttaccaatgtcacacacgctcaattggtaaatattattatgtattgtacggagcttcacccagaccttcccatttttcctggtcaggaatcaggatctgggaagcgtggaccccaaccaatgcctacagtgtcaacatcatcaactgctctgcctcgcgctgaagcaaaacccatcggacctgcgaacttcattggcatcgatcttgcacttgaagcaaatggcagctctaccgatcctcccgccggcaagtccagcgtcaaacctaagattcagggtcaagcagaccgtgaatcctctgtcgaatcagttccaccagcatggccgaaagttggtgaaggagtactgaaaggtctggacttgaacgaggacgacttgcgagacgacaacgatttcgaagccttcagtgtcacgacttatgacgggaaaggaaggaaagttatggagaatggaatacctattgagaaataaaggtcacaactggctaagctatcagcttcgctaccggtcaggatcgcttcacccatcattacagacacaacttctcttgtaaccgaaaaatgatgttttacgaaggcgttttatttgtgtatataggctgcgtttgctgtataacatccatgaggtcctgccggaatttattattgtgatgcgagccaccgcgatggttcagcaagacgatgaaaagggaacgacttgatcgtctcagactgtggaacgaaatccaacgcgacgaatagctagctactttgtaaaaatgattgtacaactgatttcactcacac

SEQ ID NO: 18601 - DNA, 1338 bp, Muscodor strobelii
  misc_feature: SGI cDNA ID NO. 566240
  misc_feature: Reduced expression when VOC is produced
  misc_feature: Encodes the peptide sequence at SEQ ID NO 18602
atgctaagccggtccttggccggtgtgagcctatgtgccaaggccactccgaggagcaacggcgcattggctcgaattgcccgatacaattcgacgagggccgccacacagccggacttgccattggctggttacagagtccttgatatgacccgggttcttgcaggcccatattgcacgcaaatacttggagatctaggtgctgagattataaaaattgaacaccctactcgtggagatgacacccgcgcatggggtccgccctatgccccttaccgggaagggtcgactcaaagcggtcctggagagtctgcttatttcttgggtgtaaaccgaaacaaaaagtctctcggtctttcttttcagcatcaggagggcgtagaaatcttacacaagcttgcggccaagtgtgacatacttgttgaaaattatcttccgggaagcctgaagaagtatggaatggactacgacacaatacacaaaattaacccgtctctcatctatgcttcgattacaggatatggccagactggtccatatgctaatcgtgccggttacgacgttatggttgaggcggaattcgggctgatgcatatcacgggcaaccgggacggcccgccagtcaaagttggtgtcgctgtaacggacctcacaacaggtctgtacacaagcaacagcatcatggcagctttgctttcgagggccaagactggtcgcggtcagcatattgatgttgcactgagcgattgccagactgctacacttgccaatattgccagcagctgtctcattagtggaaagaaagacactgggcgatggggcacagctcatccttctattgtcccatataagtcatttaagaccaaggatggagatgttcttttcggaggtggaaatgacaggctttttggtattttatgtgatggcttaggccgcccaaactggaagacggactcaagatacaacgtcaattcccagagagttgcaaaccgagtccaactcgaggaagaaatcgagaagatcagtgttcagaagacaacgcaagagtggctcgaggttttcgaaggcaaaggcatgccctacgctgccgtcaatgacgtccaaggaacattgaatcatgagcacacaaaggcaaggaacatggtggtcgaggttgaacatgaacagtgcggttcaatcaagttggtcaacactccagtgaaatacagcgagagcaaaccaagcatccgcacagcaccccctaccctaggacagcacacagacgcggtacttagcgacatattagacatggacaacagcatcatctcttcgcttagggagaagggcgcaatcagttga

SEQ ID NO: 18602 - protein, 445 aa, Muscodor strobelii
  misc_feature: SGI Peptide ID NO. 566240
  misc_feature (117)..(307): Pfam Id: PF02515 Pfam Desc: CoA-transferase family III
  misc_feature (1)..(444): NCBI GI: 85068273 Blast Desc: NCU07298 [Neurospora crassa OR74A] gi|28923749|gb|EAA32916.1| NCU07298 [Neurospora crassa OR74A]
  misc_feature (40)..(444): NCBI GI: 170940161 Blast Desc: protein product [Podospora anserina]
  misc_feature (57)..(444): NCBI GI: 46107434 Blast Desc: FG00600.1 [Gibberella zeae PH-1]
  misc_feature (54)..(444): NCBI GI: 116195668 Blast Desc: conserved [Chaetomium globosum CBS 148.51] gi|88180345|gb|EAQ87813.1| conserved [Chaetomium globosum CBS 148.51]
  misc_feature (6)..(445): NCBI GI: 242782098 Blast Desc: CAIB/BAIF family enzyme [Talaromyces stipitatus ATCC 10500] gi|218720082|gb|EED19501.1| CAIB/BAIF family enzyme [Talaromyces stipitatus ATCC 10500]
  misc_feature (28)..(445): NCBI GI: 255935381 Blast Desc: Pc13g02780 [Penicillium chrysogenum Wisconsin 54-1255] gi|211583337|emb|CAP91347.1| Pc13g02780 [Penicillium chrysogenum Wisconsin 54-1255]
  misc_feature (50)..(444): NCBI GI: 145615103 Blast Desc: MGG_13032 [Magnaporthe grisea 70-15] gi|145022016|gb|EDK06036.1| MGG_13032 [Magnaporthe grisea 70-15]
  misc_feature (34)..(445): NCBI GI: 239606951 Blast Desc: CAIB/BAIF family enzyme [Ajellomyces dermatitidis ER-3]
  misc_feature (34)..(445): NCBI GI: 261194138 Blast Desc: CAIB/BAIF family enzyme [Ajellomyces dermatitidis SLH14081] gi|239588488|gb|EEQ71131.1| CAIB/BAIF family enzyme [Ajellomyces dermatitidis SLH14081]
  misc_feature (25)..(445): NCBI GI: 145255443 Blast Desc: An18g05120 [Aspergillus niger] gi|134084557|emb|CAK43310.1| protein product [Aspergillus niger]
  misc_feature (42)..(445): SWISSPROT Homolog: EC 2.8.3.16 Formyl-CoA transferase
  misc_feature: Useful for introducing or modulating the production of volatile compounds
MLSRSLAGVSLCAKATPRSNGALARIARYNSTRAATQPDLPLAGYRVLDMTRVLAGPYCTQILGDLGAEIIKIEHPTRGDDTRAWGPPYAPYREGSTQSGPGESAYFLGVNRNKKSLGLSFQHQEGVEILHKLAAKCDILVENYLPGSLKKYGMDYDTIHKINPSLIYASITGYGQTGPYANRAGYDVMVEAEFGLMHITGNRDGPPVKVGVAVTDLTTGLYTSNSIMAALLSRAKTGRGQHIDVALSDCQTATLANIASSCLISGKKDTGRWGTAHPSIVPYKSFKTKDGDVLFGGGNDRLFGILCDGLGRPNWKTDSRYNVNSQRVANRVQLEEEIEKISVQKTTQEWLEVFEGKGMPYAAVNDVQGTLNHEHTKARNMVVEVEHEQCGSIKLVNTPVKYSESKPSIRTAPPTLGQHTDAVLSDILDMDNSIISSLREKGAIS

SEQ ID NO: 18603 - DNA, 3315 bp, Muscodor strobelii; identical to SEQ ID NO: 18600
  misc_feature: SGI EST ID NO. CUFF.43749.1
  misc_feature: Variant of the nucleotide sequence at SEQ ID NO 18601

SEQ ID NO: 18604 - DNA, 2145 bp, Muscodor strobelii
  misc_feature: SGI cDNA ID NO. 566241
  misc_feature: Elevated expression when VOC is produced
  misc_feature: Encodes the peptide sequence at SEQ ID NO 18605
atgcgcatatataaatacacgccactggctccagggagcgacgacatccgcttagttcatattcttcccggtgcaccaaatgacacgattaggctagaaatatctcatgttccattaacaacgcagatacaatcgtctaaccaattaccttggtcccgattacaagatatccaggtcaccttacccaaaagatggatggtgcacgagaatcttgaaggcaatgcgctgtattccaatgctgaaacgcaatacaccacatacgatcatcctaacaagttgaagaagcaaagacacaatataagcacggctgtccagcagacgccaaatgtccactacgaagctctgtcttatgcttggggatctaccaatgctgatgaaattatcgaaatttggcctagaaacgcccaccatgaggacctccagcctgaaggaaatcttcagatccgtcaaagcctcgcacaagcgctcagatccttgaggggtgacgacgacgcgcgaacgatatggattgatgctttatgtatcaaccaagaagacgacaaagagcgcggcgagcaagttgtccacatgggccaaatttatcgcaatgcttcaagggtagtagcatggcttggtttgggatttacagatgccagattagcagtctctaccatcgagtattttggaaaacaggtggaagttactagagaccgaagaatagttgcccgacctggctgcgatgagcctatgtattgggattcaaatgttcctctgccctacgacaaacggacgttggatgcaataacacagctgtgctctggtccctggttcgaaaggctttgggttttgcaagagatgcagctagcttcgtccgaaagtatcttgaagtgtggtaaacacgaaataaaatggtccgagttccgccgtgctattttcgtaatcaggttcaagcacgatattcctgagaaaatgcgcgatgccctagacccggcccgggacttgtgcgattatctgttcacttcatcgctacagaagctgattactaagcataccaataggaaatgcagcgatgagagggataggatctatggactattaaatgttctacctcccggtctcgctgagcgaatacacgtttcgtattcaaaaacaacagaggaagtctttgaacagatgacgcttgccagaatacaacaggtacaacgcctggaatttcttcccttttgctgtctaaaccggagcctgggatcaacatgggtctccaactggtcttttcccggacgcgggactacatcctacatcatgtgctttcaggcaagtagtgtatccggagcagtgacagagctcaaacccgacggaagcctcgaagtggctgcgatctccataggaagtattttctcgattgaagatctagattgccgtactgttttcgatatcttcaaattcattaaacgtttaggaattcagaatcttgaggcgataagatatcataatggggagacacagctggaagcatacattcgggctctcacattaggccacacgaaggacagggaatgggaatcggactatccgactgtggcacaattaaaagacacaaccttacgttttgcgcattcagaagataccgagatcgaagtttggacacgcagcgattggcaatattttctcctgtcgtggcttcccgatacgtgtatcttcaccactggcgaaggttacgttggagtgacacggaccaacgctcagctaggggacaaggtattcgtgattctcggatgtgacactcccgtggttctcaggcccgtcagacccggctattatcaggttgtgagagattgcttcgtaacaggtttcatggatggtgaggcggttctaggagagttaccaataccatggcggattgagggtgtaaaaacacgagagggagatacaaaccctttctattgtaacggcgagacaggagaggatcatcttgtggatcctcgtttgggggattggccaccggactgggagccgattgaatggacgcgaactcgtgatgatcctatatactctacgcgatttcaaaacaagacttcgggtgaagttattaacagctggcctcaactcctaccggacgagttgagaaaaaagggtattgatgtgcagaatatttgtttagtttag

SEQ ID NO: 18605 - protein, 714 aa, Muscodor strobelii
  misc_feature: SGI Peptide ID NO. 566241
  misc_feature (112)..(278): Pfam Id: PF06985 Pfam Desc: Heterokaryon incompatibility protein (HET)
  misc_feature (112)..(205): Pfam Id: PF06985 Pfam Desc: Heterokaryon incompatibility protein (HET)
  misc_feature (1)..(714): NCBI GI: 256719970 Blast Desc: NECHADRAFT_98482 [Nectria haematococca mpVI 77-13-4]
  misc_feature (1)..(696): NCBI GI: 46139411 Blast Desc: FG11220.1 [Gibberella zeae PH-1]
  misc_feature (1)..(714): NCBI GI: 154311024 Blast Desc: BC1G_06630 [Botryotinia fuckeliana B05.10] gi|150851034|gb|EDN26227.1| BC1G_06630 [Botryotinia fuckeliana B05.10]
  misc_feature (1)..(714): NCBI GI: 256727220 Blast Desc: NECHADRAFT_32743 [Nectria haematococca mpVI 77-13-4]
  misc_feature (1)..(714): NCBI GI: 115492481 Blast Desc: [Aspergillus terreus NIH2624] gi|114197728|gb|EAU39428.1| [Aspergillus terreus NIH2624]
  misc_feature (1)..(714): NCBI GI: 169603560 Blast Desc: SNOG_04789 [Phaeosphaeria nodorum SN15] gi|111066060|gb|EAT87180.1| SNOG_04789 [Phaeosphaeria nodorum SN15]
  misc_feature (138)..(714): NCBI GI: 145609067 Blast Desc: MGG_09107 [Magnaporthe grisea 70-15] gi|145016510|gb|EDK00940.1| MGG_09107 [Magnaporthe grisea 70-15]
  misc_feature (1)..(598): NCBI GI: 261357884 Blast Desc: conserved [Verticillium albo-atrum VaMs.102]
  misc_feature (97)..(622): NCBI GI: 256730222 Blast Desc: NECHADRAFT_82497 [Nectria haematococca mpVI 77-13-4]
  misc_feature (4)..(714): NCBI GI: 39974569 Blast Desc: MGG_00569 [Magnaporthe grisea 70-15] gi|145018530|gb|EDK02809.1| MGG_00569 [Magnaporthe grisea 70-15]
  misc_feature: Useful for introducing or modulating the production of volatile compounds
MRIYKYTPLAPGSDDIRLVHILPGAPNDTIRLEISHVPLTTQIQSSNQLPWSRLQDIQVTLPKRWMVHENLEGNALYSNAETQYTTYDHPNKLKKQRHNISTAVQQTPNVHYEALSYAWGSTNADEIIEIWPRNAHHEDLQPEGNLQIRQSLAQALRSLRGDDDARTIWIDALCINQEDDKERGEQVVHMGQIYRNASRVVAWLGLGFTDARLAVSTIEYFGKQVEVTRDRRIVARPGCDEPMYWDSNVPLPYDKRTLDAITQLCSGPWFERLWVLQEMQLASSESILKCGKHEIKWSEFRRAIFVIRFKHDIPEKMRDALDPARDLCDYLFTSSLQKLITKHTNRKCSDERDRIYGLLNVLPPGLAERIHVSYSKTTEEVFEQMTLARIQQVQRLEFLPFCCLNRSLGSTWVSNWSFPGRGTTSYIMCFQASSVSGAVTELKPDGSLEVAAISIGSIFSIEDLDCRTVFDIFKFIKRLGIQNLEAIRYHNGETQLEAYIRALTLGHTKDREWESDYPTVAQLKDTTLRFAHSEDTEIEVWTRSDWQYFLLSWLPDTCIFTTGEGYVGVTRTNAQLGDKVFVILGCDTPVVLRPVRPGYYQVVRDCFVTGFMDGEAVLGELPIPWRIEGVKTREGDTNPFYCNGETGEDHLVDPRLGDWPPDWEPIEWTRTRDDPIYSTRFQNKTSGEVINSWPQLLPDELRKKGIDVQNICLV

SEQ ID NO: 18606 - DNA, 862 bp, Muscodor strobelii
  misc_feature: SGI EST ID NO. CUFF.43703.0
  misc_feature: Variant of the nucleotide sequence at SEQ ID NO 18604
ctcgattgaagatctagattgccgtactgttttcgatatcttcaaattcattaaacgtttaggaattcagaatcttgaggcgataagatatcataatggggagacacagctggaagcatacattcgggctctcacattaggccacacgaaggacagggaatgggaatcggactatccgactgtggcacaattaaaagacacaaccttacgttttgcgcattcagaagataccgagatcgaagtttggacacgcagcgattggcaatattttctcctgtcgtggcttcccgatacgtgtatcttcaccactggcgaaggttacgttggagtgacacggaccaacgctcagctaggggacaaggtattcgtgattctcggatgtgacactcccgtggttctcaggcccgtcagacccggctattatcaggttgtgagagattgcttcgtaacaggtttcatggatggtgaggcggttctaggagagttaccaataccatggcggattgagggtgtaaaaacacgagagggagatacaaaccctttctattgtaacggcgagacaggagaggatcatcttgtggatcctcgtttgggggattggccaccggactgggagccgattgaatggacgcgaactcgtgatgatcctatatactctacgcgatttcaaaacaagacttcgggtgaagttattaacagctggcctcaactcctaccggacgagttgagaaaaaagggtattgatgtgcagaatatttgtttagtttagtcaggaggccaagctgtgagactcatgattttgtgcatgactctctgtttcctctcagaataatgagtcgcattgatgtctatacgattttca

SEQ ID NO: 18607 - DNA, 924 bp, Muscodor strobelii
  misc_feature: SGI cDNA ID NO. 566242
  misc_feature: Encodes the peptide sequence at SEQ ID NO 18608
atggctgatagtcatacggcaactgactcctcatcctctccgacgactcctgctcaacttcccagtgacgctatcccaaaagatgtactagagcagctaagcgccatcgccgaaaatgaagagctcgtcttacggcttgtgagagatttttgggactgtatcactcactgtgttgaacctgatttgtttcacgaaacatcagacaagcttcaggaggcacttgaatatgtaagaaacaaatcaccaagccgggacagcccccctccttctgacacaagagcaccggaactatccgtcaaagaccaagactgggaaggtctcggtatataccagattcaatttgacagcgatggcttaccaattcctgatcctgaatggcctaagatatctcaattcgtgcaaggcaagacagtggatggagaagaatacttccaactctttagatcggaggatgaagcactcgtcattgacacgacggacccgactaggacggaactcaacttgccagaactcaaggactcccattcccttgtctatcgtctcgccaagagataccgctgtggctcttctatctttgatgatcagggaaatctcatccacggcggggaattcaatcccatgttgaaattcgattacgccgagcatgtgctaatgggtaacaaagtggagctgtcctgggacacagggaggttcagggccagcgaaacccatttcagattgcagaatggcctgaacttgacatatggagacatcaatgccctcggcggtgacttcttcggaacatccactcctattatgcgaggcaaagactttctccaacagtgtgatctcttcaagaaggcctaccgtacgcttgccgaggccggtggcggcttttcaggagcagtcaagatcaggagacatcctaaaaaacgagatggatga

SEQ ID NO: 18608 - protein, 307 aa, Muscodor strobelii
  misc_feature: SGI Peptide ID NO. 566242
  misc_feature (210)..(287): NCBI GI: 154296325 Blast Desc: BC1G_12989 [Botryotinia fuckeliana B05.10] gi|150843447|gb|EDN18640.1| BC1G_12989 [Botryotinia fuckeliana B05.10]
  misc_feature (206)..(286): NCBI GI: 104780281 Blast Desc: phosphatidylcholine-hydrolyzing phospholipase C [Pseudomonas entomophila L48] gi|95109268|emb|CAK13965.1| Phosphatidylcholine-hydrolyzing phospholipase C [Pseudomonas L48]
  misc_feature (209)..(286): NCBI GI: 238838371 Blast Desc: phosphatidylcholine-hydrolyzing phospholipase C [Microsporum canis CBS 113480]
  misc_feature (206)..(286): NCBI GI: 229588392 Blast Desc: phosphatidylcholine-hydrolyzing phospholipase C [Pseudomonas fluorescens SBW25] gi|229360258|emb|CAY47115.1| phosphatidylcholine-hydrolyzing phospholipase C [Pseudomonas
  misc_feature (206)..(286): NCBI GI: 11611251 Blast Desc: phosphatidylcholine-hydrolyzing phospholipase C [Pseudomonas fluorescens]
  misc_feature (206)..(286): NCBI GI: 92090692 Blast Desc: phospholipase C [Pseudomonas fluorescens] gi|92108700|emb|CAI79482.1| [Pseudomonas fluorescens]
  misc_feature (208)..(298): NCBI GI: 77457053 Blast Desc: Pfl01_0826 [Pseudomonas fluorescens Pf0-1] gi|77381056|gb|ABA72569.1| phosphatidylcholine-hydrolyzing phospholipase C [Pseudomonas fluorescens Pf0-1]
  misc_feature (206)..(286): NCBI GI: 70728270 Blast Desc: phosphatidylcholine-hydrolyzing phospholipase C [Pseudomonas fluorescens Pf-5] gi|68342569|gb|AAY90175.1| phosphatidylcholine-hydrolyzing phospholipase C [Pseudomonas
MADSHTATDSSSSPTTPAQLPSDAIPKDVLEQLSAIAENEELVLRLVRDFWDCITHCVEPDLFHETSDKLQEALEYVRNKSPSRDSPPPSDTRAPELSVKDQDWEGLGIYQIQFDSDGLPIPDPEWPKISQFVQGKTVDGEEYFQLFRSEDEALVIDTTDPTRTELNLPELKDSHSLVYRLAKRYRCGSSIFDDQGNLIHGGEFNPMLKFDYAEHVLMGNKVELSWDTGRFRASETHFRLQNGLNLTYGDINALGGDFFGTSTPIMRGKDFLQQCDLFKKAYRTLAEAGGGFSGAVKIRRHPKKRDG

SEQ ID NO: 18609 - DNA, 1253 bp, Muscodor strobelii
  misc_feature: SGI EST ID NO. CUFF.43712.0
  misc_feature: Variant of the nucleotide sequence at SEQ ID NO 18607
ctgatctctgctacccctcgttacgagaaggtcctgaggtctgtatcctcctcctcctcttcttgataattggttgcgaggaaatatgacacgagagcattactccggcaaatcttcctactgcagagatattcagtactcggggagttgtgtttacagttcaccgccagtcgagcattcgatcagccgcacgaaatggcatgagttgatgcaggtctcgaagatgcgcgcaagccacaattctgagctgaacgagcagaagcaagctaatgggtaattgtgaatttataaagacgctacctgctacccagctttccatcttatcgggatctccagcaatttcttaagtttctacagatctctcaatttgacgcacaatggctgatagtcatacggcaactgactcctcatcctctccgacgactcctgctcaacttcccagtgacgctatcccaaaagatgtactagagcagctaagcgccatcgccgaaaatgaagagctcgtcttacggcttgtgagagatttttgggactgtatcactcactgtgttgaacctgatttgtttcacgaaacatcagacaagcttcaggaggcacttgaatatgtaagaaacaaatcaccaagccgggacagcccccctccttctgacacaagagcaccggaactatccgtcaaagaccaagactgggaaggtctcggtatataccagattcaatttgacagcgatggcttaccaattcctgatcctgaatggcctaagatatctcaattcgtgcaaggcaagacagtggatggagaagaatacttccaactctttagatcggaggatgaagcactcgtcattgacacgacggacccgactaggacggaactcaacttgccagaactcaaggactcccattcccttgtctatcgtctcgccaagagataccgctgtggctcttctatctttgatgatcagggaaatctcatccacggcggggaattcaatcccatgttgaaattcgattacgccgagcatgtgctaatgggtaacaaagtggagctgtcctgggacacagggaggttcagggccagcgaaacccatttcagattgcagaatggcctgaacttgacatatggagacatcaatgccctcggcggtgacttcttcggaacatccactcctattatgcgaggcaaagactttctccaacagtgtgatctcttcaagaaggcctaccgtacgcttgccgaggccggtggcggcttt

SEQ ID NO: 18610 - DNA, 594 bp, Muscodor strobelii
  misc_feature: SGI cDNA ID NO. 566243
  misc_feature: Encodes the peptide sequence at SEQ ID NO 18611
atgaacgcctttgctgaccatttcctcggcgactccttctccgcggcagctggagactcgtccatccccgtgatgatcgcaaagctcataatctgggtcatggatcccacctcaagcctggtgagcaccctgtcgatgttggcgcccgatgtttgcgcaaagtacatgcacgacgaggacaatattctgggtctgcatgttaacaacacacgcggggattcatggaagatgtacggcgatgcgaaattgttcgcgcccgagaacgcagttaacgcgaggttcatgctgcaagcgctgcaggtctcggccgacgaggtgttcgacgcctacaagaacccgcgggcgcccgtaccgactcctctgtcaggcccggagaacgactggccggtttggaactacaaggcctggaatattgcgccgactagggaagaacccaagaatcaccagccgctctttgatggcagtggctggatgcgaaatccttggacgaacagggacgcgcggaatcgtctcaaggctgggtttggaggatactcgtatctgaattgggcgattggtttcctcaggagcgactattttgacaaactccgatag

SEQ ID NO: 18611 - protein, 197 aa, Muscodor strobelii
  misc_feature: SGI Peptide ID NO. 566243
  misc_feature (1)..(186): NCBI GI: 171691050 Blast Desc: protein product [Podospora anserina] gi|170945473|emb|CAP71585.1| protein product [Podospora anserina]
  misc_feature (1)..(156): NCBI GI: 154296325 Blast Desc: BC1G_12989 [Botryotinia fuckeliana B05.10] gi|150843447|gb|EDN18640.1| BC1G_12989 [Botryotinia fuckeliana B05.10]
  misc_feature (1)..(150): NCBI GI: 238838371 Blast Desc: phosphatidylcholine-hydrolyzing phospholipase C [Microsporum canis CBS 113480]
  misc_feature (1)..(116): NCBI GI: 54293492 Blast Desc: lpl0541 [Legionella pneumophila str. Lens] gi|53753324|emb|CAH14771.1| [Legionella pneumophila str. Lens]
  misc_feature (1)..(116): NCBI GI: 21666986 Blast Desc: AF454865_1 phospholipase C [Legionella pneumophila]
  misc_feature (1)..(116): NCBI GI: 54296534 Blast Desc: lpp0565 [Legionella pneumophila str. Paris] gi|53750319|emb|CAH11713.1| [Legionella pneumophila str. Paris]
  misc_feature (1)..(116): NCBI GI: 148360883 Blast Desc: LPC_2843 [Legionella pneumophila str. Corby] gi|148282656|gb|ABQ56744.1| LPC_2843 [Legionella pneumophila str. Corby]
  misc_feature (1)..(116): NCBI GI: 52840747 Blast Desc: phosphatidylcholine hydrolyzing phospholipase [Legionella pneumophila subsp. pneumophila str. Philadelphia 1] gi|52627858|gb|AAU26599.1| phosphatidylcholine hydrolyzing subsp.
  misc_feature (1)..(181): NCBI GI: 104780281 Blast Desc: phosphatidylcholine-hydrolyzing phospholipase C [Pseudomonas entomophila L48] gi|95109268|emb|CAK13965.1| Phosphatidylcholine-hydrolyzing phospholipase C [Pseudomonas L48]
  misc_feature (1)..(124): NCBI GI: 229588392 Blast Desc: phosphatidylcholine-hydrolyzing phospholipase C [Pseudomonas fluorescens SBW25] gi|229360258|emb|CAY47115.1| phosphatidylcholine-hydrolyzing phospholipase C [Pseudomonas
MNAFADHFLGDSFSAAAGDSSIPVMIAKLIIWVMDPTSSLVSTLSMLAPDVCAKYMHDEDNILGLHVNNTRGDSWKMYGDAKLFAPENAVNARFMLQALQVSADEVFDAYKNPRAPVPTPLSGPENDWPVWNYKAWNIAPTREEPKNHQPLFDGSGWMRNPWTNRDARNRLKAGFGGYSYLNWAIGFLRSDYFDKLR

SEQ ID NO: 18612 - DNA, 693 bp, Muscodor strobelii
  misc_feature: SGI cDNA ID NO. 566244
  misc_feature: Encodes the peptide sequence at SEQ ID NO 18613
atgtctcatcaaccaagcagagtttcttttcgcggtcttctccaagccgctctctccagtccatctgatcggtacttttcaaggatgtcccaaatcactggtctgccaagggcagatcgccctcagcctgccgccgtgcgagccgagtcgctcactcgcaatgctgctgacttcagtaaacaagatgctacccccaacttggaggataccttcgagtccaaactccacattagggactctctcgaaatccacgccaaacactgccgatgccttgcccccaaacccaaacttctccagcgcgccaaggacaagctttgcagggtatactctaaggtccatagcgcaccaaatgcgttcacgcatcccaacactgtcactgccacagccagcaatcccagctctgtctccatcgccgccagcacggtttccacgcaggcttccacgcaggctgcctcttcgtcgcttactagcaccacaactctcgtcaactcagacacggcctcccaatactctgagtatgagtattccgacatctgcgaaagcgaagaagatgaagacccagtagactacagctgggtacctcggggttggaacccagatttcgatctctacagggacgaaacgccaaatgagcgcttccatcgccgcctggcaatggctcaggtccacatcaaggccaaattcgagtgttaa

SEQ ID NO: 18613 - protein, 230 aa, Muscodor strobelii
  misc_feature: SGI Peptide ID NO. 566244
MSHQPSRVSFRGLLQAALSSPSDRYFSRMSQITGLPRADRPQPAAVRAESLTRNAADFSKQDATPNLEDTFESKLHIRDSLEIHAKHCRCLAPKPKLLQRAKDKLCRVYSKVHSAPNAFTHPNTVTATASNPSSVSIAASTVSTQASTQAASSSLTSTTTLVNSDTASQYSEYEYSDICESEEDEDPVDYSWVPRGWNPDFDLYRDETPNERFHRRLAMAQVHIKAKFEC

SEQ ID NO: 18614 - DNA, 899 bp, Muscodor strobelii
  misc_feature: SGI EST ID NO. CUFF.43718.0
  misc_feature: Variant of the nucleotide sequence at SEQ ID NO 18612
cactcgcaatgctgctgacttcagtaaacaagatgctacccccaacttggaggataccttcgagtccaaactccacattagggactctctcgaaatccacgccaaacactgccgatgccttgcccccaaacccaaacttctccagcgcgccaaggacaagctttgcagggtatactctaaggtccatagcgcaccaaatgcgttcacgcatcccaacactgtcactgccacagccagcaatcccagctctgtctccatcgccgccagcacggtttccacgcaggcttccacgcaggctgcctcttcgtcgcttactagcaccacaactctcgtcaactcagacacggcctcccaatactctgagtatgagtattccgacatctgcgaaagcgaagaagatgaagacccagtagactacagctgggtacctcggggttggaacccagatttcgatctctacagggacgaaacgccaaatgagcgcttccatcgccgcctggcaatggctcaggtccacatcaaggccaaattcgagtgttaaggctacatcactcaactttaatcctcaatatttttcgaaattgggccgcacaactttgagtttgatggacagttagacagtctttgggcccagccccaggcacggagaaacctacagcattgattttgtcacgacgcatcgtcaaccaccacctgcattatcaatcccgtcaccacgaacattgcgatcgtttcaaaagtcaacatcattgtcattgccctcggttgttatcatcatcatcgtcatcatcatcatcattctgtctgtctatctgtcttagtgtgaaatagtgtaaaatggaaaacaaatatcgcactgcatcgctactaatcaaaactaataaactttgatgaactca

SEQ ID NO: 18615 - DNA, 1497 bp, Muscodor strobelii
  misc_feature: SGI cDNA ID NO. 566245
  misc_feature: Encodes the peptide sequence at SEQ ID NO 18616
atgaaactaacccgatccctcctttcattattcttcataccagcagcatggttccagctgggtctggcaggctgccggctcgtcaagcgaggcatttcgaatgatctactgcttctcggcactgtccttaccagcgaaggcgcactctacgattctagtgtcttgattcaatcggggaagatagcatatgtgggtgacatatgtgggctagctgcaaatagaggcgaccttgccagtgttgttaattgcactgggtcggctgtcatctcccctggctttatcaacacgcacgagcacatcgaatactccaccgtcaatcccttaccggacatcggcgagcgggtaaatcatcgtcatgactggcgagtcggtgcgcggcaccatactctgcgcccggcgccagtaaacggcagcgaaactgacgcgattgcgtggggcgagctacgccacatcttctctggcacgacgtcaatcgtcggtggccagatggctcctggcctcgctcggaacctcgatttcgttaaaggacttgaggatgggctgctgggcgctcctattgctacgtgggataccttccctttggatgatgcagctggcatcttacgaaacggagactgtgactatggaccggagccaatcaaccaagaggtggcgctgagggctcatcgctatatcgcacacattggagagggtattgattccgaggcggccaacgagtttgcctgcctgtcgaactcgacattcgacacaaagccagcgcggggtggaggtggtctgtctactgacatcgttgctcccaaccttgcccttgtgcatgcactcgggctaacccctgataactacgacatggtcgcgacgcgtggtgctaaagttgtgtggtcgcctcgcagtaacgtctacctctatgggaacaccatgaatgtaacctcgctgcttcatagcggaatcacagttgcgataggcaccgactggcttcctagtggatctgcgacgatgggcagagaggctgtttgcgccgcttctgttacgaaggaactctttgggctggaacttgagccgcaaactctttgggagatggccacgatcaacgcggctatagtggccggctttgaggactatattggctctatcgaagttggtaaacttgctgatattgtcatcttccaaggagaagggaagcttgacagagaagaaatcaacccattcgcccaagcagttttcgcgccaggagaggatattgagctcgtgcttcgcggcggaaaggtcctcgtcgtaactgacgagatcaacaatctagcaacgagaaattgtgaggtaatcaactttggcaaggcaaagaagataatatgtgttgcggaagaattgggatcttcctatgtggacttcgaaacctcactacaaggagtgtatcccgccatactcccgggtctccccgcagacgagccgtcatgtgagccccgacgtctgccccaaagctatgagccaccgagcgattaa

SEQ ID NO: 18616 - protein, 498 aa, Muscodor strobelii
  misc_feature: SGI Peptide ID NO. 566245
  misc_feature (88)..(389): Pfam Id: PF01979 Pfam Desc: Amidohydrolase family
  misc_feature (253)..(389): Pfam Id: PF01979 Pfam Desc: Amidohydrolase family
  misc_feature (350)..(387): Pfam Id: PF07969 Pfam Desc: Amidohydrolase family
  misc_feature (1)..(488): NCBI GI: 261360536 Blast Desc: metal dependent amidohydrolase [Verticillium albo-atrum VaMs.102]
  misc_feature (37)..(489): NCBI GI: 162448325 Blast Desc: sce0056 [Sorangium cellulosum 'So ce 56'] gi|161158907|emb|CAN90212.1| by Glimmer/Critica [Sorangium cellulosum 'So ce 56']
  misc_feature (21)..(494): NCBI GI: 149918127 Blast Desc: metal dependent amidohydrolase [Plesiocystis pacifica SIR-1] gi|149821132|gb|EDM80538.1| metal dependent amidohydrolase [Plesiocystis pacifica SIR-1]
  misc_feature (23)..(488): NCBI GI: 108764058 Blast Desc: metal dependent amidohydrolase [Myxococcus xanthus DK 1622] gi|108467938|gb|ABF93123.1| metal dependent amidohydrolase [Myxococcus xanthus DK 1622]
  misc_feature (23)..(488): NCBI GI: 115373115 Blast Desc: thrombospondin type 3 repeat family [Stigmatella aurantiaca DW4/3-1] gi|115369871|gb|EAU68804.1| thrombospondin type 3 repeat family [Stigmatella aurantiaca DW4/3-1]
  misc_feature (36)..(458): NCBI GI: 240142251 Blast Desc: MexAM1_META2p0573 [Methylobacterium extorquens AM1] gi|240012195|gb|ACS43420.1| conserved [Methylobacterium extorquens AM1]
  misc_feature (14)..(449): NCBI GI: 27375360 Blast Desc: blr0249 [Bradyrhizobium japonicum USDA 110] gi|27348496|dbj|BAC45514.1| blr0249 [Bradyrhizobium japonicum USDA 110]
  misc_feature (24)..(420): NCBI GI: 280966792 Blast Desc: amidohydrolase [Frankia sp. EuI1c] gi|270729220|gb|EFA57529.1| amidohydrolase [Frankia sp. EuI1c]
  misc_feature (40)..(433): NCBI GI: 167590265 Blast Desc: BuboB_33327 [Burkholderia ubonensis Bu]
  misc_feature (37)..(420): NCBI GI: 24213011 Blast Desc: chlorohydrolase [Leptospira interrogans serovar Lai str. 56601] gi|45656174|ref|YP_000260.1| chlorohydrolase family protein [Leptospira interrogans serovar Copenhageni str. Fiocruz
  misc_feature (35)..(429): SWISSPROT Homolog: EC 3.5.4.28 S-adenosylhomocysteine deaminase
MKLTRSLLSLFFIPAAWFQLGLAGCRLVKRGISNDLLLLGTVLTSEGALYDSSVLIQSGKIAYVGDICGLAANRGDLASVVNCTGSAVISPGFINTHEHIEYSTVNPLPDIGERVNHRHDWRVGARHHTLRPAPVNGSETDAIAWGELRHIFSGTTSIVGGQMAPGLARNLDFVKGLEDGLLGAPIATWDTFPLDDAAGILRNGDCDYGPEPINQEVALRAHRYIAHIGEGIDSEAANEFACLSNSTFDTKPARGGGGLSTDIVAPNLALVHALGLTPDNYDMVATRGAKVVWSPRSNVYLYGNTMNVTSLLHSGITVAIGTDWLPSGSATMGREAVCAASVTKELFGLELEPQTLWEMATINAAIVAGFEDYIGSIEVGKLADIVIFQGEGKLDREEINPFAQAVFAPGEDIELVLRGGKVLVVTDEINNLATRNCEVINFGKAKKIICVAEELGSSYVDFETSLQGVYPAILPGLPADEPSCEPRRLPQSYEPPSD

SEQ ID NO: 18617 - DNA, 3244 bp, Muscodor strobelii
  misc_feature: SGI EST ID NO. CUFF.43721.0
  misc_feature: Variant of the nucleotide sequence at SEQ ID NO 18615
tggtaatagctgtaaaaattgcgagataaactgaccttatcgatttatattcctaatgacagatctggtactgaggactgttgtcggtcaagaaatatgatatgttgtcgatgagcaaatcaaccaactgggaaagctgggctttagtgtgctgtcaattatctgtcccctgttattacatcttatgcgagcgactgattgattgcagaccaccgacacgagaaagggtaaaacgacagtttgacaattgtcaaacaagccatgctatcatgtcaaaagatctctacctagtattcctcggtacagaacgcaaatagctgaactattctacacctccttaacgtatgacgtatactaaactccacattccaagcgcgacttaacaaacccacgtgcaaccggactgaccagggcttacctaaccacagcaacatccgtcaagctccctagcttcttttctgcttgccgaaaggatttcagcctccccaacgaagaaaatacctgtgacttctgactgtcgcgagccatgtcggtcggcagccgtttcaatgaaactaacccgatccctcctttcattattcttcataccagcagcatggttccagctgggtctggcaggctgccggctcgtcaagcgaggcatttcgaatgatctactgcttctcggcactgtccttaccagcgaaggcgcactctacgattctagtgtcttgattcaatcggggaagatagcatatgtgggtgacatatgtgggctagctgcaaatagaggcgaccttgccagtgttgttaattgcactgggtcggctgtcatctcccctggctttatcaacacgcacgagcacatcgaatactccaccgtcaatcccttaccggacatcggcgagcgggtaaatcatcgtcatgactggcgagtcggtgcgcggcaccatactctgcgcccggcgccagtaaacggcagcgaaactgacgcgattgcgtggggcgagctacgccacatcttctctggcacgacgtcaatcgtcggtggccagatggctcctggcctcgctcggaacctcgatttcgttaaaggacttgaggatgggctgctgggcgctcctattgctacgtgggataccttccctttggatgatgcagctggcatcttacgaaacggagactgtgactatggaccggagccaatcaaccaagaggtggcgctgagggctcatcgctatatcgcacacattggagagggtattgattccgaggcggccaacgagtttgcctgcctgtcgaactcgacattcgacacaaagccagcgcggggtggaggtggtctgtctactgacatcgttgctcccaaccttgcccttgtgcatgcactcgggctaacccctgataactacgacatggtcgcgacgcgtggtgctaaagttgtgtggtcgcctcgcagtaacgtctacctctatgggaacaccatgaatgtaacctcgctgcttcatagcggaatcacagttgcgataggcaccgactggcttcctagtggatctgcgacgatgggcagagaggctgtttgcgccgcttctgttacgaaggaactctttgggctggaacttgagccgcaaactctttgggagatggccacgatcaacgcggctatagtggccggctttgaggactatattggctctatcgaagttggtaaacttgctgatattgtcatcttccaaggagaagggaagcttgacagagaagaaatcaacccattcgcccaagcagttttcgcgccaggagaggatattgagctcgtgcttcgcggcggaaaggtcctcgtcgtaactgacgagatcaacaatctagcaacgagaaattgtgaggtaatcaactttggcaaggcaaagaagataatatgtgttgcggaagaattgggatcttcctatgtggacttcgaaacctcactacaaggagtgtatcccgccatactcccgggtctccccgcagacgagccgtcatgtgagccccgacgtctgccccaaagctatgagccaccgagcgattaaaatcaggtagttataaactatcaagtcaacaagcaacatcgtattcaaacctttgcactaaagtcgttcttcgaagcttctcgtcatgatcaatacttgctcaagcgaattttcactgtccacctttggcgtgtgcaacaattacgcttttctcccgcgcgtcgtgcatttgttcatgacatggaactctgttgataccccaggctgaccccggttgcttctcgcgaatgtttctggcatataagtttcgctcctctaacgattcgagaacgtggcgttacgtctgaacagactctcctgaacttgcgacatgtgccagtgcaggcttgttgagcaactccacaaggctacctagtaacacaagccgacatctctttacctatttttcttgagtgactcctcttgattacagctcagtatattttaactcctttagacagatttacgctgcctggatgatgcgtgtcaaatgttcaaccggttgggcggtgagcaaaccttggtcatctacctacggcagaaagatcgtacctcctgaatcccgcttgacaggggcgttcaatagactcgccgcaaaagacgatgtcaattgtacacacgtcgccctgtttgagagtgtttcgctccatcttggaatgggctcggctggggaccacattgcgtttcaacgcccttcgagatacaacataaacagggcggtcgttattagaactccctgttcacatgaagaggcgtctctatagccctaaggttccgttgcctacgaattaacctttatatgctaatgatttagaacattatttggtgagtgagttaattaccataatcaacgccatgaaagcctaaacccaatcctatgagagatgtcggagaaagggctgctctctaagtaacataaatatctgccctccctcccttgattcttgattttgaattctgaaatttttccattacacatcatcctcagacttgagttacacacaaccgtctcataatcactcattcatcaacccgtactgtcaacagtctattgccagtccctgacgactgcgtccattttcatcaacatcaacaacaaacactcacgagtacacatcattaccagcctccaagatgtctcatcaaccaagcagagtttcttttcgcggtcttctccaagccgctctctccagtccatctgatcggtacttttcaaggat

SEQ ID NO: 18618 - DNA, 1212 bp, Muscodor strobelii
  misc_feature: SGI cDNA ID NO. 566246
  misc_feature: Encodes the peptide sequence at SEQ ID NO 18619
atggcgacatcgttagatccaccggttggcggtgttgaatcttctgatgaaaaggacgtcgatttccccgctacacaggagacaaacggaagcagtgtcagccaaactcatgagaacaaacaagagcttacagcacagcccccaacaacagcggagaatcccgtccacgaaacttcaaagcaaacaaccactcttgagattccagcacaagtctccaaggaaacagagaagaccaccccatccagcacagtatctaccttaaatgggcaagccagtgataagtcctcaccgacatcccccaacccgttggcatcaccacccaaagatgacatcgtaaacccgccagatttccaaggcgaggtggaaaccaacaacgacattcctagtcgagctattatacgagcgatagaggactacacggttctagaccgcaatggcaaaacccaccctttcaagagtctgtactgtggacacaatgtcgcgcgacgtgttctcgtcattttcattcggcatttcttctgtggtaattgccaagagtacctgcgcacactgtcagcttcaatcacaccagactcgcttctcgccttgcccgtaagcaccttcatcacggtagttggttgcggcactcatgagctcattgatgcgtacgtgaaggagacaaaatgtcccttcccagtgtatgccgacccgactagacggctataccaagagcttggcatggtgcgcacgctcagcatgggcactcgtcctgcttacatgaaggatcggacggtggcgcatacagtcctctcgggaatcaaacagggcttgaaacaagtgaagagcggccttgtgacgaagatgggcgattcgagacaagtgggtggcgaattcatgttcgaacctgcttccatgacgctcgatacgccgatctcatcgccacagattggagtggagaagaaactggaggaattggatcttgaggccgagaagaaaccagaagagaaacggatcacgtggtgtcatcggatgaagacgacgagagatcatgcggagatacccgagttgagagaagtattgggtttggaaggaaatggtgcgccgattcgagatgataagagatggcagaaggcactgagagagaggaagggaacagggctgagcatggcgagtcagatgagtgggagtgctgttgtgacgcggacacctaccggcggagatgtcgttgtgtaa

SEQ ID NO: 18619 - protein, 403 aa, Muscodor strobelii
  misc_feature: SGI Peptide ID NO. 566246
  misc_feature (90)..(387): NCBI GI: 261353170 Blast Desc: conserved [Verticillium albo-atrum VaMs.102]
  misc_feature (68)..(391): NCBI GI: 46137611 Blast Desc: FG10321.1 [Gibberella zeae PH-1]
  misc_feature (44)..(387): NCBI GI: 85102016 Blast Desc: NCU04268 [Neurospora crassa OR74A] gi|12718438|emb|CAC28745.1| [Neurospora crassa] gi|28922801|gb|EAA32023.1| conserved [Neurospora crassa OR74A]
  misc_feature (102)..(387): NCBI GI: 154294923 Blast Desc: BC1G_13584 [Botryotinia fuckeliana B05.10] gi|150844542|gb|EDN19735.1| BC1G_13584 [Botryotinia fuckeliana B05.10]
  misc_feature (104)..(387): NCBI GI: 156044404 Blast Desc: SS1G_10305 [Sclerotinia sclerotiorum 1980] gi|154694694|gb|EDN94432.1| SS1G_10305 [Sclerotinia sclerotiorum 1980]
  misc_feature (48)..(396): NCBI GI: 256731853 Blast Desc: NECHADRAFT_69625 [Nectria haematococca mpVI 77-13-4]
  misc_feature (60)..(317): NCBI GI: 39973829 Blast Desc: MGG_00939 [Magnaporthe grisea 70-15] gi|145018108|gb|EDK02387.1| MGG_00939 [Magnaporthe grisea 70-15]
  misc_feature (110)..(374): NCBI GI: 171693715 Blast Desc: protein product [Podospora anserina] gi|170946806|emb|CAP73610.1| protein product [Podospora anserina]
  misc_feature (116)..(355): NCBI GI: 169781034 Blast Desc: [Aspergillus oryzae RIB40] gi|83773721|dbj|BAE63848.1| protein product [Aspergillus oryzae]
  misc_feature (116)..(355): NCBI GI: 238504733 Blast Desc: conserved [Aspergillus flavus NRRL3357] gi|220689711|gb|EED46061.1| conserved [Aspergillus flavus NRRL3357]
MATSLDPPVGGVESSDEKDVDFPATQETNGSSVSQTHENKQELTAQPPTTAENPVHETSKQTTTLEIPAQVSKETEKTTPSSTVSTLNGQASDKSSPTSPNPLASPPKDDIVNPPDFQGEVETNNDIPSRAIIRAIEDYTVLDRNGKTHPFKSLYCGHNVARRVLVIFIRHFFCGNCQEYLRTLSASITPDSLLALPVSTFITVVGCGTHELIDAYVKETKCPFPVYADPTRRLYQELGMVRTLSMGTRPAYMKDRTVAHTVLSGIKQGLKQVKSGLVTKMGDSRQVGGEFMFEPASMTLDTPISSPQIGVEKKLEELDLEAEKKPEEKRITWCHRMKTTRDHAEIPELREVLGLEGNGAPIRDDKRWQKALRERKGTGLSMASQMSGSAVVTRTPTGGDVVV

SEQ ID NO: 18620 - DNA, 2363 bp, Muscodor strobelii
  misc_feature: SGI EST ID NO. CUFF.43727.0
  misc_feature: Variant of the nucleotide sequence at SEQ ID NO 18618
ttttcctttgccatcatgtttcaaatcttcaaacttgatttcttgcctcagtcatgtgttggcgtgtctttgttctgtgaattgttcttctcgcaatctgattgacagcattgccccataaatccagccgtagattgcatcactggaaacgacctcacttcttcaacttctcataccccccatattgcagggcctggctcaccagtacaacgcatctctgacaccctccaagataagcactgcaacctcaatactcaataaccaagttgagcggaatggcgacatcgttagatccaccggttggcggtgttgaatcttctgatgaaaaggacgtcgatttccccgctacacaggagacaaacggaagcagtgtcagccaaactcatgagaacaaacaagagcttacagcacagcccccaacaacagcggagaatcccgtccacgaaacttcaaagcaaacaaccactcttgagattccagcacaagtctccaaggaaacagagaagaccaccccatccagcacagtatctaccttaaatgggcaagccagtgataagtcctcaccgacatcccccaacccgttggcatcaccacccaaagatgacatcgtaaacccgccagatttccaaggcgaggtggaaaccaacaacgacattcctagtcgagctattatacgagcgatagaggactacacggttctagaccgcaatggcaaaacccaccctttcaagagtctgtactgtggacacaatgtcgcgcgacgtgttctcgtcattttcattcggcatttcttctgtggtaattgccaagagtacctgcgcacactgtcagcttcaatcacaccagactcgcttctcgccttgcccgtaagcaccttcatcacggtagttggttgcggcactcatgagctcattgatgcgtacgtgaaggagacaaaatgtcccttcccagtgtatgccgacccgactagacggctataccaagagcttggcatggtgcgcacgctcagcatgggcactcgtcctgcttacatgaaggatcggacggtggcgcatacagtcctctcgggaatcaaacagggcttgaaacaagtgaagagcggccttgtgacgaagatgggcgattcgagacaagtgggtggcgaattcatgttcgaacctgcttccatgacgctcgatacgccgatctcatcgccacagattggagtggagaagaaactggaggaattggatcttgaggccgagaagaaaccagaagagaaacggatcacgtggtgtcatcggatgaagacgacgagagatcatgcggagatacccgagttgagagaagtattgggtttggaaggaaatggtgcgccgattcgagatgataagagatggcagaaggcactgagagagaggaagggaacagggctgagcatggcgagtcagatgagtgggagtgctgttgtgacgcggacacctaccggcggagatgtcgttgtgtaaaatgctgaatcactggagtaacatactgagagaggcgagcatttgggagtagcgccttaaattcaaggagaagggaaatactgacgatagtgcctacccaagattcgagacaacgagctaactgtgtcataacaagaagatcaatacaccaatacgaactaatcagcaacaagtgagagcttgcaagagacacgtgcgtgagctgcctttgcgagtttagatcggacttcgaagaaaattgaatgtaaccgagaatgtcagaaaagaagttgggaaaaagatatatatttcggcctataacctagtcccaccctcccatcagaacctgctttcgcgaggtgccagacacgctctgcccccacagtcagagaactctgaactttatccctctgatcccacgtgcaacaatcgcgggttttacggccgatcactctaatggatttttacttggtgccatcaattgccatgcccgcgaggtggatcgaacccaggtgcttatgagatagtgggagttcacatcacacttgtagcggttcggcgccattatcgtctcttatccacccggcccagttgcaaaagccggggtgcttataggggtttatggagcaaagggctcagagcaggagacacgctcattggctgggggcacttcggggtgaggaggaagcctgatatgagcgcgaaggcagcgcggtcggtgacgagttttgcgtaggagatgggatgatacgcacccttttgagcacatatgtgcgccgttggtgcacttagagaagcctatgctcactcccttcctatattgcatccatagtggtccattctagccccttttgttattgttaccgagcacaaactgcaaccctttcttactccacg

SEQ ID NO: 18621 - DNA, 864 bp, Muscodor strobelii
  misc_feature: SGI cDNA ID NO. 566247
  misc_feature: Reduced expression when VOC is produced
  misc_feature: Encodes the peptide sequence at SEQ ID NO 18622
atggcttacaacggctatccgacccgggatgaggagcagggaattccaatgcagcgtgtggccctggaccactcccagttttttgccagactcggccatgtcgagaacatgatcaaagaactcaagcgaactgtcgatgagatcactggtctgcaccggcgctatctctccgaggcggatcccggccctgtcagtcgcgaaattgatgagaggaggaatgatatccaaactctgaacaattcaatccgctcggagctccagtatctcaccgacgacaaattgatcactactgccaccggtctccagcaaatcaagcaccaacagatcaacaccaaaacagcggcgttcaagagtcagctgcatgaatacagcactgaagacagtgaattcgatcgccgctgctgcgatgtgtccatacgccagttccagacagtatacccaaacgcaactcggcaggaagcggaggacgccgccagaaaccccagaaacaacggtgtcttccagcaggcactcctgagcaaccgcaccggccaggccgcctcagtattagactccgtcgaagagcggtacacccagctgcaaaacatccaacgaactataatacagctcgccgagctattcaaagatcttgatatcatgctccagcagcaggagccgaccatagactttcttcaaaagacaggggcggaagtggtcgacaacctagacaggggcaatcaggaggtcggtgtggcagttaacacgtcccgcaaaaccagaaagaagaagtggtggtgcttgatactggtgattatcatcattgctctcgcggttggtttgggtgtgggcattacgatggcgcagaagaaggtttctgggaattag

SEQ ID NO: 18622 - protein, 287 aa, Muscodor strobelii
  misc_feature: SGI Peptide ID NO. 566247
  misc_feature (23)..(120): Pfam Id: PF00804 Pfam Desc: Syntaxin
  misc_feature (188)..(250): Pfam Id: PF05739 Pfam Desc: SNARE domain
  misc_feature (4)..(276): NCBI GI: 46136825 Blast Desc: FG09928.1 [Gibberella zeae PH-1]
  misc_feature (4)..(282): NCBI GI: 119393905 Blast Desc: SSOI [Hypocrea jecorina]
  misc_feature (4)..(265): NCBI GI: 256732092 Blast Desc: NECHADRAFT_41584 [Nectria haematococca mpVI 77-13-4]
  misc_feature (27)..(261): NCBI GI: 261352128 Blast Desc: SSOI [Verticillium albo-atrum VaMs.102]
  misc_feature (34)..(260): NCBI GI: 261358807 Blast Desc: SSO2 [Verticillium albo-atrum VaMs.102]
  misc_feature (22)..(283): NCBI GI: 169614878 Blast Desc: SNOG_10590 [Phaeosphaeria nodorum SN15] gi|111060864|gb|EAT81984.1| SNOG_10590 [Phaeosphaeria nodorum SN15]
  misc_feature (23)..(280): NCBI GI: 50546529 Blast Desc: YALI0B10780p [Yarrowia lipolytica] gi|49646600|emb|CAG82979.1| YALI0B10780p [Yarrowia lipolytica]
  misc_feature (7)..(260): NCBI GI: 71020289 Blast Desc: UM04228.1 [Ustilago maydis 521] gi|46100044|gb|EAK85277.1| UM04228.1 [Ustilago maydis 521]
  misc_feature (116)..(260): NCBI GI: 46108136 Blast Desc: FG00950.1 [Gibberella zeae PH-1]
  misc_feature (34)..(264): NCBI GI: 39944158 Blast Desc: MGG_04090 [Magnaporthe grisea 70-15] gi|145014816|gb|EDJ99384.1| MGG_04090 [Magnaporthe grisea 70-15]
  misc_feature: Useful for introducing or modulating the production of volatile compounds
MAYNGYPTRDEEQGIPMQRVALDHSQFFARLGHVENMIKELKRTVDEITGLHRRYLSEADPGPVSREIDERRNDIQTLNNSIRSELQYLTDDKLITTATGLQQIKHQQINTKTAAFKSQLHEYSTEDSEFDRRCCDVSIRQFQTVYPNATRQEAEDAARNPRNNGVFQQALLSNRTGQAASVLDSVEERYTQLQNIQRTIIQLAELFKDLDIMLQQQEPTIDFLQKTGAEVVDNLDRGNQEVGVAVNTSRKTRKKKWWCLILVIIIIALAVGLGVGITMAQKKVSGN

SEQ ID NO: 18623 - DNA, 1433 bp, Muscodor strobelii
  misc_feature: SGI EST ID NO. CUFF.43910.1
  misc_feature: Variant of the nucleotide sequence at SEQ ID NO 18621
agacaagaggcaagacgtcatgcctgcctagagtgggaatgtgtcggagggatcgcagcagggttggccaggaacagcagtagcagcacttgcagcagtagacctccccacataattacatgctctctggcgctaccttcccaatcccaatttcaacgttgctctgctaggcttcgagttctcgacctcgcacccacgaacgacagtgccgccaattgatctttatttggtttcgactttattcttctcgtcatataggtgtacagtcgcatgagcgcgaacaacatggcttacaacggctatccgacccgggatgaggagcagggaattccaatgcagcgtgtggccctggaccactcccagttttttgccagactcggccatgtcgagaacatgatcaaagaactcaagcgaactgtcgatgagatcactggtctgcaccggcgctatctctccgaggcggatcccggccctgtcagtcgcgaaattgatgagaggaggaatgatatccaaactctgaacaattcaatccgctcggagctccagtatctcaccgacgacaaattgatcactactgccaccggtctccagcaaatcaagcaccaacagatcaacaccaaaacagcggcgttcaagagtcagctgcatgaatacagcactgaagacagtgaattcgatcgccgctgctgcgatgtgtccatacgccagttccagacagtatacccaaacgcaactcggcaggaagcggaggacgccgccagaaaccccagaaacaacggtgtcttccagcaggcactcctgagcaaccgcaccggccaggccgcctcagtattagactccgtcgaagagcggtacacccagctgcaaaacatccaacgaactataatacagctcgccgagctattcaaagatcttgatatcatgctccagcagcaggagccgaccatagactttcttcaaaagacaggggcggaagtggtcgacaacctagacaggggcaatcaggaggtcggtgtggcagttaacacgtcccgcaaaaccagaaagaagaagtggtggtgcttgatactggtgattatcatcattgctctcgcggttggtttgggtgtgggcattacgatggcgcagaagaaggtttctgggaattaggagagggacaccgaaaatgggaaagtgacgaagagctgagggatatgggatgtgtaatgatgttcgcgactgaaattacggattagcatgagtaattgagtacaggacgtgttttacttgactattagggttgctcacaataaaggtagagcttggcgttactgatttacctgatatgggtgtgttgatcctaggttcagataagtttagcggtgctattgtgatcgaaataagagaacggttgactgcagtgccacggctgctatgacacatgctaagtgtgc

SEQ ID NO: 18624 - DNA, 897 bp, Muscodor strobelii
  misc_feature: SGI cDNA ID NO. 566248
  misc_feature: Encodes the peptide sequence at SEQ ID NO 18625
atgatcagaaaaaatgcccgtgcacggagagactttctgtatcgcaaagcgctgctattacgagatgctgagatcagtgagaagagagcaaagttaagggcatctcttgccagtggccgaccactggatcattcagttgcccaggatactcaattacggaaggactacgcctacgatgagtctgccccagaccgcaccgtccaggaagaattagatctcgacgatgaatatgcccagctctctggtatcacggaccccagagttctaatcacaacctcccgagatccttcgacgagattacaagctttcagtaaagaaatcagattacttctacccacgggtatccgattgaatcgtggcgggacgattctgcccgacctggtcaaatctgctcagtctgctggccttacggacgtactgcttctccatgaacatcgtggtgtaccaacgggtctcaccgtttcacatcttccctttgggccaactgcttcattctctttgcataatgtggtattgcgccatgatattcccaactctatccgtggtactgtcagcgaatcatatccgcatatcatctttgaagggtttacgacgcctctaggcaagcgcattgtcaacatattaaaacatctcttcccaccgcgtgaggcggtcactagtaaaacttcgctaggaagccgcgttatcacattcaagaacatcgacgacacgatagaactccgtcaccacgtgttcgtacagacgagctacgactctgtggagctcagtgaagtcggaccgaggatgtccatgaagcccttccagattcgtgctggcttgctggaccagaaagatggcgatgtggaatgggcactcaccaattacacacgtaccggtcgcaagaagaactatctatga

SEQ ID NO: 18625 - protein, 298 aa, Muscodor strobelii
  misc_feature: SGI Peptide ID NO. 566248
  misc_feature (89)..(269): Pfam Id: PF04427 Pfam Desc: Brix domain
  misc_feature (1)..(298): NCBI GI: 46136827 Blast Desc: FG09929.1 [Gibberella zeae PH-1]
  misc_feature (1)..(298): NCBI GI: 256732093 Blast Desc: [Nectria haematococca mpVI 77-13-4]
  misc_feature (1)..(298): NCBI GI: 156065923 Blast Desc: conserved [Sclerotinia sclerotiorum 1980] gi|154691831|gb|EDN91569.1| conserved [Sclerotinia sclerotiorum 1980]
  misc_feature (1)..(298): NCBI GI: 154305572 Blast Desc: conserved [Botryotinia fuckeliana B05.10] gi|150853342|gb|EDN28534.1| conserved [Botryotinia fuckeliana B05.10]
  misc_feature (1)..(298): NCBI GI: 189188942 Blast Desc: U3 small nucleolar ribonucleoprotein protein IMP4 [Pyrenophora tritici-repentis Pt-1C-BFP] gi|187972416|gb|EDU39915.1| U3 small nucleolar ribonucleoprotein
  misc_feature (1)..(298): NCBI GI: 169608341 Blast Desc: SNOG_07244 [Phaeosphaeria nodorum SN15] gi|111064775|gb|EAT85895.1| SNOG_07244 [Phaeosphaeria nodorum SN15]
  misc_feature (1)..(298): NCBI GI: 39973753 Blast Desc: conserved [Magnaporthe grisea 70-15] gi|58257405|gb|AAW69324.1| U3 small nucleolar ribonucleoprotein-like protein [Magnaporthe grisea] conserved
  misc_feature (1)..(298): NCBI GI: 171693711 Blast Desc: protein product [Podospora anserina] gi|170946804|emb|CAP73608.1| protein product [Podospora anserina]
  misc_feature (1)..(298): NCBI GI: 116197823 Blast Desc: CHGG_07067 [Chaetomium globosum CBS 148.51] gi|88178346|gb|EAQ85814.1| CHGG_07067 [Chaetomium globosum CBS 148.51]
  misc_feature (1)..(298): NCBI GI: 261201592 Blast Desc: U3 small nucleolar ribonucleoprotein IMP4 [Ajellomyces dermatitidis SLH14081] gi|239590107|gb|EEQ72688.1| U3 small nucleolar ribonucleoprotein IMP4 [Ajellomyces dermatitidis U3
MIRKNARARRDFLYRKALLLRDAEISEKRAKLRASLASGRPLDHSVAQDTQLRKDYAYDESAPDRTVQEELDLDDEYAQLSGITDPRVLITTSRDPSTRLQAFSKEIRLLLPTGIRLNRGGTILPDLVKSAQSAGLTDVLLLHEHRGVPTGLTVSHLPFGPTASFSLHNVVLRHDIPNSIRGTVSESYPHIIFEGFTTPLGKRIVNILKHLFPPREAVTSKTSLGSRVITFKNIDDTIELRHHVFVQTSYDSVELSEVGPRMSMKPFQIRAGLLDQKDGDVEWALTNYTRTGRKKNYL

SEQ ID NO: 18626 - DNA, 2130 bp, Muscodor strobelii
  misc_feature: SGI EST ID NO. CUFF.43736.0
  misc_feature: Variant of the nucleotide sequence at SEQ ID NO 18624
ggatcgtacagttcaagatactcgaatagataaactacagcactccggataagcaatggcatacaattcagattgggcttcaagactatatctcgaatagatcgttgccgtgttttcggtttggcaagattcttgatgttcatttcagtgggtgtatgacttattttgtctatggtctcagtgggccccgaagcagctgatcgataaggctagccccgccaaaatttctagaattccttcaacctcagctttgcgacagccatccaccatttcaagccattcagccattgtatgcttgacatccgacttcacaaacgatcccaactaccaactcaacttgccttctgacaatttggccttcctttgagcaactagggcacatttgtcactagatacgtaatcatgatcagaaaaaatgcccgtgcacggagagactttctgtatcgcaaagcgctgctattacgagatgctgagatcagtgagaagagagcaaagttaagggcatctcttgccagtggccgaccactggatcattcagttgcccaggatactcaattacggaaggactacgcctacgatgagtctgccccagaccgcaccgtccaggaagaattagatctcgacgatgaatatgcccagctctctggtatcacggaccccagagttctaatcacaacctcccgagatccttcgacgagattacaagctttcagtaaagaaatcagattacttctacccacgggtatccgattgaatcgtggcgggacgattctgcccgacctggtcaaatctgctcagtctgctggccttacggacgtactgcttctccatgaacatcgtggtgtaccaacgggtctcaccgtttcacatcttccctttgggccaactgcttcattctctttgcataatgtggtattgcgccatgatattcccaactctatccgtggtactgtcagcgaatcatatccgcatatcatctttgaagggtttacgacgcctctaggcaagcgcattgtcaacatattaaaacatctcttcccaccgcgtgaggcggtcactagtaaaacttcgctaggaagccgcgttatcacattcaagaacatcgacgacacgatagaactccgtcaccacgtgttcgtacagacgagctacgactctgtggagctcagtgaagtcggaccgaggatgtccatgaagcccttccagattcgtgctggcttgctggaccagaaagatggcgatgtggaatgggcactcaccaattacacacgtaccggtcgcaagaagaactatctatgagtttccatgccttggtgctcctagacgaagatgcgtcgaaataagagtcgtcgaatctccatccggatccaggcagaataccgggcgacaaaagaagtagcgccgtggacagtaaccttcaaggttcaattatcaattttggtgtcagtagcggagcaagatttcagtcatgagcattcggaatgggaattgttcgcgcagtgtagcccagcaccgggtattccataccacaatagccgtgacgatcaacatgctttcggcagcaaaatcagaagagctacgacagtgatattcaaaagatggtagtctcaaatacagtctatgaagcgatgagcaacagcatagtacgcgagtcggtgggagagctatcatcttcgcgacactgcgtcctctcaaacggcggaatcaatcagcacccatttcttcagatgagccaatgatcagaggggggagaaaatgcagcgatgaatggaaatcacgacgtcgtttgtaatgccgcgttgaaagtcggccagagtcttgatagcagaggtttgttattgaggagaagtgagacgttagctaccacgtttcaacatagttgagcagtcactttaaatgatacctcaaatggtaccggtagcttaagattagatatcaactgactcagatgatgcaaagctgtttctcaatttgctagacgtgagacagtctgatgtgttttcaactgcaaaatctacaggctttcatacatcgtaggaacgttgtttataacattgatcctcgcgacctcttctgacataagacaggctcgtgcaactattgaacttcgaaagtgtggatagagttttc

SEQ ID NO: 18627 - DNA, 1104 bp, Muscodor strobelii
  misc_feature: SGI cDNA ID NO. 566249
  misc_feature: Encodes the peptide sequence at SEQ ID NO 18628
ggcttcgccggccgcatcttcatcgagaccatcccgcagtggctggccatcggcgccatgctgtcgctcatcttcggcggctgctgctccaatgtcttcgccctcgaggccatcgtcaaggttgagccaacgagcggaaccctgttgaccttcgtgcaattcctcttcgttgccgtcaccggctacgtctcgcagttcgatgccacccggcccccgttcttcctgcgcccgaaccgcgtccccatccgacgctggctcatcaatatcgtgctcttcttcggcatcaacctgttgaacaaccatgcctttagctacgacatctccgtccctgtccacatcatcctgcgctccggcggcagcatcaccaccatgctagcaggctacacgtatggcaaaaggtactctcgtgtccagatcgttgccgtggtgcttctgacgacgggcgtcatcaccgctgcgtggtcagatgcccaggccaaggattcacgaccgcccgaagagctggccacgccgagcttcagcaccggactcgtcattcttttcgtggcccagatcctttcggccatcatgggtctgtacacggaggagacgtacaagcaatacggaccccagtggaaagagaatctgttctactcccacctgctctcgcttcccctcttcctacccttttcgcggtcgctgatacgccaattcatacgcctcgtagacagtccgcccctgacggtccgtctgcccatggaccaggccagccttgcgacgctgccggagggctggcgcaaagcagcagagggtcttcacgtgccgagtcaagtagtgtacctggcgctgaacgtgcttacccagtacgcatgcatccgcggggtgaacttgctggcggcggcctcgacggcgctcacggtgacgatcgtgctcaacgtgcgcaagctggtcagcctgctgctcagtatctggttcttcggcaatagactggcgacgggaacgctggtgggggccgtggtggtgttcactgctggaggactatactcgttggactcgtcgaagaaggggccgaagaagacgggagcgccgaagcccaaggccggtggtgatgacaagactgggtag

SEQ ID NO: 18628 - protein, 367 aa, Muscodor strobelii
  misc_feature: SGI Peptide ID NO. 566249
  misc_feature (17)..(349): Pfam Id: PF08449 Pfam Desc: UAA transporter family
  misc_feature (1)..(367): NCBI GI: 39941440 Blast Desc: MGG_05631 [Magnaporthe grisea 70-15] gi|145022315|gb|EDK06335.1| MGG_05631 [Magnaporthe grisea 70-15]
  misc_feature (1)..(360): NCBI GI: 85118037 Blast Desc: NCU02980 [Neurospora crassa OR74A] gi|16945395|emb|CAB97317.2| related to UDP N-ACETYLGLUCOSAMINE TRANSPORTER (MNN2) [Neurospora crassa] gi|28927175|gb|EAA36131.1|
  misc_feature (1)..(360): NCBI GI: 171684793 Blast Desc: protein product [Podospora anserina] gi|170942357|emb|CAP68009.1| protein product [Podospora anserina]
  misc_feature (1)..(341): NCBI GI: 116192393 Blast Desc: CHGG_05914 [Chaetomium globosum CBS 148.51] gi|88181827|gb|EAQ89295.1| CHGG_05914 [Chaetomium globosum CBS 148.51]
  misc_feature (36)..(352): NCBI GI: 154316400 Blast Desc: BC1G_04131 [Botryotinia fuckeliana B05.10] gi|150845931|gb|EDN21124.1| BC1G_04131 [Botryotinia fuckeliana B05.10]
  misc_feature (9)..(356): NCBI GI: 46108976 Blast Desc: FG01370.1 [Gibberella zeae PH-1]
  misc_feature (16)..(361): NCBI GI: 169626517 Blast Desc: SNOG_16550 [Phaeosphaeria nodorum SN15] gi|111054970|gb|EAT76090.1| SNOG_16550 [Phaeosphaeria nodorum SN15]
  misc_feature (13)..(359): NCBI GI: 50553854 Blast Desc: YALI0E24123p [Yarrowia lipolytica] gi|49650207|emb|CAG79937.1| YALI0E24123p [Yarrowia lipolytica]
  misc_feature (1)..(347): NCBI GI: 240278891 Blast Desc: NST UDP-N-acetylglucosamine transporter [Ajellomyces capsulatus H143]
  misc_feature (11)..(364): NCBI GI: 145235843 Blast Desc: An03g06940 [Aspergillus niger] gi|134058259|emb|CAK38451.1| protein product [Aspergillus niger]
GFAGRIFIETIPQWLAIGAMLSLIFGGCCSNVFALEAIVKVEPTSGTLLTFVQFLFVAVTGYVSQFDATRPPFFLRPNRVPIRRWLINIVLFFGINLLNNHAFSYDISVPVHIILRSGGSITTMLAGYTYGKRYSRVQIVAVVLLTTGVITAAWSDAQAKDSRPPEELATPSFSTGLVILFVAQILSAIMGLYTEETYKQYGPQWKENLFYSHLLSLPLFLPFSRSLIRQFIRLVDSPPLTVRLPMDQASLATLPEGWRKAAEGLHVPSQVVYLALNVLTQYACIRGVNLLAAASTALTVTIVLNVRKLVSLLLSIWFFGNRLATGTLVGAVVVFTAGGLYSLDSSKKGPKKTGAPKPKAGGDDKTG

SEQ ID NO: 18629 - DNA, 1674 bp, Muscodor strobelii
  misc_feature: SGI EST ID NO. CUFF.43985.5
  misc_feature: Variant of the nucleotide sequence at SEQ ID NO 18627
gcttcgccggccgcatcttcatcgagaccatcccgcagtggctggccatcggcgccatgctgtcgctcatcttcggcggctgctgctccaatgtcttcgccctcgaggccatcgtcaaggttgagccaacgagcggtacggcgaccatgccactcgattcgcccccctcgcgtccctcgcccctgccagcgcttagtctgacttgcctctcgtcgctctaggaaccctgttgaccttcgtgcaattcctcttcgttgccgtcaccggctacgtctcgcagttcgatgccacccggcccccgttcttcctgcgcccgaaccgcgtccccatccgacgctggctcatcaatatcgtgctcttcttcggcatcaacctgttgaacaaccatgcctttagctacgacatctccgtccctgtccacatcatcctgcgctccggcggcagcatcaccaccatgctagcaggctacacgtatggcaaaaggtactctcgtgtccagatcgttgccgtggtgcttctgacgacgggcgtcatcaccgctgcgtggtcagatgcccaggccaaggattcacgaccgcccgaagagctggccacgccgagcttcagcaccggactcgtcattcttttcgtggcccagatcctttcggccatcatgggtctgtacacggaggagacgtacaagcaatacggaccccagtggaaagagaatctgttctactcccacctgctctcgcttcccctcttcctacccttttcgcggtcgctgatacgccaattcatacgcctcgtagacagtccgcccctgacggtccgtctgcccatggaccaggccagccttgcgacgctgccggagggctggcgcaaagcagcagagggtcttcacgtgccgagtcaagtagtgtacctggcgctgaacgtgcttacccagtacgcatgcatccgcggggtgaacttgctggcggcggcctcgacggcgctcacggtgacgatcgtgctcaacgtgcgcaagctggtcagcctgctgctcagtatctggttcttcggcaatagactggcgacgggaacgctggtgggggccgtggtggtgttcactgctggaggactatactcgttggactcgtcgaagaaggggccgaagaagacgggagcgccgaagcccaaggccggtggtgatgacaagactgggtagcacgccgcgccgtgtggacgaaccgctgtctgtcctggcacttctctcccataagcatatctaggtagccttagtctacccaatacccagcaatactaccaagatttatgtggtgtagaccctcgacctgtggagaaaaagggcctgatctagttgtgctcgatgtgtatgcgaagccatttcgctgtgccctttcctctcctagcctgccgtggggtacactacattctacgtaatgatcttgttcacctacatgtcccaaaggcaaggatacgcaaaacgccgtataggaatgaggtcgaatttgatgggcctgggtagcatcgccgacggcaaagctcaagacgactctcactcgtacatgtcatcggtaggctactacatctaccgtgtcttcgtacacaatgcgtgtgttgcacgagccaaaatggatgttcaaccctcgaggcttgtggtgccgatgcggaagctcgcatgcggctctt

SEQ ID NO: 18630 - DNA, 386 bp, Muscodor strobelii
  misc_feature: SGI cDNA ID NO. 566250
  misc_feature: Reduced expression when VOC is produced
  misc_feature: Encodes the peptide sequence at SEQ ID NO 18631
atgcgagaattgattgatgtctggccagtggcagtcgacggccacacccgccaccctgaggcgtccgccgccgagcacggcgggatgttgggacggataccggcggcagggattgccttggccaccttccccccggcgtcgcctccgccgcgcatcgaccgccagaccttcgacttcgactcggacgagtctgatgccgccggacatgcccatcaagatgcccacgagcaccaccacgacggcgcctccgaccacgacggtgccagcgacgccggcgaccacggcgaccatcgctccacctcgggcgccccgccatcctcgtctgccctcgacgacggcatgctgccccgcgacgtgcccaggaagacgaccttctacgatgccgt

SEQ ID NO: 18631 - protein, 128 aa, Muscodor strobelii
  misc_feature: SGI Peptide ID NO. 566250
  misc_feature: Useful for introducing or modulating the production of volatile compounds
MRELIDVWPVAVDGHTRHPEASAAEHGGMLGRIPAAGIALATFPPASPPPRIDRQTFDFDSDESDAAGHAHQDAHEHHHDGASDHDGASDAGDHGDHRSTSGAPPSSSALDDGMLPRDVPRKTTFYDA

SEQ ID NO: 18632 - DNA, 941 bp, Muscodor strobelii
  misc_feature: SGI EST ID NO. CUFF.44032.1
  misc_feature: Variant of the nucleotide sequence at SEQ ID NO 18630
ctggggcgcgttccagggtgggggtgggctgcagatgcagaaatgacgccgtatcaagtcgatttactctccgcaaaagactaggaacggacaaggtcagctctcaaacgcaagtgtgtattgagcgtatctatctgagtggacaagagagtggccacgcattgccgtgtcgatctgacagtcccatgcgagaattgattgatgtctggccagtggcagtcgacggccacacccgccaccctgaggcgtccgccgccgagcacggcgggatgttgggacggataccggcggcagggattgccttgggtacgatttaaactggaagcatgcactgcatccgtctcgggcaacttcgcaggattgctaccaacattctaccttgctttttagctcgagcatctccgtacttgcacatctgcccgctgccgcctccgagcccaagaagcatcgggcatcgactgccccgccaaccgttgcgtctagtgcgccgttgcagggtccagtagagggacggaggtgtgtccgccccgaggcgctgacggtggccgtcctcgagacacgggagggcgagtgaaaagttgacagaaattcggaaacacacagaacgcagctactcgacatgccttccaccttccccccggcgtcgcctccgccgcgcatcgaccgccagaccttcgacttcgactcggacgagtctgatgccgccggacatgcccatcaagatgcccacgagcaccaccacgacggcgcctccgaccacgacggtgccagcgacgccggcgaccacggcgaccatcgctccacctcgggcgccccgccatcctcgtctgccctcgacgacggcatgctgccccgcgacgtgcccaggaagacgaccttctacgatgccgtcgccgagcgccagatgagccaggccgacgccaagctcttctaccagcgaa

SEQ ID NO: 18633 - DNA, 834 bp, Muscodor strobelii
  misc_feature: SGI cDNA ID NO. 566251
  misc_feature: Reduced expression when VOC is produced
  misc_feature: Encodes the peptide sequence at SEQ ID NO 18634
atggctgcatcgtcgccgccgccgccgccggagccgacgtacacggtcttcatccggctgccgtttgcgcgccgcggcttcgtcgaccctccgccggtggactgggactcgtccaaggacgacgcgctgtgggcgatggtgtcgagcctggccaagacggacatcgactggcacgacatcgcggcccagttccacgtcaccgtcgacttcctgctgcagcacgtcgcctggctgaccgaccgccacgcctcccaggtccgcgcccagatgcgccgcgcccagcactcgaccccgaccccgacaccgcctgcacctgcacctgcgtctacgtctttacctacggcagcagcaacagcaacagcaacagcaacatctcaacaaaaccaacagccccaagactcaacgacgacaacgacaacggcaacgacaacagcaacagcaacctcttccacgagagccacgccccgtccgccctcgacccgcacctcgtccaccaacaccgccgtcttcaccacccgcaacctcggcaccagcaccaccaccagacccagctctcactctcatgcccatgcccactcccactcccactcccaccgccgtcgcctctcctccctgcccgtcaccacccacgtcgacgaccacgaccacgacgccgatacaacccctgtctctccggggcctgccgagtccagctctgccgcctcttcctcgtcatcgtccgacgacgacgagtccagcccggcccagtctcgcatcatccgccggcccccgcagagccacgacgacgacgacgacgatgacgacgacgacgctcgccccgcattccctgcccta

SEQ ID NO: 18634 - protein, 278 aa, Muscodor strobelii
  misc_feature: SGI Peptide ID NO. 566251
  misc_feature (11)..(258): NCBI GI: 46135799 Blast Desc: FG09415.1 [Gibberella zeae PH-1]
  misc_feature (11)..(275): NCBI GI: 145610016 Blast Desc: MGG_02790 [Magnaporthe grisea 70-15] gi|145017396|gb|EDK01759.1| MGG_02790 [Magnaporthe grisea 70-15]
  misc_feature (11)..(268): NCBI GI: 164429636 Blast Desc: NCU02024 [Neurospora crassa OR74A] gi|157073558|gb|EAA35410.2| [Neurospora crassa OR74A]
  misc_feature (4)..(169): NCBI GI: 156046170 Blast Desc: SS1G_09359 [Sclerotinia sclerotiorum 1980] gi|154693754|gb|EDN93492.1| SS1G_09359 [Sclerotinia sclerotiorum 1980]
  misc_feature (11)..(268): NCBI GI: 16945399 Blast Desc: [Neurospora crassa]
  misc_feature (11)..(266): NCBI GI: 261353646 Blast Desc: [Verticillium albo-atrum VaMs.102]
  misc_feature (9)..(155): NCBI GI: 166990583 Blast Desc: ATG29_PENCW RecName: Full=Autophagy-related protein 29 gi|129716092|gb|ABO31324.1| Atg29p [Penicillium chrysogenum]
  misc_feature (14)..(128): NCBI GI: 67537324 Blast Desc: AN4832.2 [Aspergillus nidulans FGSC A4] gi|40740877|gb|EAA60067.1| AN4832.2 [Aspergillus nidulans FGSC A4]
  misc_feature (14)..(128): NCBI GI: 259482313 Blast Desc: TPA: autophagy-related protein Atg29 (Eurofung) [Aspergillus nidulans FGSC A4]
  misc_feature (11)..(275): NCBI GI: 149210123 Blast Desc: MGCH7_ch7g543 [Magnaporthe grisea 70-15] gi|86196498|gb|EAQ71136.1| MGCH7_ch7g543 [Magnaporthe grisea 70-15]
  misc_feature: Useful for introducing or modulating the production of volatile compounds
MAASSPPPPPEPTYTVFIRLPFARRGFVDPPPVDWDSSKDDALWAMVSSLAKTDIDWHDIAAQFHVTVDFLLQHVAWLTDRHASQVRAQMRRAQHSTPTPTPPAPAPASTSLPTAAATATATATSQQNQQPQDSTTTTTTATTTATATSSTRATPRPPSTRTSSTNTAVFTTRNLGTSTTTRPSSHSHAHAHSHSHSHRRRLSSLPVTTHVDDHDHDADTTPVSPGPAESSSAASSSSSSDDDESSPAQSRIIRRPPQSHDDDDDDDDDDARPAFPAL

SEQ ID NO: 18635 - DNA, 1173 bp, Muscodor strobelii
  misc_feature: SGI cDNA ID NO. 566252
  misc_feature: Encodes the peptide sequence at SEQ ID NO 18636
atggagcatttggcccagcgcgctgccaggtttccaaattggacgcagactcccattcctcattttgaaatttccgctgctggtctcttggcgttggcagatctcagcactgtcgctcagcgcaccaggatatccggcggcgcttcgtggcttgacgctcttttgctggcaccgggtctgcattaccaacaagccgccgatgctgtgcttgacgaaaatgcatccccttacaatgctgtcgagctggtagacggcaagacgtcgacctacgacattgtgaacaccgccaccttgcagtacctcgagcgcgtcggcaagcccggccagagaatagtcgtcgatgtcggcaagatgcctcagcgcaactacttctcctccaccaagaatcgcaagaggaatagcaccggacagcgcgccatcatctggaaagaccaggaagcggggctcggctggctttcgcagtgcttgtatctggccagccccgtcttcaccatcgccgctttcgttttcatggtgctccttcgtgaatggtggggagttgccacattacttgcccttatgttctcacggcttctcaatatttgggtcattaaacaacgcacgaaataccctaagatacctcaacccaaaccaaaccccagtacgcctggccccagtaccgatggctccgacatattgaccgaataccatgttgatctaggccatggacgagttgtctgtttacgtggcttaacatcagatctacaagccatcatcacgtcatcgtggttacaaacaaaaactcatatcgatggttacctagaagctgccgcgaagctgactgtctatcttgtcgctgcgcttagtggaaacttgactcaagttggttccatcatcttactggtgctcctcattctcaccgcaggcttgttaggtctgagcaatgccaacgcgaagacctttagcatgtacggaagattggcagccccgacgaccattaacttgccagcccaaaatatggagggtgacccgccgtaccctaatagtcggcagcagagctcgctatttccttcgcaaagtgacgacgtcacgtcctccggttactccgctatggacgattttgccgaaagaggtcagatagggagagcggttaggaactcgtacccatttgatagatcggcagattacaattaa

SEQ ID NO: 18636 - protein, 390 aa, Muscodor strobelii
  misc_feature: SGI Peptide ID NO. 566252
  misc_feature (14)..(318): NCBI GI: 116193027 Blast Desc: CHGG_06231 [Chaetomium globosum CBS 148.51] gi|88182144|gb|EAQ89612.1| CHGG_06231 [Chaetomium globosum CBS 148.51]
  misc_feature (11)..(325): NCBI GI: 256732300 Blast Desc: NECHADRAFT_80756 [Nectria haematococca mpVI 77-13-4]
  misc_feature (11)..(321): NCBI GI: 171683975 Blast Desc: protein product [Podospora anserina] gi|170941948|emb|CAP67600.1| protein product [Podospora anserina]
  misc_feature (11)..(323): NCBI GI: 46105268 Blast Desc: FG00262.1 [Gibberella zeae PH-1]
  misc_feature (2)..(384): NCBI GI: 149210739 Blast Desc: MGCH7_ch7g842 [Magnaporthe grisea 70-15] gi|86196797|gb|EAQ71435.1| MGCH7_ch7g842 [Magnaporthe grisea 70-15]
  misc_feature (2)..(384): NCBI GI: 145609706 Blast Desc: [Magnaporthe grisea 70-15] gi|145017104|gb|EDK01467.1| [Magnaporthe grisea 70-15]
  misc_feature (11)..(320): NCBI GI: 85114587 Blast Desc: NCU00561 [Neurospora crassa OR74A] gi|28926514|gb|EAA35486.1| [Neurospora crassa OR74A]
  misc_feature (20)..(324): NCBI GI: 240110130 Blast Desc: CPC735_061620 [Coccidioides posadasii C735 delta SOWgp]
  misc_feature (1)..(319): NCBI GI: 212541044 Blast Desc: conserved [Penicillium marneffei ATCC 18224] gi|210067976|gb|EEA22068.1| conserved [Penicillium marneffei ATCC 18224]
  misc_feature (15)..(319): NCBI GI: 169851552 Blast Desc: CC1G_03479 [Coprinopsis cinerea okayama7#130] gi|116506319|gb|EAU89214.1| CC1G_03479 [Coprinopsis cinerea okayama7#130]
MEHLAQRAARFPNWTQTPIPHFEISAAGLLALADLSTVAQRTRISGGASWLDALLLAPGLHYQQAADAVLDENASPYNAVELVDGKTSTYDIVNTATLQYLERVGKPGQRIVVDVGKMPQRNYFSSTKNRKRNSTGQRAIIWKDQEAGLGWLSQCLYLASPVFTIAAFVFMVLLREWWGVATLLALMFSRLLNIWVIKQRTKYPKIPQPKPNPSTPGPSTDGSDILTEYHVDLGHGRVVCLRGLTSDLQAIITSSWLQTKTHIDGYLEAAAKLTVYLVAALSGNLTQVGSIILLVLLILTAGLLGLSNANAKTFSMYGRLAAPTTINLPAQNMEGDPPYPNSRQQSSLFPSQSDDVTSSGYSAMDDFAERGQIGRAVRNSYPFDRSADYN

SEQ ID NO: 18637 - DNA, 2553 bp, Muscodor strobelii
  misc_feature: SGI EST ID NO. CUFF.43808.0
  misc_feature: Variant of the nucleotide sequence at SEQ ID NO 18635
gtgcactttccatgccaccgcgacctacgaatgactacttacatgtatgtaggctacttttatcggtggcattttacgatcatattttgtgatatatcgatacggatgtacgtcatttgcaatgaccagccatcctatctcccccacgctactacttactgcctgtttatccaaaagtacgtccatagctctaccctcacaaagcgccatcccagactggatacttctcattcggcaattcgaccaatactcatcaagagtcctgattcgcagccggaaccacatttcatcacactgcttctacgtaagcttcaaagcttcatcaacggccagtcgctctcatcatgttccacccacatcttctttcgcttcctttgtatcctcgcaaaccaagctgcccgtagattcaaactattagaagtctatgaattctgatatacggagagatatatgctcaccactgcctatctcggagctagttgtgcgagacgccagagccgagcatagatcaagcaagggatcgccattgctccatccttccaactctgcagtgccaagactcgccctccatgaacctctcgcttttctcgtccccccaaatccagtcgtcaagtgttgtgtgacggcacgtacggcgctctctcctgtcaagaatgcttggccccgatctattgcttattagtcctagtctcgcggctcctgcctcgctgcttgaattctcgtctatcatgtcatctctcccaatcgctagcttctctgtgatttttctattaccggtctcttctcatgctgtaattcgctccctctgctttgtgtcattctgttgcgcttcgtgtgtttgctgttcgctctttctggcgctctctgtgcgtaaatccccagctacctgtggctgcaggtgcatcgtgcatacgttcagaccaggatcctccatcgctgcaattacatcattcttggagaccgctttcgttgctcactatcatggagcatttggcccagcgcgctgccaggtttccaaattggacgcagactcccattcctcattttgaaatttccgctgctggtctcttggcgttggcagatctcagcactgtcgctcagcgcaccaggatatccggcggcgcttcgtggcttgacgctcttttgctggcaccgggtctgcattaccaacaagccgccgatgctgtgcttgacgaaaatgcatccccttacaatgctgtcgagctggtagacggcaagacgtcgacctacgacattgtgaacaccgccaccttgcagtacctcgagcgcgtcggcaagcccggccagagaatagtcgtcgatgtcggcaagatgcctcagcgcaactacttctcctccaccaagaatcgcaagaggaatagcaccggacagcgcgccatcatctggaaagaccaggaagcggggctcggctggctttcgcagtgcttgtatctggccagccccgtcttcaccatcgccgctttcgttttcatggtgctccttcgtgaatggtggggagttgccacattacttgcccttatgttctcacggcttctcaatatttgggtcattaaacaacgcacgaaataccctaagatacctcaacccaaaccaaaccccagtacgcctggccccagtaccgatggctccgacatattgaccgaataccatgttgatctaggccatggacgagttgtctgtttacgtggcttaacatcagatctacaagccatcatcacgtcatcgtggttacaaacaaaaactcatatcgatggttacctagaagctgccgcgaagctgactgtctatcttgtcgctgcgcttagtggaaacttgactcaagttggttccatcatcttactggtgctcctcattctcaccgcaggcttgttaggtctgagcaatgccaacgcgaagacctttagcatgtacggaagattggcagccccgacgaccattaacttgccagcccaaaatatggagggtgacccgccgtaccctaatagtcggcagcagagctcgctatttccttcgcaaagtgacgacgtcacgtcctccggttactccgctatggacgattttgccgaaagaggtcagatagggagagcggttaggaactcgtacccatttgatagatcggcagattacaattaatacaaaccgctcctcatttacacagcctaatgactcatgttttgcttcacgcatgtaagtttctcatagacatacgagatcgtcatcatgcgtgctaccagaatatccaagtctttctggaggcatgggcaactacgatctgtaatcatcaacacttgatatggcaataagaatgtctattagcattgcactactcggcaatgcatagctccatctcggtactgctcataagacccctctacattctctcgatctctctagtatatgtagcggaaattgggattctcacgatctgtaagatcctcgaaggcatgtgtcaaattctcatccttggcggcttggacaccctcagccgcgagcttatcacgcttgctattctctcgcttaagataccatcgg

SEQ ID NO: 18638 - DNA, 1581 bp, Muscodor strobelii
  misc_feature: SGI cDNA ID NO. 566253
  misc_feature: Encodes the peptide sequence at SEQ ID NO 18639
atgccgacgactgaaaagccctccgtggctgaccacgaggagacaattgggcggaccttctctgccactgacgatgtcgatttcaaagatcacacaaactatgacaaggtcgacaaggagattgcggcatatgcgtctcaaggtcgcatcgtcatcagtcctgaggagaacacgagactgcggaggatgatagatcgcagagttcttgtcgtcatgatctgcacgtatttcttgcaggccatcgataagggcacgctttcgttctcgtcgattatgggcttacccaaagatacggggttgctgacgccgagcggccaggtcagccagttgtatagctggctcacgacttgcatctatatcgccattttgattgtcgagtatcctcagaactacatcatcgcgcgcgtcccactcgggaaatacctgggtttctccatctttgcttggggcgccgtgctcgcaagccatgcggcctgtagcaacttcgtcggtctcgtgaccgtacgcacacttctcggtatcttcgaatccgcctgtcagccagcctttgtcgtgctctcggcgatgtggtatcgacgcgaggaacaagctgcccgcgttacctattggtacatgatgaacggcgcgcaacaaatcgtcggcgggctgcttgcctacctctttaccctcattaccacaggaccgctcaaatcgtggcagtggttgttcctgtcgtacggcatcatctcggtctttttcggcgtcttcgtcttcttttacatgcccgactcgcctatgcgcgccaagtgcttctcggaggaggataagaggctgatggtcgagcgtgtgcgtgacaaccagaccggtctgcagaatcggacgttcaagaaggagcatgtgtacgatgccttgaccgacccgcagacatggtgttatgccatcattcagcttaccacgactctgccgacgagcggtctcggaagctttgcgaacctgatcatctcgaagaacttgggcttcagcaatctccagacgcagctcttggccatcgtgctcggggcttatatcatcatcatcctcctcagctcggtgtggatcgtgaagaagacgagtcagaacgtgttggtggctttgggattcgtcgttccctccttcattggcactattctgctcttgacgataccaaaccatactttctcgcaacatgttgggctgctgatttcgtattacatcacgctgtccttttggtctgcacagactttgggcctgtccttgctctctcgaaacgtcggtggtcagacgaagaagtcggtcgtcgtagccatcaacttcgtcttttgggctacgggtaatgccataggtcctcaggtcttcctctcatgggatgctccgcggtaccacattgcttttatcacgcatctcggatgctacagtctgcttgtattgacactgctttggttccgatggtatcttaagcgagagaatagcaagcgtgataagctcgcggctgagggtgtccaagccgccaaggatgagaatttgacacatgccttcgaggatcttacagatcgtgagaatcccaatttccgctacatatactag

SEQ ID NO: 18639 - protein, 526 aa, Muscodor strobelii
  misc_feature: SGI Peptide ID NO. 566253
  misc_feature (72)..(448): Pfam Id: PF07690 Pfam Desc: Major Facilitator Superfamily
  misc_feature (1)..(525): NCBI GI: 256728135 Blast Desc: NECHADRAFT_87632 [Nectria haematococca mpVI 77-13-4]
  misc_feature (11)..(526): NCBI GI: 256732415 Blast Desc: NECHADRAFT_41596 [Nectria haematococca mpVI 77-13-4]
  misc_feature (2)..(526): NCBI GI: 85118370 Blast Desc: NCU02653 [Neurospora crassa OR74A] gi|28927235|gb|EAA36190.1| NCU02653 [Neurospora crassa OR74A] gi|38567170|emb|CAE76463.1| related to allantoate permease
  misc_feature (4)..(526): NCBI GI: 121714745 Blast Desc: allantoate permease [Aspergillus clavatus NRRL 1] gi|119403137|gb|EAW13557.1| allantoate permease [Aspergillus clavatus NRRL 1]
  misc_feature (16)..(526): NCBI GI: 255933582 Blast Desc: Pc12g13630 [Penicillium chrysogenum Wisconsin 54-1255] gi|211582789|emb|CAP80990.1| Pc12g13630 [Penicillium chrysogenum Wisconsin 54-1255]
  misc_feature (11)..(526): NCBI GI: 212527514 Blast Desc: 2-ketogluconate transporter, [Penicillium marneffei ATCC 18224] gi|210073312|gb|EEA27399.1| 2-ketogluconate transporter, [Penicillium marneffei ATCC 18224]
  misc_feature (16)..(526): NCBI GI: 115401878 Blast Desc: conserved [Aspergillus terreus NIH2624] gi|114190468|gb|EAU32168.1| conserved [Aspergillus terreus NIH2624]
  misc_feature (2)..(526): NCBI GI: 261353707 Blast Desc: allantoate permease [Verticillium albo-atrum VaMs.102]
  misc_feature (3)..(526): NCBI GI: 169768512 Blast Desc: [Aspergillus oryzae RIB40] gi|238497810|ref|XP_002380140.1| 2-ketogluconate transporter, [Aspergillus flavus NRRL3357] gi|83766584|dbj|BAE56724.1| protein
  misc_feature (27)..(523): NCBI GI: 154298995 Blast Desc: BC1G_11810 [Botryotinia fuckeliana B05.10] gi|150857513|gb|EDN32705.1| BC1G_11810 [Botryotinia fuckeliana B05.10]
MPTTEKPSVADHEETIGRTFSATDDVDFKDHTNYDKVDKEIAAYASQGRIVISPEENTRLRRMIDRRVLVVMICTYFLQAIDKGTLSFSSIMGLPKDTGLLTPSGQVSQLYSWLTTCIYIAILIVEYPQNYIIARVPLGKYLGFSIFAWGAVLASHAACSNFVGLVTVRTLLGIFESACQPAFVVLSAMWYRREEQAARVTYWYMMNGAQQIVGGLLAYLFTLITTGPLKSWQWLFLSYGIISVFFGVFVFFYMPDSPMRAKCFSEEDKRLMVERVRDNQTGLQNRTFKKEHVYDALTDPQTWCYAIIQLTTTLPTSGLGSFANLIISKNLGFSNLQTQLLAIVLGAYIIIILLSSVWIVKKTSQNVLVALGFVVPSFIGTILLLTIPNHTFSQHVGLLISYYITLSFWSAQTLGLSLLSRNVGGQTKKSVVVAINFVFWATGNAIGPQVFLSWDAPRYHIAFITHLGCYSLLVLTLLWFRWYLKRENSKRDKLAAEGVQAAKDENLTHAFEDLTDRENPNFRYIY

SEQ ID NO: 18640 - DNA, 3362 bp, Muscodor strobelii
  misc_feature: SGI EST ID NO. CUFF.43809.2
  misc_feature: Variant of the nucleotide sequence at SEQ ID NO 18638
ggaggataagaggctgatggtcgagcgtgtgcgtgacaaccagaccggtctgcagaatcggacgttcaagaaggagcatgtgtacgatgccttgaccgacccgcagacatggtgttatgccatcattcagcttaccacgactctgccgacgagcggtctcggaagctttgcgaacctgatcatctcgaagaacttgggcttcagcaatctccagacgcagctcttggccatcgtgctcggggcttatatcatcatcatcctcctcagctcggtgtggatcgtgaagaagacgagtcagaacgtgttggtggctttgggattcgtcgttccctccttcattggcactattctgctcttgacgataccaaaccatactttctcgcaacatgttgggctgctgatttcgtattacatcacgctgtccttttggtctgcacagactttgggcctgtccttgctctctcgaaacgtcggtggtcagacgaagaagtcggtcgtcgtagccatcaacttcgtcttttgggctacgggtaatgccataggtcctcaggtcttcctctcatgggatgctccgcggtaccacattgcttttatcacgcatctcggatgctacagtctgcttgtattgacactgctttggttccgatggtatcttaagcgagagaatagcaagcgtgataagctcgcggctgagggtgtccaagccgccaaggatgagaatttgacacatgccttcgaggatcttacagatcgtgagaatcccaatttccgctacatatactagagagatcgagagaatgtagaggggtcttatgagcagtaccgagatggagctatgcattgccgagtagtgcaatgctaatagacattcttattgccatatcaagtgttgatgattacagatcgtagttgcccatgcctccagaaagacttggatattctggtagcacgcatgatgacgatctcgtatgtctatgagaaacttacatgcgtgaagcaaaacatgagtcattaggctgtgtaaatgaggagcggtttgtattaattgtaatctgccgatctatcaaatgggtacgagttcctaaccgctctccctatctgacctctttcggcaaaatcgtccatagcggagtaaccggaggacgtgacgtcgtcactttgcgaaggaaatagcgagctctgctgccgactattagggtacggcgggtcaccctccatattttgggctggcaagttaatggtcgtcggggctgccaatcttccgtacatgctaaaggtcttcgcgttggcattgctcagacctaacaagcctgcggtgagaatgaggagcaccagtaagatgatggaaccaacttgagtcaagtttccactaagcgcagcgacaagatagacagtcagcttcgcggcagcttctaggtaaccatcgatatgagtttttgtttgtaaccacgatgacgtgatgatggcttgtagatctgatgttaagccacgtaaacagacaactcgtccatggcctagatcaacatggtattcggtcaatatgtcggagccatcggtactggggccaggcgtactggggtttggtttgggttgaggtatcttagggtatttcgtgcgttgtttaatgacccaaatattgagaagccgtgagaacataagggcaagtaatgtggcaactccccaccctgtcaattatgcatgagcctactaagtcgcgaagtgacagagaagagagcaagggaataaggaatatagtttgaacaagaaacgcaacacacattcacgaaggagcaccatgaaaacgaaagcggcgatggtgaagacggggctggccagatacaagcactgcgaaagccagccgagccccgcttcctggtctttccagatgatggcgcgctgtccggtgctattcctcttgcgattcttggtggaggagaagtagttgcgctgaggcatcttgccgacatcgacgactattctctggccgggcttgccgacgcgctcgaggtactgcaaggtggcggtgttcacaatgtcgtaggtcgacgtcttgccgtctaccagctcgacagcattgtaaggggatgcattttcgtcaagcacagcatcggcggcttgttggtaatgcagacccggtgccagcaaaagagcgtcaagccacgaagcgccgccggatatcctggtgcgctgagcgacagtgctgagatctgccaacgccaagagaccagcagcggaaatttcaaaatgaggaatgggagtctgcgtccaatttggaaacctggcagcgcgctgggccaaatgctgtgtgagaatgtgagcttctgatgagattcgggctgtgtgtatgagactgcgtgagataaaagtgaacttgcctccatgatagtgagcaacgaaagcggtctccaagaatgatgtaattgcagcgatggaggatcctggtctgaacgtatgcacgatgcacctgcagccacaggtagctggggatttacgcacagagagcgccagaaagagcgaacagcaaacacacgaagcgcaacagaatgacacaaagcagagggagcgaattacagcatgagaagagaccggtaatagaaaaatcacagagaagctagcgattgggagagatgacatgatagacgagaattcaagcagcgaggcaggagccgcgagactaggactaataagcaatagatcggggccaagcattcttgacaggagagagcgccgtacgtgccgtcacacaacacttgacgactggatttggggggacgagaaaagcgagaggttcatggagggcgagtcttggcactgcagagttggaaggatggagcaatggcgatcccttgcttgatctatgctcggctctggcgtctcgcacaactagctccgagataggcagtggtgagcatatatctctccgtatatcagaattcatagacttctaatagtttgaatctacgggcagcttggtttgcgaggatacaaaggaagcgaaagaagatgtgggtggaacatgatgagagcgactggccgttgatgaagctttgaagcttacgtagaagcagtgtgatgaaatgtggttccggctgcgaatcaggactcttgatgagtattggtcgaattgccgaatgagaagtatccagtctgggatggcgctttgtgagggtagagctatggacgtacttttggataaacaggcagtaagtagtagcgtgggggagataggatggctggtcattgcaaatgacgtacatccgtatcgatatatcacaaaatatgatcgtaaaatgccaccgataaaagtagcctacatacatgtaagtagtcattcgtaggtcgcggtggcatggaaagtgcac

SEQ ID NO: 18641 - DNA, 1119 bp, Muscodor strobelii
  misc_feature: SGI cDNA ID NO. 566254
  misc_feature: Elevated expression when VOC is produced
  misc_feature: Encodes the peptide sequence at SEQ ID NO 18642
atgcctgcgcaagcccatggtttcaaggcaagcgatatccatgccaagatacagctcctcatcgatggcatggtcaatatcaaagacaaatcgggagagtttctgatgacgctcgcggatggccgggtcatcgataccaagggatggaacgactgggagtggacgcatggcatagggctcaatggtatatgggcctactataacctcacgggcgatgaaaagtatttaaagatcatcgaggagtggttcaaaagccgatttgacgcaggcggaaccacaaagaacatcaataccatggccgtatttctgacgctagcctatgtctacgagaagacaggcaacatcacctatcttccatggctcgatagctgggcggaatgggcatatcatgatctagcgaggacgaaatacggtggcatgcaacacatcacgtatctcgaggagaacgaccagcagctctgggacgatacgctgatgatgacagtgatgccgctggccaaaatcggcaagctactcaaccgaccgcattacatcgacgaggcgaagagacagttcttattgcacataaaatacttgttcgatgcgaagagcggtctgtttttccacggctggacattccacgagggcgggcacaacttcgcggacgcgcgctgggcgaggggcaacgcatggctcacaatcgtgattccagacttcctcgagctccttgacttcgcgcccaacgacccaattcgcatgcatcttatcgacacgctggatgcacagtgtgatgcgctgaagggtttgcaggcgccgacgggactatggcgcacacttctagatcatcctgaggaggaaggctcctacgtggaggccagtgcgacggcagggttcgctttcggtatcctcaaggctcaaagaaagaagtatattggaagggagtatgaggttgttgcattgaaggcaatccagggagtcattgataacatcgatgctgacggtgaacttttgaacacttcatttggaacaggtatgggtcgcgatttgcaacactataagaacattccaattacgagcatgccgtatggacaggcaatggcaatcatggctctggttgagttcttgcgtgtgttcatatga

SEQ ID NO: 18642 - protein, 372 aa, Muscodor strobelii
  misc_feature: SGI Peptide ID NO. 566254
  misc_feature (26)..(371): Pfam Id: PF07470 Pfam Desc: Glycosyl Hydrolase Family 88
  misc_feature (1)..(372): NCBI GI: 256732002 Blast Desc: NECHADRAFT_40704 [Nectria haematococca mpVI 77-13-4]
  misc_feature (1)..(372): NCBI GI: 85118374 Blast Desc: NCU02654 [Neurospora crassa OR74A] gi|28927236|gb|EAA36191.1| NCU02654 [Neurospora crassa OR74A] gi|38567171|emb|CAE76464.1| conserved [Neurospora crassa]
  misc_feature (1)..(372): NCBI GI: 149211185 Blast Desc: MGCH7_ch7g1053 [Magnaporthe grisea 70-15] gi|86197008|gb|EAQ71646.1| MGCH7_ch7g1053 [Magnaporthe grisea 70-15]
  misc_feature (12)..(369): NCBI GI: 255933584 Blast Desc: Pc12g13640 [Penicillium chrysogenum Wisconsin 54-1255] gi|211582790|emb|CAP80991.1| Pc12g13640 [Penicillium chrysogenum Wisconsin 54-1255]
  misc_feature (13)..(372): NCBI GI: 238497808 Blast Desc: glycosyl hydrolase family 88, [Aspergillus flavus NRRL3357] gi|220693413|gb|EED49758.1| glycosyl hydrolase family 88, [Aspergillus flavus NRRL3357]
  misc_feature (13)..(372): NCBI GI: 169768510 Blast Desc: [Aspergillus oryzae RIB40] gi|83766583|dbj|BAE56723.1| protein product [Aspergillus oryzae]
  misc_feature (11)..(372): NCBI GI: 119487477 Blast Desc: glycosyl hydrolase family 88, [Neosartorya fischeri NRRL 181] gi|119410688|gb|EAW20634.1| glycosyl hydrolase family 88, [Neosartorya fischeri NRRL 181]
  misc_feature (11)..(372): NCBI GI: 70981887 Blast Desc: glycosyl hydrolase family 88 [Aspergillus fumigatus Af293] gi|66844095|gb|EAL84434.1| glycosyl hydrolase family 88, [Aspergillus fumigatus Af293] gi|159122302|gb|EDP47424.1| family
  misc_feature (1)..(372): NCBI GI: 116201289 Blast Desc: CHGG_08529 [Chaetomium globosum CBS 148.51] gi|88177047|gb|EAQ84515.1| CHGG_08529 [Chaetomium globosum CBS 148.51]
  misc_feature (10)..(372): NCBI GI: 212527512 Blast Desc: glycosyl hydrolase family 88, [Penicillium marneffei ATCC 18224] gi|210073311|gb|EEA27398.1| glycosyl hydrolase family 88, [Penicillium marneffei ATCC 18224]
  misc_feature: Useful for introducing or modulating the production of volatile compounds
MPAQAHGFKASDIHAKIQLLIDGMVNIKDKSGEFLMTLADGRVIDTKGWNDWEWTHGIGLNGIWAYYNLTGDEKYLKIIEEWFKSRFDAGGTTKNINTMAVFLTLAYVYEKTGNITYLPWLDSWAEWAYHDLARTKYGGMQHITYLEENDQQLWDDTLMMTVMPLAKIGKLLNRPHYIDEAKRQFLLHIKYLFDAKSGLFFHGWTFHEGGHNFADARWARGNAWLTIVIPDFLELLDFAPNDPIRMHLIDTLDAQCDALKGLQAPTGLWRTLLDHPEEEGSYVEASATAGFAFGILKAQRKKYIGREYEVVALKAIQGVIDNIDADGELLNTSFGTGMGRDLQHYKNIPITSMPYGQAMAIMALVEFLRVFI

SEQ ID NO: 18643 - DNA, 2313 bp, Muscodor strobelii
  misc_feature: SGI EST ID NO. CUFF.43763.0
  misc_feature: Variant of the nucleotide sequence at SEQ ID NO 18641
gagccgactagggataatcacagatcggctggtaaaggaagcagtctaatctcacggatcgcgtcgcaacacgcgtttgcgagagctgtgcttcgagttcccaattggagagctcaaaaattagtgattttttgatctcaagaggccgaaatcgactgcaccgaagcggatagcaacctgaacccaccactgtggagcgtatcattgcgagtgccggattcgtaggtcggtagagtatctgaaaccaaatatgatgattgctattgaaccgaggaagcgaaaatcaaagattgactattcatatacatatatgtccttgcgaattctgattgttgacaggttgtgaccataacccgctccgcaacactagctctcgagaacgcgtggtgcttgggacggtgtcccattccctatcgaaatgcctgcgcaagcccatggtttcaaggcaagcgatatccatgccaagatacagctcctcatcgatggcatggtcaatatcaaagacaaatcgggagagtttctgatgacgctcgcggatggccgggtcatcgataccaagggatggaacgactgggagtggacgcatggcatagggctcaatggtatatgggcctactataacctcacgggcgatgaaaagtatttaaagatcatcgaggagtggttcaaaagccgatttgacgcaggcggaaccacaaagaacatcaataccatggccgtatttctgacgctagcctatgtctacgagaagacaggcaacatcacctatcttccatggctcgatagctgggcggaatgggcatatcatgatctagcgaggacgaaatacggtggcatgcaacacatcacgtatctcgaggagaacgaccagcagctctgggacgatacgctgatgatgacagtgatgccgctggccaaaatcggcaagctactcaaccgaccgcattacatcgacgaggcgaagagacagttcttattgcacataaaatacttgttcgatgcgaagagcggtctgtttttccacggctggacattccacgagggcgggcacaacttcgcggacgcgcgctgggcgaggggcaacgcatggctcacaatcgtgattccagacttcctcgagctccttgacttcgcgcccaacgacccaattcgcatgcatcttatcgacacgctggatgcacagtgtgatgcgctgaagggtttgcaggcgccgacgggactatggcgcacacttctagatcatcctgaggaggaaggctcctacgtggaggccagtgcgacggcagggttcgctttcggtatcctcaaggctcaaagaaagaagtatattggaagggagtatgaggttgttgcattgaaggcaatccagggagtcattgataacatcgatgctgacggtgaacttttgaacacttcatttggaacaggtatgggtcgcgatttgcaacactataagaacattccaattacgagcatgccgtatggacaggcaatggcaatcatggctctggttgagttcttgcgtgtgttcatatgaataagatcaaaggtgtaattagtaatgaagacggcaaattaatgggctataaccgtagctttagggtcgacacacaataggtgtctcaacaagtccttaggtagtggcctgatctgggaataccaagaccaagatattggcggtcttatgtaggtctaggacgaatatgctgctaacaaattgatgaggggatcactcatacgagtgtctaccgtcggggggttgagcatgaagaggacacttgaacattgcagttggcaagcaagtcatggaatatgttcgagttcagaacgagtcaaacaaataaagttgtggactgctaactggatgcggttcaggtggttgaaatcgagagcaagcccgaaaacccagacttgtatttacagatcgaatttcaatccagcagtcgcgtagacagatgcatgaagcaaagagataggagagctttgatattacttctctacgacttagaacaccgcctgcgaatcttgaggccccccattctgtatttaagttgcagcaagacaactgtggaagctgagaggtaacaagtagagtccacgcactttgtccaatgtcatcctgagcatcgaaacgttaagtgcgcttccttgccggttgctgatagaattgggccatctgcatttacaatgcgagacactacctacatgccacagaatgacccaatagatggaaatgcacaaccaatccgggcggacacaccgtgtgaaagtttccgctaagaacgatatcggagttggaccaccgcaccccca

SEQ ID NO: 18644 - DNA, 2064 bp, Muscodor strobelii
  misc_feature: SGI cDNA ID NO. 566255
  misc_feature: Elevated expression when VOC is produced
  misc_feature: Encodes the peptide sequence at SEQ ID NO 18645
atgagcagcacgcaggtgtcgcctccacttggggagggagtcggatatggcatcgttcttggactaggagctgtgttcgcgttgggcatgattctagtgacattcgtgctcaagcgatacaacagagaactacaaacatccgagatgttcaatactgccggacgtactgtcaagagtggccttgtgggctctgcagttgtgtcctcatggacttgggcagctaccctgcttcagagcacgggcgtatgctacaaatatggcgtatcaggacctttctggtatgcatcgggagcgactgtacaaattcttctctttgccactctggcaatcgagctgaagagacgtgcacctaatgctcacacgtttctggaagttatcagagccagatatggtaccattcctcatctcgtgtttatggttttcggactggttacaaacatactcgtcagtctgatgctggttgttggaggctctgcaacagtcaatgcactcacaggaatgcatgaaatcgcagcaatctatttgttgcctgtcggcgtcattgcatatacgatggtcggtggtttgaaagctacgattctcacggattggatccacactttcattttgctgattatcattatcatcttcgcattgacagcgtatgcaacatctgagacacttggatccccttcagctgtctacgatcgattagtcgatgctgcaatgcgacaccctgttgaaggcaatgctcatggtagctatctgacgatgcgatctaccgaaggagtcatcttctttgtgatcaacattgtaggtaactttggtactgttttcctagataacggctattataacaaggccattgccgcctcgccagtgcatgcactgcccggttacatcttgggtggattgagctggtttgctataccctggcttaccgcaacaaccatgggtctatccgccttagcattggagaacacgcctgcattcccaacatacccaaatcgaatgtctgccgacgatgtctcagcgggtctggtattgccctacgcggctgttgcacttcttggcaaaggtggcgccgtcgcaacattgttgcttgtttttcttgcggtcacctctgctacatcctccgagctgatcgctgtgtcctccatctttacgtatgatttgtatcggacttacttcaagcctgatgctagcggcaaacgcttgatctacatgtcgcatgtcatcgtttgcgtttatgcactgttcatctcgacattctccgtaggcttatattatgcgggaatatcgatggggtatctatatctgttgatgggtgtcatcatctcctccgctgttgtgcctgcaacactcacgttggtctggtcgggacaaaacagatgggccgctgcactttcaccaccacttgggctcgcatttgcgcttattgcctggctagtaacggcttctaaggaatgcggcgtattggatgtgaactgcactggttcgaacaaccccatgctagctggcaatgttgttgcattgctatccccggttgcactcgtcccgatcttcacattattgtttggtctggataaatatgactggaagtcgatggcaatgattcgcaaagcagatgatcatgatgtcgccaacgctgcgggtgtcgacctagagcacacggcaggaggtcacgtagaaagcgtcgatgagcttgatgaagaacaagcgaagctattacgcgccagcaagatttcaaaatggactaccgttatacttacactggcattcttgattctctggccgttcccactgtacggctcctcgtacgtgttctcgaaacctttcttcacaggctgggttaccgtcggaattatttggattttcggctcgctcggcgctgtcgggctattccccgtcttcgaaggccgccatacacttatccataccgtcaagtgtatattcctagatatgactggaaagcagcaccccagaacgattcatgcccaggttatgaaggaggagaaacggccatctagcgccgaaacgccaccgaataagaactcaacaacggttgatgaagatcatatctaa

SEQ ID NO: 18645 - protein, 687 aa, Muscodor strobelii
  misc_feature: SGI Peptide ID NO. 566255
  misc_feature (50)..(467): Pfam Id: PF00474 Pfam Desc: Sodium:solute symporter family
  misc_feature (5)..(678): NCBI GI: 85090209 Blast Desc: urea active transporter [Neurospora crassa OR74A] gi|28919657|gb|EAA29072.1| urea active transporter [Neurospora crassa OR74A]
  misc_feature (3)..(683): NCBI GI: 39956134 Blast Desc: MGG_09063 [Magnaporthe grisea 70-15] gi|149209485|ref|XP_001522117.1| MGCH7_ch7g226 [Magnaporthe grisea 70-15] gi|86196181|gb|EAQ70819.1| MGCH7_ch7g226 grisea
  misc_feature (10)..(677): NCBI GI: 170940378 Blast Desc: protein product [Podospora anserina]
  misc_feature (10)..(678): NCBI GI: 116194181 Blast Desc: CHGG_06808 [Chaetomium globosum CBS 148.51] gi|88182721|gb|EAQ90189.1| CHGG_06808 [Chaetomium globosum CBS 148.51]
  misc_feature (6)..(683): NCBI GI: 156054736 Blast Desc: SS1G_06216 [Sclerotinia sclerotiorum 1980] gi|154703996|gb|EDO03735.1| SS1G_06216 [Sclerotinia sclerotiorum 1980]
  misc_feature (7)..(679): NCBI GI: 189197153 Blast Desc: urea active transporter [Pyrenophora tritici-repentis Pt-1C-BFP] gi|187980862|gb|EDU47488.1| urea active transporter [Pyrenophora tritici-repentis Pt-1C-BFP]
  misc_feature (7)..(678): NCBI GI: 256733632 Blast Desc: NECHADRAFT_35431 [Nectria haematococca mpVI 77-13-4]
  misc_feature (6)..(613): NCBI GI: 154296456 Blast Desc: BC1G_13054 [Botryotinia fuckeliana B05.10] gi|150843415|gb|EDN18608.1| BC1G_13054 [Botryotinia fuckeliana B05.10]
  misc_feature (2)..(666): NCBI GI: 46114538 Blast Desc: FG03111.1 [Gibberella zeae PH-1]
  misc_feature (2)..(665): NCBI GI: 256721284 Blast Desc: [Nectria haematococca mpVI 77-13-4]
  misc_feature: Useful for introducing or modulating the production of volatile compounds
MSSTQVSPPLGEGVGYGIVLGLGAVFALGMILVTFVLKRYNRELQTSEMFNTAGRTVKSGLVGSAVVSSWTWAATLLQSTGVCYKYGVSGPFWYASGATVQILLFATLAIELKRRAPNAHTFLEVIRARYGTIPHLVFMVFGLVTNILVSLMLVVGGSATVNALTGMHEIAAIYLLPVGVIAYTMVGGLKATILTDWIHTFILLIIIIIFALTAYATSETLGSPSAVYDRLVDAAMRHPVEGNAHGSYLTMRSTEGVIFFVINIVGNFGTVFLDNGYYNKAIAASPVHALPGYILGGLSWFAIPWLTATTMGLSALALENTPAFPTYPNRMSADDVSAGLVLPYAAVALLGKGGAVATLLLVFLAVTSATSSELIAVSSIFTYDLYRTYFKPDASGKRLIYMSHVIVCVYALFISTFSVGLYYAGISMGYLYLLMGVIISSAVVPATLTLVWSGQNRWAAALSPPLGLAFALIAWLVTASKECGVLDVNCTGSNNPMLAGNVVALLSPVALVPIFTLLFGLDKYDWKSMAMIRKADDHDVANAAGVDLEHTAGGHVESVDELDEEQAKLLRASKISKWTTVILTLAFLILWPFPLYGSSYVFSKPFFTGWVTVGIIWIFGSLGAVGLFPVFEGRHTLIHTVKCIFLDMTGKQHPRTIHAQVMKEEKRPSSAETPPNKNSTTVDEDHI

SEQ ID NO: 18646 - DNA, 2822 bp, Muscodor strobelii
  misc_feature: SGI EST ID NO. CUFF.43766.0
  misc_feature: Variant of the nucleotide sequence at SEQ ID NO 18644
ttgccacagacctggagacatcaagaagccgctgtgatgttggaatcgctcgtttgctcagcatccttgtcttatcaatgccgtgcgcccaggtagctcttatcaacgaatccactgctgaagtcgaatcgcggcactgcagtagacttttgcgccccgcgaaactgtagctcttagcccgtcgacaatgtccttgaaaaggcaagataggacggcatgtggccaatcaccgagggcccattgccgtttgtgcatatcgtatactgtcttacattatgggacatgtgtataggtggggggatcaaccctttgaatgagcactatttgtctctctcttggccgatagctcatgctctcatgtgggcttataaacttgcatagtatctcaacctagtctcggtgatgagatctgtctgtcttcccagcaaccaaggctaattcaaccatctgtaagcgaggcaagccccttgggttctgtcctatgaccatcgtatttgctacagtctttaatagaagcacacggtcagttgtgtaagctccaatagtatgagcagcacgcaggtgtcgcctccacttggggagggagtcggatatggcatcgttcttggactaggagctgtgttcgcgttgggcatgattctagtgacattcgtgctcaagcgatacaacagagaactacaaacatccgagatgttcaatactgccggacgtactgtcaagagtggccttgtgggctctgcagttgtgtcctcatggacttgggcagctaccctgcttcagagcacgggcgtatgctacaaatatggcgtatcaggacctttctggtatgcatcgggagcgactgtacaaattcttctctttgccactctggcaatcgagctgaagagacgtgcacctaatgctcacacgtttctggaagttatcagagccagatatggtaccattcctcatctcgtgtttatggttttcggactggttacaaacatactcgtcagtctgatgctggttgttggaggctctgcaacagtcaatgcactcacaggaatgcatgaaatcgcagcaatctatttgttgcctgtcggcgtcattgcatatacgatggtcggtggtttgaaagctacgattctcacggattggatccacactttcattttgctgattatcattatcatcttcgcattgacagcgtatgcaacatctgagacacttggatccccttcagctgtctacgatcgattagtcgatgctgcaatgcgacaccctgttgaaggcaatgctcatggtagctatctgacgatgcgatctaccgaaggagtcatcttctttgtgatcaacattgtaggtaactttggtactgttttcctagataacggctattataacaaggccattgccgcctcgccagtgcatgcactgcccggttacatcttgggtggattgagctggtttgctataccctggcttaccgcaacaaccatgggtctatccgccttagcattggagaacacgcctgcattcccaacatacccaaatcgaatgtctgccgacgatgtctcagcgggtctggtattgccctacgcggctgttgcacttcttggcaaaggtggcgccgtcgcaacattgttgcttgtttttcttgcggtcacctctgctacatcctccgagctgatcgctgtgtcctccatctttacgtatgatttgtatcggacttacttcaagcctgatgctagcggcaaacgcttgatctacatgtcgcatgtcatcgtttgcgtttatgcactgttcatctcgacattctccgtaggcttatattatgcgggaatatcgatggggtatctatatctgttgatgggtgtcatcatctcctccgctgttgtgcctgcaacactcacgttggtctggtcgggacaaaacagatgggccgctgcactttcaccaccacttgggctcgcatttgcgcttattgcctggctagtaacggcttctaaggaatgcggcgtattggatgtgaactgcactggttcgaacaaccccatgctagctggcaatgttgttgcattgctatccccggttgcactcgtcccgatcttcacattattgtttggtctggataaatatgactggaagtcgatggcaatgattcgcaaagcagatgatcatgatgtcgccaacgctgcgggtgtcgacctagagcacacggcaggaggtcacgtagaaagcgtcgatgagcttgatgaagaacaagcgaagctattacgcgccagcaagatttcaaaatggactaccgttatacttacactggcattcttgattctctggccgttcccactgtacggctcctcgtacgtgttctcgaaacctttcttcacaggctgggttaccgtcggaattatttggattttcggctcgctcggcgctgtcgggctattccccgtcttcgaaggccgccatacacttatccataccgtcaagtgtatattcctagatatgactggaaagcagcaccccagaacgattcatgcccaggttatgaaggaggagaaacggccatctagcgccgaaacgccaccgaataagaactcaacaacggttgatgaagatcatatctaaatcctacatggtgtatggccacgatttagaggcggcacttaagacaacagattttatggataagaaggtcatgccgattttatctaaaacgaaaaaataaaacgagtaataacgtcaagtcgtatattcgtactaagggccagcagctcgctcttgtgcatgcaaataatgacaattatgtacaatctgccggtcccgtaactacgtgtcgc

SEQ ID NO: 18647 - DNA, 849 bp, Muscodor strobelii
  misc_feature: SGI cDNA ID NO. 566256
  misc_feature: Encodes the peptide sequence at SEQ ID NO 18648
atgactacttatgatattcccgtcgaaagaaggggcgacgaatggtctaccggctccttgggatatgagaagtactgtgcgccattgacccagcgaggatgtcatgcaatggtggatgcattggaatcaatgtgtgctatcacttcggcctcgaatatcttggactgtgctgcgggcaccggccttattactagttacctgcgaagaaaccatagtgatgttgctatcactgccttcgacatttcacctggaatgttgcagaagattaggcaactaaacctgcccgacatcagcctcgggattagtgacttgacacgcatggatcgcgtgttaatacccaaaggcagcttcacgcatgttttcgctgcgcattgcattcagttctgcggagaccaacaatcgtctgtcgtgggcgaggtttatgactctcttgctccagggggcatcgcggggatatctttgacggtggagatcaacatcgcagaaccttggcatcatgcttgcaagctgttagaccccgattacaagcgcgtctatgttcacgacgacaaagcttggaagacaagcgaggagctaaaagccggcatgcgggatggagggttcgaggacgtccgcagcatcagagtctggatgccgatgaccacgctgaagactaaggaagactacattgacttctggtttgaaggtaaacatccggctttcacgaagagagatatagcggcgtggaaaggtaacccgaaagacgttataccaacaattgtgaaggtacttgatgagaattacaaggacataggcaatgaaattggctgtgcttctgaaatcgtgatggggaagcggcctgataattga

SEQ ID NO: 18648 - protein, 282 aa, Muscodor strobelii
  misc_feature: SGI Peptide ID NO. 566256
  misc_feature (54)..(152): Pfam Id: PF08241 Pfam Desc: Methyltransferase domain
  misc_feature (54)..(150): Pfam Id: PF08242 Pfam Desc: Methyltransferase domain
  misc_feature (49)..(216): NCBI GI: 158335484 Blast Desc: methyltransferase, [Acaryochloris marina MBIC11017] gi|158305725|gb|ABW27342.1| methyltransferase, [Acaryochloris marina MBIC11017]
  misc_feature (6)..(103): NCBI GI: 114328439 Blast Desc: methyltransferase [Granulibacter bethesdensis CGDNIH1] gi|114316613|gb|ABI62673.1| methyltransferase [Granulibacter bethesdensis CGDNIH1]
  misc_feature (22)..(174): NCBI GI: 74311321 Blast Desc: biotin biosynthesis protein BioC [Shigella sonnei Ss046] gi|82543224|ref|YP_407171.1| biotin biosynthesis protein BioC [Shigella boydii Sb227] gi|187731538|ref|YP_001881037.1| CDC
  misc_feature (38)..(174): NCBI GI: 194434993 Blast Desc: biotin biosynthesis protein BioC [Shigella dysenteriae 1012] gi|194416775|gb|EDX32902.1| biotin biosynthesis protein BioC [Shigella dysenteriae 1012]
  misc_feature (39)..(208): NCBI GI: 254441397 Blast Desc: methyltransferase, UbiE/COQ5 family [Octadecabacter antarcticus 307] gi|198251475|gb|EDY75790.1| methyltransferase, UbiE/COQ5 family [Octadecabacter antarcticus 307]
  misc_feature (38)..(174): NCBI GI: 218557682 Blast Desc: biotin biosynthesis protein BioC [Escherichia coli S88] gi|229775975|ref|YP_851873.2| biotin biosynthesis protein BioC [Escherichia coli APEC O1] gi|218364451|emb|CAR02133.1| of
  misc_feature (38)..(174): NCBI GI: 215485865 Blast Desc: biotin biosynthesis protein BioC [Escherichia coli O127:H6 str. E2348/69] gi|215263937|emb|CAS08277.1| methltransferase, enzyme of biotin synthesis [Escherichia coli
  misc_feature (38)..(174): NCBI GI: 218549659 Blast Desc: biotin biosynthesis protein BioC [Escherichia fergusonii ATCC 35469] gi|218357200|emb|CAQ89835.1| methltransferase, enzyme of biotin synthesis [Escherichia ATCC
  misc_feature (38)..(174): NCBI GI: 170681622 Blast Desc: biotin biosynthesis protein BioC [Escherichia coli SMS-3-5] gi|170519340|gb|ACB17518.1| biotin biosynthesis protein BioC [Escherichia coli SMS-3-5]
  misc_feature (38)..(174): NCBI GI: 218699149 Blast Desc: biotin biosynthesis protein BioC [Escherichia coli IAI39] gi|218369135|emb|CAR16890.1| methltransferase, enzyme of biotin synthesis [Escherichia coli IAI39]
MTTYDIPVERRGDEWSTGSLGYEKYCAPLTQRGCHAMVDALESMCAITSASNILDCAAGTGLITSYLRRNHSDVAITAFDISPGMLQKIRQLNLPDISLGISDLTRMDRVLIPKGSFTHVFAAHCIQFCGDQQSSVVGEVYDSLAPGGIAGISLTVEINIAEPWHHACKLLDPDYKRVYVHDDKAWKTSEELKAGMRDGGFEDVRSIRVWMPMTTLKTKEDYIDFWFEGKHPAFTKRDIAAWKGNPKDVIPTIVKVLDENYKDIGNEIGCASEIVMGKRPDN

SEQ ID NO: 18649 - DNA, 1221 bp, Muscodor strobelii
  misc_feature: SGI EST ID NO. CUFF.43772.0
  misc_feature: Variant of the nucleotide sequence at SEQ ID NO 18647
ttttgatgtacaaaagttctctgcttatgcatatctcattgcatgtttccctatggtcactgaccgaagactcggcagattggttgaagtacataagaagtcatagttgtcatgtatgctacgtaaatgctgaaaggtggtggacgcagaacactccacgcttgggtttccggcaaaacgcttgtccttcatcacatttcaaagatgactacttatgatattcccgtcgaaagaaggggcgacgaatggtctaccggctccttgggatatgagaagtactgtgcgccattgacccagcgaggatgtcatgcaatggtggatgcattggaatcaatgtgtgctatcacttcggcctcgaatatcttggactgtgctgcgggcaccggccttattactagttacctgcgaagaaaccatagtgatgttgctatcactgccttcgacatttcacctggaatgttgcagaagattaggcaactaaacctgcccgacatcagcctcgggattagtgacttgacacgcatggatcgcgtgttaatacccaaaggcagcttcacgcatgttttcgctgcgcattgcattcagttctgcggagaccaacaatcgtctgtcgtgggcgaggtttatgactctcttgctccagggggcatcgcggggatatctttgacggtggagatcaacatcgcagaaccttggcatcatgcttgcaagctgttagaccccgattacaagcgcgtctatgttcacgacgacaaagcttggaagacaagcgaggagctaaaagccggcatgcgggatggagggttcgaggacgtccgcagcatcagagtctggatgccgatgaccacgctgaagactaaggaagactacattgacttctggtttgaaggtaaacatccggctttcacgaagagagatatagcggcgtggaaaggtaacccgaaagacgttataccaacaattgtgaaggtacttgatgagaattacaaggacataggcaatgaaattggctgtgcttctgaaatcgtgatggggaagcggcctgataattgaatgtagggtagagcaaagtgcctgcaattggaaaggtggagatgataggggccaataacgttcacgaaattcaacaagcacaaataagcccgcttggctcagtggtagagcgtatcactagtaatgataaggtcgtcagttcaattctggcagtgggcattacttttg

SEQ ID NO: 18650 - DNA, 1536 bp, Muscodor strobelii
  misc_feature: SGI cDNA ID NO. 566257
  misc_feature: Elevated expression when VOC is produced
  misc_feature: Encodes the peptide sequence at SEQ ID NO 18651
atgctctcctttcaagttgttaccgccctgttcacatcggctgcactggtttcggcagacccgtacaacactttcgacggagatggattcccagcatgtcgaaatgtagctcaagtacacaatgcgaccagtgttgaagatatggttgcggtcgtaaagcaggcggctgccagtggcacaccgattagagcttctggaaagggacatatgtggtatgatacaatgtgttctgataaccctgataccatcatcctgcgcaccgaaaacgtaaacggtatctcgaacctcgtgctcgaagaaggggccgaatccggaacagtcgatatcgaagctggtgtgacatttttgcagctcgctgaatatctgcacgacaacaatgcctccatgggctatacgcttgtcaattggaacattactctagcaggcgctgtcgcaatgggtggacaccgttcatcaatccgggaagactcgatggtcgctgccggtgtcatgtctattgacattatcaacggagacggcgatatcatcacaattgaccgagataacagcaatgacgattggcttgctgcctcgacgtcgcttggattgctcggtcctattgctagaatgactttcaaaatttatcccgacttcaaggtctatgcgaaacaagagatcttggatgaagacgaagttctgaacggcgacatctacggtctcattgctccttatgctactgcgaacttttggtggtggccatacaacaggaaattccactggcgatactacgacgaggtgccaacggagctgagcgaccagcaaggttttcaaaataccttttctatcacggacttcgaggctggcgttgcgaaaacaaccctggaaagtgggaagtatctggcttcatcaaactggtttttcgagacgactgccttcgcgctgtggtctgcaccaaatttcaaagagaaaacgacctggtcagatatcctcacatggccggtgtacgggtggaactacgatgttcttattggaggcctttaccctgaccaaaagccagagtgggaacaaggtctccacggatacacgcttgagctcggatttcctgtcacaattgccaatcaagttctacagcgggttcgacaggcgttcgacgctgaggctagcgcggggagaacaatggctgcaacatatcgaagtggtatcaacatcaagttcggcaagccttattttgatttcctcggccaagtcacatacaacacatccgatggagcagactggtcgaaaggggcaatcatgtttgactttccgacttttcaccccacgaccggcgacggaaagcggtacaatgaacaattctatatcaatcttgccacaacactaatcgacgagtttcctgctcggccacattggacgaagaatacgcgcgaggtatttggcaatgccaccaaaaatctcgatccagatcatctatcgcgtttcaaagtcgtgcgtgagaagtttgaccctagtggcattttcaagtctatcgttggcgaaatcctaggtttctatgactaa

SEQ ID NO: 18651 - protein, 511 aa, Muscodor strobelii
  misc_feature: SGI Peptide ID NO. 566257
  misc_feature (36)..(179): Pfam Id: PF01565 Pfam Desc: FAD binding domain
  misc_feature (17)..(510): NCBI GI: 67524755 Blast Desc: AN2835.2 [Aspergillus nidulans FGSC A4] gi|40744230|gb|EAA63406.1| AN2835.2 [Aspergillus nidulans FGSC A4]
  misc_feature (1)..(510): NCBI GI: 115389860 Blast Desc: conserved [Aspergillus terreus NIH2624] gi|114194831|gb|EAU36531.1| conserved [Aspergillus terreus NIH2624]
  misc_feature (2)..(508): NCBI GI: 46110749 Blast Desc: FG02256.1 [Gibberella zeae PH-1]
  misc_feature (19)..(510): NCBI GI: 239615166 Blast Desc: FAD/FMN-containing dehydrogenase [Ajellomyces dermatitidis ER-3]
  misc_feature (19)..(510): NCBI GI: 261192342 Blast Desc: FAD/FMN-containing dehydrogenase [Ajellomyces dermatitidis SLH14081] gi|239589453|gb|EEQ72096.1| FAD/FMN-containing dehydrogenase [Ajellomyces dermatitidis
  misc_feature (70)..(510): NCBI GI: 259486233 Blast Desc: TPA: conserved [Aspergillus nidulans FGSC A4]
  misc_feature (9)..(510): NCBI GI: 261353320 Blast Desc: conserved [Verticillium albo-atrum VaMs.102]
  misc_feature (13)..(510): NCBI GI: 145606278 Blast Desc: MGG_02420 [Magnaporthe grisea 70-15] gi|145013982|gb|EDJ98623.1| MGG_02420 [Magnaporthe grisea 70-15]
  misc_feature (12)..(510): NCBI GI: 171680137 Blast Desc: protein product [Podospora anserina] gi|170939695|emb|CAP64921.1| protein product [Podospora anserina]
  misc_feature (5)..(494): NCBI GI: 116193253 Blast Desc: CHGG_06344 [Chaetomium globosum CBS 148.51] gi|88182257|gb|EAQ89725.1| CHGG_06344 [Chaetomium globosum CBS 148.51]
  misc_feature: Useful for introducing or modulating the production of volatile compounds
MLSFQVVTALFTSAALVSADPYNTFDGDGFPACRNVAQVHNATSVEDMVAVVKQAAASGTPIRASGKGHMWYDTMCSDNPDTIILRTENVNGISNLVLEEGAESGTVDIEAGVTFLQLAEYLHDNNASMGYTLVNWNITLAGAVAMGGHRSSIREDSMVAAGVMSIDIINGDGDIITIDRDNSNDDWLAASTSLGLLGPIARMTFKIYPDFKVYAKQEILDEDEVLNGDIYGLIAPYATANFWWWPYNRKFHWRYYDEVPTELSDQQGFQNTFSITDFEAGVAKTTLESGKYLASSNWFFETTAFALWSAPNFKEKTTWSDILTWPVYGWNYDVLIGGLYPDQKPEWEQGLHGYTLELGFPVTIANQVLQRVRQAFDAEASAGRTMAATYRSGINIKFGKPYFDFLGQVTYNTSDGADWSKGAIMFDFPTFHPTTGDGKRYNEQFYINLATTLIDEFPARPHWTKNTREVFGNATKNLDPDHLSRFKVVREKFDPSGIFKSIVGEILGFYD

SEQ ID NO: 18652 - DNA, 2184 bp, Muscodor strobelii
  misc_feature: SGI EST ID NO. CUFF.43778.0
  misc_feature: Variant of the nucleotide sequence at SEQ ID NO 18650
tgtgcatcgcagttcccgaaaccgaagggcttatgatatttgaccgttgacctgacactgtgactccgagttgacggtgatacgtgtgacccagtgacatcagtgccccagcatgcatgttggaagggtcaaccccaggagaggaagttgttaagcagattatcatgccctcgtgtggaaggattaagaaactataagtgagaggcccaagtccgattctaatcctattcctgatgggagattttgctcccacatctcggaagaagtgtggcccggatcgtacaatatgctctcctttcaagttgttaccgccctgttcacatcggctgcactggtttcggcagacccgtacaacactttcgacggagatggattcccagcatgtcgaaatgtagctcaagtacacaatgcgaccagtgttgaagatatggttgcggtcgtaaagcaggcggctgccagtggcacaccgattagagcttctggaaagggacatatgtggtatgatacaatgtgttctgataaccctgataccatcatcctgcgcaccgaaaacgtaaacggtatctcgaacctcgtgctcgaagaaggggccgaatccggaacagtcgatatcgaagctggtgtgacatttttgcagctcgctgaatatctgcacgacaacaatgcctccatgggctatacgcttgtcaattggaacattactctagcaggcgctgtcgcaatgggtggacaccgttcatcaatccgggaagactcgatggtcgctgccggtgtcatgtctattgacattatcaacggagacggcgatatcatcacaattgaccgagataacagcaatgacgattggcttgctgcctcgacgtcgcttggattgctcggtcctattgctagaatgactttcaaaatttatcccgacttcaaggtctatgcgaaacaagagatcttggatgaagacgaagttctgaacggcgacatctacggtctcattgctccttatgctactgcgaacttttggtggtggccatacaacaggaaattccactggcgatactacgacgaggtgccaacggagctgagcgaccagcaaggttttcaaaataccttttctatcacggacttcgaggctggcgttgcgaaaacaaccctggaaagtgggaagtatctggcttcatcaaactggtttttcgagacgactgccttcgcgctgtggtctgcaccaaatttcaaagagaaaacgacctggtcagatatcctcacatggccggtgtacgggtggaactacgatgttcttattggaggcctttaccctgaccaaaagccagagtgggaacaaggtctccacggatacacgcttgagctcggatttcctgtcacaattgccaatcaagttctacagcgggttcgacaggcgttcgacgctgaggctagcgcggggagaacaatggctgcaacatatcgaagtggtatcaacatcaagttcggcaagccttattttgatttcctcggccaagtcacatacaacacatccgatggagcagactggtcgaaaggggcaatcatgtttgactttccgacttttcaccccacgaccggcgacggaaagcggtacaatgaacaattctatatcaatcttgccacaacactaatcgacgagtttcctgctcggccacattggacgaagaatacgcgcgaggtatttggcaatgccaccaaaaatctcgatccagatcatctatcgcgtttcaaagtcgtgcgtgagaagtttgaccctagtggcattttcaagtctatcgttggcgaaatcctaggtttctatgactaagaagacggacacactggcatataataatgaggatatatcggcgattactacataaaaggtctcgaatgacttaatgagccccgtatcactatgtatcaggtcataacttaaaggatcgtgctttgaaaacccatggtatatgccctagcttatgaagcgtaacgggccaagattgcaaacttcaagtcattcttgtacgacgaggtttaatgcattgaatcgacaagcgattcatcgttcagcatacattagggctctttagcgctgccaataatgtttgtctcaatgttctaataccaacccaaaggaacgtatattatctacatagttctcgtcaaattgatttccgcacttcactgaaa

SEQ ID NO: 18653 - DNA, 1851 bp, Muscodor strobelii
  misc_feature: SGI cDNA ID NO. 566258
  misc_feature: Reduced expression when VOC is produced
  misc_feature: Encodes the peptide sequence at SEQ ID NO 18654
atgtttggccgagacaagaaatcgaacctaccgccagacgacggccctggcgaaacggctgccgaactcaccaatatacagacaacgacttcgaccaaaactaatcacgaatatccaacggggattcgtctcgccttggttttgtcgtccgcattcgtatccatcttcctcgtctcgctcgatcgtctcatcatcactactgctattcctgccatcaccgatgaattccactcgctccctgacgttgggtggtacggttctgcttacctcctaacaagtgccgccttccaactattgtttggcaaactctacggtttctatccaattcgtgtcgtcttcgggtcttccgttgttttattcgaagttggatcggcaatttgcggtgccgccccaaattccatcgccttcattctcggtagggctatccagggtattggatctgcgggcatcttctccggtggcatagtgataatagttttcgccgttcccttggagaagcgtcctctgtatcagggtttatttggcgccgtgttcggaatctcctctatcctagggccgctagttggaggagccttcacgtctaatgtcacttggcgctggtgcttttacatcaatattcctttcggagtagtcgcattcatcgtcatcatcgtcttccttcgtgtgccagatagacccgagaccagaatatcgacgaaggccaaactttcacaactggatgcattcggcacagcggcactcattccggctgtggtttcattgcttctggctgttcaatggggcgggttgacgtttccatggaacgatcgccgagtgattgcacttctcacactcggcatcttcttattcatcgtgttcattttggtacaagtctgcttgccgaaaactgcaactattcctcccagtaagtacatttttcgccagcggtcgattctagcaggtttctgggcaacattggcccttggtagccaaatgatgatctttgtttactacttgcccatctggtttcaagcaattaaaggaatttcggcggtgaactccggcataaggttgctgcctacaactttggctatcgtcttggcctcgatagcgaacggtgtcttcgtctctaagattggctactatacacccaccatgatctttggttcgtttttggtgaccattggcggtggccttctcactaccttgcaggtcgatactggtgcaggcaagtggattggctaccagattctctacggatttggccagggtttatgtttccaagctccgaacctcgcagcgcagactgttcttgccaaaaaggacgtctcgattggtgcttcgctgatgttctttacccaaattctcggcggtgcgatttttatctcagtcggccagaacgtacttgacaaccagcttgttcaaagattctcgggctttcccgggttctcggcttccattatcaagaatggtggtgccactgaactgatcaatacgctcccagctgatctgcgcccagatgccctggtcgcatacaacgagtcactcagggtcgtctgtaatataaccttccggattggcctggtgcttgcggctctctccgtgcttggcgcgatcgctatggagtggaggagtgtgaaaaagaacaagccgtctactggtacggatgcggcagacgttgagaaaggtgctgtgggtaatgccgacagtaaatctcaggaaacccatgcacacaatacagaagccgatgcaatgaccgaaacgtcatcgaatgacgggcaagtgacacttgcaggcgactcggcagaccatggcgactccgtgcctcaatatgaggagaaacgaaggtcgtcagcagatactgccgtataa

SEQ ID NO: 18654 - protein, 616 aa, Muscodor strobelii
  misc_feature: SGI Peptide ID NO. 566258
  misc_feature (51)..(455): Pfam Id: PF07690 Pfam Desc: Major Facilitator Superfamily
  misc_feature (51)..(265): Pfam Id: PF07690 Pfam Desc: Major Facilitator Superfamily
  misc_feature (274)..(455): Pfam Id: PF07690 Pfam Desc: Major Facilitator Superfamily
  misc_feature (28)..(597): NCBI GI: 242796877 Blast Desc: MFS multidrug transporter, [Talaromyces stipitatus ATCC 10500] gi|218719483|gb|EED18903.1| MFS multidrug transporter, [Talaromyces stipitatus ATCC 10500]
  misc_feature (26)..(542): NCBI GI: 256723307 Blast Desc: NECHADRAFT_97193 [Nectria haematococca mpVI 77-13-4]
  misc_feature (4)..(570): NCBI GI: 238492575 Blast Desc: MFS aflatoxin efflux pump, [Aspergillus flavus NRRL3357] gi|220696018|gb|EED52360.1| MFS aflatoxin efflux pump, [Aspergillus flavus NRRL3357]
  misc_feature (13)..(561): NCBI GI: 255941244 Blast Desc: Pc16g10850 [Penicillium chrysogenum Wisconsin 54-1255] gi|211586014|emb|CAP93755.1| Pc16g10850 [Penicillium chrysogenum Wisconsin 54-1255]
  misc_feature (33)..(563): NCBI GI: 70985937 Blast Desc: MFS multidrug transporter [Aspergillus fumigatus Af293] gi|66846102|gb|EAL86435.1| MFS multidrug transporter, [Aspergillus fumigatus Af293] gi|159128392|gb|EDP53507.1| MFS
  misc_feature (33)..(573): NCBI GI: 119473843 Blast Desc: MFS transporter, [Neosartorya fischeri NRRL 181] gi|119406950|gb|EAW16900.1| MFS transporter, [Neosartorya fischeri NRRL 181]
  misc_feature (35)..(549): NCBI GI: 121711683 Blast Desc: MFS aflatoxin efflux pump, [Aspergillus clavatus NRRL 1] gi|119401608|gb|EAW12031.1| MFS aflatoxin efflux pump, [Aspergillus clavatus NRRL 1]
  misc_feature (17)..(555): NCBI GI: 119499237 Blast Desc: MFS aflatoxin efflux pump, [Neosartorya fischeri NRRL 181] gi|119414540|gb|EAW24479.1| MFS aflatoxin efflux pump, [Neosartorya fischeri NRRL 181]
  misc_feature (31)..(554): NCBI GI: 256732882 Blast Desc: NECHADRAFT_78630 [Nectria haematococca mpVI 77-13-4]
  misc_feature (17)..(567): NCBI GI: 70985364 Blast Desc: MFS aflatoxin efflux pump [Aspergillus fumigatus Af293] gi|66845816|gb|EAL86150.1| MFS aflatoxin efflux pump, [Aspergillus fumigatus Af293]
  misc_feature: Useful for introducing or modulating the production of volatile compounds
MFGRDKKSNLPPDDGPGETAAELTNIQTTTSTKTNHEYPTGIRLALVLSSAFVSIFLVSLDRLIITTAIPAITDEFHSLPDVGWYGSAYLLTSAAFQLLFGKLYGFYPIRVVFGSSVVLFEVGSAICGAAPNSIAFILGRAIQGIGSAGIFSGGIVIIVFAVPLEKRPLYQGLFGAVFGISSILGPLVGGAFTSNVTWRWCFYINIPFGVVAFIVIIVFLRVPDRPETRISTKAKLSQLDAFGTAALIPAVVSLLLAVQWGGLTFPWNDRRVIALLTLGIFLFIVFILVQVCLPKTATIPPSKYIFRQRSILAGFWATLALGSQMMIFVYYLPIWFQAIKGISAVNSGIRLLPTTLAIVLASIANGVFVSKIGYYTPTMIFGSFLVTIGGGLLTTLQVDTGAGKWIGYQILYGFGQGLCFQAPNLAAQTVLAKKDVSIGASLMFFTQILGGAIFISVGQNVLDNQLVQRFSGFPGFSASIIKNGGATELINTLPADLRPDALVAYNESLRVVCNITFRIGLVLAALSVLGAIAMEWRSVKKNKPSTGTDAADVEKGAVGNADSKSQETHAHNTEADAMTETSSNDGQVTLAGDSADHGDSVPQYEEKRRSSADTAV

SEQ ID NO: 18655 - DNA, 1443 bp, Muscodor strobelii
  misc_feature: SGI EST ID NO. CUFF.43797.0
  misc_feature: Variant of the nucleotide sequence at SEQ ID NO 18653
tttttcgccagcggtcgattctagcaggtttctgggcaacattggcccttggtagccaaatgatgatctttgtttactacttgcccatctggtttcaagcaattaaaggaatttcggcggtgaactccggcataaggttgctgcctacaactttggctatcgtcttggcctcgatagcgaacggtgtcttcgtctctaagattggctactatacacccaccatgatctttggttcgtttttggtgaccattggcggtggccttctcactaccttgcaggtcgatactggtgcaggcaagtggattggctaccagattctctacggatttggccagggtttatgtttccaagctccgaacctcgcagcgcagactgttcttgccaaaaaggacgtctcgattggtgcttcgctgatgttctttacccaaattctcggcggtgcgatttttatctcagtcggccagaacgtacttgacaaccagcttgttcaaagattctcgggctttcccgggttctcggcttccattatcaagaatggtggtgccactgaactgatcaatacgctcccagctgatctgcgcccagatgccctggtcgcatacaacgagtcactcagggtcgtctgtaagtaatataacctgttagttattaaaaactagcctttgttttaaaacccgcggccccgcaaaacgttgcgaaaaataactaacccgatacctttctggctaccagtccggattggcctggtgcttgcggctctctccgtgcttggcgcgatcgctatggagtggaggagtgtgaaaaagaacaagccgtctactggtacggatgcggcagacgttgagaaaggtgctgtgggtaatgccgacagtaaatctcaggaaacccatgcacacaatacagaagccgatgcaatgaccgaaacgtcatcgaatgacgggcaagtgacacttgcaggcgactcggcagaccatggcgactccgtgcctcaatatgaggagaaacgaaggtcgtcagcagatactgccgtataatccctacgcgttgacttatcattttgcattatcttggcgttgaggagagatcttcttttttgaactatcataataggctcatcttgtattcccgtagtctggcgttggggccgattagatactcatactagtagttgacgataatctagtacggtcagactcctctcttcgaaaaggggtggcttggcagttgtgtatatattaaatataatagtcttacatggcctcatctgtagcttcgccgcgatgtgattgggctgtgctcttgacacccgacgaggcgctcgaaaaaatagatgggactccaaagcaaccacattactattaattcaccccattcaagaccgtccaccactaaaatcaatgatttcagtactgtattatcacatatatgttattttcaatgttg

SEQ ID NO: 18656 - DNA, 1284 bp, Muscodor strobelii
  misc_feature: SGI cDNA ID NO. 566259
  misc_feature: Encodes the peptide sequence at SEQ ID NO 18657
atgtttacacatgatagattgaagacatatgacctagtagtcttacaagcactggtgttatacttgttctcgcttgctggccgcttcgatagacatggcgcgtggatcctgaacgggattgttgtgagggttgcacagaagatgggactccacagagacggcgagctcctggggctgccgccatttgaaaccgagatacgtaggagaatttggtggcaaatcatcatgatcgatgctctatacgcactcatgtccggtctgggtcagtctcttctcccgcgatcgtgggatacgaagacacccataaatatcaacgacgcggatctctatcccaccatgacgacgcttcaggccaaagacggtcccacagatatgatatattgcttaacgttttacgaaataggcaagatgatgatggacacgccgaatctcgaaagcttgattgtccaaaacgaagctgggctcctcgacccctcaccatcagaagagatcgagaaagcacggcgacgtatcttacagcttgatgatacactggaggagatcatggagaagtacagcgatccatcgatggggccagtgcaccaactggctgccgaaatccgacccatgctgtgctccaagctgcaagagtttgtgcgtccagcaagcgagcaaccagagtggggcacagaaatcaagagccctcgagataatatatttaaaatcgctgtctcgacgacggagacagacatgaaattatatcaaaagcttcaagcgcaggggccctttttctggtacatgcttgctcatttccagatcgagatgttgatctacatggcaggtcaactaattgagcgaacgaggggtagtctcgtcgagagagcgtggctgctcgtcgaagctcattataaatttcacgatgagctgtatatcctgaactccaagacgcatatcgccctcgctatcctagtgacaaggggttggagagcacgggagagatatctgcgcgacgcacagggatcattaccgccaacacctgatttcatcgtcaagttgctcggcgttctagcgtcaaatgagaacaaggctgttgctgctgtcgtagacgaagatgctacaatgaaaccagaagcggcccctttatttggagcgggagcgcagggactcgaaataccctgggatcaaatgctcgggttcacggatgtaccagctttggactggaatatgtttgcgaataatacgatgggagatatgcaatctaatcagggaggttatggttctgggtatggaagctggggcttatag

SEQ ID NO: 18657 - protein, 427 aa, Muscodor strobelii
  misc_feature: SGI Peptide ID NO. 566259
  misc_feature (11)..(107): Pfam Id: PF04082 Pfam Desc: Fungal specific transcription factor domain
  misc_feature (7)..(405): NCBI GI: 171693007 Blast Desc: protein product [Podospora anserina] gi|170946452|emb|CAP73253.1| protein product [Podospora anserina]
  misc_feature (7)..(424): NCBI GI: 256728042 Blast Desc: NECHADRAFT_62595 [Nectria haematococca mpVI 77-13-4]
  misc_feature (7)..(378): NCBI GI: 116198843 Blast Desc: CHGG_07577 [Chaetomium globosum CBS 148.51] gi|88178856|gb|EAQ86324.1| CHGG_07577 [Chaetomium globosum CBS 148.51]
  misc_feature (7)..(407): NCBI GI: 46132954 Blast Desc: FG09014.1 [Gibberella zeae PH-1]
  misc_feature (7)..(426): NCBI GI: 261358003 Blast Desc: C6 zinc finger domain-containing protein [Verticillium albo-atrum VaMs.102]
  misc_feature (7)..(404): NCBI GI: 39940794 Blast Desc: MGG_04843 [Magnaporthe grisea 70-15] gi|145010933|gb|EDJ95589.1| MGG_04843 [Magnaporthe grisea 70-15]
  misc_feature (7)..(413): NCBI GI: 46114900 Blast Desc: FG03292.1 [Gibberella zeae PH-1]
  misc_feature (7)..(325): NCBI GI: 256728626 Blast Desc: NECHADRAFT_22695 [Nectria haematococca mpVI 77-13-4]
  misc_feature (7)..(361): NCBI GI: 256727246 Blast Desc: NECHADRAFT_75919 [Nectria haematococca mpVI 77-13-4]
  misc_feature (5)..(351): NCBI GI: 256724594 Blast Desc: NECHADRAFT_13089 [Nectria haematococca mpVI 77-13-4]
MFTHDRLKTYDLVVLQALVLYLFSLAGRFDRHGAWILNGIVVRVAQKMGLHRDGELLGLPPFETEIRRRIWWQIIMIDALYALMSGLGQSLLPRSWDTKTPININDADLYPTMTTLQAKDGPTDMIYCLTFYEIGKMMMDTPNLESLIVQNEAGLLDPSPSEEIEKARRRILQLDDTLEEIMEKYSDPSMGPVHQLAAEIRPMLCSKLQEFVRPASEQPEWGTEIKSPRDNIFKIAVSTTETDMKLYQKLQAQGPFFWYMLAHFQIEMLIYMAGQLIERTRGSLVERAWLLVEAHYKFHDELYILNSKTHIALAILVTRGWRARERYLRDAQGSLPPTPDFIVKLLGVLASNENKAVAAVVDEDATMKPEAAPLFGAGAQGLEIPWDQMLGFTDVPALDWNMFANNTMGDMQSNQGGYGSGYGSWGL

SEQ ID NO: 18658 - DNA, 6337 bp, Muscodor strobelii
  misc_feature: SGI EST ID NO. CUFF.44450.6
  misc_feature: Variant of the nucleotide sequence at SEQ ID NO 18656
caacgagctgctgtccggtctctccacccctctcctcacgcccgccgccctctccgccgaccagcaccccggcccgcagcccttcttctcccttgccaggcccgacggcgcatcgtcttcatcttcgccctacaccggcgctgctgctgctgctgctgctgggcgatgcaagagacaacggaacaaggagatcctccgccgtctcaccgagctgctcgtcgtcggactgctgaccttcttggtcgctaccagcccccgcgttcgcccactgtgggctgcgtcgagtccaggtttgtgctctctcccgttgaccgcctcgtgtgcctgtcgcaatgtcacgctgacagcacgtgtgtctatcgctagagctcggcatcttcatggcagtagtgattaatctgatacttctctacccgctgcgtctggtgctgtggacgcaacgccaccgcacctcgttctcggctctgcctgtcaccatccccagcgctttcgacccggcaccgctcctctaccctcctgccataaccatcctcgtgtcctacttgatcgccgccgacaaccccgccgttgttctgcccaacatcgtgctcgccatctgctcgctgccgcccgcactggttccttcgctgcccacggcatctccacattacaatcccttgcattgggccctatcttgcctgccgctcgccggccctaacgctctcgatcgatatgtgggcgtgggcctggacgaaagcggtctgcgtctgcgtagcgcgccattgtcagtgcaagatgcagtcttcctctaccccctccactgcagtctgttgcaggtattgcaccagctcacgacgacaagcctgcttactgccgagctgcagcttctctccatcggtctcatcaacatactgctgctgtcatcctcaccacaggccacaattctgaaggcgatgctctgggtcggcggcctggacatcttggtatcctgtgccaaacccgtccaatggggcataatcctcgctcgagtccccaaatggcgttataagcggcccccgaccccgcggcacgggctcgcccatggctctccatgctaggaacatggcgtcgaatgcgatacgattttctccgccccccggtggattcctcttgcagctcggccgaggccattgacgatcaagactcggatgagagcggcactaagatgcccagacgcctcgaccgagcccagctccaaaccggtgacatcacggcagttgccaaaaagcccgctgcgaggtctctctctggcgtggacgggttttccgaggtcttgacggaaatcttaccgctccggctccggagacatactctgcccggagccgggaagcagcgaaaatcacccactcacacgccttctggccgaaagaagaggtcggcgtccatatcgattcaagctttcctctcgctcacgcaccagcaagccaaagtccgcaagtggatgtatgctagctacgtctacatttgtataattgcgactatattcattccgctctcctatatcggcgtgaaagaagtagtaatgcgggacgctctgcagggtgacgagccagtcggctgggcgttgggctacctttttggagatctcccatggtttcggtggcaagtggttagccataacttgaattactggatcccgctgcctcccagattccgtgaagacgacgtccatgctttagcgcacggatggatcgaacatgtgcgcgtctcgtgtttcggcgaggccaacacacgtttgcttatcagtgcctactgcatgtctgtcatcacgattggcctccttgttgtcttcagcctttcgcccctctatgaagtagatacacgtcgaaaagtgttccattttatgatggttgccatgtttctcccggccacttacatcgatccagcattcgtggctctagccctcagcatcatactagccgcctttcttctactcgacctactgcgtgctagccaactaccacctctctccaagccactggcctcctttctaacgccttatgtcgatggacgcgatttgaagggtccggtcgtcatttcacacatcttcctcctcatcggctgtgcaatacccctttggctttctctgggctcgttgcctaggacaggccaaggccaccttcaaggctggagcctctccacgagggaagtcagtatggtctcgggtatcgtatgcgtcggactgggggatgcagcagcgtcgctgatcggtcggcgctacggtcaccggaaatggttctggggtggtggtaagagcctcgaaggcagcatagccttcgccttagccgtgtttctaggactcatggcggctcatacatggttgcgactcggtggttggacagcgacggagcgacaggagaatacatggcagactactgcgaagaagacaaccgtctgcgctagcattgccagtataacggaagcggttctgaccggaggaaatgacaacgtcgtggtgcctgtggtgttgtgggcttgtgttaaaagtgcgggcatatagtggctattgttttttaagcagggaaaagaccctcttgcatcgcttggcgtacgggcggatttggaacatttgactacacacggcgcatttttgacgacggactttcatatatgaagggctatagaacgagaacgagggcatcttaatagaatgctggacgtaaagaaggtcgacagaccgtatctgacattcggtaaatgaggggctgaggttgttccaggagatgtgctgccataggtaaaagcctacctagctaacgaagtgcctggccttccaccactactgaagtcaaagtatggcgcttagacaggaaaacacaaaccatagcgcctctagtgatctatctttgacagtatcttaagagcctcttgaaattgaaattgaatcgctccggatctaaaacgagtacgaaaaacagttgagagatattctcggtcatggccgcatccaccctgttatgcctcgtccagcgtattcgcgagaccacgcagagagcatgttgtagtgcctgaaacggcgcgaacgattttgaagcctgtctgtttgcgggacaatagatgctatcatattgcagctgagacttacatctatcatggtgctttgaactatcgagccaagaaatacgtggaatacgatggcatgccaagaaatggtggtatgaatcatccagacatcaatcccaaccgtcaatttctaatctaccggttgactcacaggacccccgtgattaggtatcccagttctgtcccctagctggctgatctcggatgctcttggcgatgcaggaagtgaacacgttgaacgcaaatgggggacaagttacagcacttgtgaacgacttagagacggacggaattccgaccggtagcacttctctttggaagattgaagaagacaccgggaagaaaagtctccggagctgcatagcggcgggcaagcgggcctcccaactccctacacctccaatcttggcgtgctttcagagttcacctccgacatgtgcgtgaggcttgcctgaggtaataataacgatccgcgccgtgcttcgattaccttgcctttctcgaccaacccagagcacatcaagtgcatatcttacgtagctgcctggtgacgtacaccctcaatactactttgctcgcttgcctacataattaggcagacaagcaacctatcacgtctatacagtccccatctcactcagccttatgtcgcaggcatcttcctatcctctgtctgattccgtaccttgacatagtcgtatctccgtgtctaccgccaagtccgagtctttaacagtttcttccggtcgcaaatggtaatagcaacgtgcccctcactctgccgcctggtataactccgcgacggccacgagatggcttcaaatccggcaaaggcgccccgaattcttgcttgtgtgctttgtcagagtcgaaagataaaatgtgatcgcaacacaccttgctcaaactgcagtgagtacttactcttgcttttaccgctagctcttcatacagatgaactgatgctagccggtagtcaaggcgaatgttcaatgcactcccgcaacaccagcacctccgcgcaaacgccggcggccgaatcaggacttacagcaacgccttgcccgttgtgaggagctgttgtcagagtataccactaatccccgcacacccaccagctctcacgagacaccgagtcgggacgagctatggaagcccgtgggaaagctgatcattgacggcgaaaatgtcaagttcactgatagccatctctgggcagatgtacatcgcgagctctcggccatgcgcgagattttagaagatgatgaaatagcagatgactactacacacccgctgactctagaacacccgatacgaatgttgggttgctgttgtccgactctacggacggtagtgtagaagagtttcgcccctctcctgcacaagccttccgtctatggcaaacattcctcgagcgagtcaatccattgaccaaggtcatccatgtacccacggttcagccccagctagtcgaggccacgaccaaccctgcctctataccaaagaatgtcgaagctcttctcttctccatttatctcatgggtgcggttgccttgaatgagcgcgaatgcgaggaacagctaggctgtacgaaagaggatgcttatcgacgcttcgccaatggctgtcgaacagccttgatgcgaattggaatgtaagtaaagtcgacctgctcgcaaataaagctgcgtcctgtcctatcctaaacgatcgtcacttcaccacctgtctttgaagtataatagcatgtttacacatgatagattgaagacatatgacctagtagtcttacaagcactggtgttatacttggtttgtcctgctgctcctctcgtgtatctctgtgccttctcagtctaaccctccctagttctcgcttgctggccgcttcgatagacagtgagtctgattgatgcctcgctactgtgataactgatcgtttccttagtggcgcgtggatcctgaacgggattgttgtgagggttgcacagaagatgggactccacagagacggcgagctcctggggctgccgccatttgaaaccgagatacgtaggagaatttggtggcaaatcatcatgatcgatgctctatacgcactcatgtccggtctgggtcagtctcttctcccgcgatcgtgggatacgaagacacccataaatatcaacgacgcggatctctatcccaccatgacgacgcttcaggccaaagacggtcccacagatatgatatattgcttaacgttttacgaaataggcaagatgatgatggacacgccgaatctcgaaagcttgattgtccaaaacgaagctgggctcctcgacccctcaccatcagaagagatcgagaaagcacggcgacgtatcttacagcttgatgatacactggaggagatcatggagaagtacagcgatccatcgatggggccagtgcaccaactggctgccgaaatccgacccatgctgtgctccaagctgcaagagtttgtgcgtccagcaagcgagcaaccagagtggggcacagaaatcaagagccctcgagataatatatttaaaatcgctgtctcgacgacggagacagacatgaaattatatcaaaagcttcaagcgcaggggccctttttctggtacatgcttgctcatttccagatcgagatgttgatctacatggcaggtcaactaattgagcgaacgaggggtagtctcgtcgagagagcgtggctgctcgtcgaagctcattataaatttcacgatgagctgtatatcctgaactccaagacgcatatcgccctcgctatcctagtgacaaggggttggagagcacgggagagatatctgcgcgacgcacagggatcattaccgccaacacctgatttcatcgtcaagttgctcggcgttctagcgtcaaatgagaacaaggctgttgctgctgtcgtagacgaagatgctacaatgaaaccagaagcggcccctttatttggagcgggagcgcagggactcgaaataccctgggatcaaatgctcgggttcacggatgtaccagctttggactggaatatgtttgcgaataatacgatgggagatatgcaatctaatcagggaggttatggttctgggtatggaagctggggcttatagaggattcaactaagtgcatgtgcactcctgtatttataagcgtaaggttaaatagacggacatctcctgtctagcgatggcgcataattatacgaactcactactcgttcgaaatttc

SEQ ID NO: 18659 - DNA, 783 bp, Muscodor strobelii
  misc_feature: SGI cDNA ID NO. 566260
  misc_feature: Encodes the peptide sequence at SEQ ID NO 18660
atggcttcaaatccggcaaaggcgccccgaattcttgcttgtgtgctttgtcagagtcgaaagataaaatgtgatcgcaacacaccttgctcaaactgcatcaaggcgaatgttcaatgcactcccgcaacaccagcacctccgcgcaaacgccggcggccgaatcaggacttacagcaacgccttgcccgttgtgaggagctgttgtcagagtataccactaatccccgcacacccaccagctctcacgagacaccgagtcgggacgagctatggaagcccgtgggaaagctgatcattgacggcgaaaatgtcaagttcactgatagccatctctgggcagatgtacatcgcgagctctcggccatgcgcgagattttagaagatgatgaaatagcagatgactactacacacccgctgactctagaacacccgatacgaatgttgggttgctgttgtccgactctacggacggtagtgtagaagagtttcgcccctctcctgcacaagccttccgtctatggcaaacattcctcgagcgagtcaatccattgaccaaggtcatccatgtacccacggttcagccccagctagtcgaggccacgaccaaccctgcctctataccaaagaatgtcgaagctcttctcttctccatttatctcatgggtgcggttgccttgaatgagcgcgaatgcgaggaacagctaggctgtacgaaagaggatgcttatcgacgcttcgccaatggctgtcgaacagccttgatgcgaattggaatgtaa

SEQ ID NO: 18660 - protein, 260 aa, Muscodor strobelii
  misc_feature: SGI Peptide ID NO. 566260
  misc_feature (12)..(50): Pfam Id: PF00172 Pfam Desc: Fungal Zn(2)-Cys(6) binuclear cluster domain
  misc_feature (7)..(260): NCBI GI: 256728042 Blast Desc: NECHADRAFT_62595 [Nectria haematococca mpVI 77-13-4]
  misc_feature (6)..(258): NCBI GI: 261358003 Blast Desc: C6 zinc finger domain-containing protein [Verticillium albo-atrum VaMs.102]
  misc_feature (2)..(260): NCBI GI: 171693007 Blast Desc: protein product [Podospora anserina] gi|170946452|emb|CAP73253.1| protein product [Podospora anserina]
  misc_feature (6)..(260): NCBI GI: 39940794 Blast Desc: MGG_04843 [Magnaporthe grisea 70-15] gi|145010933|gb|EDJ95589.1| MGG_04843 [Magnaporthe grisea 70-15]
  misc_feature (7)..(258): NCBI GI: 46114900 Blast Desc: FG03292.1 [Gibberella zeae PH-1]
  misc_feature (74)..(260): NCBI GI: 46132954 Blast Desc: FG09014.1 [Gibberella zeae PH-1]
  misc_feature (4)..(255): NCBI GI: 255939263 Blast Desc: Pc15g01860 [Penicillium chrysogenum Wisconsin 54-1255] gi|211585023|emb|CAP83072.1| Pc15g01860 [Penicillium chrysogenum Wisconsin 54-1255]
  misc_feature (6)..(255): NCBI GI: 121704992 Blast Desc: fungal specific transcription factor domain protein [Aspergillus clavatus NRRL 1] gi|119398905|gb|EAW09333.1| fungal specific transcription factor domain protein [Aspergillus NRRL 1]
  misc_feature (7)..(260): NCBI GI: 256727600 Blast Desc: NECHADRAFT_66570 [Nectria haematococca mpVI 77-13-4]
  misc_feature (1)..(257): NCBI GI: 238840269 Blast Desc: fungal specific transcription factor domain-containing protein [Microsporum canis CBS 113480]
MASNPAKAPRILACVLCQSRKIKCDRNTPCSNCIKANVQCTPATPAPPRKRRRPNQDLQQRLARCEELLSEYTTNPRTPTSSHETPSRDELWKPVGKLIIDGENVKFTDSHLWADVHRELSAMREILEDDEIADDYYTPADSRTPDTNVGLLLSDSTDGSVEEFRPSPAQAFRLWQTFLERVNPLTKVIHVPTVQPQLVEATTNPASIPKNVEALLFSIYLMGAVALNERECEEQLGCTKEDAYRRFANGCRTALMRIGM

SEQ ID NO: 18661 - DNA, 6337 bp, Muscodor strobelii; identical to SEQ ID NO: 18658
  misc_feature: SGI EST ID NO. CUFF.44450.6
  misc_feature: Variant of the nucleotide sequence at SEQ ID NO 18659

SEQ ID NO: 18662 - DNA, 1788 bp, Muscodor strobelii
  misc_feature: SGI cDNA ID NO. 566261
  misc_feature: Encodes the peptide sequence at SEQ ID NO 18663
atggggagcgaagagcagttggaaacgatggcagagcgtgaccttcttgacaacctggaaatgaggcccggcctcctcgagaacatgttccgtattctcaacctcaaagacacacccgaaaggatggtcgaatgcaatcttaccgccgtaacactgcactcgaaaccgacatacactgctatatcctactgctgggatactcccgagcctcgagcggccattctatgcaatggtaaaacgatgcgtgtccgcactaatctctaccgtgcattgctactcctacgagagttcagcgagtcacatattctttgggcagatgcaatctgcatcgatcaagacaatgtccgtgagcgcagtcaacaagttcagcttatgaaggacatattccttggtgcagacaaggttctcgtctggctaggccccgaaacagaagacagcgagctggggatacaattggctcgcgatcttgctgatgcaggtcgcgagtatctaactcatcgtgacagtctagagaatattccgcaagatgcactctggaaccgactgttccgcagattcaagcatcgctcggagtgggctcgcggcaatgcactatctcagataattgatcgatcatggttttcgcgcacctggattgtgcaagaggtcgctgtagctagagaaatcaccgttcattgtggtaaagccacaataagctgggaggacctgatgcacgcatgcatattacaaaatcagctggatctatatacaagtcatcacgatcgtaacacagcatccctgatcttacacaaatcccgccaacattttcaggaggggattcgccccgatctcctttccatcttgtatcgacatcggttattcgacgcaacagacccgagagataaatgctacgggttgggtgcgctggcaagtggccctgtggcagagcattttatgactcatgtcgactatactatagactggttcctcctttatcggcagatagcgatccagctactaaaggcaggaaacaaccttaacttactatcgattcctcccggcctggcaaaagaacacgcaccagagcttccgacctgggtaccagattggaggacgacaagaaagtcgccatgccttggcctagtcgaccaagacgacatacacaacatgcggtaccgagcgagcggtgactcacagccgagcgtagaatttgatgatacaggcatgcttctcggtctggagtgtaactttatcgacgagatcgaagccctagccacagtgatggtagtcgatgatctccctcatgggtttcccggcgtattacgcctcccaaaactagcctacaaacttgacgagtggcgtaaagtgactcgatgcatggaaaatatcccatatcccgcgccagggcatgaaaccctagatgccttcatcaatacactaattgggggcgccgctgacatgacccgccaattcaaacgagaccaatatcatatcttagatcgacaggcacgacttctgcgctggcatcgccgactcagcaatttatggcccaggctgcagagtgctcaagtatggctcgtacgatgtctggctaagctgttgagagttccggacgagtctatcgcatacgtttttgggagcaaaaactggtcctgcggcagatcggacagtgttccgaacgacgaagggttatattggcatgactacaatcagagcttccccgggggatcggatcgtggttgtcaagggtgggagggtaccgttattactacgacctcacgagagagggaactggaagttccggggtga

SEQ ID NO: 18663 - protein, 595 aa, Muscodor strobelii
  misc_feature: SGI Peptide ID NO. 566261
  misc_feature (58)..(215): Pfam Id: PF06985 Pfam Desc: Heterokaryon incompatibility protein (HET)
  misc_feature (58)..(147): Pfam Id: PF06985 Pfam Desc: Heterokaryon incompatibility protein (HET)
  misc_feature (19)..(420): NCBI GI: 145245067 Blast Desc: An11g08370 [Aspergillus niger] gi|134079496|emb|CAK46028.1| protein product [Aspergillus niger]
  misc_feature (43)..(363): NCBI GI: 256721799 Blast Desc: NECHADRAFT_53281 [Nectria haematococca mpVI 77-13-4]
  misc_feature (25)..(363): NCBI GI: 46127485 Blast Desc: FG08120.1 [Gibberella zeae PH-1]
  misc_feature (26)..(417): NCBI GI: 46135655 Blast Desc: FG09350.1 [Gibberella zeae PH-1]
  misc_feature (43)..(363): NCBI GI: 46114550 Blast Desc: FG03117.1 [Gibberella zeae PH-1]
  misc_feature (43)..(423): NCBI GI: 261202540 Blast Desc: conserved [Ajellomyces dermatitidis SLH14081] gi|239590581|gb|EEQ73162.1| conserved [Ajellomyces dermatitidis SLH14081]
  misc_feature (43)..(423): NCBI GI: 239612306 Blast Desc: conserved [Ajellomyces dermatitidis ER-3]
  misc_feature (23)..(381): NCBI GI: 116182272 Blast Desc: CHGG_01764 [Chaetomium globosum CBS 148.51] gi|88186061|gb|EAQ93529.1| CHGG_01764 [Chaetomium globosum CBS 148.51]
  misc_feature (13)..(428): NCBI GI: 154305655 Blast Desc: BC1G_07642 [Botryotinia fuckeliana B05.10] gi|150853161|gb|EDN28353.1| BC1G_07642 [Botryotinia fuckeliana B05.10]
  misc_feature (30)..(370): NCBI GI: 119179507 Blast Desc: CIMG_08498 [Coccidioides immitis RS]
MGSEEQLETMAERDLLDNLEMRPGLLENMFRILNLKDTPERMVECNLTAVTLHSKPTYTAISYCWDTPEPRAAILCNGKTMRVRTNLYRALLLLREFSESHILWADAICIDQDNVRERSQQVQLMKDIFLGADKVLVWLGPETEDSELGIQLARDLADAGREYLTHRDSLENIPQDALWNRLFRRFKHRSEWARGNALSQIIDRSWFSRTWIVQEVAVAREITVHCGKATISWEDLMHACILQNQLDLYTSHHDRNTASLILHKSRQHFQEGIRPDLLSILYRHRLFDATDPRDKCYGLGALASGPVAEHFMTHVDYTIDWFLLYRQIAIQLLKAGNNLNLLSIPPGLAKEHAPELPTWVPDWRTTRKSPCLGLVDQDDIHNMRYRASGDSQPSVEFDDTGMLLGLECNFIDEIEALATVMVVDDLPHGFPGVLRLPKLAYKLDEWRKVTRCMENIPYPAPGHETLDAFINTLIGGAADMTRQFKRDQYHILDRQARLLRWHRRLSNLWPRLQSAQVWLVRCLAKLLRVPDESIAYVFGSKNWSCGRSDSVPNDEGLYWHDYNQSFPGGSDRGCQGWEGTVITTTSRERELEVPG

SEQ ID NO: 18664 - DNA, 2388 bp, Muscodor strobelii
  misc_feature: SGI EST ID NO. CUFF.43815.0
  misc_feature: Variant of the nucleotide sequence at SEQ ID NO 18662
ggcttcgcacttactttcatgtctaattaggtgcgatgtgagtagactgcgatgcgtgatgagtagcccatcatttttaggaatcacaacacacacttgcacctagatcctagattcccaatgtcactgcactcgcgcataccctgccgaacccgaagccatatcacctcgggcccttcaaccttgcatgcttctccccagctgcgcagagcagggatcgacaactaggagcaggaggattgccgggattccaattctggggatgttgcccaacttgggcatcttacatacagccttataacaagtaaccccgaagcctaggagatggcaatcgtccgggacggaatgcatcttcttcctagatcataagctgcgattttccttgtttctcgcagcaatggggagcgaagagcagttggaaacgatggcagagcgtgaccttcttgacaacctggaaatgaggcccggcctcctcgagaacatgttccgtattctcaacctcaaagacacacccgaaaggatggtcgaatgcaatcttaccgccgtaacactgcactcgaaaccgacatacactgctatatcctactgctgggatactcccgagcctcgagcggccattctatgcaatggtaaaacgatgcgtgtccgcactaatctctaccgtgcattgctactcctacgagagttcagcgagtcacatattctttgggcagatgcaatctgcatcgatcaagacaatgtccgtgagcgcagtcaacaagttcagcttatgaaggacatattccttggtgcagacaaggttctcgtctggctaggccccgaaacagaagacagcgagctggggatacaattggctcgcgatcttgctgatgcaggtcgcgagtatctaactcatcgtgacagtctagagaatattccgcaagatgcactctggaaccgactgttccgcagattcaagcatcgctcggagtgggctcgcggcaatgcactatctcagataattgatcgatcatggttttcgcgcacctggattgtgcaagaggtcgctgtagctagagaaatcaccgttcattgtggtaaagccacaataagctgggaggacctgatgcacgcatgcatattacaaaatcagctggatctatatacaagtcatcacgatcgtaacacagcatccctgatcttacacaaatcccgccaacattttcaggaggggattcgccccgatctcctttccatcttgtatcgacatcggttattcgacgcaacagacccgagagataaatgctacgggttgggtgcgctggcaagtggccctgtggcagagcattttatgactcatgtcgactatactatagactggttcctcctttatcggcagatagcgatccagctactaaaggcaggaaacaaccttaacttactatcgattcctcccggcctggcaaaagaacacgcaccagagcttccgacctgggtaccagattggaggacgacaagaaagtcgccatgccttggcctagtcgaccaagacgacatacacaacatgcggtaccgagcgagcggtgactcacagccgagcgtagaatttgatgatacaggcatgcttctcggtctggagtgtaactttatcgacgagatcgaagccctagccacagtgatggtagtcgatgatctccctcatgggtttcccggcgtattacgcctcccaaaactagcctacaaacttgacgagtggcgtaaagtgactcgatgcatggaaaatatcccatatcccgcgccagggcatgaaaccctagatgccttcatcaatacactaattgggggcgccgctgacatgacccgccaattcaaacgagaccaatatcatatcttagatcgacaggcacgacttctgcgctggcatcgccgactcagcaatttatggcccaggctgcagagtgctcaagtatggctcgtacgatgtctggctaagctgttgagagttccggacgagtctatcgcatacgtttttgggagcaaaaactggtcctgcggcagatcggacagtgttccgaacgacgaagggttatattggcatgactacaatcagagcttccccgggggatcggatcgtggttgtcaagggtgggagggtaccgttattactacgacctcacgagagagggaactggaagttccggggtgattcttatgttcacgggatcatgaatggggaggcgtatgatgagaacagactagagcgagtttgggttgcttgaagtttgattggctagtgacaaaagatggcttgggctatagatatgataatgacggaatgatctaagtgcaacataataatagttaatagtcgcctgaaagcttgatcttggcattcaagctcagaagaaa

SEQ ID NO: 18665 - DNA, 1410 bp, Muscodor strobelii
  misc_feature: SGI cDNA ID NO. 566262
  misc_feature: Encodes the peptide sequence at SEQ ID NO 18666
atgtcgtcgccagcatccttcgacgatgatgagagtcccaggtcctccccgccgcctatggcttctcagcaaagtgtgaactgcaacagccaagatgatccggcaaccgcccaccgttgcgcatctcggtccaagatgctgacatattgcagcttggtcgtcagagatagagtccccagcggtgcggccaagaggaagaggactttgacaaatggcgcgggaccctcgacctcgagacgccgcacccgcgatgtcagcatagtatccgacaacgaggacgaggacgaagacgaagacgccgaagcatacgacccagaccagcctctcgaggaacggcgcaaagtccagcgaggctaccgagatctcctacgtggtctgcatgagcgcgccgacgagttcaacgaccccaagtccctcatcctacaagagacactagagaaggcgaaccggctggcgcggcatgtcaaacaaaccggcgaggccaccgtcgactccaaactcctggtcgctgcggcagaagcctcgtacaggagaaccgctcgtctcgttcatggcaacgtcgcgcaaggagttgatgtcgatgagtttgtctccaagtgcataagctatatgcgccgtggtatagggattgcaaacgatgacgccccagagcttacggccacacagcagcaacggaggaggcctggccgcggggatgcggatgattcggatgaagatgagatcggcgacgatggcgacatgatgaactgggaacatcttggtcgcttcgcctgtctccccaatatcagtcggccggccgttccgggcttcctcctcggacccttatcggtagagaagaagataaggaaggtggcgaagcgtagtgcgcctttcagagcagaccacctcagagaaacaaggccagaagtcttgaatgcagaagatgtccagcgaaacgaaaagaatgacctgactgctatctgcgccaagatattacgacgattacgagacttccaagaagaggcgcaaacgagggctgaagaggctttcaaccaggatgaagattctggtatagagcttatgcagaagatgggcttacgagacgatggtggtatcgatctactcaagttcgtcatcaaccctagatcgttcggccagaccgtggagaacatattctacgtcagtttcttgatacgagacggtgcagtcgagatcaaattcgactcaaacgagctccctacgttacatcccacagatcctcaagaagctggcacagccaggacaaacgccgaaaggcatcaagccgtgttatccatcgacatgaagtcttggaaagacatcattaagactttcgaaatcaccgaacctatcatcgagcaccgcagagaagagaagagtcagggccctggagccagaagttggtatagctaa

SEQ ID NO: 18666 - protein, 469 aa, Muscodor strobelii
  misc_feature: SGI Peptide ID NO. 566262
  misc_feature (103)..(454): Pfam Id: PF08743 Pfam Desc: Nse4
  misc_feature (51)..(469): NCBI GI: 261353135 Blast Desc: conserved [Verticillium albo-atrum VaMs.102]
  misc_feature (28)..(469): NCBI GI: 85074859 Blast Desc: NCU00657 [Neurospora crassa OR74A] gi|28927610|gb|EAA36561.1| [Neurospora crassa OR74A]
  misc_feature (34)..(469): NCBI GI: 46128295 Blast Desc: FG08525.1 [Gibberella zeae PH-1]
  misc_feature (59)..(465): NCBI GI: 116193415 Blast Desc: CHGG_06425 [Chaetomium globosum CBS 148.51] gi|88182338|gb|EAQ89806.1| CHGG_06425 [Chaetomium globosum CBS 148.51]
  misc_feature (103)..(469): NCBI GI: 256733994 Blast Desc: NECHADRAFT_5514 [Nectria haematococca mpVI 77-13-4]
  misc_feature (52)..(468): NCBI GI: 171685049 Blast Desc: protein product [Podospora anserina] gi|170942485|emb|CAP68137.1| protein product [Podospora anserina]
  misc_feature (99)..(469): NCBI GI: 39971203 Blast Desc: MGG_03068 [Magnaporthe grisea 70-15] gi|149210795|ref|XP_001522772.1| MGCH7_ch7g870 [Magnaporthe grisea 70-15] gi|86196825|gb|EAQ71463.1| MGCH7_ch7g870 grisea
  misc_feature (57)..(469): NCBI GI: 154303782 Blast Desc: BC1G_08775 [Botryotinia fuckeliana B05.10] gi|150854359|gb|EDN29551.1| BC1G_08775 [Botryotinia fuckeliana B05.10]
  misc_feature (97)..(468): NCBI GI: 238505264 Blast Desc: nuclear protein Qri2/Nse4, [Aspergillus flavus NRRL3357] gi|220689975|gb|EED46325.1| nuclear protein Qri2/Nse4, [Aspergillus flavus NRRL3357]
  misc_feature (97)..(469): NCBI GI: 121713150 Blast Desc: nuclear protein Qri2/Nse4, [Aspergillus clavatus NRRL 1] gi|119402339|gb|EAW12760.1| nuclear protein Qri2/Nse4, [Aspergillus clavatus NRRL 1]
MSSPASFDDDESPRSSPPPMASQQSVNCNSQDDPATAHRCASRSKMLTYCSLVVRDRVPSGAAKRKRTLTNGAGPSTSRRRTRDVSIVSDNEDEDEDEDAEAYDPDQPLEERRKVQRGYRDLLRGLHERADEFNDPKSLILQETLEKANRLARHVKQTGEATVDSKLLVAAAEASYRRTARLVHGNVAQGVDVDEFVSKCISYMRRGIGIANDDAPELTATQQQRRRPGRGDADDSDEDEIGDDGDMMNWEHLGRFACLPNISRPAVPGFLLGPLSVEKKIRKVAKRSAPFRADHLRETRPEVLNAEDVQRNEKNDLTAICAKILRRLRDFQEEAQTRAEEAFNQDEDSGIELMQKMGLRDDGGIDLLKFVINPRSFGQTVENIFYVSFLIRDGAVEIKFDSNELPTLHPTDPQEAGTARTNAERHQAVLSIDMKSWKDIIKTFEITEPIIEHRREEKSQGPGARSWYS

SEQ ID NO: 18667 - DNA, 1577 bp, Muscodor strobelii
  misc_feature: SGI EST ID NO. CUFF.43819.0
  misc_feature: Variant of the nucleotide sequence at SEQ ID NO 18665
caaatccgagtctttttcccagaactgcaacagccaagatgatccggcaaccgcccaccgttgcgcatctcggtccaagatgctgacatattgcagcttggtcgtcagagatagagtccccagcggtgcggccaagaggaagaggactttgacaaatggcgcgggaccctcgacctcgagacgccgcacccgcgatgtcagcatagtatccgacaacgaggacgaggacgaagacgaagacgccgaagcatacgacccagaccagcctctcgaggaacggcgcaaagtccagcgaggctaccgagatctcctacgtggtctgcatgagcgcgccgacgagttcaacgaccccaagtccctcatcctacaagagacactagagaaggcgaaccggctggcgcggcatgtcaaacaaaccggcgaggccaccgtcgactccaaactcctggtcgctgcggcagaagcctcgtacaggagaaccgctcgtctcgttcatggcaacgtcgcgcaaggagttgatgtcgatgagtttgtctccaagtgcataagctatatgcgccgtggtatagggattgcaaacgatgacgccccagagcttacggccacacagcagcaacggaggaggcctggccgcggggatgcggatgattcggatgaagatgagatcggcgacgatggcgacatgatgaactgggaacatcttggtcgcttcgcctgtctccccaatatcagtcggccggccgttccgggcttcctcctcggacccttatcggtagagaagaagataaggaaggtggcgaagcgtagtgcgcctttcagagcagaccacctcagagaaacaaggccagaagtcttgaatgcagaagatgtccagcgaaacgaaaagaatgacctgactgctatctgcgccaagatattacgacgattacgagacttccaagaagaggcgcaaacgagggctgaagaggctttcaaccaggatgaagattctggtatagagcttatgcagaagatgggcttacgagacgatggtggtatcgatctactcaagttcgtcatcaaccctagatcgttcggccagaccgtggagaacatattctacgtcagtttcttgatacgagacggtgcagtcgagatcaaattcgactcaaacgagctccctacgttacatcccacagatcctcaagaagctggcacagccaggacaaacgccgaaaggcatcaagccgtgttatccatcgacatgaagtcttggaaagacatcattaagactttcgaaatcaccgaacctatcatcgagcaccgcagagaagagaagagtcagggccctggagccagaagttggtatagctaatccctttgcgattcgatttacgcttggagttttctgccaccgcatctctgtgtcaaagacacatggagaaaagaatacccttgtatttgagtttcgctggaaattcgccctgctttactgtaaaatagcccttgagtcacgtctatatgtggatatgagcattgctttgtggattgctgggtagcgatagaaatttcatgattgatgatgagttgcttttcgc

SEQ ID NO: 18668 - DNA, 905 bp, Muscodor strobelii
  misc_feature: SGI cDNA ID NO. 566263
  misc_feature: Elevated expression when VOC is produced
  misc_feature: Encodes the peptide sequence at SEQ ID NO 18669
atgccttccattatgaagacagcgggggccgtggcaggacttattgccgtagcttcagctctcccagctcaacccaagctgtcgacaagacaagaacatatctacaacctatcaaaacggcaaaatgccgccgcagcggccgccggtttgaccgatgttgatatcctgcaatttgccttgaccttggaatggttagaagctaccttctactcgcaaggtttccagcagttcccagacagcgacttccaggccttgggtctaaacgcccagcaactgtctgacctcaagagcatcggtacaagcgagtcggcacacgtagacctacttcagtcctcaatcgcccaggccggtgtccagcccgtgcaaccttgccagtacaacttcggcttcacggacgccgccggcatggtagccacggcttccatcctcgagaacgttggtgtatccgcatatctcggtgccgcacctctcgtctcagacggcggtatcctcagcacagcaggctcaatccttacagtcgaagcccgtcatcaatccttcatccgcgccgcatcaggtgtcgccgtatctccttcacctctcgacacacctctcggtcctaaggcagtcttctccctcgccgcaccattcatcacctcatgtcccggaggctcaaatctcatcttgaccgcattcccaagccttacgctctcgagccccgctcccgtagcaggcgttatgaacgtagcccaaggcaccacactacagctgcagagtgatgccgccagcggcgccactttctgcggtttcacaaacagtgcagcggctggcggaactgccttcactcctttcactgccgacgctggatgtgcgctgcctcctaacttggctggtgttgtctacgtcacgctctacgagcgatggcc

SEQ ID NO: 18669 - protein, 301 aa, Muscodor strobelii
  misc_feature: SGI Peptide ID NO. 566263
  misc_feature (1)..(297): NCBI GI: 171692893 Blast Desc: protein product [Podospora anserina] gi|170946395|emb|CAP73196.1| protein product [Podospora anserina]
  misc_feature (1)..(297): NCBI GI: 116199113 Blast Desc: CHGG_07712 [Chaetomium globosum CBS 148.51] gi|88178991|gb|EAQ86459.1| CHGG_07712 [Chaetomium globosum CBS 148.51]
  misc_feature (1)..(300): NCBI GI: 145612085 Blast Desc: MGG_12275 [Magnaporthe grisea 70-15] gi|145019326|gb|EDK03554.1| MGG_12275 [Magnaporthe grisea 70-15]
  misc_feature (25)..(274): NCBI GI: 261355593 Blast Desc: conserved [Verticillium albo-atrum VaMs.102]
  misc_feature (1)..(297): NCBI GI: 85103631 Blast Desc: NCU01196 [Neurospora crassa OR74A] gi|18376313|emb|CAD21425.1| related to stress response protein rds1p [Neurospora crassa] gi|28923109|gb|EAA32326.1| conserved
  misc_feature (1)..(297): NCBI GI: 256731411 Blast Desc: NECHADRAFT_48575 [Nectria haematococca mpVI 77-13-4]
  misc_feature (1)..(297): NCBI GI: 154300576 Blast Desc: BC1G_10876 [Botryotinia fuckeliana B05.10] gi|150856483|gb|EDN31675.1| BC1G_10876 [Botryotinia fuckeliana B05.10]
  misc_feature (1)..(301): NCBI GI: 156048796 Blast Desc: SS1G_09130 [Sclerotinia sclerotiorum 1980] gi|154693526|gb|EDN93264.1| SS1G_09130 [Sclerotinia sclerotiorum 1980]
  misc_feature (13)..(297): NCBI GI: 46125265 Blast Desc: FG07010.1 [Gibberella zeae PH-1]
  misc_feature (50)..(299): NCBI GI: 189189702 Blast Desc: PTRG_00857 [Pyrenophora tritici-repentis Pt-1C-BFP] gi|187972796|gb|EDU40295.1| PTRG_00857 [Pyrenophora tritici-repentis Pt-1C-BFP]
  misc_feature: Useful for introducing or modulating the production of volatile compounds
MPSIMKTAGAVAGLIAVASALPAQPKLSTRQEHIYNLSKRQNAAAAAAGLTDVDILQFALTLEWLEATFYSQGFQQFPDSDFQALGLNAQQLSDLKSIGTSESAHVDLLQSSIAQAGVQPVQPCQYNFGFTDAAGMVATASILENVGVSAYLGAAPLVSDGGILSTAGSILTVEARHQSFIRAASGVAVSPSPLDTPLGPKAVFSLAAPFITSCPGGSNLILTAFPSLTLSSPAPVAGVMNVAQGTTLQLQSDAASGATFCGFTNSAAAGGTAFTPFTADAGCALPPNLAGVVYVTLYERW

SEQ ID NO: 18670 - DNA, 1779 bp, Muscodor strobelii
  misc_feature: SGI EST ID NO. CUFF.43828.0
  misc_feature: Variant of the nucleotide sequence at SEQ ID NO 18668
cagcccctgacccccgcgacgattccccctagtcacttgcacccctcgacaattccgcttgctgtttagacatgctcatggccccttgtcaaagcacaccagccttgtcttcctttcgcagtgcctgctcgggggcgacaacagcctgctcctacggcattgggcaacggatcgcatcaagtttgtttcgttttggcgcgctatcgacaacatatcattcgctagactaaccagctccacgtgtatcgcgaagcggccactcgtgcaaatgaccacccatgttgcttccgtcccatttatcacgctattccctggatcagatctctcagatcgtatggctggaaccagatccttctactggaatgggtgcagccgacgggcagaacaaaagacgttctcctggccaggagtgccaaggagcctcaagagccaggctgtttaatgttaggggtcatccgatccacgaccggcctaccgtctttccgtgatggactggcgagtgtcccagtagtcctgctgccgagccgaaatccccttgtagagtgcggcgtggcgattggttttaatcatgtcgtgtttccctttctcgaatcgaatgctcttttctccttcatccctctactatctttcgagtgtgtgttctgtgtgtttccccttctaaaccaaagcgctggtctgcttccctgggataaacgaccttttccctcctttactttaaactacttacgatttaatacccagagcatacaggctggtcttgcttgtccattcttcaacactctttcacgtcgcctaactgtcgctattggattggtcctggacaacgttatcaggaaggaagaatacagagaacgagagacaaataaagatacatactcgacatcaatcataatcatacgaaaatgccttccattatgaagacagcgggggccgtggcaggacttattgccgtagcttcagctctcccagctcaacccaagctgtcgacaagacaagaacatatctacaacctatcaaaacggcaaaatgccgccgcagcggccgccggtttgaccgatgttgatatcctgcaatttgccttgaccttggaatggttagaagctaccttctactcgcaaggtttccagcagttcccagacagcgacttccaggccttgggtctaaacgcccagcaactgtctgacctcaagagcatcggtacaagcgagtcggcacacgtagacctacttcagtcctcaatcgcccaggccggtgtccagcccgtgcaaccttgccagtacaacttcggcttcacggacgccgccggcatggtagccacggcttccatcctcgagaacgttggtgtatccgcatatctcggtgccgcacctctcgtctcagacggcggtatcctcagcacagcaggctcaatccttacagtcgaagcccgtcatcaatccttcatccgcgccgcatcaggtgtcgccgtatctccttcacctctcgacacacctctcggtcctaaggcagtcttctccctcgccgcaccattcatcacctcatgtcccggaggctcaaatctcatcttgaccgcattcccaagccttacgctctcgagccccgctcccgtagcaggcgttatgaacgtagcccaaggcaccacactacagctgcagagtgatgccgccagcggcgccactttctgcggtttcacaaacagtgcagcggctggcggaactgccttcactcctttcactgccgacgctggatgtgcgctgcctcctaacttggctggtgttg

SEQ ID NO: 18671 - DNA, 4044 bp, Muscodor strobelii
  misc_feature: SGI cDNA ID NO. 566264
  misc_feature: Encodes the peptide sequence at SEQ ID NO 18672
atggatcagcagcagcaaccgcagcagcctcccccgaccggcggcgtccctgggccgacgggacgccgtctgcacattgctcatcgtcgtagtccgtctgaactcacacctctcatgagcatgttctccaacaaccctggcatggagcaactggctattcaacagcagatcgagttgttgcagcaacagcagcagcagatccaagccacgcaccagcagtatgtgaacatgggcatgatggcgcctggccagctgggtgccggtgcccagttcaatcctttgcagcccaacatggccaacatgtcgccgcagaatgccttccaattccccgcgcagctaccgcagcaacagaacctccaaatgggcactccaaaccagcccatgtctcaccgccgaaatcagtccgcgcttcctaacatgaacatggggcccccgcctgccccctcgtctggtgcctctggctctgcctttggccagttcgagaacccctcggccccgagtcgagagaacgcaccgagaggtggccgtggtggcggaggcgggcatcagcgaaggcattctttagccctctcagatgccaagaaggcagcagaaatagctcagcaaaagcgtactacttcgggattccagtttcccggacccggagctgaagcggccccgtctgccgacgaacccaagagcagcgttgcggatgcccctatagcacaggggtcatccactcgcggtggacggggcggtcacgggcgtagtcagagtatggccgtgcatgggcgcggaggagcgcgcggcggcgcttccgctgattcgggcgatttttctcgtcgtggaggtgccggcggtcatgctcgaacggggtctcgcaattttgagggcaactggcgcaaccaacagggtcaaaataatggccaggaccaggccgctgctcagggacaacaaagctttcagcctggccatcgttcgcgggcttccatgaaccagtccatttcgtcaatcggagcatttcaataccctagccagccacaactcatgcagatcccgggtcagctccccatgatgcaaatgtatccgggccagcagctcaaccctatgcagcttagtcagcttcaggctctccaagccgcccagatgaatggccaacaattcggtctccaggcgagtcaacatgctccccaaatgggcggccaacaaaaccaacaacagcagagaaaaacactgttcactccttatctacctcaggccactcttcctgctttactaggggatggtcagctagtatccggaattctccgtgttaataaaaagaatcgcagcgatgcatatgtagcgacttctgatggtattttagacgccgatatcttcatctgcggcagcaaggatcgcaaccgagctttggagggtgacttggttgccgtcgagcttctcgatgtggatgaagtttgggggcaaaaacgtgaaaaggaggagaaaaagaagagaaaggacatcaccgatactaggactggttctactaacggaaatgctcctacgagcacgggtaatggtgatgacaacggaggcgagggtgggctgcgccgcagaggtagtcttcggcagagacccactcagaagaagaacgacgatgttgaagtcgagggccaaagccttctccttgtcgaggaagaagaaattaacgacgagtcaaagcctttgtatgctggccacattgttgccgtcattgagcgggtcgctgggcaaatgttctcgggaactcttggtcttctacgtccaagcagtcaagctaccaaagaaaagcaggaagccgagcgagcggccagggatggtggtcgctcacacgaacaccggcaacaggataaacccaagattgtgtggtttaaacctactgacaagcgtgtaccgctgattgctatccctaccgagcaagcgcctcgcgacttcgtggaaaagcaccaggactacgctgatcgaattttcgtagcatgcatcaagaggtggcctattacctctctccaccccttcggtacgcttgttgaacagcttggcaagatgggcgatctcaaagtggagaccgatgcactattgcgtgacaacaacttcgcttctgatgagttttctgacgctgtccttcgcagcattggtttgcaagactggtctttggaaaaagaggacgcagaggccatcgatgctcgccgagatttccgccaagagaaatcctttacgctcgatcttgctggtacaggagaactaggcaacgctgtgcacgtaaagactgaggccgatggtaagattgaaatcggtattcatgtgcctgatgtaacccacttcgtcaagcccaactctctcgttgaccgtgaagcgaagaagcgcggaactgctgttcatctagtgaaccgcacttgtgccctactacctccgaagatggcttctgagctttgtactctttcccccggccaggacagacttaccgtcagcgccgtcttcaaggttaatcctcacactggtgctgtagccgaaggtgacgcttgggtcggcaagagtattgtcaggagttctgccaagctatctttgcaagatatcgacgaagcgctgtcgggcggtgccaacttcaaacatgagagcgctgagcttaaggacattcaaattctcaatgctatttcgcagaaatttcaggaagcgcgccttggctcagaaggtgaaccgaccgcaccattacgcctcctccatcagctcgacgatgagaacatccccatccagcacaatatctttgattcgactccaggcaccgaacttgtagaagaactgctccatcgggcaaatacctttgtcgcacaaaagctggctgctggacttccagaaaaggccttgttgcgacgtcagggatcgcctaacgctcgtcgcttgcaaacatttgttgagcgcatgggggctcttggttacgacatggacagcaccagcagcggcactcttcagaacagtctattcaaggtcgatgatgctgatatccgaaagggtatggagacgctgttggtcaagactatgcatcatgcgaagtattatattactgggaagacaaacaagcagctttggcctcactatgccttgaattctcccctgtacacacatttcacaagtcctacccgacgatatgccgatatcatcgtgcatcggcaattggaggctgttctatctgagggtgcagtcgagtacaatgacgacatcgaaaatctcgtcaaaactatcgattcatgcaacaccaagaaggagtctgctcagaacgctcaggagcagagcatccacatcgaatcttgccgaatcatggacaagaagcgacaagaggctaatggagacctcatcagcgaaggtatcgtgctgtgtgtgtatgagtctgccttcgatgtgttgatcccagaatggggcttcgaaaagcgagtgcattgtgaccaattgcctctcaaaaaggcagaattcagaaaagaaaagagagtactggagctctattgggagaagggcgtaccaagctccgcatacgtacctgaggatgagaggcctaaggcagccgcttcccaaagggtcacgaatgcgatggccgcagcacgtcaagctgaagaagctgagcgtgtcaagaaggagcgtgaagaagcagctcgtaagcagacggagacgggcacaatgtcaacagatgatgttgatgccctgtttgatgacgacgatgataatgtttcggatgtaactgaggctatggccggcgcatctttggccgaacgcccgactcagagtgtgcctggctcaccaactcgctctacttcggacgctgcaggcacgctgcaccgcaccaggtctgactcaaaggttcctgtcgcggaagccgtggaaacacgtctgacaaacaaggaaaaatacttgaagctgttctctctcagagaggaaggcggagattacatccaagatgtcacagagatgacgagagtacccatcattctcaagaccgatctctccaagagtcctccatgcctgacaattcgctccctcaatccctacgctctgtaa

SEQ ID NO: 18672 - protein, 1347 aa, Muscodor strobelii
  misc_feature: SGI Peptide ID NO. 566264
  misc_feature (729)..(1063): Pfam Id: PF00773 Pfam Desc: RNB domain
  misc_feature (14)..(1347): NCBI GI: 171692895 Blast Desc: protein product [Podospora anserina] gi|170946396|emb|CAP73197.1| protein product [Podospora anserina]
  misc_feature (15)..(1347): NCBI GI: 281331165 Blast Desc: [Colletotrichum higginsianum]
  misc_feature (1)..(1347): NCBI GI: 85103635 Blast Desc: NCU01197 [Neurospora crassa OR74A] gi|18376312|emb|CAD21424.1| related to SSD1 protein [Neurospora crassa] gi|28923110|gb|EAA32327.1| NCU01197 [Neurospora crassa
  misc_feature (16)..(1347): NCBI GI: 156048798 Blast Desc: SS1G_09131 [Sclerotinia sclerotiorum 1980] gi|154693527|gb|EDN93265.1| SS1G_09131 [Sclerotinia sclerotiorum 1980]
  misc_feature (266)..(1347): NCBI GI: 46125263 Blast Desc: FG07009.1 [Gibberella zeae PH-1]
  misc_feature (253)..(1347): NCBI GI: 256731412 Blast Desc: [Nectria haematococca mpVI 77-13-4]
  misc_feature (251)..(1347): NCBI GI: 145612079 Blast Desc: MGG_08084 [Magnaporthe grisea 70-15] gi|145019323|gb|EDK03551.1| MGG_08084 [Magnaporthe grisea 70-15]
  misc_feature (1)..(1347): NCBI GI: 145239647 Blast Desc: An08g03530 [Aspergillus niger] gi|134076981|emb|CAK45390.1| protein product [Aspergillus niger]
  misc_feature (1)..(1347): NCBI GI: 242768414 Blast Desc: cell wall biogenesis protein phosphatase Ssd1, [Talaromyces stipitatus ATCC 10500] gi|218724760|gb|EED24177.1| cell wall biogenesis protein phosphatase Ssd1, [Talaromyces ATCC
  misc_feature (119)..(1347): NCBI GI: 226285865 Blast Desc: conserved [Paracoccidioides brasiliensis Pb01]
MDQQQQPQQPPPTGGVPGPTGRRLHIAHRRSPSELTPLMSMFSNNPGMEQLAIQQQIELLQQQQQQIQATHQQYVNMGMMAPGQLGAGAQFNPLQPNMANMSPQNAFQFPAQLPQQQNLQMGTPNQPMSHRRNQSALPNMNMGPPPAPSSGASGSAFGQFENPSAPSRENAPRGGRGGGGGHQRRHSLALSDAKKAAEIAQQKRTTSGFQFPGPGAEAAPSADEPKSSVADAPIAQGSSTRGGRGGHGRSQSMAVHGRGGARGGASADSGDFSRRGGAGGHARTGSRNFEGNWRNQQGQNNGQDQAAAQGQQSFQPGHRSRASMNQSISSIGAFQYPSQPQLMQIPGQLPMMQMYPGQQLNPMQLSQLQALQAAQMNGQQFGLQASQHAPQMGGQQNQQQQRKTLFTPYLPQATLPALLGDGQLVSGILRVNKKNRSDAYVATSDGILDADIFICGSKDRNRALEGDLVAVELLDVDEVWGQKREKEEKKKRKDITDTRTGSTNGNAPTSTGNGDDNGGEGGLRRRGSLRQRPTQKKNDDVEVEGQSLLLVEEEEINDESKPLYAGHIVAVIERVAGQMFSGTLGLLRPSSQATKEKQEAERAARDGGRSHEHRQQDKPKIVWFKPTDKRVPLIAIPTEQAPRDFVEKHQDYADRIFVACIKRWPITSLHPFGTLVEQLGKMGDLKVETDALLRDNNFASDEFSDAVLRSIGLQDWSLEKEDAEAIDARRDFRQEKSFTLDLAGTGELGNAVHVKTEADGKIEIGIHVPDVTHFVKPNSLVDREAKKRGTAVHLVNRTCALLPPKMASELCTLSPGQDRLTVSAVFKVNPHTGAVAEGDAWVGKSIVRSSAKLSLQDIDEALSGGANFKHESAELKDIQILNAISQKFQEARLGSEGEPTAPLRLLHQLDDENIPIQHNIFDSTPGTELVEELLHRANTFVAQKLAAGLPEKALLRRQGSPNARRLQTFVERMGALGYDMDSTSSGTLQNSLFKVDDADIRKGMETLLVKTMHHAKYYITGKTNKQLWPHYALNSPLYTHFTSPTRRYADIIVHRQLEAVLSEGAVEYNDDIENLVKTIDSCNTKKESAQNAQEQSIHIESCRIMDKKRQEANGDLISEGIVLCVYESAFDVLIPEWGFEKRVHCDQLPLKKAEFRKEKRVLELYWEKGVPSSAYVPEDERPKAAASQRVTNAMAAARQAEEAERVKKEREEAARKQTETGTMSTDDVDALFDDDDDNVSDVTEAMAGASLAERPTQSVPGSPTRSTSDAAGTLHRTRSDSKVPVAEAVETRLTNKEKYLKLFSLREEGGDYIQDVTEMTRVPIILKTDLSKSPPCLTIRSLNPYAL

SEQ ID NO: 18673 - DNA, 4825 bp, Muscodor strobelii
  misc_feature: SGI EST ID NO. CUFF.43944.0
  misc_feature: Variant of the nucleotide sequence at SEQ ID NO 18671
tttccatcgccaccaccttcgtctttcctccctcttcccaactccttctccccctatctcgtccatctatctaggtaccctctcttgggtttgcttgcacactccttccttcgggatttacagcatcactcgccctaccgagacagatattcatcctctcatttaccctccttttccgtgtcgcgcaacgctgccagcactgtttacgcaatctatcatcatcgctgtcacagagtcatcacactctcattgcccactgtgcatcaacgacataccacccacatacagccatcaggagcccagccagcctttgcagcatttgcttcgtctattccgccattctagcttacatcgacttttagctatactcttttaaactcactgataatcgcttgtcgcactcagtacttggacgtgcagccagcctgacggcccaccatggatcagcagcagcaaccgcagcagcctcccccgaccggcggcgtccctgggccgacgggacgccgtctgcacattgctcatcgtcgtagtccgtctgaactcacacctctcatgagcatgttctccaacaaccctggcatggagcaactggctattcaacagcagatcgagttgttgcagcaacagcagcagcagatccaagccacgcaccagcagtatgtgaacatgggcatgatggcgcctggccagctgggtgccggtgcccagttcaatcctttgcagcccaacatggccaacatgtcgccgcagaatgccttccaattccccgcgcagctaccgcagcaacagaacctccaaatgggcactccaaaccagcccatgtctcaccgccgaaatcagtccgcgcttcctaacatgaacatggggcccccgcctgccccctcgtctggtgcctctggctctgcctttggccagttcgagaacccctcggccccgagtcgagagaacgcaccgagaggtggccgtggtggcggaggcgggcatcagcgaaggcattctttagccctctcagatgccaagaaggcagcagaaatagctcagcaaaagcgtactacttcgggattccagtttcccggacccggagctgaagcggccccgtctgccgacgaacccaagagcagcgttgcggatgcccctatagcacaggggtcatccactcgcggtggacggggcggtcacgggcgtagtcagagtatggccgtgcatgggcgcggaggagcgcgcggcggcgcttccgctgattcgggcgatttttctcgtcgtggaggtgccggcggtcatgctcgaacggggtctcgcaattttgagggcaactggcgcaaccaacagggtcaaaataatggccaggaccaggccgctgctcagggacaacaaagctttcagcctggccatcgttcgcgggcttccatgaaccagtccatttcgtcaatcggagcatttcaataccctagccagccacaactcatgcagatcccgggtcagctccccatgatgcaaatgtatccgggccagcagctcaaccctatgcagcttagtcagcttcaggctctccaagccgcccagatgaatggccaacaattcggtctccaggcgagtcaacatgctccccaaatgggcggccaacaaaaccaacaacagcagagaaaaacactgttcactccttatctacctcaggccactcttcctgctttactaggggatggtcagctagtatccggaattctccgtgttaataaaaagaatcgcagcgatgcatatgtagcgacttctgatggtattttagacgccgatatcttcatctgcggcagcaaggatcgcaaccgagctttggagggtgacttggttgccgtcgagcttctcgatgtggatgaagtttgggggcaaaaacgtgaaaaggaggagaaaaagaagagaaaggacatcaccgatactaggactggttctactaacggaaatgctcctacgagcacgggtaatggtgatgacaacggaggcgagggtgggctgcgccgcagaggtagtcttcggcagagacccactcagaagaagaacgacgatgttgaagtcgagggccaaagccttctccttgtcgaggaagaagaaattaacgacgagtcaaagcctttgtatgctggccacattgttgccgtcattgagcgggtcgctgggcaaatgttctcgggaactcttggtcttctacgtccaagcagtcaagctaccaaagaaaagcaggaagccgagcgagcggccagggatggtggtcgctcacacgaacaccggcaacaggataaacccaagattgtgtggtttaaacctactgacaagcgtgtaccgctgattgctatccctaccgagcaagcgcctcgcgacttcgtggaaaagcaccaggactacgctgatcgaattttcgtagcatgcatcaagaggtggcctattacctctctccaccccttcggtacgcttgttgaacagcttggcaagatgggcgatctcaaagtggagaccgatgcactattgcgtgacaacaacttcgcttctgatgagttttctgacgctgtccttcgcagcattggtttgcaagactggtctttggaaaaagaggacgcagaggccatcgatgctcgccgagatttccgccaagagaaatcctttacgctcgatcttgctggtacaggagaactaggcaacgctgtgcacgtaaagactgaggccgatggtaagattgaaatcggtattcatgtgcctgatgtaacccacttcgtcaagcccaactctctcgttgaccgtgaagcgaagaagcgcggaactgctgttcatctagtgaaccgcacttgtgccctactacctccgaagatggcttctgagctttgtactctttcccccggccaggacagacttaccgtcagcgccgtcttcaaggttaatcctcacactggtgctgtagccgaaggtgacgcttgggtcggcaagagtattgtcaggagttctgccaagctatctttgcaagatatcgacgaagcgctgtcgggcggtgccaacttcaaacatgagagcgctgagcttaaggacattcaaattctcaatgctatttcgcagaaatttcaggaagcgcgccttggctcagaaggtgaaccgaccgcaccattacgcctcctccatcagctcgacgatgagaacatccccatccagcacaatatctttgattcgactccaggcaccgaacttgtagaagaactgctccatcgggcaaatacctttgtcgcacaaaagctggctgctggacttccagaaaaggccttgttgcgacgtcagggatcgcctaacgctcgtcgcttgcaaacatttgttgagcgcatgggggctcttggttacgacatggacagcaccagcagcggcactcttcagaacagtctattcaaggtcgatgatgctgatatccgaaagggtatggagacgctgttggtcaagactatgcatcatgcgaagtattatattactgggaagacaaacaagcagctttggcctcactatgccttgaattctcccctgtacacacatttcacaagtcctacccgacgatatgccgatatcatcgtgcatcggcaattggaggctgttctatctgagggtgcagtcgagtacaatgacgacatcgaaaatctcgtcaaaactatcgattcatgcaacaccaagaaggagtctgctcagaacgctcaggagcagagcatccacatcgaatcttgccgaatcatggacaagaagcgacaagaggctaatggagacctcatcagcgaaggtatcgtgctgtgtgtgtatgagtctgccttcgatgtgttgatcccagaatggggcttcgaaaagcgagtgcattgtgaccaattgcctctcaaaaaggcagaattcagaaaagaaaagagagtactggagctctattgggagaagggcgtaccaagctccgcatacgtacctgaggatgagaggcctaaggcagccgcttcccaaagggtcacgaatgcgatggccgcagcacgtcaagctgaagaagctgagcgtgtcaagaaggagcgtgaagaagcagctcgtaagcagacggagacgggcacaatgtcaacagatgatgttgatgccctgtttgatgacgacgatgataatgtttcggatgtaactgaggctatggccggcgcatctttggccgaacgcccgactcagagtgtgcctggctcaccaactcgctctacttcggacgctgcaggcacgctgcaccgcaccaggtctgactcaaaggttcctgtcgcggaagccgtggaaacacgtctgacaaacaaggaaaaatacttgaagctgttctctctcagagaggaaggcggagattacatccaagatgtcacagagatgacgagagtacccatcattctcaagaccgatctctccaagagtcctccatgcctgacaattcgctccctcaatccctacgctctgtaaaaccagagttttcggagcgatggttgcttattagctgctgggctaggatgagtgggatcatgggtaatgcggtggaacgttctgcgaccgttgaaagacggacgacaagcagtgacaggcgaaatatgcgaggcatgtttctatttgaagttatccggaggagcatctcttaagtgtgcgcggatcaaaagtttcgtggggccagttagacgcaagatgtagtttgccgcgactcaagtttgcttcgagctgtttgggtcaagcaatacaaaaatggtagctccatatgcatcaatatcagctatcagatcacatcaattttaggcaaagccacaatcgccga

SEQ ID NO: 18674 - DNA, 1227 bp, Muscodor strobelii
  misc_feature: SGI cDNA ID NO. 566265
  misc_feature: Encodes the peptide sequence at SEQ ID NO 18675
atggccagttcagcacgtcatgctatcgtctacggcgcatccggcctcattggctgggcagtcgtaaacgagcttcttcgagatccaaatttctcgaaggtcaccgcaattactaatcgcgaggttaacctttcagaatctttctggcctagggcgagcagctcaaatgggactgagttgcagcttgtctctggtattaacctgcggacaggagacggctctgctctagttaattccttaagccaatccatgcaggatatcgaaagcataacacacatcttttatttagcatttacttctgtcgccgatgacattgaggaggtcgccgtcaattcttccatgttcaaagcggtcatcgatgcccacaacgcacactctccaaacttacgatttgtcgcttttccgggaggaactagaggatatggtatctacgttcccggaggctcgttcactcctccactaacagaggacatggtgaacaatctcccgcctgactacgctaagaccgtcgtttatcccgaacaccgcaagctcctaaatgcggcatgtcaaggaaaagagtggacttggtgcgaggtgtgcccagatgcagttgtcgggtttactccgaatggctcccagttctcgctagcattgcattgggctcaatatctatctctatatgcccacaatcatcccgatgagaatgagaagaccacgagagtaccgttcccaggaaacgcagctggcgcgaactcgctattttcgccggtcgccgcgaagactattgcgcggttcatgatctacgcctcactaaatccagaccgttgcggtagcggccagttattcaacattgctgacaacgaaaagccatgcacgtatggcgagatctggactcaactcgctgcgtggttcggacttgttggtgtcagcccaactgaagacgcgcagtctgaagagaaagctctgaaagtcggcgagcttcctaggaataactcgatgatgacacccggagattatgttgccaagcataaagatgcgttcgctcagaacggacgtccaaatgctgtgacaggtggtgttggtgccggtagcaagcagctggacagtgttgggtattggctgacttttgatcgacaaatgagccttgagaagattaaaaagacgggcttcaaggtagacatcgatcctattcagggatggctggatacctttgagctctttagaaaggcgggcttgatattctag

SEQ ID NO: 18675 - protein, 408 aa, Muscodor strobelii
  misc_feature: SGI Peptide ID NO. 566265
  misc_feature (1)..(408): NCBI GI: 164427367 Blast Desc: NCU03376 [Neurospora crassa OR74A] gi|157071713|gb|EAA27075.2| conserved [Neurospora crassa OR74A]
  misc_feature (1)..(408): NCBI GI: 28881153 Blast Desc: conserved [Neurospora crassa]
  misc_feature (7)..(408): NCBI GI: 145240897 Blast Desc: An08g09860 [Aspergillus niger] gi|134077619|emb|CAK96763.1| protein product [Aspergillus niger]
  misc_feature (7)..(407): NCBI GI: 261354139 Blast Desc: conserved [Verticillium albo-atrum VaMs.102]
  misc_feature (1)..(408): NCBI GI: 256723800 Blast Desc: NECHADRAFT_78366 [Nectria haematococca mpVI 77-13-4]
  misc_feature (1)..(408): NCBI GI: 46111881 Blast Desc: FG02822.1 [Gibberella zeae PH-1]
  misc_feature (2)..(407): NCBI GI: 169613380 Blast Desc: SNOG_09821 [Phaeosphaeria nodorum SN15] gi|111061966|gb|EAT83086.1| SNOG_09821 [Phaeosphaeria nodorum SN15]
  misc_feature (1)..(408): NCBI GI: 119487635 Blast Desc: NFIA_030850 [Neosartorya fischeri NRRL 181] gi|119410706|gb|EAW20652.1| conserved [Neosartorya fischeri NRRL 181]
  misc_feature (2)..(314): NCBI GI: 154312531 Blast Desc: BC1G_05868 [Botryotinia fuckeliana B05.10] gi|150849969|gb|EDN25162.1| BC1G_05868 [Botryotinia fuckeliana B05.10]
  misc_feature (3)..(408): NCBI GI: 145241980 Blast Desc: An09g03200 [Aspergillus niger] gi|134078179|emb|CAK40259.1| protein product [Aspergillus niger]
MASSARHAIVYGASGLIGWAVVNELLRDPNFSKVTAITNREVNLSESFWPRASSSNGTELQLVSGINLRTGDGSALVNSLSQSMQDIESITHIFYLAFTSVADDIEEVAVNSSMFKAVIDAHNAHSPNLRFVAFPGGTRGYGIYVPGGSFTPPLTEDMVNNLPPDYAKTVVYPEHRKLLNAACQGKEWTWCEVCPDAVVGFTPNGSQFSLALHWAQYLSLYAHNHPDENEKTTRVPFPGNAAGANSLFSPVAAKTIARFMIYASLNPDRCGSGQLFNIADNEKPCTYGEIWTQLAAWFGLVGVSPTEDAQSEEKALKVGELPRNNSMMTPGDYVAKHKDAFAQNGRPNAVTGGVGAGSKQLDSVGYWLTFDRQMSLEKIKKTGFKVDIDPIQGWLDTFELFRKAGLIF

SEQ ID NO: 18676 - DNA, 1995 bp, Muscodor strobelii
  misc_feature: SGI EST ID NO. CUFF.43854.1
  misc_feature: Variant of the nucleotide sequence at SEQ ID NO 18674
tagttcccaacctagttatacgacaagtacgattaacagtaatctttctggcctagggcgagcagctcaaatgggactgagttgcagcttgtctctggtattaacctgcggacaggagacggctctgctctagttaattccttaagccaatccatgcaggatatcgaaagcataacacacatcttttatttagcatttacttctgtcgccgatgacattgaggaggtcgccgtcaattcttccatgttcaaagcggtcatcgatgcccacaacgcacactctccaaacttacgatttgtcgcttttccgggaggaactagaggatatggtatctacgttcccggaggctcgttcactcctccactaacagaggacatggtgaacaatctcccgcctgactacgctaagaccgtcgtttatcccgaacaccgcaagctcctaaatgcggcatgtcaaggaaaagagtggacttggtgcgaggtgtgcccagatgcagttgtcgggtttactccgaatggctcccagttctcgctagcattgcattgggctcaatatctatctctatatgcccacaatcatcccgatgagaatgagaagaccacgagagtaccgttcccaggaaacgcagctggcgcgaactcgctattttcgccggtcgccgcgaagactattgcgcggttcatgatctacgcctcactaaatccagaccgttgcggtagcggccagttattcaacattgctgacaacgaaaagccatgcacgtatggcgagatctggactcaactcgctgcgtggttcggacttgttggtgtcagcccaactgaagacgcgcagtctgaagagaaagctctgaaagtcggcgagcttcctaggaataactcgatgatgacacccggagattatgttgccaagcataaagatgcgttcgctcagaacggacgtccaaatgctgtgacaggtggtgttggtgccggtagcaagcagctggacagtgttgggtattggctgacttttgatcgacaaatgagccttgagaagattaaaaagacgggcttcaaggtagacatcgatcctattcagggatggctggatacctttgagctctttagaaaggcgggcttgatattctagaatgcgcctatgattcgcacttatttcgaagtcgatagagtagaactcgttcgtagagagtaaataaaattgaggtgcttgaatgcaactcaatcaaagccatatctccgtcattcctacctttattgatctgcttcctcttcttctagtctctctaaatgggtcatgaagtccttcctagctttttcgaaccgagcatcaacctcgttccagatcggcttcgggaacttgatgccaaagacccaatcagcacacacatgcataacaaaaccctttgccgtgtccaccgtagctagtcccagcatgttctcgtactgatcccatttctcttgagacgtttcaaaagtcatgttcgtgaacatagcgccctcaccctcgaggtcagcctttccttctggtcctagcggcatcttcattgtaacgtctgcaatgagaaaccccgtccaactgcgatggaagtgaacggcgaactctccatcaccattgggcccgtcggcatacacgaagtatctatcgtccattgacgagcccttaaagcctaccacaaggatagaagctgcgccctcgggtaaagggactacccatggtactgtgcgaggtttctcgaaagatagtagtcttcgatgatccgatgcttgaacgcgctcgtgtggtatgttgcctggccaattgcgtgccggcgtccagttctccattatcgacaaaccaccacataagtattttaaatggaatacgcgctaagctgctgattagcttggactgcgtgacgccgcgagtcactttacattgagtgtcgtttacaagagagtgatgtcgcacgctaggcaaggtgtctcccgcaagtaggatccaagatgctacgag

SEQ ID NO: 18677 - DNA, 573 bp, Muscodor strobelii
  misc_feature: SGI cDNA ID NO. 566266
  misc_feature: Encodes the peptide sequence at SEQ ID NO 18678
atggagaactggacgccggcacgcaattggccaggcaacataccacacgagcgcgttcaagcatcggatcatcgaagactactatctttcgagaaacctcgcacagtaccatgggtagtccctttacccgagggcgcagcttctatccttgtggtaggctttaagggctcgtcaatggacgatagatacttcgtgtatgccgacgggcccaatggtgatggagagttcgccgttcacttccatcgcagttggacggggtttctcattgcagacgttacaatgaagatgccgctaggaccagaaggaaaggctgacctcgagggtgagggcgctatgttcacgaacatgacttttgaaacgtctcaagagaaatgggatcagtacgagaacatgctgggactagctacggtggacacggcaaagggttttgttatgcatgtgtgtgctgattgggtctttggcatcaagttcccgaagccgatctggaacgaggttgatgctcggttcgaaaaagctaggaaggacttcatgacccatttagagagactagaagaagaggaagcagatcaataa

SEQ ID NO: 18678 - protein, 190 aa, Muscodor strobelii
  misc_feature: SGI Peptide ID NO. 566266
  misc_feature (15)..(144): NCBI GI: 256724149 Blast Desc: NECHADRAFT_86413 [Nectria haematococca mpVI 77-13-4]
  misc_feature (32)..(108): NCBI GI: 189209265 Blast Desc: conserved [Pyrenophora tritici-repentis Pt-1C-BFP] gi|187977058|gb|EDU43684.1| conserved [Pyrenophora tritici-repentis Pt-1C-BFP]
  misc_feature (34)..(154): NCBI GI: 169595400 Blast Desc: SNOG_00437 [Phaeosphaeria nodorum SN15] gi|160701089|gb|EAT91932.2| SNOG_00437 [Phaeosphaeria nodorum SN15]
  misc_feature (6)..(122): NCBI GI: 261354638 Blast Desc: [Verticillium albo-atrum VaMs.102]
MENWTPARNWPGNIPHERVQASDHRRLLSFEKPRTVPWVVPLPEGAASILVVGFKGSSMDDRYFVYADGPNGDGEFAVHFHRSWTGFLIADVTMKMPLGPEGKADLEGEGAMFTNMTFETSQEKWDQYENMLGLATVDTAKGFVMHVCADWVFGIKFPKPIWNEVDARFEKARKDFMTHLERLEEEEADQ

SEQ ID NO: 18679 - DNA, 463 bp, Muscodor strobelii
  misc_feature: SGI cDNA ID NO. 566267
  misc_feature: Reduced expression when VOC is produced
  misc_feature: Encodes the peptide sequence at SEQ ID NO 18680
atgcccatcacgatattaccaccggcgcccccgccgcgcttcaatccgcaacacaacgccagctacggcgcagactccgactcggactcagacggcggcgtagacatagaaggcgatgtgtcaatgggcagatcatccaagacccacgcagaggacaccatagtcaccccaggcgaagtcataaccgaagactcccaatggatgcgcggccacggaacatacacaaccctcgagccccccgcgataatatcctctgtagccggcaccctagccaagaccaacaagctgctctccgtccggcccctgcgcgcccgctacaccccagagatcggcgacctagtagtaggccgcatagtcgaagtccaagcccgccgctggcgcgtcgacgtcggcgccgccctcctcgcccagctgcccctctccgccatcaacctgcccggcggcatccagcgccgccgcaccg

SEQ ID NO: 18680 - protein, 154 aa, Muscodor strobelii
  misc_feature: SGI Peptide ID NO. 566267
  misc_feature (1)..(154): NCBI GI: 156043601 Blast Desc: SS1G_10804 [Sclerotinia sclerotiorum 1980] gi|154695191|gb|EDN94929.1| SS1G_10804 [Sclerotinia sclerotiorum 1980]
  misc_feature (1)..(154): NCBI GI: 154316807 Blast Desc: BC1G_03821 [Botryotinia fuckeliana B05.10] gi|150845433|gb|EDN20626.1| BC1G_03821 [Botryotinia fuckeliana B05.10]
  misc_feature (1)..(154): NCBI GI: 145245527 Blast Desc: An11g10740 [Aspergillus niger] gi|134079734|emb|CAK40872.1| protein product [Aspergillus niger]
  misc_feature (1)..(154): NCBI GI: 238845799 Blast Desc: exosome complex exonuclease RRP4 [Microsporum canis CBS 113480]
  misc_feature (1)..(154): NCBI GI: 116201531 Blast Desc: CHGG_08650 [Chaetomium globosum CBS 148.51] gi|88177168|gb|EAQ84636.1| CHGG_08650 [Chaetomium globosum CBS 148.51]
  misc_feature (1)..(154): NCBI GI: 119493346 Blast Desc: exosome complex exonuclease Rrp4, [Neosartorya fischeri NRRL 181] gi|119412023|gb|EAW21966.1| exosome complex exonuclease Rrp4, [Neosartorya fischeri NRRL 181]
  misc_feature (1)..(154): NCBI GI: 238506042 Blast Desc: exosome complex exonuclease Rrp4, [Aspergillus flavus NRRL3357] gi|220690337|gb|EED46687.1| exosome complex exonuclease Rrp4, [Aspergillus flavus NRRL3357]
  misc_feature (1)..(154): NCBI GI: 169779940 Blast Desc: [Aspergillus oryzae RIB40] gi|83773174|dbj|BAE63301.1| protein product [Aspergillus oryzae]
  misc_feature (1)..(154): NCBI GI: 115402927 Blast Desc: conserved [Aspergillus terreus NIH2624] gi|114189386|gb|EAU31086.1| conserved [Aspergillus terreus NIH2624]
  misc_feature (1)..(154): NCBI GI: 46136891 Blast Desc: FG09961.1 [Gibberella zeae PH-1]
  misc_feature: Useful for introducing or modulating the production of volatile compounds
MPITILPPAPPPRFNPQHNASYGADSDSDSDGGVDIEGDVSMGRSSKTHAEDTIVTPGEVITEDSQWMRGHGTYTTLEPPAIISSVAGTLAKTNKLLSVRPLRARYTPEIGDLVVGRIVEVQARRWRVDVGAALLAQLPLSAINLPGGIQRRRT

SEQ ID NO: 18681 - DNA, 591 bp, Muscodor strobelii
  misc_feature: SGI EST ID NO. CUFF.43879.1
  misc_feature: Variant of the nucleotide sequence at SEQ ID NO 18679
cggagatctaacaaaatacctggtgtcacagttctgccacagatacacaacgtcacgaactgccattggccttaggatacattgagataccgtttctttctccactctcacaacacatcctcctcgacaatgcccatcacgatattaccaccggcgcccccgccgcgcttcaatccgcaacacaacgccagctacggcgcagactccgactcggactcagacggcggcgtagacatagaaggcgatgtgtcaatgggcagatcatccaagacccacgcagaggacaccatagtcaccccaggcgaagtcataaccgaagactcccaatggatgcgcggccacggaacatacacaaccctcgagccccccgcgataatatcctctgtagccggcaccctagccaagaccaacaagctgctctccgtccggcccctgcgcgcccgctacaccccagagatcggcgacctagtagtaggccgcatagtcgaagtccaagcccgccgctggcgcgtcgacgtcggcgccgccctcctcgcccagctgcccctctccgccatcaacctgcccggcggcatccagcgccgccgcacc

SEQ ID NO: 18682 - DNA, 1521 bp, Muscodor strobelii
  misc_feature: SGI cDNA ID NO. 566268
  misc_feature: Encodes the peptide sequence at SEQ ID NO 18683
atggacgaagacagctccaccttcgtcaaccgcgacgacccaatcccaaccgtaaccctcgacacatcgtcaccacgccccaaaacacccctctccatatcctcctcttcgcacatgcgcaacgagagccatgactcctcccaatccgacaccgacacgccgtcgcgacgcagtggcttccgcgacagattcaccgccttccgagagaaagcccgcatccaagaccacctcgtcgagaagctactagcacaagtaatacccccagacaccatggacatcccacccgacgaacctctacccggccgtgcccaaaaaccaaacttcaacctccccacaatgtccaacaacttccggcgcttcaacgcacgcataggcgtagtattcgtctttcaatcacgcgttctgaagctactctcctggcggcggccaacccatacactatccttcctagcagtctacacattcatctgtctcgacccgtctctcctccctctcctccctctcgtcgtcctactagtcagcgtgttggtccccagtttcgtggcgagacacccagcagcggagtttagtctcgatagcgaacaggcgctagcgtactcttcatacgcgttgtctacgaggggcccaccgatcgcgcccgcgcctacggtgaagccggttaaggagctcagtagggatttcttcaggaatatgcgggatctgcagaattgcatggaggattttagccagttgcatgatctggttgtgaagttggtggtgcccaggacgaacttcagtgatgaggcgctgagtagcgcgttgttcgttgcgctttttgcggctgcggggttgttgagcattgctgctaatgccctgccctggagggctatcttcttgacggctggatgggcggtcgtggttagtggtcatccgctcgtgcagagacagattgagacggcccataagaaatatggacagagtaaggaggcagaagctgcgacttgggttgagcagtgggtcgagagtgatgttattcttgacagcgcgccagagacgagggaagtggagatttttgagttgcagaagttgtccggggcgggcgagtgggaaccttgggtgttttcggttagcccttatgatccccttagtcaggcgaggattgcgggtgatagaccgatgggcacgaggttctttgaggatgtgatgccgccccagggttgggagtggagcgagaagaagtgggcgctggatctttggagtcgcgagtgggtggaggaacgcattattacgggcgttgagattgagaccgagggagagaggtgggtttatgatatgttcgacgaggcggccgataagattggtgttattgaggggtcggtgctggggaataagagtagcgagagtgtgagtgctaggtcgacgatgaggccgagttgggaggagggtgaggatggggatggaagacggggggattggaggaggagaaggtgggtgaggttagttaagagacggcttgttagtcgggatgctgttgcgtcgtga

SEQ ID NO: 18683 - protein, 506 aa, Muscodor strobelii
  misc_feature: SGI Peptide ID NO. 566268
  misc_feature (106)..(492): Pfam Id: PF06398 Pfam Desc: Integral peroxisomal membrane peroxin
  misc_feature (218)..(436): Pfam Id: PF06398 Pfam Desc: Integral peroxisomal membrane peroxin
  misc_feature (106)..(185): Pfam Id: PF06398 Pfam Desc: Integral peroxisomal membrane peroxin
  misc_feature (49)..(499): NCBI GI: 46137161 Blast Desc: FG10096.1 [Gibberella zeae PH-1]
  misc_feature (33)..(478): NCBI GI: 256732188 Blast Desc: [Nectria haematococca mpVI 77-13-4]
  misc_feature (47)..(484): NCBI GI: 170674502 Blast Desc: peroxisomal Pex24-like protein [Epichloe festucae]
  misc_feature (1)..(480): NCBI GI: 156065731 Blast Desc: SS1G_00876 [Sclerotinia sclerotiorum 1980] gi|154691735|gb|EDN91473.1| SS1G_00876 [Sclerotinia sclerotiorum 1980]
  misc_feature (1)..(480): NCBI GI: 154304857 Blast Desc: BC1G_09014 [Botryotinia fuckeliana B05.10] gi|150853876|gb|EDN29068.1| BC1G_09014 [Botryotinia fuckeliana B05.10]
  misc_feature (41)..(478): NCBI GI: 171691763 Blast Desc: protein product [Podospora anserina] gi|170945830|emb|CAP72630.1| protein product [Podospora anserina]
  misc_feature (80)..(478): NCBI GI: 164424771 Blast Desc: NCU06637 [Neurospora crassa OR74A] gi|157070653|gb|EAA31634.2| conserved [Neurospora crassa OR74A]
  misc_feature (55)..(441): NCBI GI: 116179882 Blast Desc: CHGG_00569 [Chaetomium globosum CBS 148.51] gi|88184866|gb|EAQ92334.1| CHGG_00569 [Chaetomium globosum CBS 148.51]
  misc_feature (27)..(481): NCBI GI: 39974189 Blast Desc: MGG_00759 [Magnaporthe grisea 70-15] gi|145018309|gb|EDK02588.1| MGG_00759 [Magnaporthe grisea 70-15]
  misc_feature (3)..(447): NCBI GI: 225559250 Blast Desc: peroxin 24 [Ajellomyces capsulatus G186AR]
MDEDSSTFVNRDDPIPTVTLDTSSPRPKTPLSISSSSHMRNESHDSSQSDTDTPSRRSGFRDRFTAFREKARIQDHLVEKLLAQVIPPDTMDIPPDEPLPGRAQKPNFNLPTMSNNFRRFNARIGVVFVFQSRVLKLLSWRRPTHTLSFLAVYTFICLDPSLLPLLPLVVLLVSVLVPSFVARHPAAEFSLDSEQALAYSSYALSTRGPPIAPAPTVKPVKELSRDFFRNMRDLQNCMEDFSQLHDLVVKLVVPRTNFSDEALSSALFVALFAAAGLLSIAANALPWRAIFLTAGWAVVVSGHPLVQRQIETAHKKYGQSKEAEAATWVEQWVESDVILDSAPETREVEIFELQKLSGAGEWEPWVFSVSPYDPLSQARIAGDRPMGTRFFEDVMPPQGWEWSEKKWALDLWSREWVEERIITGVEIETEGERWVYDMFDEAADKIGVIEGSVLGNKSSESVSARSTMRPSWEEGEDGDGRRGDWRRRRWVRLVKRRLVSRDAVAS

SEQ ID NO: 18684 - DNA, 2033 bp, Muscodor strobelii
  misc_feature: SGI EST ID NO. CUFF.43857.0
  misc_feature: Variant of the nucleotide sequence at SEQ ID NO 18682
ctagaacccctctaaaatggtgcatccctgcccagcccgctttccccaacgtcgcgggcgaggcgggtcggtcgctttggcatgtgatgccgtcagaacgccttgcattcatacctctgatattctcatttgcattgatatccatctatgacattgaccatctctaggcactgtacgatgagcgcatcggaatctgtcacagttattgcatcaacatgaagtgatttggcagcacagcatagcgtctccctctcgtgacattcagaaggccggtagacgtcatcgcgaacaccaatttctcataattgctgcctcggcagcccacgtcgcaaaatacagcgaaaacaccacgaacatcaccatcacacattcgcgaacctgcatcatagaaccgctgccaagatggacgaagacagctccaccttcgtcaaccgcgacgacccaatcccaaccgtaaccctcgacacatcgtcaccacgccccaaaacacccctctccatatcctcctcttcgcacatgcgcaacgagagccatgactcctcccaatccgacaccgacacgccgtcgcgacgcagtggcttccgcgacagattcaccgccttccgagagaaagcccgcatccaagaccacctcgtcgagaagctactagcacaagtaatacccccagacaccatggacatcccacccgacgaacctctacccggccgtgcccaaaaaccaaacttcaacctccccacaatgtccaacaacttccggcgcttcaacgcacgcataggcgtagtattcgtctttcaatcacgcgttctgaagctactctcctggcggcggccaacccatacactatccttcctagcagtctacacattcatctgtctcgacccgtctctcctccctctcctccctctcgtcgtcctactagtcagcgtgttggtccccagtttcgtggcgagacacccagcagcggagtttagtctcgatagcgaacaggcgctagcgtactcttcatacgcgttgtctacgaggggcccaccgatcgcgcccgcgcctacggtgaagccggttaaggagctcagtagggatttcttcaggaatatgcgggatctgcagaattgcatggaggattttagccagttgcatgatctggttgtgaagttggtggtgcccaggacgaacttcagtgatgaggcgctgagtagcgcgttgttcgttgcgctttttgcggctgcggggttgttgagcattgctgctaatgccctgccctggagggctatcttcttgacggctggatgggcggtcgtggttagtggtcatccgctcgtgcagagacagattgagacggcccataagaaatatggacagagtaaggaggcagaagctgcgacttgggttgagcagtgggtcgagagtgatgttattcttgacagcgcgccagagacgagggaagtggagatttttgagttgcagaagttgtccggggcgggcgagtgggaaccttgggtgttttcggttagcccttatgatccccttagtcaggcgaggattgcgggtgatagaccgatgggcacgaggttctttgaggatgtgatgccgccccagggttgggagtggagcgagaagaagtgggcgctggatctttggagtcgcgagtgggtggaggaacgcattattacgggcgttgagattgagaccgagggagagaggtgggtttatgatatgttcgacgaggcggccgataagattggtgttattgaggggtcggtgctggggaataagagtagcgagagtgtgagtgctaggtcgacgatgaggccgagttgggaggagggtgaggatggggatggaagacggggggattggaggaggagaaggtgggtgaggttagttaagagacggcttgttagtcgggatgctgttgcgtcgtgattttgaaatgtgtcgtcagggcgatggtggaggagactgttattgataccaatgaatacgatacgttaataactgatctgtgttctatgaactacatacgtgtggactgt

SEQ ID NO: 18685 - DNA, 6258 bp, Muscodor strobelii
  misc_feature: SGI cDNA ID NO. 566269
  misc_feature: Encodes the peptide sequence at SEQ ID NO 18686
atggcgggcttcttccagtccttcgggacgtcgagcatggcaaagcggctggttcgatatgtgttgacaaggattgattacttcgagacagaggccctggagctggacaagatgaatgtggcctggggcgaaacctcaactctcacctggaccgatgtcgggctcaagatcgagaagctcgataaattgctacaacttcccccgtccatccagatagtaaaagcaaaggtcctcgtgctgcgcctgaaattccctgtcgacttctattcgagtcccatcttcgtcgaggctgatggcgtcgacgtcaaacttcgggtcgtcccgccggaggaactgagagcagctcggaaaggagcaaacaagcacaagggaaacagaacagcgtccgaacgagcaaatgacgagtctatcccccataccagcgacttggttcagtccttcctggagacgcaacctcgcaaagagaaggaagagcttcaagctgcgctcgacgccgagacacatgatcttgcagcttcggtcactagctctgaagaggggagtgaagatgattatcctctcggcacaggacagcccttatcgctgccaggtttcttgaccaacttcacggacgggttggtagaccggttgcagggtgcgattaaggggataacttgtcacttggatgtcgaggttcccatcgaacctaactcgcccaccaccgaagtcgtcacctttcagcttgcgatcgatgaactcgacgttgagggtgtcacgacggtgaaactacgagatgacagctcaggacaaccgccccagagtgttcacaagccagggaagaaatactttgagttgcgtgatgttcgagcatgcttgatatccgaggccaatttcttctcggcactttcgaggtcgccatccatgccgtcctcagccggcgcaagctcccccgtggcgacgagcagacagccgctctctcgagaacccactgtcatgccaccctcatttcgtcaatttggaggaaacttggctgattctggtgaacttagtgagagccagtatcagcctctcatggacagcgaagatgccttcaacatcccttatgatttgagcagctccaacagtgaccctgaggaaaatgacgaactacggtctaacccatcaaccccacgggccggtacccccagagcggcagagcgagcgattctaagagaggatcctgcgttgtctgctttggcacctgaaagagatccttgggccgacccattacaaccaacggctagatccgaaccaaccctcgagcgtctggggcaatggactggtggtgctcttgaatcgtctcaggtgtctttgggaagtaacgacggcctcccacagccgttagacggtagcccatccccctcgagcagtcaagaccttgctcaatcacatcttttcagccacgaggaagcagaaagcatgtacatgagtgctttctcgcacgcgacatcgtctcagatgccgcaacctatgcctggcgcgtgggacacggaacctttagtccccaggagccctacaagccagacgaatcagcatcccccacaaaaccaggatgccatcgagcccctgactgccgatatggaagagtcacttgtaatacggcagccatcaccaacggagcccagaccactcatagacaatctgcaagaggccatatattcgccagacagtgaacacagccagtcccctgaaacaagcaacgtccatgtgccattacttgcggaagatgctttggcagacgagaccgctgcggaagaggccgccacgccgaaagggccaacaagattagccaaggagctcatcacttcgaaagcttttcgcctgtggattcccctcaaagccgaggataagtctggtgtagtaacggttgatccacgcacgacatcccaaagatccttacatcgttctgtcgctcctaatatacccggagccttttcggttcatgcggatgctcagtctacgatttctgctatggaacactcagttcaacctctccacgaaacacaaatccctaaggaacccgttgaccgctctatagaggtcgttctatcgccgttggagataaattttgacttgccgattgctttcctactgagtactgttctctcacggatcctcggcgccttgagcgaacctactagccaatctaaacccagttctaccactactaccactacgaacacgtctacctctacatcttcatccccgcctctcgttttcaagctgatagctgaaaagatctccttacattttctcgaaaatcttgttggagtggccgacactcccgaacggatactcggatcgcggctgccagcgttcgacagcgatgcactactcaccactaccatacaaaacttgactgtcaatctctccaaatcccagtcatctaccaccacatcggtagacatagggaagttcaacttcggttatgccaatgatgatatcgtatcgttcgatcaacgcatacaaatgcgatcctcgatcagggatgccttcccttcgtctggctcagatgtctccctcgctatcacccagacacctgactcgactagatgcgaggtgaaaacattacccttacacgtaaaactagatctacccagacttgacgagacatttacgtggttcggaggtttgagcagttttctcagcttgaattcgtccatggtttcgaatagtccggcaccccttcaaagttcaatcaaatcgccgcggaaagctagaggcgtcaaatttgatgctccaattcgtcctgatgacatctctgcgcatgcggaaaataaagtcaacatgagaattggaggatttcgcttggacttgattgggaaggagtgcagcattgctttggacacaagcgccgtgaaactagtgaaccgcgacgaaggacttggagtcggcatatcaaagatccagcttgttggaccttatgtcaggaactccggagcagaccctccaatcaatgccatcatcaccaacacgcgtatcgagttttccagcggaccaaaaaatgctgacttggaacgacttttggaactcatcactccatctaagcacaagttcgaccaatctgatgatgaaattatggtcgacactctcctgcgacagaggaggaaaggatctgtgttgcgcgtttacttcgatgatgtcgaaatcaatgtcaaccaggtacagcagctgcaggtactatcaagcttgggcgaagactttgcgcgtctatcgactatgaccaagtatttgccagaggatgatcggccaggtcttcttactttggcacttatccgtaacatcaacgtttctgccagcatcgacaggaagattggcgtagtcagagcttcgttgaaagatttagaggttggccacatcacgatgccgtcattggtcgcattgggtcttgggtcagtctcgatagggcgcaatcacaacgagcaattagtgtctacagttattcctatctccgataaaatcggacagggccctgtactaactatgagaatgatcggagatgagatggatcctgttgtcaaactgagaatgcgacacctggacatcgaatatagggtgccgactattatggatttgctggaccttggagaagatactacgcctcaggaattcgaggcttctctggctgcttcaattgctaacctgggagaccatgctcatacggcgatgaagcaaaatatcaccacgactgttccagagaagaaggaggcgaagcctaccagagttgacatcgtctttcgcgattgccttctcgggctcaatcccctagggttgacgtcgaagatggccatcgtattgagcgatgctcgactggagatagcactccccaagggcgacgatatcaatgcattggcacatttcaacaagacatcaatacttctcattgatgacgtctctgtgctcgattctaaaggtccttcggcatctaagcgacgaccttcaaatacggctacaccacaaatcatcgagctctgccaacaaggatatgtcgacatctgttacatgtcttcggctaaggtcaccgtccaagtcggcgctaatgaagacgatgggagcaagtgggttgatgtcgagtttcgagatgatcttcttgtccttgagacttgcgcggactccacacagactctgatcgcactcgctaatgcccttgctccaccaacgccaccgaaaagagagatcaagtacaggaccaaagtcattccgatgcaagatatgctttcatctatttctgcggatgcttttgggcaagcagaaggagcctataacatagaggacgatttccttgaccaagttctggagtccgaagattcctttgactcagaaggttccgattcgagtcctctgggttatgattctcaatttttcgaaccatctgctgaatcacagttaatcgatccagcggattcaattctgtcagaacacaccacagggcaagaaacaaatgatggcgtgcttttaacgaatttcaacagccagccggaagatcctgacgatgattctgagttagatatacaggataattatttcacgtctgatcctgttgcagagggaacagctcatcgctggaattcgaccaagaacacttatgaccagtccaaccccaagctttcgaaaagtcctcttaaagtccgtgttcgtgatgtccatttcatatggaatctcttcgacggctatgattggaaccatacgcgagatgtcatatcgaaagcagtgtacaatatcgaaacaacggccaacgagcgccagtcccggcaagatcgtgctcgtgctggaactgacatggagatcgtggaggaggagactgtcattggcgacttccttttcaactctatttacatagggatacctgcgaatcgagatccgacagagctcgcgcatgccatcaatcaggacttgaatgacaatgcgactgagacagagtcgatcgcgacaacggcaaccgtcatgacgcacaaccgccagcacagtcggcaaggcagtacgtatcgtggcggtaagagactacgtctgaatcgcagcaagcgtcacaaaatcacatttgaactcaggggcattaatgttgatcttgtcactttcccgcctggctctggcgagacacaaagcgcaatcgatgttcgtgtgaaggatctagaagtattcgaccacgttccgacttcaacatggaagaaatttgccacgtacaaccaggacgcaggggaacgcgaaatgggcgccagtatggctcatcttgaaatcctcaatgtgaaaccacaacctgatcttgctgcgtctgagattgtcctcaaagtaagtgtgcttccacttcggttgcatgttgaccaagatgctctcgacttcatcactcgattcttcgaattcaaagacgataccaagcctgtccacacttcgccaagcgacatacccttcatacagagagccgaaattatggacattcctgtcacccttgacttcaagccaaaacgcgtagactacgctggattgcgctctggacacactacagaattcatgaacttcgtggtattggatgagtctcgtatggtgttacgccgtactattgtttatggagcatctggattcgatagactcggtaagaccttgaacgatatatggatgcccgatgtcaagaggaaccagcttcctggtgtgctggcgggtctcgcacctgtccgctcactagtcaacgtcggtagcggattcaaagatttgattgaaattcccatcaaagagtacaagaaagacggaaggatcgttcgaagcattgggaaaggcgcagcagcatttgtcaagtcgactggtacagagcttgtgaagttgggtgctaagatggctgtcggtacgcagtatgccttgcaaggtgcggaaggaatgctagttcagcagcctacttctcatgaagccggtggctgggaggatgaagacatggattctgaagagcagaagcagatcagtctctatgccaaccaacctactggtgtcgtccaaggcttgagaggagcctactcgagtctcgctcgcgatctcaatgcagccagagatgctatcatcgctgtacctgctgaaataatggagagtgagaacgcacagggtgctgccaaagctgtcctcaaacgagcaccaacgattatttttagaccgcttattgggtccagcaaggccatcggacagactctcatgggcgccacgaattccctggatccccataaccaacgacgcgttaatgagaaatataagagaggttaa

SEQ ID NO: 18686 - protein, 2085 aa, Muscodor strobelii
  misc_feature: SGI Peptide ID NO. 566269
  misc_feature (1986)..(2083): Pfam Id: PF09333 Pfam Desc: ATG C terminal domain
  misc_feature (1)..(2077): NCBI GI: 171694377 Blast Desc: protein product [Podospora anserina] gi|170947137|emb|CAP73942.1| protein product [Podospora anserina]
  misc_feature (1)..(2080): NCBI GI: 46137535 Blast Desc: FG10283.1 [Gibberella zeae PH-1]
  misc_feature (13)..(2084): NCBI GI: 116197721 Blast Desc: CHGG_07016 [Chaetomium globosum CBS 148.51] gi|121781938|sp|Q2GYD8.1|ATG2_CHAGB RecName: Full=Autophagy-related protein 2 gi|88178295|gb|EAQ85763.1| CBS
  misc_feature (13)..(2083): NCBI GI: 256732220 Blast Desc: NECHADRAFT_80599 [Nectria haematococca mpVI 77-13-4]
  misc_feature (1)..(2084): NCBI GI: 164423734 Blast Desc: NCU08926 [Neurospora crassa OR74A] gi|166203131|sp|Q871L5.2|ATG2_NEUCR RecName: Full=Autophagy-related protein 2 gi|157070214|gb|EAA31372.2|
  misc_feature (1)..(2083): NCBI GI: 148887339 Blast Desc: ATG2_MAGGR RecName: Full=Autophagy-related protein 2 gi|201068605|gb|ACH92941.1| ATG2 [Magnaporthe oryzae]
  misc_feature (59)..(2084): NCBI GI: 28950128 Blast Desc: related to sporulation protein SPO72 [Neurospora crassa]
  misc_feature (1)..(2083): NCBI GI: 145603512 Blast Desc: MGG_05998 [Magnaporthe grisea 70-15] gi|145011728|gb|EDJ96384.1| MGG_05998 [Magnaporthe grisea 70-15]
  misc_feature (465)..(2084): NCBI GI: 156065739 Blast Desc: SS1G_00880 [Sclerotinia sclerotiorum 1980] gi|166990593|sp|A7E6F5.1|ATG2_SCLS1 RecName: Full=Autophagy-related protein 2 gi|154691739|gb|EDN91477.1|
  misc_feature (465)..(2084): NCBI GI: 154304849 Blast Desc: BC1G_09010 [Botryotinia fuckeliana B05.10] gi|166990589|sp|A6S7C7.1|ATG2_BOTFB RecName: Full=Autophagy-related protein 2 gi|150853872|gb|EDN29064.1|
MAGFFQSFGTSSMAKRLVRYVLTRIDYFETEALELDKMNVAWGETSTLTWTDVGLKIEKLDKLLQLPPSIQIVKAKVLVLRLKFPVDFYSSPIFVEADGVDVKLRVVPPEELRAARKGANKHKGNRTASERANDESIPHTSDLVQSFLETQPRKEKEELQAALDAETHDLAASVTSSEEGSEDDYPLGTGQPLSLPGFLTNFTDGLVDRLQGAIKGITCHLDVEVPIEPNSPTTEVVTFQLAIDELDVEGVTTVKLRDDSSGQPPQSVHKPGKKYFELRDVRACLISEANFFSALSRSPSMPSSAGASSPVATSRQPLSREPTVMPPSFRQFGGNLADSGELSESQYQPLMDSEDAFNIPYDLSSSNSDPEENDELRSNPSTPRAGTPRAAERAILREDPALSALAPERDPWADPLQPTARSEPTLERLGQWTGGALESSQVSLGSNDGLPQPLDGSPSPSSSQDLAQSHLFSHEEAESMYMSAFSHATSSQMPQPMPGAWDTEPLVPRSPTSQTNQHPPQNQDAIEPLTADMEESLVIRQPSPTEPRPLIDNLQEAIYSPDSEHSQSPETSNVHVPLLAEDALADETAAEEAATPKGPTRLAKELITSKAFRLWIPLKAEDKSGVVTVDPRTTSQRSLHRSVAPNIPGAFSVHADAQSTISAMEHSVQPLHETQIPKEPVDRSIEVVLSPLEINFDLPIAFLLSTVLSRILGALSEPTSQSKPSSTTTTTTNTSTSTSSSPPLVFKLIAEKISLHFLENLVGVADTPERILGSRLPAFDSDALLTTTIQNLTVNLSKSQSSTTTSVDIGKFNFGYANDDIVSFDQRIQMRSSIRDAFPSSGSDVSLAITQTPDSTRCEVKTLPLHVKLDLPRLDETFTWFGGLSSFLSLNSSMVSNSPAPLQSSIKSPRKARGVKFDAPIRPDDISAHAENKVNMRIGGFRLDLIGKECSIALDTSAVKLVNRDEGLGVGISKIQLVGPYVRNSGADPPINAIITNTRIEFSSGPKNADLERLLELITPSKHKFDQSDDEIMVDTLLRQRRKGSVLRVYFDDVEINVNQVQQLQVLSSLGEDFARLSTMTKYLPEDDRPGLLTLALIRNINVSASIDRKIGVVRASLKDLEVGHITMPSLVALGLGSVSIGRNHNEQLVSTVIPISDKIGQGPVLTMRMIGDEMDPVVKLRMRHLDIEYRVPTIMDLLDLGEDTTPQEFEASLAASIANLGDHAHTAMKQNITTTVPEKKEAKPTRVDIVFRDCLLGLNPLGLTSKMAIVLSDARLEIALPKGDDINALAHFNKTSILLIDDVSVLDSKGPSASKRRPSNTATPQIIELCQQGYVDICYMSSAKVTVQVGANEDDGSKWVDVEFRDDLLVLETCADSTQTLIALANALAPPTPPKREIKYRTKVIPMQDMLSSISADAFGQAEGAYNIEDDFLDQVLESEDSFDSEGSDSSPLGYDSQFFEPSAESQLIDPADSILSEHTTGQETNDGVLLTNFNSQPEDPDDDSELDIQDNYFTSDPVAEGTAHRWNSTKNTYDQSNPKLSKSPLKVRVRDVHFIWNLFDGYDWNHTRDVISKAVYNIETTANERQSRQDRARAGTDMEIVEEETVIGDFLFNSIYIGIPANRDPTELAHAINQDLNDNATETESIATTATVMTHNRQHSRQGSTYRGGKRLRLNRSKRHKITFELRGINVDLVTFPPGSGETQSAIDVRVKDLEVFDHVPTSTWKKFATYNQDAGEREMGASMAHLEILNVKPQPDLAASEIVLKVSVLPLRLHVDQDALDFITRFFEFKDDTKPVHTSPSDIPFIQRAEIMDIPVTLDFKPKRVDYAGLRSGHTTEFMNFVVLDESRMVLRRTIVYGASGFDRLGKTLNDIWMPDVKRNQLPGVLAGLAPVRSLVNVGSGFKDLIEIPIKEYKKDGRIVRSIGKGAAAFVKSTGTELVKLGAKMAVGTQYALQGAEGMLVQQPTSHEAGGWEDEDMDSEEQKQISLYANQPTGVVQGLRGAYSSLARDLNAARDAIIAVPAEIMESENAQGAAKAVLKRAPTIIFRPLIGSSKAIGQTLMGATNSLDPHNQRRVNEKYKRG

SEQ ID NO: 18687 - DNA, 7376 bp, Muscodor strobelii
  misc_feature: SGI EST ID NO. CUFF.43864.0
  misc_feature: Variant of the nucleotide sequence at SEQ ID NO 18685
gatcgaaacattccgcttaattcttgggacataattcaacccccatccttgcaaacgaccctgcagccagcaaacgatcttcgtcatcggtgcagccatttccgtccagtctgctccccgtccgtcttgtcgctcccatgcattgcgtacatgaccataccatctgaatacctacactactgtagatgtacgtacatgtattcctgtgcataagctgctgtgcatgggcatccgtagcccacgcagctatcagctcctattcagtaccttaggttcggttatctgctgtgctaatcagcgagtggtagctcgtcacctgtagtcgtagtcgggctctcttacgcctgaatcattgtgcctgtcctggcccattgaactctactctacttcgctgcccttccttaatctttcttcgcctttgaagctcagaaggactgtatttgactctgactttctctttccttttctccctctcatcctcgcccatgctgtcaacgacatgcccttccaccccgcatccctacgaatagggtatcgtgaacgccgtactctctcgcgatccacgcgcctaagcccgtgatcgcttccctctcgacctctcccgcagctcacagccaaggctctctctcacacactctctcgtcgtctgtaaattagcgagaggaacatcttcgcagccgcccgtcatggcgggcttcttccagtccttcgggacgtcgagcatggcaaagcggctggttcgatatgtgttgacaaggattgattacttcgagacagaggccctggagctggacaagatgaatgtggcctggggcgaaacctcaactctcacctggaccgatgtcgggctcaagatcgagaagctcgataaattgctacaacttcccccgtccatccagatagtaaaagcaaaggtcctcgtgctgcgcctgaaattccctgtcgacttctattcgagtcccatcttcgtcgaggctgatggcgtcgacgtcaaacttcgggtcgtcccgccggaggaactgagagcagctcggaaaggagcaaacaagcacaagggaaacagaacagcgtccgaacgagcaaatgacgagtctatcccccataccagcgacttggttcagtccttcctggagacgcaacctcgcaaagagaaggaagagcttcaagctgcgctcgacgccgagacacatgatcttgcagcttcggtcactagctctgaagaggggagtgaagatgattatcctctcggcacaggacagcccttatcgctgccaggtttcttgaccaacttcacggacgggttggtagaccggttgcagggtgcgattaaggggataacttgtcacttggatgtcgaggttcccatcgaacctaactcgcccaccaccgaagtcgtcacctttcagcttgcgatcgatgaactcgacgttgagggtgtcacgacggtgaaactacgagatgacagctcaggacaaccgccccagagtgttcacaagccagggaagaaatactttgagttgcgtgatgttcgagcatgcttgatatccgaggccaatttcttctcggcactttcgaggtcgccatccatgccgtcctcagccggcgcaagctcccccgtggcgacgagcagacagccgctctctcgagaacccactgtcatgccaccctcatttcgtcaatttggaggaaacttggctgattctggtgaacttagtgagagccagtatcagcctctcatggacagcgaagatgccttcaacatcccttatgatttgagcagctccaacagtgaccctgaggaaaatgacgaactacggtctaacccatcaaccccacgggccggtacccccagagcggcagagcgagcgattctaagagaggatcctgcgttgtctgctttggcacctgaaagagatccttgggccgacccattacaaccaacggctagatccgaaccaaccctcgagcgtctggggcaatggactggtggtgctcttgaatcgtctcaggtgtctttgggaagtaacgacggcctcccacagccgttagacggtagcccatccccctcgagcagtcaagaccttgctcaatcacatcttttcagccacgaggaagcagaaagcatgtacatgagtgctttctcgcacgcgacatcgtctcagatgccgcaacctatgcctggcgcgtgggacacggaacctttagtccccaggagccctacaagccagacgaatcagcatcccccacaaaaccaggatgccatcgagcccctgactgccgatatggaagagtcacttgtaatacggcagccatcaccaacggagcccagaccactcatagacaatctgcaagaggccatatattcgccagacagtgaacacagccagtcccctgaaacaagcaacgtccatgtgccattacttgcggaagatgctttggcagacgagaccgctgcggaagaggccgccacgccgaaagggccaacaagattagccaaggagctcatcacttcgaaagcttttcgcctgtggattcccctcaaagccgaggataagtctggtgtagtaacggttgatccacgcacgacatcccaaagatccttacatcgttctgtcgctcctaatatacccggagccttttcggttcatgcggatgctcagtctacgatttctgctatggaacactcagttcaacctctccacgaaacacaaatccctaaggaacccgttgaccgctctatagaggtcgttctatcgccgttggagataaattttgacttgccgattgctttcctactgagtactgttctctcacggatcctcggcgccttgagcgaacctactagccaatctaaacccagttctaccactactaccactacgaacacgtctacctctacatcttcatccccgcctctcgttttcaagctgatagctgaaaagatctccttacattttctcgaaaatcttgttggagtggccgacactcccgaacggatactcggatcgcggctgccagcgttcgacagcgatgcactactcaccactaccatacaaaacttgactgtcaatctctccaaatcccagtcatctaccaccacatcggtagacatagggaagttcaacttcggttatgccaatgatgatatcgtatcgttcgatcaacgcatacaaatgcgatcctcgatcagggatgccttcccttcgtctggctcagatgtctccctcgctatcacccagacacctgactcgactagatgcgaggtgaaaacattacccttacacgtaaaactagatctacccagacttgacgagacatttacgtggttcggaggtttgagcagttttctcagcttgaattcgtccatggtttcgaatagtccggcaccccttcaaagttcaatcaaatcgccgcggaaagctagaggcgtcaaatttgatgctccaattcgtcctgatgacatctctgcgcatgcggaaaataaagtcaacatgagaattggaggatttcgcttggacttgattgggaaggagtgcagcattgctttggacacaagcgccgtgaaactagtgaaccgcgacgaaggacttggagtcggcatatcaaagatccagcttgttggaccttatgtcaggaactccggagcagaccctccaatcaatgccatcatcaccaacacgcgtatcgagttttccagcggaccaaaaaatgctgacttggaacgacttttggaactcatcactccatctaagcacaagttcgaccaatctgatgatgaaattatggtcgacactctcctgcgacagaggaggaaaggatctgtgttgcgcgtttacttcgatgatgtcgaaatcaatgtcaaccaggtacagcagctgcaggtactatcaagcttgggcgaagactttgcgcgtctatcgactatgaccaagtatttgccagaggatgatcggccaggtcttcttactttggcacttatccgtaacatcaacgtttctgccagcatcgacaggaagattggcgtagtcagagcttcgttgaaagatttagaggttggccacatcacgatgccgtcattggtcgcattgggtcttgggtcagtctcgatagggcgcaatcacaacgagcaattagtgtctacagttattcctatctccgataaaatcggacagggccctgtactaactatgagaatgatcggagatgagatggatcctgttgtcaaactgagaatgcgacacctggacatcgaatatagggtgccgactattatggatttgctggaccttggagaagatactacgcctcaggaattcgaggcttctctggctgcttcaattgctaacctgggagaccatgctcatacggcgatgaagcaaaatatcaccacgactgttccagagaagaaggaggcgaagcctaccagagttgacatcgtctttcgcgattgccttctcgggctcaatcccctagggttgacgtcgaagatggccatcgtattgagcgatgctcgactggagatagcactccccaagggcgacgatatcaatgcattggcacatttcaacaagacatcaatacttctcattgatgacgtctctgtgctcgattctaaaggtccttcggcatctaagcgacgaccttcaaatacggctacaccacaaatcatcgagctctgccaacaaggatatgtcgacatctgttacatgtcttcggctaaggtcaccgtccaagtcggcgctaatgaagacgatgggagcaagtgggttgatgtcgagtttcgagatgatcttcttgtccttgagacttgcgcggactccacacagactctgatcgcactcgctaatgcccttgctccaccaacgccaccgaaaagagagatcaagtacaggaccaaagtcattccgatgcaagatatgctttcatctatttctgcggatgcttttgggcaagcagaaggagcctataacatagaggacgatttccttgaccaagttctggagtccgaagattcctttgactcagaaggttccgattcgagtcctctgggttatgattctcaatttttcgaaccatctgctgaatcacagttaatcgatccagcggattcaattctgtcagaacacaccacagggcaagaaacaaatgatggcgtgcttttaacgaatttcaacagccagccggaagatcctgacgatgattctgagttagatatacaggataattatttcacgtctgatcctgttgcagagggaacagctcatcgctggaattcgaccaagaacacttatgaccagtccaaccccaagctttcgaaaagtcctcttaaagtccgtgttcgtgatgtccatttcatatggaatctcttcgacggctatgattggaaccatacgcgagatgtcatatcgaaagcagtgtacaatatcgaaacaacggccaacgagcgccagtcccggcaagatcgtgctcgtgctggaactgacatggagatcgtggaggaggagactgtcattggcgacttccttttcaactctatttacatagggatacctgcgaatcgagatccgacagagctcgcgcatgccatcaatcaggacttgaatgacaatgcgactgagacagagtcgatcgcgacaacggcaaccgtcatgacgcacaaccgccagcacagtcggcaaggcagtacgtatcgtggcggtaagagactacgtctgaatcgcagcaagcgtcacaaaatcacatttgaactcaggggcattaatgttgatcttgtcactttcccgcctggctctggcgagacacaaagcgcaatcgatgttcgtgtgaaggatctagaagtattcgaccacgttccgacttcaacatggaagaaatttgccacgtacaaccaggacgcaggggaacgcgaaatgggcgccagtatggctcatcttgaaatcctcaatgtgaaaccacaacctgatcttgctgcgtctgagattgtcctcaaagtaagtgtgcttccacttcggttgcatgttgaccaagatgctctcgacttcatcactcgattcttcgaattcaaagacgataccaagcctgtccacacttcgccaagcgacatacccttcatacagagagccgaaattatggacattcctgtcacccttgacttcaagccaaaacgcgtagactacgctggattgcgctctggacacactacagaattcatgaacttcgtggtattggatgagtctcgtatggtgttacgccgtactattgtttatggagcatctggattcgatagactcggtaagaccttgaacgatatatggatgcccgatgtcaagaggaaccagcttcctggtgtgctggcgggtctcgcacctgtccgctcactagtcaacgtcggtagcggattcaaagatttgattgaaattcccatcaaagagtacaagaaagacggaaggatcgttcgaagcattgggaaaggcgcagcagcatttgtcaagtcgactggtacagagcttgtgaagttgggtgctaagatggctgtcggtacgcagtatgccttgcaaggtgcggaaggaatgctagttcagcagcctacttctcatgaagccggtggctgggaggatgaagacatggattctgaagagcagaagcagatcagtctctatgccaaccaacctactggtgtcgtccaaggcttgagaggagcctactcgagtctcgctcgcgatctcaatgcagccagagatgctatcatcgctgtacctgctgaaataatggagagtgagaacgcacagggtgctgccaaagctgtcctcaaacgagcaccaacgattatttttagaccgcttattgggtccagcaaggccatcggacagactctcatgggcgccacgaattccctggatccccataaccaacgacgcgttaatgagaaatataagagaggttaagcatctctgcgtgtacgatttgttttgctggggtttagggaatcttgtggtccattttgttttgttcacatactgcaaggagttttcgggaagcatatcctggcgccactcattcattttttaattttaccctttgctgtttctatggccgcaactactcaatatgcatgatagtatgacggaatgaaagagaaagatacacatttgcattgatccatcttggacggaacagaacagaacgacctcacggatgtaaatagtttgatacacggagaaccgggagagattgttgaatatatgatgtgataaatcaatcactggagtgaagttggtgtttgtgtgtcgtatgtggtatggacaagctgtcatcatgaattaagctaacgcgactgctagcaatctatctgatcaattcctttagtggcgtattag

SEQ ID NO: 18688 - DNA, 1353 bp, Muscodor strobelii
  misc_feature: SGI cDNA ID NO. 566270
  misc_feature: Encodes the peptide sequence at SEQ ID NO 18689
atgctggattcttcaactcgtagtgccggacccaattggatacacggaacaaacgacaatccaataatggaccttgcgaagcagactcaaacgggaacgggctcagttgccctcgaggaaaatgtgttcggcgaacttggaaatttgcttccgcaagacgaagccgctggctattctgatatgatgtgggatatcatcaagtctgcgttcgcccacagccaggaaaactgcgcgagcattaatccaaatgagagcctactagactttttccgaacggaaacctcaaagaaaatacaagatggcacaccggattgcgcgaggcagaaagcaatattactgcaaaccgcagagaactggggcaatttcgttggcagccacgttcgtacacaaagcttgaagtatttctggctcgaagaatgtatagacggcgaaaatttgttttgcgcagacacttacaagaagatcctctcagccatcgccaaacctgttgtggagaacgcgaatgcagacatacaatatagagctgttgtcacgcaggttgaatgcactgacgacgaaggaaaacgacaactaaaagtccacactggaacgggggacatgttcgaattcgacgaggttgtctttaccacaccactcggctggttaaagcagcacccagaagccttcaagcctccgttgccggagagacttaccagtgcaatcgccaatatcggttatgggtgcctcgaaaaagtttacctcaattttaccaaggcgttctggctaccaagtgacgccggaagcgagtcgacaaaaggatttatccagtttcttgccccaaaatatgcaccagactcaaacccacagggttggaaccaagaaatcgtcgagcttgcttcgttcgctgctgaatcatctcatcctacgcttcttttctatatgtacggtgcgcagtccaagtatttgactgaaaaggtttcgggattttcgtcggataaggcgaaacaagaatttctatatgaatggttcagaccgtactactcccggttaccgcactacagcgagggatctccggactgtcagcccgtgggctacttcgctacatcatggcttcaagatgaattggcaggcaatgggagttacgccaattttcagaccggtcttgaggaaggcgataaagacatagagattatgagggaaggcctgccagaacgagggctctggctagcgggtgagcacacagccccttttattgccctcgggacggttacgggggcttactggagcggcgagtcggttggcaagcgtattgctcaagcgtactgcaggggcaaagggggtgttacgattggacaggtgaagtcttctatgtga

SEQ ID NO: 18689 - protein, 450 aa, Muscodor strobelii
  misc_feature: SGI Peptide ID NO. 566270
  misc_feature (170)..(256): Pfam Id: PF01593 Pfam Desc: Flavin containing amine oxidoreductase
  misc_feature (9)..(438): NCBI GI: 46137537 Blast Desc: FG10284.1 [Gibberella zeae PH-1]
  misc_feature (10)..(436): NCBI GI: 171694375 Blast Desc: protein product [Podospora anserina] gi|170947136|emb|CAP73941.1| protein product [Podospora anserina]
  misc_feature (9)..(434): NCBI GI: 256732221 Blast Desc: [Nectria haematococca mpVI 77-13-4]
  misc_feature (10)..(434): NCBI GI: 116197719 Blast Desc: CHGG_07015 [Chaetomium globosum CBS 148.51] gi|88178294|gb|EAQ85762.1| CHGG_07015 [Chaetomium globosum CBS 148.51]
  misc_feature (10)..(434): NCBI GI: 85098410 Blast Desc: NCU08925 [Neurospora crassa OR74A] gi|28922113|gb|EAA31371.1| conserved [Neurospora crassa OR74A] gi|28950127|emb|CAD70985.1| related to ANON-37CS PROTEIN crassa]
  misc_feature (10)..(441): NCBI GI: 154304869 Blast Desc: BC1G_09020 [Botryotinia fuckeliana B05.10] gi|150853882|gb|EDN29074.1| BC1G_09020 [Botryotinia fuckeliana B05.10]
  misc_feature (62)..(436): NCBI GI: 261352052 Blast Desc: ATPAO3 [Verticillium albo-atrum VaMs.102]
  misc_feature (10)..(441): NCBI GI: 189207957 Blast Desc: amine oxidase [Pyrenophora tritici-repentis Pt-1C-BFP] gi|187976405|gb|EDU43031.1| amine oxidase [Pyrenophora tritici-repentis Pt-1C-BFP]
  misc_feature (10)..(422): NCBI GI: 145603570 Blast Desc: MGG_13246 [Magnaporthe grisea 70-15] gi|145011782|gb|EDJ96438.1| MGG_13246 [Magnaporthe grisea 70-15]
  misc_feature (9)..(440): NCBI GI: 225683715 Blast Desc: conserved [Paracoccidioides brasiliensis Pb03]
  misc_feature (10)..(434): SWISSPROT Homolog: EC 1.5.3.11 Polyamine oxidase
MLDSSTRSAGPNWIHGTNDNPIMDLAKQTQTGTGSVALEENVFGELGNLLPQDEAAGYSDMMWDIIKSAFAHSQENCASINPNESLLDFFRTETSKKIQDGTPDCARQKAILLQTAENWGNFVGSHVRTQSLKYFWLEECIDGENLFCADTYKKILSAIAKPVVENANADIQYRAVVTQVECTDDEGKRQLKVHTGTGDMFEFDEVVFTTPLGWLKQHPEAFKPPLPERLTSAIANIGYGCLEKVYLNFTKAFWLPSDAGSESTKGFIQFLAPKYAPDSNPQGWNQEIVELASFAAESSHPTLLFYMYGAQSKYLTEKVSGFSSDKAKQEFLYEWFRPYYSRLPHYSEGSPDCQPVGYFATSWLQDELAGNGSYANFQTGLEEGDKDIEIMREGLPERGLWLAGEHTAPFIALGTVTGAYWSGESVGKRIAQAYCRGKGGVTIGQVKSSM

SEQ ID NO: 18690 - DNA, 1984 bp, Muscodor strobelii
  misc_feature: SGI EST ID NO. CUFF.43870.0
  misc_feature: Variant of the nucleotide sequence at SEQ ID NO 18688
gagaaattggccccgaaaatcagctcctaaaacacgattgcatttgttcaaagtattagcttaagccattgctaatgctggattcttcaactcgtagtgccggacccaattggatacacggaacaaacgacaatccaataatggaccttgcgaagcagactcaaacgggaacgggctcagttgccctcgaggaaaatgtgttcggcgaacttggaaatttgcttccgcaagacgaagccgctggctattctgatatgatgtgggatatcatcaagtctgcgttcgcccacagccaggaaaactgcgcgagcattaatccaaatgagagcctactagactttttccgaacggaaacctcaaagaaaatacaagatggcacaccggattgcgcgaggcagaaagcaatattactgcaaaccgcagagaactggggcaatttcgttggcagccacgttcgtacacaaagcttgaagtatttctggctcgaagaatgtatagacggcgaaaatttgttttgcgcagacacttacaagaagatcctctcagccatcgccaaacctgttgtggagaacgcgaatgcagacatacaatatagagctgttgtcacgcaggttgaatgcactgacgacgaaggaaaacgacaactaaaagtccacactggaacgggggacatgttcgaattcgacgaggttgtctttaccacaccactcggctggttaaagcagcacccagaagccttcaagcctccgttgccggagagacttaccagtgcaatcgccaatatcggttatgggtgcctcgaaaaagtttacctcaattttaccaaggcgttctggctaccaagtgacgccggaagcgagtcgacaaaaggatttatccagtttcttgccccaaaatatgcaccagactcaaacccacagggttggaaccaagaaatcgtcgagcttgcttcgttcgctgctgaatcatctcatcctacgcttcttttctatatgtacggtgcgcagtccaagtatttgactgaaaaggtttcgggattttcgtcggataaggcgaaacaagaatttctatatgaatggttcagaccgtactactcccggttaccgcactacagcgagggatctccggactgtcagcccgtgggctacttcgctacatcatggcttcaagatgaattggcaggcaatgggagttacgccaattttcagaccggtcttgaggaaggcgataaagacatagagattatgagggaaggcctgccagaacgagggctctggctagcgggtgagcacacagccccttttattgccctcgggacggttacgggggcttactggagcggcgagtcggttggcaagcgtattgctcaagcgtactgcaggggcaaagggggtgttacgattggacaggtgaagtcttctatgtgagcagccgttctgagatggcattgctcccaaggtcggcaaagccagaagacatggttgattggatatggacaacacacttcgtctttttaacagtagcatacctacagcaatgttttcatcctcatgtaggcaacagagtagagagataggcagatgctcatgatttatgagagactccgtaggcaatgccgaaggagattctgtcacctaaaattgcttatgaaagaatgggttatttgtcaattccgatcaatcagtctttacggacagtcagattcccgtttatgaataaagcttcgtgacgatacttggtgtctggacttctatggacttatcgcacataactagatgagagcctcatccaaagcagctcgcgctattctgatacgaacttctcttgcctactgaattgtatatttcgtcgactggtaccactgaggtagtcagagtgagacggacacgacagagaaacacttcaggcatcgtgcactgtctttgactgtcaatagagaacaaatgataaattagacaatatgattgcggtcgacgtggataag

SEQ ID NO: 18691 - DNA, 1542 bp, Muscodor strobelii
  misc_feature: SGI cDNA ID NO. 566271
  misc_feature: Reduced expression when VOC is produced
  misc_feature: Encodes the peptide sequence at SEQ ID NO 18692
atggcgaagaccttttcaaaggacgaggtcgctaagcacaatacggaggattccacatggatcataatcgacagcaaggtctatgacgtgagcgagttcttagacgcacaccctggtggtgaatcagttctcaaacaagtagccggtcaagacgcgaccgttgcattctacaacctccatcgtcacgaggtcctcgccaagtacgatgatgaccttctcatcggcactgtcgaaggcgagacgcccaccgttgtcacacctcaacccggagatctgagtaccgttccttacgctgagcctctatggttaacgcccgctttcaagagtccttattacaacgacagccatcgaaagctccagaaggcgacacgcatcttcacagacaaatacattacgcccgaggcgcaagcccgtgagcaagatggcaaatacatcagccaggagctcgttgatcgcatgtcaaaggccggcatgctccacatgcgtctcggtcccggcaagcatcttcacggtgtcaacctgctcgatggcgctgtcaagggcgaggagtttgactacttccacgacctcatcatggctcaagagggtgtccgtgccagtgcccgaggttttcaagatggttccttggctggtatggttatcggtctgccctgcatcatgaacttcatggaagatcaacagcgaaagaaggcaatcatggacgaagtcttcagcggcaagaaattcatgtgcctggctattaccgaagcctttgcaggatccgatgttgccggcctccgtacgaccgctaccaagactcccgatggcaagcactacattgtcaatggaaccaagaaatggatcaccaatggcgtattctcagattacttcatcactggtgtgcgcacagagaagggactcagtgttctattgatcgagcgtggtgagggcattgagactaagccaatcaagacttcgtactcacccgctgccggcacaacctacatcacattcgacaacgttaaagtaccagccgaaaatctcctcggcgaagagaacaagggtatttacgtcatcttgagtaacttcaatcacgaacgatggagcatgtgcgctgctggtattcgcatgtgcagagtcgtcgttgaggagtgcttgaagtggtcacatcagcgtcttgttttcggcaagcggctaatcgatcagcccgtaatccgacagaagcttgcaaagatgatcgcactagtagaagccaaccaatcctggctcgagacgatcacctaccaaatgtgcaacatgccctacaaggagcaatccaagcatctcggtggtcccattggtctcctcaagatgagcatcacccgcgcctcgcatgagattgccgacgagtccgttcagatcttcggtggccgtggcttgacacagaccggtatgggcaaagtcatcgagatgttccacagaacatacaagttcgatgccatcctcggtggttccgaagaggtcctcgccgacttgggtgtacggcaagctatggctaagatgccaaagagcgcgaagttgtaa

SEQ ID NO: 18692 - protein, 513 aa, Muscodor strobelii
  misc_feature: SGI Peptide ID NO. 566271
  misc_feature (244)..(297): Pfam Id: PF02770 Pfam Desc: Acyl-CoA dehydrogenase, middle domain
  misc_feature (346)..(504): Pfam Id: PF00441 Pfam Desc: Acyl-CoA dehydrogenase, C-terminal domain
  misc_feature (4)..(78): Pfam Id: PF00173 Pfam Desc: Cytochrome b5-like Heme/Steroid binding domain
  misc_feature (2)..(510): NCBI GI: 116197717 Blast Desc: conserved [Chaetomium globosum CBS 148.51] gi|88178293|gb|EAQ85761.1| conserved [Chaetomium globosum CBS 148.51]
  misc_feature (3)..(510): NCBI GI: 28950126 Blast Desc: related to ACYL-COA DEHYDROGENASE, LONG-CHAIN SPECIFIC PRECURSOR [Neurospora crassa]
  misc_feature (2)..(510): NCBI GI: 171694373 Blast Desc: protein product [Podospora anserina] gi|170947135|emb|CAP73940.1| protein product [Podospora anserina]
  misc_feature (3)..(510): NCBI GI: 164423732 Blast Desc: NCU08924 [Neurospora crassa OR74A] gi|157070213|gb|EAA31370.2| NCU08924 [Neurospora crassa OR74A]
  misc_feature (2)..(510): NCBI GI: 39976249 Blast Desc: conserved [Magnaporthe grisea 70-15] gi|145011783|gb|EDJ96439.1| conserved [Magnaporthe grisea 70-15]
  misc_feature (4)..(510): NCBI GI: 256731829 Blast Desc: [Nectria haematococca mpVI 77-13-4]
  misc_feature (1)..(510): NCBI GI: 46137539 Blast Desc: FG10285.1 [Gibberella zeae PH-1]
  misc_feature (3)..(509): NCBI GI: 261352053 Blast Desc: medium-chain specific acyl-CoA dehydrogenase [Verticillium albo-atrum VaMs.102]
  misc_feature (4)..(510): NCBI GI: 156065735 Blast Desc: SS1G_00878 [Sclerotinia sclerotiorum 1980] gi|154691737|gb|EDN91475.1| SS1G_00878 [Sclerotinia sclerotiorum 1980]
  misc_feature (1)..(510): NCBI GI: 115449711 Blast Desc: ATEG_10328 [Aspergillus terreus NIH2624] gi|114187625|gb|EAU29325.1| ATEG_10328 [Aspergillus terreus NIH2624]
  misc_feature (112)..(505): SWISSPROT Homolog: EC 1.3.99.13 Long-chain-acyl-CoA dehydrogenase
  misc_feature: Useful for introducing or modulating the production of volatile compounds
  misc_feature: Useful for fungicidal and/or biocontrol applications
MAKTFSKDEVAKHNTEDSTWIIIDSKVYDVSEFLDAHPGGESVLKQVAGQDATVAFYNLHRHEVLAKYDDDLLIGTVEGETPTVVTPQPGDLSTVPYAEPLWLTPAFKSPYYNDSHRKLQKATRIFTDKYITPEAQAREQDGKYISQELVDRMSKAGMLHMRLGPGKHLHGVNLLDGAVKGEEFDYFHDLIMAQEGVRASARGFQDGSLAGMVIGLPCIMNFMEDQQRKKAIMDEVFSGKKFMCLAITEAFAGSDVAGLRTTATKTPDGKHYIVNGTKKWITNGVFSDYFITGVRTEKGLSVLLIERGEGIETKPIKTSYSPAAGTTYITFDNVKVPAENLLGEENKGIYVILSNFNHERWSMCAAGIRMCRVVVEECLKWSHQRLVFGKRLIDQPVIRQKLAKMIALVEANQSWLETITYQMCNMPYKEQSKHLGGPIGLLKMSITRASHEIADESVQIFGGRGLTQTGMGKVIEMFHRTYKFDAILGGSEEVLADLGVRQAMAKMPKSAKL

SEQ ID NO: 18693 - DNA, 2110 bp, Muscodor strobelii
  misc_feature: SGI EST ID NO. CUFF.43891.0
  misc_feature: Variant of the nucleotide sequence at SEQ ID NO 18691
gtcagatttaagaggaagctcacgagacctttttttctcaccgaaggaaggattctttttgcggtttattgttccccatagatcgtctttcgccgatttggatttgcgtatctaattcttcttcttccactgtataatcaatattttgcgcaaattccacctccttgatccaaaatccgcaaagatggcgaagaccttttcaaaggacgaggtcgctaagcacaatacggaggattccacatggatcataatcgacagcaaggtctatgacgtgagcgagttcttagacgcacaccctggtggtgaatcagttctcaaacaagtagccggtcaagacgcgaccgttgcattctacaacctccatcgtcacgaggtcctcgccaagtacgatgatgaccttctcatcggcactgtcgaaggcgagacgcccaccgttgtcacacctcaacccggagatctgagtaccgttccttacgctgagcctctatggttaacgcccgctttcaagagtccttattacaacgacagccatcgaaagctccagaaggcgacacgcatcttcacagacaaatacattacgcccgaggcgcaagcccgtgagcaagatggcaaatacatcagccaggagctcgttgatcgcatgtcaaaggccggcatgctccacatgcgtctcggtcccggcaagcatcttcacggtgtcaacctgctcgatggcgctgtcaagggcgaggagtttgactacttccacgacctcatcatggctcaagagggtgtccgtgccagtgcccgaggttttcaagatggttccttggctggtatggttatcggtctgccctgcatcatgaacttcatggaagatcaacagcgaaagaaggcaatcatggacgaagtcttcagcggcaagaaattcatgtgcctggctattaccgaagcctttgcaggatccgatgttgccggcctccgtacgaccgctaccaagactcccgatggcaagcactacattgtcaatggaaccaagaaatggatcaccaatggcgtattctcagattacttcatcactggtgtgcgcacagagaagggactcagtgttctattgatcgagcgtggtgagggcattgagactaagccaatcaagacttcgtactcacccgctgccggcacaacctacatcacattcgacaacgttaaagtaccagccgaaaatctcctcggcgaagagaacaagggtatttacgtcatcttgagtaacttcaatcacgaacgatggagcatgtgcgctgctggtattcgcatgtgcagagtcgtcgttgaggagtgcttgaagtggtcacatcagcgtcttgttttcggcaagcggctaatcgatcagcccgtaatccgacagaagcttgcaaagatgatcgcactagtagaagccaaccaatcctggctcgagacgatcacctaccaaatgtgcaacatgccctacaaggagcaatccaagcatctcggtggtcccattggtctcctcaagatgagcatcacccgcgcctcgcatgagattgccgacgagtccgttcagatcttcggtggccgtggcttgacacagaccggtatgggcaaagtcatcgagatgttccacagaacatacaagttcgatgccatcctcggtggttccgaagaggtcctcgccgacttgggtgtacggcaagctatggctaagatgccaaagagcgcgaagttgtaaatgcaacacagcgacgtggaaagaaggaaacggcaaagagaagcgtcttatttcatccccgtatcatcggcatgtacaatcaggtcaggtctgagcgccggcttatgcatagtgttcacggcgttatacaggaagtctagcatccattgtagatctgcttatatggcaatatttggaaagacatataaatgaaaaagttttatcaaaaataggacagttagagaggaggtgaggaaacgtgatagcttcatgagagtataaaccaccattatacattcatgaagagctaagaggtgatcaaatgtcagtttgcactgactaaaaattatttgggacttactagtagacagaccgatcccgcaagaatcgaaagctctgccagca

SEQ ID NO: 18694 - DNA, 1962 bp, Muscodor strobelii
  misc_feature: SGI cDNA ID NO. 566272
  misc_feature: Encodes the peptide sequence at SEQ ID NO 18695
atgtcgcctgcagagacggcttggtctactgccagctctggacttactaccggcgcttttctcttaccattcggatacattgccgacaactgtgcaatacttccccgcaaggcactccttgtgatcagcctagcaacgttttccttgctcgttgcatgtacatcatttgcacagaacggagtcgtacttgatgccctatccggtctcacgggtatcgcatgtgccgcgaacatccccattgccctcggtattttgagtcttgtgtacccggagacctctcgacgccgaaatattgtcttttcgtctttcttcatgggaaccccggcagccaccatcattggtgggctaggatccggtggattcgcagtcagattcagttggaaagcaccgttcattgccctggctggactgtacgccattgtctcggttctcacttgggttcttgtccctaacgtctccgatcctgaggttatggcagagaaatcagagttgtgtgttctatctggaccaaatgcacctcatatcatcacgctaggtgcaccaagtaagcttgttacaatcctggaattcgattgggtcggattgttcctactcattgcgggcgcactgcttttcactatagcattgactatcggacccgaaggtccccagccttggaagactccaacagttatcttgctcctgactatgggcatattattcattggatgctttgttctttggcaaggcgtgtccaagaacccgatgattccccccgcgatatgggaaagctggagtgtaacactcgttgttatctgcactttgggggcctcgatggcttattattcccaactattctgggtatcaatgttcatgcaggagatggagggcctcaaccctttagatgtcgccgtcagattattaccgcaagccattgttggactactcctttcccctctagttgggcttttcatgcatgctgttccagggactggtctactagcattcgcatcctcagctctcgtcttgagcaatatattcctcgtctttcttcgccgcaataataactatttgctctggatattcccctcactcatgctcagtaccattggtatggattgggtcatgaacgttggatcgcttcatatactatcatgtctgcatcttaagcatcactctgtcggagcttcactcctccagacgacgagtcgtcttggtgtgcccttgggacttgcagtgaccaccgcgatctggtcttcatacgacggcaaagccgattgggctcagcccgagcttgcttatacacacactttcatagcgactgctgcattttcatgcttgtcactcctttctgtcccgttcatccgcattggaaaacaggaacctattaagagacgattaacacatcaggagaagaaaagtgcagatcattcggagcaaagatcgttcattttgagcaggacatctgggccacccactaatagcgagaagggctcgatcaaagaactagatcgccagtcaagtaagcgatggtcaacggttgaaagtgcaacgagaacgtcaacggtggccccatcaatatcctcgcagtcatcgcctagtacagatttgacaaaatctgagaatacaacgaagaccacaatccgccgtggccgttgctcgtccgagaaaatcatctgggtcgtctgcgaagaatgcggtaacagcaaacgtcagcgagaatcatcgaatacttcggtcgtcggcgatccaacgagatatttcaacgagcatgttcgagagaatagtcctgttactgccaaccagagctcacctcggggccaaaaaggtcaggctaacaccattcgacgcagtcccacaggccttggtgcccctatccgccctaatgctgcgcagagaccttaccccggacgtagacgactgccccttgtcaatcgacagattatgacacatcagattttgacccaggggttccagccatga

SEQ ID NO: 18695 - protein, 653 aa, Muscodor strobelii
  misc_feature: SGI Peptide ID NO. 566272
  misc_feature (1)..(404): Pfam Id: PF07690 Pfam Desc: Major Facilitator Superfamily
  misc_feature (1)..(164): Pfam Id: PF07690 Pfam Desc: Major Facilitator Superfamily
  misc_feature (187)..(404): Pfam Id: PF07690 Pfam Desc: Major Facilitator Superfamily
  misc_feature (1)..(465): NCBI GI: 39951549 Blast Desc: MGG_01417 [Magnaporthe grisea 70-15] gi|145020751|gb|EDK04880.1| MGG_01417 [Magnaporthe grisea 70-15]
  misc_feature (1)..(495): NCBI GI: 240107451 Blast Desc: Major Facilitator Superfamily protein [Coccidioides posadasii C735 delta SOWgp]
  misc_feature (1)..(495): NCBI GI: 119191135 Blast Desc: CIMG_05615 [Coccidioides immitis RS]
  misc_feature (1)..(453): NCBI GI: 145254056 Blast Desc: An18g00380 [Aspergillus niger] gi|134084085|emb|CAK43114.1| protein product [Aspergillus niger]
  misc_feature (1)..(466): NCBI GI: 256726914 Blast Desc: NECHADRAFT_90973 [Nectria haematococca mpVI 77-13-4]
  misc_feature (1)..(453): NCBI GI: 255948240 Blast Desc: Pc22g08750 [Penicillium chrysogenum Wisconsin 54-1255] gi|211591904|emb|CAP98163.1| Pc22g08750 [Penicillium chrysogenum Wisconsin 54-1255]
  misc_feature (1)..(472): NCBI GI: 238507455 Blast Desc: aminotriazole resistance protein, [Aspergillus flavus NRRL3357] gi|220689642|gb|EED45993.1| aminotriazole resistance protein, [Aspergillus flavus NRRL3357]
  misc_feature (1)..(469): NCBI GI: 242796817 Blast Desc: acyl-CoA oxidase, [Talaromyces stipitatus ATCC 10500] gi|242796820|ref|XP_002482881.1| acyl-CoA oxidase, [Talaromyces stipitatus ATCC 10500] gi|218719468|gb|EED18888.1| acyl-CoA ATCC
  misc_feature (1)..(453): NCBI GI: 212536772 Blast Desc: aminotriazole resistance protein, [Penicillium marneffei ATCC 18224] gi|210070941|gb|EEA25031.1| aminotriazole resistance protein, [Penicillium marneffei ATCC 18224]
  misc_feature (1)..(487): NCBI GI: 169786443 Blast Desc: [Aspergillus oryzae RIB40] gi|83776430|dbj|BAE66549.1| protein product [Aspergillus oryzae]
MSPAETAWSTASSGLTTGAFLLPFGYIADNCAILPRKALLVISLATFSLLVACTSFAQNGVVLDALSGLTGIACAANIPIALGILSLVYPETSRRRNIVFSSFFMGTPAATIIGGLGSGGFAVRFSWKAPFIALAGLYAIVSVLTWVLVPNVSDPEVMAEKSELCVLSGPNAPHIITLGAPSKLVTILEFDWVGLFLLIAGALLFTIALTIGPEGPQPWKTPTVILLLTMGILFIGCFVLWQGVSKNPMIPPAIWESWSVTLVVICTLGASMAYYSQLFWVSMFMQEMEGLNPLDVAVRLLPQAIVGLLLSPLVGLFMHAVPGTGLLAFASSALVLSNIFLVFLRRNNNYLLWIFPSLMLSTIGMDWVMNVGSLHILSCLHLKHHSVGASLLQTTSRLGVPLGLAVTTAIWSSYDGKADWAQPELAYTHTFIATAAFSCLSLLSVPFIRIGKQEPIKRRLTHQEKKSADHSEQRSFILSRTSGPPTNSEKGSIKELDRQSSKRWSTVESATRTSTVAPSISSQSSPSTDLTKSENTTKTTIRRGRCSSEKIIWVVCEECGNSKRQRESSNTSVVGDPTRYFNEHVRENSPVTANQSSPRGQKGQANTIRRSPTGLGAPIRPNAAQRPYPGRRRLPLVNRQIMTHQILTQGFQP

SEQ ID NO: 18696 - DNA, 300 bp, Muscodor strobelii
  misc_feature: SGI cDNA ID NO. 566273
  misc_feature: Encodes the peptide sequence at SEQ ID NO 18697
atggatcacaacgtcgacgataccgagctttcggatgacgaggaggcagccatgggactaaccgtggctgaacaccgatatctctttgctctggccgagtacgaggcgttcttacgtatacgaagggaacatgaagaagaggttcagcgctgggaagatacaaagcgacatttctttatggggtctgcgcttgtcttgggtctcatcccacttctcaaatcgggaggactaggaaaggtgatctacgaagcactgcaaggcatctttgcttatcttcgagctctcgtcttcggcttgtag

SEQ ID NO: 18697 - protein, 99 aa, Muscodor strobelii
  misc_feature: SGI Peptide ID NO. 566273
MDHNVDDTELSDDEEAAMGLTVAEHRYLFALAEYEAFLRIRREHEEEVQRWEDTKRHFFMGSALVLGLIPLLKSGGLGKVIYEALQGIFAYLRALVFGL

SEQ ID NO: 18698 - DNA, 951 bp, Muscodor strobelii
  misc_feature: SGI cDNA ID NO. 566274
  misc_feature: Encodes the peptide sequence at SEQ ID NO 18699
atgcgggcgctgatgaaagtcgcggaggctcgctatggaaacatcttgaggactgttgcgactgcagcctcttacgcgcctttagtttcgcgaagtgtcatcgacaatccagtcacatggacattttcgagatggtcttcatcaaattcgagatggaaacagcgtcaagggaaagactactttgcccgcgaggccaaagtccaaggtctcaagagtcgggctgctttcaagttgcttgaaatggatgccaaatatagactatttcggaaaggtcagactgttattgatcttgttgctgtagaacgaactaaaccgcatggccgtgtaattggcattgatctacttcctgcacaaccgcccaaaggcgtttctacaattcaaggaaatttcctgtcgccaactgtacaaacactcgttaaagactaccttgttgagtttgcgaaaccaaaagtcgcgaagaaacaggacattgaaccggaacaagacgaagacgtcattatcgaaaagcccagctacatcgatgcagagcgcgcagagtcggcggagcacgataatgaggtagaccttgatgacggaaaactcgtcgatttagttctaagcgacatgtcagcaccctggatacaaacgtccggcttttccagcaacactttgagtaaccctttccgtaggatgatgaacacaagcgggatgagttttcgtgaccatgcgggcagtatggacctttgcctcgctgccctgcagtttgccagcgaaacactcaggaccggtggccattttgtatgcaagttttatcaaggcgccgaagacaaagacttggaaatgaagctcaaaaagatgtttacaaaggtcttccgagaaaagccagaatcttctcggactgagtcaaaagaagcattctttgtagccttacgccgtaagggcgatgtaactttagcagatgtatcaaaataa

SEQ ID NO: 18699 - protein, 316 aa, Muscodor strobelii
  misc_feature: SGI Peptide ID NO. 566274
  misc_feature (70)..(307): Pfam Id: PF01728 Pfam Desc: FtsJ-like methyltransferase
  misc_feature (225)..(307): Pfam Id: PF01728 Pfam Desc: FtsJ-like methyltransferase
  misc_feature (70)..(203): Pfam Id: PF01728 Pfam Desc: FtsJ-like methyltransferase
  misc_feature (44)..(292): NCBI GI: 256732015 Blast Desc: NECHADRAFT_41834 [Nectria haematococca mpVI 77-13-4]
  misc_feature (25)..(314): NCBI GI: 242765533 Blast Desc: ftsj, [Talaromyces stipitatus ATCC 10500] gi|218724189|gb|EED23606.1| ftsj, [Talaromyces stipitatus ATCC 10500]
  misc_feature (42)..(314): NCBI GI: 46136703 Blast Desc: FG09867.1 [Gibberella zeae PH-1]
  misc_feature (47)..(314): NCBI GI: 212528768 Blast Desc: cell division protein ftsj, [Penicillium marneffei ATCC 18224] gi|210073939|gb|EEA28026.1| cell division protein ftsj, [Penicillium marneffei ATCC 18224]
  misc_feature (47)..(306): NCBI GI: 226280399 Blast Desc: ribosomal RNA methyltransferase MRM2 [Paracoccidioides brasiliensis Pb01]
  misc_feature (42)..(306): NCBI GI: 240274199 Blast Desc: cell division cycle protein [Ajellomyces capsulatus H143]
  misc_feature (42)..(306): NCBI GI: 225557686 Blast Desc: cell division cycle protein [Ajellomyces capsulatus G186AR]
  misc_feature (50)..(309): NCBI GI: 156043163 Blast Desc: SS1G_10584 [Sclerotinia sclerotiorum 1980] gi|154694972|gb|EDN94710.1| SS1G_10584 [Sclerotinia sclerotiorum 1980]
  misc_feature (47)..(293): NCBI GI: 255954837 Blast Desc: Pc21g11390 [Penicillium chrysogenum Wisconsin 54-1255] gi|211589882|emb|CAP96036.1| Pc21g11390 [Penicillium chrysogenum Wisconsin 54-1255]
  misc_feature (39)..(297): NCBI GI: 121715190 Blast Desc: cell division protein ftsj [Aspergillus clavatus NRRL 1] gi|119403361|gb|EAW13778.1| cell division protein ftsj [Aspergillus clavatus NRRL 1]
MRALMKVAEARYGNILRTVATAASYAPLVSRSVIDNPVTWTFSRWSSSNSRWKQRQGKDYFAREAKVQGLKSRAAFKLLEMDAKYRLFRKGQTVIDLVAVERTKPHGRVIGIDLLPAQPPKGVSTIQGNFLSPTVQTLVKDYLVEFAKPKVAKKQDIEPEQDEDVIIEKPSYIDAERAESAEHDNEVDLDDGKLVDLVLSDMSAPWIQTSGFSSNTLSNPFRRMMNTSGMSFRDHAGSMDLCLAALQFASETLRTGGHFVCKFYQGAEDKDLEMKLKKMFTKVFREKPESSRTESKEAFFVALRRKGDVTLADVSK

SEQ ID NO: 18700 - DNA, 2449 bp, Muscodor strobelii
  misc_feature: SGI EST ID NO. CUFF.44023.1
  misc_feature: Variant of the nucleotide sequence at SEQ ID NO 18698
tcaatattccagagacacaccacagcgaaaaactgaatgagaaaatgcagctgctgaacccgaacaccttcatcccaggctagtggtccagcgataaaagcagcgaccaggtaccggaagagatcgagagcttcgatcccggtataaacttcacgcaaaggtacaccattgtggtacttggcgttgtcgacttggtctatgaagcctacgggtatatctttgatacctgtctcaacccgcataagccataagccggttgcggaaaacacggagaaaagcaggataatgaggccattgcccggacgtgtgaacctgcttttggcgacgaccgagccgccggaagctctatttgactttttcgttcgggccatttctgtgaggctctgggcttgaggtcgaggctgaaggagctcgttgttacagtaagctagataaagtccttggtgtctgagatgaggatatgagatgagagatgcaagcaattgtaaaaatgcaaggcgtagatcacatatgaggaaaagtagccgaagcctcgccaaacgttatcgcagcaaacagcctcgtccaacatcagaaatgcaagtgatttggaataggagttgccaacggattccacatatccttttgttagagagccgaccttggcggcgcatcccggggattccatgtccgaggtggagcggagctcgagcaaatattggcggatccttcgctagctacgagttgtaggattgcctgcattgccttgctttgtgtcttgttgagggatatgtgcattcatacctgtcaacgattcgtttggagtactttgagtctaccggagcatcggaaacatgtgtggcctttctgtcacagcgtgacggcatgaagttgcagtgtcacaggggtcacagcaaatatgtggcaaccggggccttaacgcgaaataagccaggtgtttctagactaaatcgatcaaatatgcatttgtcggaattacccattcaagagcataatggaaataaatctctgtgctctctgtctgtctttggattacggcgagttcattgctgtctgggtcttgtgattgatatgggcaagcgattcttcgtttgtcctgatcgcatcgttccatgcgggcgctgatgaaagtcgcggaggctcgctatggaaacatcttgaggactgttgcgactgcagcctcttacgcgcctttagtttcgcgaagtgtcatcgacaatccagtcacatggacattttcgagatggtcttcatcaaattcgagatggaaacagcgtcaagggaaagactactttgcccgcgaggccaaagtccaaggtctcaagagtcgggctgctttcaagttgcttgaaatggatgccaaatatagactatttcggaaaggtcagactgttattgatcttgggtatgcacccgggagttggtcgcaggttgctgtagaacgaactaaaccgcatggccgtgtaattggcattgatctacttcctgcacaaccgcccaaaggcgtttctacaattcaaggaaatttcctgtcgccaactgtacaaacactcgttaaagactaccttgttgagtttgcgaaaccaaaagtcgcgaagaaacaggacattgaaccggaacaagacgaagacgtcattatcgaaaagcccagctacatcgatgcagagcgcgcagagtcggcggagcacgataatgaggtagaccttgatgacggaaaactcgtcgatttagttctaagcgacatgtcagcaccctggatacaaacgtccggcttttccagcaacactttgagtaaccctttccgtaggatgatgaacacaagcgggatgagttttcgtgaccatgcgggcagtatggacctttgcctcgctgccctgcagtttgccagcgaaacactcaggaccggtggccattttgtatgcaagttttatcaaggcgccgaagacaaagacttggaaatgaagctcaaaaagatgtttacaaaggtcttccgagaaaagccagaatcttctcggactgagtcaaaagaagcattctttgtagccttacgccgtaagggcgatgtaactttagcagatgtatcaaaataataggtgttattaggcccctacctccaagttctcctatgcatgggatataatggaactagagcaacttcaatgctcgacataatgacgacttccacgcaatcagttgaatagctcacggtcacgatccgggaagcatgagcaagccaaagcaacgaggaataccgaagaggggatgatggttattgggtattgaggtcgagttataatcattacatgtctgcacttccacctcgtctcattcctcgcgtgacaacaacagggagaatgcaggactagcaaaaaatgtggcaacaaccatcccagtgtaaatcgcaactcgactcccgtctccgaaaacagaacaaaagtattaatcctgc

SEQ ID NO: 18701 - DNA, 1170 bp, Muscodor strobelii
  misc_feature: SGI cDNA ID NO. 566275
  misc_feature: Elevated expression when VOC is produced
  misc_feature: Encodes the peptide sequence at SEQ ID NO 18702
atggcccgaacgaaaaagtcaaatagagcttccggcggctcggtcgtcgccaaaagcaggttcacacgtccgggcaatggcctcattatcctgcttttctccgtgttttccgcaaccggcttatggcttatgcgggttgagacaggtatcaaagatatacccgtaggcttcatagaccaagtcgacaacgccaagtaccacaatggtgtacctttgcgtgaagtttataccgggatcgaagctctcgatctcttccggtacctggtcgctgcttttatcgctggaccactagcctgggatgaaggtgttcgggttcagcagctgcattttctcattcagtttttcgctgtggtgtgtctctggaatattgaggcatgccgtagccgaaatgcaaggagaattttcagctacactggactcttcgcagtcttgtaccagacggtaggcggagccgtgatcatccctctctggttcctctcattcctcgtgtcttcgaaatcagacacgtactatcaatcagggcgtcaggtgaacctcccccacgcccgcggtattctctttgccgttgtagttgggtacttgatcccaactcttgcgatgtttactcctggcatgagcccagagactgcacaactcttgacttttatctggcagccagcccctactttcgtcaacttgctactcttcctctcgtctctacttctacctgccactgccgcgcgtggtgaaagaacaccagatgtgaagtatctgaagcgcgtgtacactgccgctggccttgtctcagcgatcaaccacttggtgaccgtttacatctgctatacgtcttccaacccagaactcagcttcacacacgtattcatcccgaatcggagtacgtggacagatagcgcgacgatcggcctccactacattttccagatcgattggtggggttgtttcacgccctctctgatcttcgctcttatttctgtctgggatgtttaccgtgtcttgctcggcggcgccagcaccactcaactaattggctgggctgtctacatcctcggattggctgctgcgattggacctggtggcatgttggctgtcgtttggagctggagggaagaccgcttagttatgattgaatccggtgttaggggcactgtcaaaaagcccaagactgcttaa

SEQ ID NO: 18702 - protein, 389 aa, Muscodor strobelii
  misc_feature: SGI Peptide ID NO. 566275
  misc_feature (23)..(385): NCBI GI: 169612639 Blast Desc: SNOG_09444 [Phaeosphaeria nodorum SN15] gi|160702554|gb|EAT83636.2| SNOG_09444 [Phaeosphaeria nodorum SN15]
  misc_feature (23)..(385): NCBI GI: 189189178 Blast Desc: PTRG_00595 [Pyrenophora tritici-repentis Pt-1C-BFP] gi|187972534|gb|EDU40033.1| PTRG_00595 [Pyrenophora tritici-repentis Pt-1C-BFP]
  misc_feature (71)..(370): NCBI GI: 255952903 Blast Desc: Pc21g01340 [Penicillium chrysogenum Wisconsin 54-1255] gi|211588915|emb|CAP95031.1| Pc21g01340 [Penicillium chrysogenum Wisconsin 54-1255]
  misc_feature (105)..(385): NCBI GI: 261188963 Blast Desc: conserved [Ajellomyces dermatitidis SLH14081] gi|239591898|gb|EEQ74479.1| conserved [Ajellomyces dermatitidis SLH14081]
  misc_feature (32)..(375): NCBI GI: 225555179 Blast Desc: HCBG_08412 [Ajellomyces capsulatus G186AR]
  misc_feature (32)..(375): NCBI GI: 240281400 Blast Desc: HCDG_00482 [Ajellomyces capsulatus H143]
  misc_feature (138)..(385): NCBI GI: 239609172 Blast Desc: conserved [Ajellomyces dermatitidis ER-3]
  misc_feature (78)..(369): NCBI GI: 115401122 Blast Desc: [Aspergillus terreus NIH2624] gi|114190090|gb|EAU31790.1| [Aspergillus terreus NIH2624]
  misc_feature (88)..(369): NCBI GI: 119494160 Blast Desc: FAD binding domain protein [Neosartorya fischeri NRRL 181] gi|119412152|gb|EAW22093.1| FAD binding domain protein [Neosartorya fischeri NRRL 181]
  misc_feature (84)..(370): NCBI GI: 238496933 Blast Desc: monooxygenase, [Aspergillus flavus NRRL3357] gi|220694582|gb|EED50926.1| monooxygenase, [Aspergillus flavus NRRL3357]
  misc_feature: Useful for introducing or modulating the production of volatile compounds
MARTKKSNRASGGSVVAKSRFTRPGNGLIILLFSVFSATGLWLMRVETGIKDIPVGFIDQVDNAKYHNGVPLREVYTGIEALDLFRYLVAAFIAGPLAWDEGVRVQQLHFLIQFFAVVCLWNIEACRSRNARRIFSYTGLFAVLYQTVGGAVIIPLWFLSFLVSSKSDTYYQSGRQVNLPHARGILFAVVVGYLIPTLAMFTPGMSPETAQLLTFIWQPAPTFVNLLLFLSSLLLPATAARGERTPDVKYLKRVYTAAGLVSAINHLVTVYICYTSSNPELSFTHVFIPNRSTWTDSATIGLHYIFQIDWWGCFTPSLIFALISVWDVYRVLLGGASTTQLIGWAVYILGLAAAIGPGGMLAVVWSWREDRLVMIESGVRGTVKKPKTA

SEQ ID NO: 18703 - DNA, 2807 bp, Muscodor strobelii
  misc_feature: SGI EST ID NO. CUFF.44022.2
  misc_feature: Variant of the nucleotide sequence at SEQ ID NO 18701
atccaggctgcatgacttacaagatcaataacagtctgacctttccgaaatagtctatatttggcatccatctaatgaggcgaatctgttagttcacgaatgcgatgtcaattgcacaattttgcgtaactcacttcaagcaacttgaaagcagcccgactcttgagaccttggactttggcctcgcgggcaaagtagtctttcccttgacgctgtttccatctcgaatttgatgaagaccatctcgaaaatgtccatgtgactggattgtcgatgacacttcgcgaaactaaaggcgcgtaagaggctgcagtcgcaacagtcctcaagatgtttccatagcgagcctccgcgactttcatcagcgcccgcatggaacgatgcgatcaggacaaacgaagaatcgcttgcccatatcaatcacaagacccagacagcaatgaactcgccgtaatccaaagacagacagagagcacagagatttatttccattatgctcttgaatgggtaattccgacaaatgcatatttgatcgatttagtctagaaacacctggcttatttcgcgttaaggccccggttgccacatatttgctgtgacccctgtgacactgcaacttcatgccgtcacgctgtgacagaaaggccacacatgtttccgatgctccggtagactcaaagtactccaaacgaatcgttgacaggtatgaatgcacatatccctcaacaagacacaaagcaaggcaatgcaggcaatcctacaactcgtagctagcgaaggatccgccaatatttgctcgagctccgctccacctcggacatggaatccccgggatgcgccgccaaggtcggctctctaacaaaaggatatgtggaatccgttggcaactcctattccaaatcacttgcatttctgatgttggacgaggctgtttgctgcgataacgtttggcgaggcttcggctacttttcctcatatgtgatctacgccttgcatttttacaattgcttgcatctctcatctcatatcctcatctcagacaccaaggactttatctagcttactgtaacaacgagctccttcagcctcgacctcaagcccagagcctcacagaaatggcccgaacgaaaaagtcaaatagagcttccggcggctcggtcgtcgccaaaagcaggttcacacgtccgggcaatggcctcattatcctgcttttctccgtgttttccgcaaccggcttatggcttatgcgggttgagacaggtatcaaagatatacccgtaggcttcatagaccaagtcgacaacgccaagtaccacaatggtgtacctttgcgtgaagtttataccgggatcgaagctctcgatctcttccggtacctggtcgctgcttttatcgctggaccactagcctgggatgaaggtgttcgggttcagcagctgcattttctcattcagtttttcgctgtggtgtgtctctggaatattgaggcatgccgtagccgaaatgcaaggagaattttcagctacactggactcttcgcagtcttgtaccagacggtaggcggagccgtgatcatccctctctggttcctctcattcctcgtgtcttcgaaatcagacacgtactatcaatcagggcgtcaggtgaacctcccccacgcccgcggtattctctttgccgttgtagttgggtacttgatcccaactcttgcgatgtttactcctggcatgagcccagagactgcacaactcttgacttttatctggcagccagcccctactttcgtcaacttgctactcttcctctcgtctctacttctacctgccactgccgcgcgtggtgaaagaacaccagatgtgaagtatctgaagcgcgtgtacactgccgctggccttgtctcagcgatcaaccacttggtgaccgtttacatctgctatacgtcttccaacccagaactcagcttcacacacgtattcatcccgaatcggagtacgtggacagatagcgcgacgatcggcctccactacattttccagatcgattggtggggttgtttcacgccctctctgatcttcgctcttatttctgtctgggatgtttaccgtgtcttgctcggcggcgccagcaccactcaactaattggctgggctgtctacatcctcggattggctgctgcgattggacctggtggcatgttggctgtcgtttggagctggagggaagaccgcttagttatgattgaatccggtgttaggggcactgtcaaaaagcccaagactgcttaatcataaggcactagatcttcgatgacctgactacccggggaacatacgagctttttgaatacaacatccagtgttcatttattctgaggaatcgagagatggctggtggggttacggagttagaagatcttgcataccttacctacaactagagaagggtaaaagacggcgctgcagatcatattgaagatgagtgcatatgcaagcaaggaaggtttgaaggatgttatgtccccagggtgttacagatactcgaacatggcttttaaggcactcataatgcggagatagcatttcgccttaacgaggcaacattttgcaatcatctgatcccagcaaccgattgagccttccttcatagaaagcgggaaaatagtttataaggccaacgaacgagacgagtttcatgtagatatttatcggaacatattcagcttctccctcgcacagagctatcacaacatgaattttaatagtgcagttttgctaggtttatagtaacatggcgctgttattggtcgc

SEQ ID NO: 18704 - DNA, 1044 bp, Muscodor strobelii
  misc_feature: SGI cDNA ID NO. 566276
  misc_feature: Encodes the peptide sequence at SEQ ID NO 18705
atggtgttgagaacaactatcgctgccctttctgcggcttacactgcattcgcagctccctcaatagatcccgtaagaacagtcgagctcaatgtaccaacaacgctctattcccaacagcgaggcgtcgatgggtcgttccagagtttctccatagagttttcgtatatggctgattacttcggaaatctaagtcatccaaacacacgatcccacaacctcctctcgaacctcctgcaacgctcaggcaaaaacgtagtaatccgagccggaggctcaacagccaacatagcaatcttcaacgcatctcagtccctcgcagtagagaatttctggaacggttcaacgaacgttggactcacgggggctaacacggaccaaccctctttatccctaataggaccagcatggtttgaagcctttcagactgctccgcggggaacgaagtacatctacgatttgaattatagagataacactacggccggtgttgccgctacaatcgacgttgcgaggagggtgtataagacattgggtaaggacttgtatgcgtttgaactgggtaatgagattgatctgagatgggtcggtgtttaccggcctgcggactggagtcctgagacttacacggaggagtatttgaggtatgcgagattatttagggagcaggtcttcgaggggaggaatagagatggggaggaaccgttgttccagatggggacgctgatagggagtggtggtgcttggatcaatcccggttggaatagcgtggagattttggggttgggtattaatcgtaatggagacgtgaagagtaccagtcagcacgactaccacggcagcaactgcaaatccacgacggaaatcgcgacaatccgtcaaaacctactaaaccacacaaatgtgcagaatcgcgtctggccacatctacagatgtctcccgtagtatcaacctacggcatcgagtacagcatcggagagacaaatagtatatcctgtcaaggacgagatttcgtatccaacgtgttcgcttccgcgctttga

SEQ ID NO: 18705 - protein, 347 aa, Muscodor strobelii
  misc_feature: SGI Peptide ID NO. 566276
  misc_feature (40)..(347): NCBI GI: 145248842 Blast Desc: An14g01330 [Aspergillus niger] gi|134081431|emb|CAK41913.1| protein product [Aspergillus niger]
  misc_feature (47)..(347): NCBI GI: 145233889 Blast Desc: An02g11890 [Aspergillus niger] gi|134057255|emb|CAK96418.1| protein product [Aspergillus niger]
  misc_feature (46)..(347): NCBI GI: 156060939 Blast Desc: SS1G_02612 [Sclerotinia sclerotiorum 1980] gi|154700016|gb|EDN99754.1| SS1G_02612 [Sclerotinia sclerotiorum 1980]
  misc_feature (86)..(347): NCBI GI: 169610051 Blast Desc: SNOG_08119 [Phaeosphaeria nodorum SN15] gi|160701970|gb|EAT84395.2| SNOG_08119 [Phaeosphaeria nodorum SN15]
  misc_feature (31)..(347): NCBI GI: 85114813 Blast Desc: NCU00937 [Neurospora crassa OR74A] gi|28926556|gb|EAA35527.1| [Neurospora crassa OR74A] gi|156071386|dbj|BAF75800.1| beta-glucuronidase [Neurospora
  misc_feature (13)..(347): NCBI GI: 170111527 Blast Desc: glycoside hydrolase family 79 protein [Laccaria bicolor S238N-H82] gi|164638010|gb|EDR02290.1| glycoside hydrolase family 79 protein [Laccaria bicolor S238N-H82]
  misc_feature (28)..(347): NCBI GI: 170110112 Blast Desc: glycoside hydrolase family 79 protein [Laccaria bicolor S238N-H82] gi|164638846|gb|EDR03121.1| glycoside hydrolase family 79 protein [Laccaria bicolor S238N-H82]
  misc_feature (46)..(347): NCBI GI: 261358686 Blast Desc: beta-glucuronidase [Verticillium albo-atrum VaMs.102]
  misc_feature (43)..(347): NCBI GI: 169783006 Blast Desc: [Aspergillus oryzae RIB40] gi|83774709|dbj|BAE64832.1| protein product [Aspergillus oryzae]
  misc_feature (43)..(347): NCBI GI: 238492749 Blast Desc: conserved [Aspergillus flavus NRRL3357] gi|220696105|gb|EED52447.1| conserved [Aspergillus flavus NRRL3357]
MVLRTTIAALSAAYTAFAAPSIDPVRTVELNVPTTLYSQQRGVDGSFQSFSIEFSYMADYFGNLSHPNTRSHNLLSNLLQRSGKNVVIRAGGSTANIAIFNASQSLAVENFWNGSTNVGLTGANTDQPSLSLIGPAWFEAFQTAPRGTKYIYDLNYRDNTTAGVAATIDVARRVYKTLGKDLYAFELGNEIDLRWVGVYRPADWSPETYTEEYLRYARLFREQVFEGRNRDGEEPLFQMGTLIGSGGAWINPGWNSVEILGLGINRNGDVKSTSQHDYHGSNCKSTTEIATIRQNLLNHTNVQNRVWPHLQMSPVVSTYGIEYSIGETNSISCQGRDFVSNVFASAL

SEQ ID NO: 18706 - DNA, 590 bp, Muscodor strobelii
  misc_feature: SGI EST ID NO. CUFF.43907.0
  misc_feature: Variant of the nucleotide sequence at SEQ ID NO 18704
actcacgggggctaacacggaccaaccctctttatccctaataggaccagcatggtttgaagcctttcagactgctccgcggggaacgaagtacatctacgatttgaattatagagataacactacggccggtgttgccgctacaatcgacgttgcgaggagggtgtataagacattgggtaaggacttgtatgcgtttgaactgggtaatgagattgatctgagatgggtcggtgtttaccggcctgcggactggagtcctgagacttacacggaggagtatttgaggtatgcgagattatttagggagcaggtcttcgaggggaggaatagagatggggaggaaccgttgttccagatggggacgctgatagggagtggtggtgcttggatcaatcccggttggaatagcgtggagattttggggttgggtattaatcgtaatggagacgtgaagagtaccagtcagcacgactaccacggcagcaactgcaaatccacgacggaaatcgcgacaatccgtcaaaacctactaaaccacacaaatgtgcagaatcgcgtctggccacatctacagatgtctcccgtag

SEQ ID NO: 18707 - DNA, 993 bp, Muscodor strobelii
  misc_feature: SGI cDNA ID NO. 566277
  misc_feature: Encodes the peptide sequence at SEQ ID NO 18708
atgcgctggctgactgccctcctctcgttggcggcgctgcctctgggatcgctcgccgccaagtcgtcctcggccgataggttccaagacttccacaagaaggctctggcttcttcgcccatcaagctcgccgactcctcctaccgcaagctcaccaaggcgccgcgagactactcggtcgcagtgctcctgacggccctcgacgccaagtatggctgccagctctgctccgccttccagcccgaatgggatctgctgggcaagagctacacaaggggcgacaagaagggggagtccagactgatcatcagcaccctcgacttctccgagggcagagagaccttcatgtctctcggcctccagtctgctcccacgctgttgctcttccctcccacgaccggcgaccacgctgttgcgagccccgatcctattcgctacgatttctctgccggttctctgaccgccgacgagatccgcaactggcttgttcgtcacctgcccgaccggcctcacccacctgtctaccgccccatcaactacttccgctggatcgtctccaccgtcagtttcctaggtgtcgccggcgtcatcttcaagctgtggccctacatgctgcccctgctccagaaccgcaacctctgggccggcgctagcttgatcggcatcctgctgttcaccagcggccacatgttcaaccagatccgcaaagttccttacgtcgccggcgatggtcatggtggcattagctactttgctggcgggttccagaaccagtatggtctggagacgcagatcgttgccttcatctatggtattctgtccttcgctaccatctcactcgctatcaaggcccctcggacagcggattcgtacttgcagcagttcatggtcattgcctggggcgctgttctggtcatcatgtacagctacctgatgtctgtcttccgcgtcaagaacggaggctaccctttcaagcttcccccctttatgtaa

SEQ ID NO: 18708 - protein, 330 aa, Muscodor strobelii
  misc_feature: SGI Peptide ID NO. 566277
  misc_feature (7)..(324): Pfam Id: PF04756 Pfam Desc: OST3 / OST6 family
  misc_feature (205)..(324): Pfam Id: PF04756 Pfam Desc: OST3 / OST6 family
  misc_feature (7)..(134): Pfam Id: PF04756 Pfam Desc: OST3 / OST6 family
  misc_feature (1)..(329): NCBI GI: 39945036 Blast Desc: MGG_04500 [Magnaporthe grisea 70-15] gi|145011393|gb|EDJ96049.1| MGG_04500 [Magnaporthe grisea 70-15]
  misc_feature (1)..(330): NCBI GI: 85080643 Blast Desc: NCU03995 [Neurospora crassa OR74A] gi|28917649|gb|EAA27344.1| NCU03995 [Neurospora crassa OR74A]
  misc_feature (18)..(330): NCBI GI: 256731638 Blast Desc: NECHADRAFT_69186 [Nectria haematococca mpVI 77-13-4]
  misc_feature (1)..(330): NCBI GI: 46136707 Blast Desc: FG09869.1 [Gibberella zeae PH-1]
  misc_feature (1)..(330): NCBI GI: 171677891 Blast Desc: protein product [Podospora anserina] gi|170937014|emb|CAP61672.1| protein product [Podospora anserina]
  misc_feature (26)..(329): NCBI GI: 154301026 Blast Desc: BC1G_10651 [Botryotinia fuckeliana B05.10] gi|150856399|gb|EDN31591.1| BC1G_10651 [Botryotinia fuckeliana B05.10]
  misc_feature (16)..(330): NCBI GI: 116201503 Blast Desc: CHGG_08636 [Chaetomium globosum CBS 148.51] gi|88177154|gb|EAQ84622.1| CHGG_08636 [Chaetomium globosum CBS 148.51]
  misc_feature (1)..(330): NCBI GI: 261358505 Blast Desc: dolichyl-diphosphooligosaccharide-protein glycotransferase [Verticillium albo-atrum VaMs.102]
  misc_feature (1)..(329): NCBI GI: 169600579 Blast Desc: SNOG_03130 [Phaeosphaeria nodorum SN15] gi|111068741|gb|EAT89861.1| SNOG_03130 [Phaeosphaeria nodorum SN15]
  misc_feature (1)..(329): NCBI GI: 189191682 Blast Desc: PTRG_01847 [Pyrenophora tritici-repentis Pt-1C-BFP] gi|187973786|gb|EDU41285.1| PTRG_01847 [Pyrenophora tritici-repentis Pt-1C-BFP]
  misc_feature (41)..(326): SWISSPROT Homolog: EC 2.4.1.119 Dolichyl-diphosphooligosaccharide--protein glycotransferase
MRWLTALLSLAALPLGSLAAKSSSADRFQDFHKKALASSPIKLADSSYRKLTKAPRDYSVAVLLTALDAKYGCQLCSAFQPEWDLLGKSYTRGDKKGESRLIISTLDFSEGRETFMSLGLQSAPTLLLFPPTTGDHAVASPDPIRYDFSAGSLTADEIRNWLVRHLPDRPHPPVYRPINYFRWIVSTVSFLGVAGVIFKLWPYMLPLLQNRNLWAGASLIGILLFTSGHMFNQIRKVPYVAGDGHGGISYFAGGFQNQYGLETQIVAFIYGILSFATISLAIKAPRTADSYLQQFMVIAWGAVLVIMYSYLMSVFRVKNGGYPFKLPPFM

SEQ ID NO: 18709 - DNA, 1829 bp, Muscodor strobelii
  misc_feature: SGI EST ID NO. CUFF.44045.1
  misc_feature: Variant of the nucleotide sequence at SEQ ID NO 18707
ccggcttttgaggacaagtgtcgccgtgagcacctccagcaccacggcaagcttcactgtgggagcttccgttcataccatctctaactctctacatctagccattgcggtgctctaatcagtcgttctttcttccggctctggcatcatcgtcaagatgcgctggctgactgccctcctctcgttggcggcgctgcctctgggatcgctcgccgccaagtcgtcctcggccgataggttccaagacttccacaagaaggctctggcttcttcgcccatcaagctcgccgactcctcctaccgcaagctcaccaaggcgccgcgagactactcggtcgcagtgctcctgacggccctcgacgccaagtatggctgccagctctgctccgccttccagcccgaatgggatctgctgggcaagagctacacaaggggcgacaagaagggggagtccagactgatcatcagcaccctcgacttctccgagggcagagagaccttcatgtctgtgagtgctcatcaacagcccatcaacagcccacctcccatgtgaaagcaatgtcgtgctgaccacactgctctctccccagctcggcctccagtctgctcccacgctgttgctcttccctcccacgaccggcgaccacgctgttgcgagccccgatcctattcgctacgatttctctgccggttctctgaccgccgacgagatccgcaactggcttgttcgtcacctgcccgaccggcctcacccacctgtctaccgccccatcaactacttccgctggatcgtctccaccgtcagtttcctaggtgtcgccggcgtcatcttcaagctgtggccctacatgctgcccctgctccagaaccgcaacctctgggccggcgctagcttgatcggcatcctgctgttcaccagcggccacatgttcaaccagatccgcaaagttccttacgtcgccggcgatggtcatggtggcattagctactttgctggcgggttccagaaccagtatggtctggagacgcagatcgttgccttcatctatggtattctgtccttcgctaccatctcactcgctatcaaggcccctcggacagcggattcgtacttgcagcagttcatggtcattgcctggggcgctgttctggtcatcatgtacagctacctgatgtctgtcttccgcgtcaagaacggaggctaccctttcaagcttcccccctttatgtaaattatacacagctcatctgcgaatggatagatgcgccatatcatacatctcctggccgtaatggcatggcagacgtggcagctctcgaggcttgtgcgcaaatactccgaagctcgtaacggcacgcgccgagctcatatgctgcaagggatgtactcatacactcatacaatggagactctaaggacttgcggtgaataaaatgcatggcgactcgggcggaataaaagaaaattagaattgcgttcatgaacatgagaaagcgactaagtgaaccggtagttgaaccccagattggtgtcttggcatggagaaatcataacctggggaagctgatctcggggtatcactaaccgatcaacaacatcgccctgacgatatatcgtcatacccaagtacctgcataaaccgatagtccatatgatgtaaggtgattgtggactgcccatgatgtctgagcgaccaattggtcattcttagatagacaattgaccatcatggtgttgagaacaactatcgctgccctttctgcggcttacactgcattcgcagctccctcaatagatcccgtaagaacagtcgagctcaatgtaccaa

SEQ ID NO: 18710 - DNA, 2010 bp, Muscodor strobelii
  misc_feature: SGI cDNA ID NO. 566278
  misc_feature: Encodes the peptide sequence at SEQ ID NO 18711
atgcgtcggaccgcaaaggccaccacggcccgcgatcaacgaggcgacatggatgacgaaaagcgtactcgattgcttcatgaacttgagctgaagcatcacaagtctgctgccgagggcgatcttctcgtcaaggatgaagatgtccgccgacttcgagtccgcattctactgctcaaggacgagaacaccacactacgagacgagatcgagatgaacagtgccagcaacacgaagctcgcggcccaatgcgacaacctcaaggcagagattgaggccaagatggacgccgttcgcttgcaggagaagcagctgcgcaaacaggagcgggagtatgcaaacctcaagtctgagcttcagtccatgagtaacgtcaatgagagttccgccaatgtcctcgccgagaaactagccctcagccgtgaactatccatcctaaagcccgagctcgagcacctccgatcccaggtcaaccatcagcaagctaccctcgccgagaagttggcacttgagcgtcaggtcaccacgctcgaggtcgaactagcgaacgagaagaaggctacacgacgcgcaatgcagagtcgcgaaagcaatgaccgcgttgaagacgacctccgcaagaagcttcgagagattgagaagaagttgaccgccgagacagccgcacgagagagactcgaagatcagctcgagcaaagcaagaaaacccatgagatggccctgcaggaccaagacagtacccgagagctggaagcggatcttcgaaagcagctccaagaagcccagcgtcaattgagagacgagaaagaggagaaagagagacttcaggaggagctacaaagcgctaagcgtgcctcgaaaaaggcccagcaggttcaagccggcacaactgccgaagaagaacttcgcgcccaattggaagagtcccaaactaagctcgctgcgctccaaaacaaatactccaatctcgaacaagagcatcagaccatggctgccgaagtagaaagtcgcaacgaacagtttgagaagagagtcgtcaagatgaagacgaagtaccgagagcttcaagaagagctgaagaagtgtcagagcgatcttgtcaagactcaacaacaacaagctcgtgctgccaaggccgaggagacgaagaaggatgtcgccaaaacagctgctttccgtaagagaaaagcccaggagatggcgagcggcgacttcaccaacatcgagatccaaacccccagcgccgaagacgcaacgagaggacgtaaggccaagaaacccgcattcgagcccaaggtcgtagagaagtccactttctccattactcctttcctcaaccgatccaaggaggcaagtgacgaggcgtcgaagatggatgacgtagaggactctattctaggtccccagtccgcatcgtcacactccacgcgctcgccagccgagcaacctgcaccatcagaggctgccgaagcctcagagcctgagcttgagcctgccgagaccgcacctgtcgagacggaggaaccgaagccagctcagaaatcccgcggtaggcccaagaaggtccttggagatgccccctcagccaagcagaacgcaattcctcagggaaccacaaagaaagtcctaaagcagaagaagagcgccgagaaggctgagagtgcggcagctcaaccgcagaccgatgctgtcgagaagactacgacagtcgctgtcaaattcaacgactcagctcagcacgaagacaccaatgctcctcgcttgaacgaggagataaagaagaggaagcgcaaggtcttaggttccacaaagacactgttcgacgaggatgatggagaggttccggctgcggctgcgaggaaacccgtggccaaggtgccgcttggtgccaaaagagttgttagtaaggcaccgcttggtggtgcgcagcggaatgcgtttgcgggctctgcttcgttttcgcccctcaagcgtgataagaggggtgtgggcgcgagtttcctggcttag

SEQ ID NO: 18711 - protein, 669 aa, Muscodor strobelii
  misc_feature: SGI Peptide ID NO. 566278
  misc_feature (14)..(669): NCBI GI: 39945038 Blast Desc: MGG_04501 [Magnaporthe grisea 70-15] gi|145011392|gb|EDJ96048.1| MGG_04501 [Magnaporthe grisea 70-15]
  misc_feature (21)..(651): NCBI GI: 116201505 Blast Desc: CHGG_08637 [Chaetomium globosum CBS 148.51] gi|88177155|gb|EAQ84623.1| CHGG_08637 [Chaetomium globosum CBS 148.51]
  misc_feature (17)..(487): NCBI GI: 85080638 Blast Desc: NCU03994 [Neurospora crassa OR74A] gi|28917648|gb|EAA27343.1| [Neurospora crassa OR74A]
  misc_feature (17)..(613): NCBI GI: 261358506 Blast Desc: conserved [Verticillium albo-atrum VaMs.102]
  misc_feature (18)..(669): NCBI GI: 154301024 Blast Desc: BC1G_10650 [Botryotinia fuckeliana B05.10] gi|150856398|gb|EDN31590.1| BC1G_10650 [Botryotinia fuckeliana B05.10]
  misc_feature (21)..(669): NCBI GI: 171677889 Blast Desc: protein product [Podospora anserina] gi|170937013|emb|CAP61671.1| protein product [Podospora anserina]
  misc_feature (29)..(668): NCBI GI: 189191684 Blast Desc: conserved [Pyrenophora tritici-repentis Pt-1C-BFP] gi|187973787|gb|EDU41286.1| conserved [Pyrenophora tritici-repentis Pt-1C-BFP]
  misc_feature (254)..(669): NCBI GI: 256732016 Blast Desc: NECHADRAFT_104389 [Nectria haematococca mpVI 77-13-4]
  misc_feature (18)..(448): NCBI GI: 156043161 Blast Desc: SS1G_10583 [Sclerotinia sclerotiorum 1980] gi|154694971|gb|EDN94709.1| SS1G_10583 [Sclerotinia sclerotiorum 1980]
  misc_feature (205)..(668): NCBI GI: 46136705 Blast Desc: FG09868.1 [Gibberella zeae PH-1]
MRRTAKATTARDQRGDMDDEKRTRLLHELELKHHKSAAEGDLLVKDEDVRRLRVRILLLKDENTTLRDEIEMNSASNTKLAAQCDNLKAEIEAKMDAVRLQEKQLRKQEREYANLKSELQSMSNVNESSANVLAEKLALSRELSILKPELEHLRSQVNHQQATLAEKLALERQVTTLEVELANEKKATRRAMQSRESNDRVEDDLRKKLREIEKKLTAETAARERLEDQLEQSKKTHEMALQDQDSTRELEADLRKQLQEAQRQLRDEKEEKERLQEELQSAKRASKKAQQVQAGTTAEEELRAQLEESQTKLAALQNKYSNLEQEHQTMAAEVESRNEQFEKRVVKMKTKYRELQEELKKCQSDLVKTQQQQARAAKAEETKKDVAKTAAFRKRKAQEMASGDFTNIEIQTPSAEDATRGRKAKKPAFEPKVVEKSTFSITPFLNRSKEASDEASKMDDVEDSILGPQSASSHSTRSPAEQPAPSEAAEASEPELEPAETAPVETEEPKPAQKSRGRPKKVLGDAPSAKQNAIPQGTTKKVLKQKKSAEKAESAAAQPQTDAVEKTTTVAVKFNDSAQHEDTNAPRLNEEIKKRKRKVLGSTKTLFDEDDGEVPAAAARKPVAKVPLGAKRVVSKAPLGGAQRNAFAGSASFSPLKRDKRGVGASFLA

SEQ ID NO: 18712 - DNA, 2521 bp, Muscodor strobelii
  misc_feature: SGI EST ID NO. CUFF.43912.0
  misc_feature: Variant of the nucleotide sequence at SEQ ID NO 18710
ttcaaggtaagcaagggagcaattgatacctgcaattccaatcaaacaaattcaagtactttatttgtcttttgatcaagaattcttgtctctctttccacaagttcaaacatcaacccacccaggcaaagtagacagacgcgtcctgcccatgatgcgtcggaccgcaaaggccaccacggcccgcgatcaacgaggcgacatggatgacgaaaagcgtactcgattgcttcatgaacttgagctgaagcatcacaagtctgctgccgagggcgatcttctcgtcaaggatgaagatgtccgccgacttcgagtccgcattctactgctcaaggacgagaacaccacactacgagacgagatcgagatgaacagtgccagcaacacgaagctcgcggcccaatgcgacaacctcaaggcagagattgaggccaagatggacgccgttcgcttgcaggagaagcagctgcgcaaacaggagcgggagtatgcaaacctcaagtctgagcttcagtccatgagtaacgtcaatgagagttccgccaatgtcctcgccgagaaactagccctcagccgtgaactatccatcctaaagcccgagctcgagcacctccgatcccaggtcaaccatcagcaagctaccctcgccgagaagttggcacttgagcgtcaggtcaccacgctcgaggtcgaactagcgaacgagaagaaggctacacgacgcgcaatgcagagtcgcgaaagcaatgaccgcgttgaagacgacctccgcaagaagcttcgagagattgagaagaagttgaccgccgagacagccgcacgagagagactcgaagatcagctcgagcaaagcaagaaaacccatgagatggccctgcaggaccaagacagtacccgagagctggaagcggatcttcgaaagcagctccaagaagcccagcgtcaattgagagacgagaaagaggagaaagagagacttcaggaggagctacaaagcgctaagcgtgcctcgaaaaaggcccagcaggttcaagccggcacaactgccgaagaagaacttcgcgcccaattggaagagtcccaaactaagctcgctgcgctccaaaacaaatactccaatctcgaacaagagcatcagaccatggctgccgaagtagaaagtcgcaacgaacagtttgagaagagagtcgtcaagatgaagacgaagtaccgagagcttcaagaagagctgaagaagtgtcagagcgatcttgtcaagactcaacaacaacaagctcgtgctgccaaggccgaggagacgaagaaggatgtcgccaaaacagctgctttccgtaagagaaaagcccaggagatggcgagcggcgacttcaccaacatcgagatccaaacccccagcgccgaagacgcaacgagaggacgtaaggccaagaaacccgcattcgagcccaaggtcgtagagaagtccactttctccattactcctttcctcaaccgatccaaggaggcaagtgacgaggcgtcgaagatggatgacgtagaggactctattctaggtccccagtccgcatcgtcacactccacgcgctcgccagccgagcaacctgcaccatcagaggctgccgaagcctcagagcctgagcttgagcctgccgagaccgcacctgtcgagacggaggaaccgaagccagctcagaaatcccgcggtaggcccaagaaggtccttggagatgccccctcagccaagcagaacgcaattcctcagggaaccacaaagaaagtcctaaagcagaagaagagcgccgagaaggctgagagtgcggcagctcaaccgcagaccgatgctgtcgagaagactacgacagtcgctgtcaaattcaacgactcagctcagcacgaagacaccaatgctcctcgcttgaacgaggagataaagaagaggaagcgcaaggtcttaggttccacaaagacactgttcgacgaggatgatggagaggttccggctgcggctgcgaggaaacccgtggccaaggtgccgcttggtgccaaaagagttgttagtaaggcaccgcttggtggtgcgcagcggaatgcgtttgcgggctctgcttcgttttcgcccctcaagcgtgataagaggggtgtgggcgcgagtttcctggcttaggtaaatgagcgcaggtgacgatcatgattcgatgatgaacttcgccggagttaacggtgcattgttatggcgttttgtgtttgtatgcatacctaatgttttgttaggggatttgggaggggggttggagtttttgaggcgcgctgtaattgtaccggtttgagcacagatgataggcgcaatggcttgtgtcgttaaaaggagcaaatatgcacttctattatctccatcctaagattattgagctatggctggagatgaaagttctctagtgtttccgttgtgcttgttgaagttgagcgtagttgcacaaggcgataagtaacttagctagatgacatgaaccaggagtcctca

SEQ ID NO: 18713 - DNA, 1179 bp, Muscodor strobelii
  misc_feature: SGI cDNA ID NO. 566279
  misc_feature: Encodes the peptide sequence at SEQ ID NO 18714
atgaagatgcagctcgaaactgttatggcgatgttcgccattggtgccatcgccgcaccttcggtacagactcggacgtcttccgcggcttgcacgtcggccgtcacactcgatgccagcaccaacgtcttctctaaatacacactccacgccaatacattctaccgggatgaagtaaacaaggccgtggaggcgattaccgacacttctctcaaggcatcggctgctaaggttgcagatgtcggcagctttctctggctcgacacgatcgcaaatattgccaagttcgatagcgcgatatcagatcttccttgcgaccacatcctgggtcttgtgatctacgacttgcccggtcgtgattgtgccgccaaggcctcaaacggtgaacttgcgtactcagaaattgacaagtacaagacgtcgtacattgaccccatcgtcgcgaagatcaaggccaaccccaactcagctttcgctctcatcatcgagcctgactcgcttcccaacctcgtcaccaacgcagatctcaccacctgccagaacagcaagagtgcttacgaggagggtgtcgcctacgctctgaagaacctcaaccttcccaacgtcgtcatgtacgttgatgctggccacggtggctggctcggctgggacgccaaccttcagcccggtgctgaggagctcgccaaggtgtacaagaacgccggcagccctaagcaagtccgtggtttctccaccaacattgctggctggaactcatttgaccaatcccccggcgagttctccaccgcctcagatgccaagtacaactcgtgccagaacgagaagacctacatccagaaattcggcgctgccctcaagaccgccggccacccgagcttcgccatcatggacactggccgcaacgccgtcactggcctgcgtgacgcgtggggtgactggtgcaacgtcgacggtgctggtttcggtgtccgccctaccggcagcaccggcgacagcaacactgacgcctttgtctggggcaagcccggtggtgagtcggatggtactagcgataccagcgccacccgatacgattcgttctgcggaaagcccgatgcctacaagccttctcccgaggccggtcaatggaaccaggcttactttgagatgctgctcaagaacgcgaagcccgctttctaa

SEQ ID NO: 18714 - protein, 392 aa, Muscodor strobelii
  misc_feature: SGI Peptide ID NO. 566279
  misc_feature (51)..(359): Pfam Id: PF01341 Pfam Desc: Glycosyl hydrolases family 6
  misc_feature (23)..(392): NCBI GI: 116201509 Blast Desc: conserved [Chaetomium globosum CBS 148.51] gi|88177157|gb|EAQ84625.1| conserved [Chaetomium globosum CBS 148.51]
  misc_feature (18)..(392): NCBI GI: 85080647 Blast Desc: exoglucanase 3 precursor [Neurospora crassa OR74A] gi|28917650|gb|EAA27345.1| exoglucanase 3 precursor [Neurospora crassa OR74A]
  misc_feature (1)..(392): NCBI GI: 39945034 Blast Desc: MGG_04499 [Magnaporthe grisea 70-15] gi|145011394|gb|EDJ96050.1| MGG_04499 [Magnaporthe grisea 70-15]
  misc_feature (19)..(392): NCBI GI: 171677885 Blast Desc: protein product [Podospora anserina] gi|170937011|emb|CAP61669.1| protein product [Podospora anserina]
  misc_feature (33)..(392): NCBI GI: 169626319 Blast Desc: SNOG_16444 [Phaeosphaeria nodorum SN15] gi|160705810|gb|EAT76142.2| SNOG_16444 [Phaeosphaeria nodorum SN15]
  misc_feature (1)..(392): NCBI GI: 189190568 Blast Desc: exoglucanase 3 precursor [Pyrenophora tritici-repentis Pt-1C-BFP] gi|187973229|gb|EDU40728.1| exoglucanase 3 precursor [Pyrenophora tritici-repentis Pt-1C-BFP]
  misc_feature (32)..(392): NCBI GI: 23429039 Blast Desc: cellobiohydrolase II [Cochliobolus heterostrophus]
  misc_feature (33)..(392): NCBI GI: 189194878 Blast Desc: exoglucanase-6A precursor [Pyrenophora tritici-repentis Pt-1C-BFP] gi|187979656|gb|EDU46282.1| exoglucanase-6A precursor [Pyrenophora tritici-repentis
  misc_feature (39)..(390): NCBI GI: 169597801 Blast Desc: SNOG_01690 [Phaeosphaeria nodorum SN15] gi|111070219|gb|EAT91339.1| SNOG_01690 [Phaeosphaeria nodorum SN15]
  misc_feature (42)..(392): NCBI GI: 1346227 Blast Desc: GUX3_AGABI RecName: Full=Exoglucanase 3; AltName: Full=Exocellobiohydrolase 3; AltName: Full=1,4-beta-cellobiohydrolase 3; Flags: Precursor [Agaricus
  misc_feature (42)..(392): SWISSPROT Homolog: EC 3.2.1.91 Cellulose 1,4-beta-cellobiosidase
MKMQLETVMAMFAIGAIAAPSVQTRTSSAACTSAVTLDASTNVFSKYTLHANTFYRDEVNKAVEAITDTSLKASAAKVADVGSFLWLDTIANIAKFDSAISDLPCDHILGLVIYDLPGRDCAAKASNGELAYSEIDKYKTSYIDPIVAKIKANPNSAFALIIEPDSLPNLVTNADLTTCQNSKSAYEEGVAYALKNLNLPNVVMYVDAGHGGWLGWDANLQPGAEELAKVYKNAGSPKQVRGFSTNIAGWNSFDQSPGEFSTASDAKYNSCQNEKTYIQKFGAALKTAGHPSFAIMDTGRNAVTGLRDAWGDWCNVDGAGFGVRPTGSTGDSNTDAFVWGKPGGESDGTSDTSATRYDSFCGKPDAYKPSPEAGQWNQAYFEMLLKNAKPAF

SEQ ID NO: 18715 - DNA, 3146 bp, Muscodor strobelii
  misc_feature: SGI EST ID NO. CUFF.43924.0
  misc_feature: Variant of the nucleotide sequence at SEQ ID NO 18713
gttgcagatgtcggcagctttctctggctgtaagtttccaaatcgcgtgtaagttgaatttggcacctaatccagaatgtagcgacacgatcgcaaatattgccaagttcgatagcgcgatatcagatcttccttgcgaccacatcctgggtcttgtgatctacgacttgcccggtcgtgattgtgccgccaaggcctcaaacggtgaacttgcgtactcagaaattgacaagtacaagacgtcgtacattgaccccatcgtcgcgaagatcaaggccaaccccaactcagctttcgctctcatcatcgagcctgactcgcttcccaacctcgtcaccaacgcagatctcaccacctgccagaacagcaagagtgcttacgaggagggtgtcgcctacgctctgaagaacctcaaccttcccaacgtcgtcatgtacgttgatgctggccacggtggctggctcggctgggacgccaaccttcagcccggtgctgaggagctcgccaaggtgtacaagaacgccggcagccctaagcaagtccgtggtttctccaccaacattgctggctggaactcattgtatgtttttacacacaaacccaacgaggacaggaaaaagaagactaacatattgaaattagtgaccaatcccccggcgagttctccaccgcctcagatgccaagtacaactcgtgccagaacgagaagacctacatccagaaattcggcgctgccctcaagaccgccggccacccgagcttcgccatcatggacactggccgcaacgccgtcactggcctgcgtgacgcgtggggtgactggtgcaacgtcgacggtgctggtttcggtgtccgccctaccggcagcaccggcgacagcaacactgacgcctttgtctggggcaagcccggtggtgagtcggatggtactagcgataccagcgccacccgatacgattcgttctgcggaaagcccgatgcctacaagccttctcccgaggccggtcaatggaaccaggcttactttgagatgctgctcaagaacgcgaagcccgctttctaagtcgcaaaatgtaatcgatcatcggtggaaccgggttcacttgtattatgtaaatagcttctcaagtacatacaaatgaagtgggctactcactcactagaattcaatctatgtcaacatagtctcacggtgatggtgcttgggagtgttcactccgcatgatgctgtacttcggtgtggagctgcttactttgtgagaggtgaagcttccgactgtgaacgaggatgacggattgccgaaggtttttcgatgtcggtcattgtcaaccctcgatccgcgtcgattcgaaatactcggcgagttttctaaatttttttcacaatgatttccagccatgcgatgtctgaatagtaatacaaatattatcgacgatgcagtgttccgcgtcaattggccggagataacacagcgtgcatgcagcatctggggaccactttgcagcaacctccaccgctcaacgcgatcatatggaaaccttcacacaagatttacagtcgcgtgccattcaaagccgcttccttacctctagatctgtttccatttcgagatacaaatcaccgtacgcgctgactaagcgtcgttcgatgacgccaatttgagattggaaaaatgtatctaaacctttgcatcacgagattttcatacctctgatgtctggggatcattaagcccaacgacactcctttgatcaaatcaacaagttgatctatactggtcactgcaaatcaatcatcaatcctacgaatatcgatgcaacctatcaggagagacgttcgcccggcatgtttagagaccatgttgtgatacaccgacaccctatcccgaggttcctcgctcgcctcgaacacttcacatgggccaacttcacctttccgatggcgacggggggcttggccctgttgttatctgaacagacacaaggcttcaccttccatggtctacagacaattggcaaagtggtttatgtcttcgatctcgtgatcttctcccttgtttcttgcgccataacctatcgcttcctcaaatttccaggcacgttgacgtcttcggttacgcatcctactgagggcctattcctgggcacgtcgacccttagtgtggcttcgatcattgctggaatggcgcgatacggtatcccatcctgcgggccttggctcatcgtcgtttaccgaattttgttttggatatactttgctattacattcctcatcgctgtcggccagtattcactactatttacgtcaccgaggctcaaaatccaagacatgacgccggcatgggatctgcccatcttcccgttcatgttgtcaggtacaatcgcagcagccggtgccgccgaccagcctccgtggcacgcggcgcctatcatatttgccggtctcactgctcagggccttggaatgttggtttctatcttcatgtacgctagttatgtacgacgaatgattcaatatggctttcctgcaccgaaatctcgaccagggatgttcatcgctgttgggccaccgtctttcacgagtcttgctatcattgggttatctaacgacttcccgagatactataattggtttggaagcgacgagatcacaattcagattcttcgtgttcttgcattggtgacgagcgtctttatctggtctttgagcctatggttcttctgtatcgccgtcatagctaacttggctgttcgaaagcaactcacatttcatctcaactggtacgccttcatctttcccaacgtcgggtttacgatcacagtcatatctgttgggaagacgttgaagagtcctggggtaatgggtgttggtagcgggatgactatactcctagtcattggctggctattgattgttgtgaatcatgtcagggctgtctggagaggcgatatcatggcgcctggtaaagatgaagatttttacgtcgatgagaaggatcatgatcatgtcaagaagagcgatgatgacggaaatgtggtgaaaatagcataagttagggtttggtggttgtgccattcttcattcagtaactcatagaattatttaacgattcagttgaatatctacctagattatgataaacagg

SEQ ID NO: 18716 - DNA, 1206 bp, Muscodor strobelii
  misc_feature: SGI cDNA ID NO. 566280
  misc_feature: Encodes the peptide sequence at SEQ ID NO 18717
atgtttagagaccatgttgtgatacaccgacaccctatcccgaggttcctcgctcgcctcgaacacttcacatgggccaacttcacctttccgatggcgacggggggcttggccctgttgttatctgaacagacacaaggcttcaccttccatggtctacagacaattggcaaagtggtttatgtcttcgatctcgtgatcttctcccttgtttcttgcgccataacctatcgcttcctcaaatttccaggcacgttgacgtcttcggttacgcatcctactgagggcctattcctgggcacgtcgacccttagtgtggcttcgatcattgctggaatggcgcgatacggtatcccatcctgcgggccttggctcatcgtcgtttaccgaattttgttttggatatactttgctattacattcctcatcgctgtcggccagtattcactactatttacgtcaccgaggctcaaaatccaagacatgacgccggcatgggatctgcccatcttcccgttcatgttgtcaggtacaatcgcagcagccggtgccgccgaccagcctccgtggcacgcggcgcctatcatatttgccggtctcactgctcagggccttggaatgttggtttctatcttcatgtacgctagttatgtacgacgaatgattcaatatggctttcctgcaccgaaatctcgaccagggatgttcatcgctgttgggccaccgtctttcacgagtcttgctatcattgggttatctaacgacttcccgagatactataattggtttggaagcgacgagatcacaattcagattcttcgtgttcttgcattggtgacgagcgtctttatctggtctttgagcctatggttcttctgtatcgccgtcatagctaacttggctgttcgaaagcaactcacatttcatctcaactggtacgccttcatctttcccaacgtcgggtttacgatcacagtcatatctgttgggaagacgttgaagagtcctggggtaatgggtgttggtagcgggatgactatactcctagtcattggctggctattgattgttgtgaatcatgtcagggctgtctggagaggcgatatcatggcgcctggtaaagatgaagatttttacgtcgatgagaaggatcatgatcatgtcaagaagagcgatgatgacggaaatgtggtgaaaatagcataa

SEQ ID NO: 18717 - protein, 401 aa, Muscodor strobelii
  misc_feature: SGI Peptide ID NO. 566280
  misc_feature (25)..(325): Pfam Id: PF03595 Pfam Desc: C4-dicarboxylate transporter/malic acid transport protein
  misc_feature (3)..(377): NCBI GI: 154290673 Blast Desc: BC1G_15595 [Botryotinia fuckeliana B05.10] gi|150847447|gb|EDN22640.1| BC1G_15595 [Botryotinia fuckeliana B05.10]
  misc_feature (19)..(377): NCBI GI: 115491087 Blast Desc: conserved [Aspergillus terreus NIH2624] gi|114197031|gb|EAU38731.1| conserved [Aspergillus terreus NIH2624]
  misc_feature (19)..(377): NCBI GI: 121719747 Blast Desc: C4-dicarboxylate transporter/malic acid transport protein, [Aspergillus clavatus NRRL 1] gi|119404784|gb|EAW15146.1| C4-dicarboxylate transporter/malic 1]
  misc_feature (8)..(377): NCBI GI: 70983484 Blast Desc: C4-dicarboxylate transporter/malic acid transport protein, [Aspergillus fumigatus Af293] gi|66844895|gb|EAL85231.1| C4-dicarboxylate transporter/malic acid transport protein, Af293]
  misc_feature (16)..(377): NCBI GI: 255945319 Blast Desc: Pc20g09310 [Penicillium chrysogenum Wisconsin 54-1255] gi|211588162|emb|CAP86260.1| Pc20g09310 [Penicillium chrysogenum Wisconsin 54-1255]
  misc_feature (8)..(377): NCBI GI: 119484216 Blast Desc: C4-dicarboxylate transporter/malic acid transport protein, [Neosartorya fischeri NRRL 181] gi|119410167|gb|EAW20114.1| C4-dicarboxylate transporter/malic
  misc_feature (19)..(377): NCBI GI: 238490736 Blast Desc: C4-dicarboxylate transporter/malic acid transport protein, [Aspergillus flavus NRRL3357] gi|220697018|gb|EED53359.1| C4-dicarboxylate transporter/malic
  misc_feature (19)..(377): NCBI GI: 169772825 Blast Desc: [Aspergillus oryzae RIB40] gi|83768742|dbj|BAE58879.1| protein product [Aspergillus oryzae]
  misc_feature (10)..(385): NCBI GI: 46115602 Blast Desc: FG03643.1 [Gibberella zeae PH-1]
  misc_feature (19)..(377): NCBI GI: 67522030 Blast Desc: AN1472.2 [Aspergillus nidulans FGSC A4] gi|40745446|gb|EAA64602.1| AN1472.2 [Aspergillus nidulans FGSC A4] gi|259486787|tpe|CBF84928.1| TPA: C4-dicarboxylate acid FGSC
MFRDHVVIHRHPIPRFLARLEHFTWANFTFPMATGGLALLLSEQTQGFTFHGLQTIGKVVYVFDLVIFSLVSCAITYRFLKFPGTLTSSVTHPTEGLFLGTSTLSVASIIAGMARYGIPSCGPWLIVVYRILFWIYFAITFLIAVGQYSLLFTSPRLKIQDMTPAWDLPIFPFMLSGTIAAAGAADQPPWHAAPIIFAGLTAQGLGMLVSIFMYASYVRRMIQYGFPAPKSRPGMFIAVGPPSFTSLAIIGLSNDFPRYYNWFGSDEITIQILRVLALVTSVFIWSLSLWFFCIAVIANLAVRKQLTFHLNWYAFIFPNVGFTITVISVGKTLKSPGVMGVGSGMTILLVIGWLLIVVNHVRAVWRGDIMAPGKDEDFYVDEKDHDHVKKSDDDGNVVKIA

SEQ ID NO: 18718 - DNA, 3146 bp, Muscodor strobelii; identical to SEQ ID NO: 18715
  misc_feature: SGI EST ID NO. CUFF.43924.0
  misc_feature: Variant of the nucleotide sequence at SEQ ID NO 18716

SEQ ID NO: 18719 - DNA, 1146 bp, Muscodor strobelii
  misc_feature: SGI cDNA ID NO. 566281
  misc_feature: Encodes the peptide sequence at SEQ ID NO 18720
atgacggtggagatcgatcctattattctggcggcctttgggccgcctcccaaaggcataaacttggaggaaaatcaagcgacagcaattattgcggtggccctcgtgtccgcgggtttcgcgacggtcgccctgggtctaagaatatgggcaaggaacttccagcggttcggcatgatggcggacgattggttgatgattgttgctctcatttttacattcggtactctcgttatcactattctaggagccaaagcgggcgcgggacagcacgtatgggctcttcatccccaagatgtagccaatgtctttgaattgttatatgcgtacactttcatttatgcgggtagtgtgtcgttcacaaaaatatcgatcctgctgttctactaccgtttattcgagagggggtcgaaatggttccacgttcgcttaggcttcgcagctttcttttcgattggatacctcctctcaatctggggtgtggcagctggtctttgcatgccgactcgatatttctggacacagtttcttggtgagactggacgttgtctcgatataaatgcctccttcttgagcttgacggcgctgaacttggtcgccgacgttttagtcttagtcgtcccgattcccgagattctggctcttcagatgcccacgaacagaaaactgggagtcttattcatcatgcttcttggaggcctggtttgtgtcgtcagcgcagtccgtatctgggctttcgtcgtcttcacccaagccatcgaccttacatgggttcaagccaacgtcttcctcttatcgtcagttgagcctgcgtttggcattgtctcagcctgtctaccaagccttcgaccgctctatcgccgagcaagatcaaaaatcaccggaaaagactcgactagcggcacgcgcagtggcacatggtacgccaattcgaaaaccagccgtgttgggaatagttacgtccgctttggagacgatacctcgaggtcaggagacaatgatgacattgctttgacctctgtcggcattgggaaagggccccaatccaagaaaccgatgccccagaatatcatactcgtacgatcggaaataacacagcaatcctcaatccagagatcaagagaccctgagctggactcactctga

SEQ ID NO: 18720 - protein, 381 aa, Muscodor strobelii
  misc_feature: SGI Peptide ID NO. 566281
  misc_feature (1)..(369): NCBI GI: 145604961 Blast Desc: MGG_02001 [Magnaporthe grisea 70-15] gi|145012868|gb|EDJ97509.1| MGG_02001 [Magnaporthe grisea 70-15]
  misc_feature (3)..(303): NCBI GI: 46115324 Blast Desc: FG03504.1 [Gibberella zeae PH-1]
  misc_feature (3)..(334): NCBI GI: 46114326 Blast Desc: FG03005.1 [Gibberella zeae PH-1]
  misc_feature (6)..(377): NCBI GI: 255951390 Blast Desc: Pc22g25770 [Penicillium chrysogenum Wisconsin 54-1255] gi|211593479|emb|CAP99865.1| Pc22g25770 [Penicillium chrysogenum Wisconsin 54-1255]
  misc_feature (5)..(371): NCBI GI: 145254394 Blast Desc: An18g01530 [Aspergillus niger] gi|134084193|emb|CAK47226.1| protein product [Aspergillus niger]
  misc_feature (11)..(338): NCBI GI: 119473139 Blast Desc: NFIA_059740 [Neosartorya fischeri NRRL 181] gi|119406668|gb|EAW16619.1| conserved [Neosartorya fischeri NRRL 181]
  misc_feature (11)..(330): NCBI GI: 145245001 Blast Desc: An11g08020 [Aspergillus niger] gi|134079463|emb|CAK45995.1| protein product [Aspergillus niger]
  misc_feature (10)..(305): NCBI GI: 239612727 Blast Desc: conserved [Ajellomyces dermatitidis ER-3]
  misc_feature (11)..(340): NCBI GI: 256724727 Blast Desc: NECHADRAFT_84327 [Nectria haematococca mpVI 77-13-4]
  misc_feature (13)..(300): NCBI GI: 255955939 Blast Desc: Pc21g17240 [Penicillium chrysogenum Wisconsin 54-1255] gi|211590433|emb|CAP96621.1| Pc21g17240 [Penicillium chrysogenum Wisconsin 54-1255]
MTVEIDPIILAAFGPPPKGINLEENQATAIIAVALVSAGFATVALGLRIWARNFQRFGMMADDWLMIVALIFTFGTLVITILGAKAGAGQHVWALHPQDVANVFELLYAYTFIYAGSVSFTKISILLFYYRLFERGSKWFHVRLGFAAFFSIGYLLSIWGVAAGLCMPTRYFWTQFLGETGRCLDINASFLSLTALNLVADVLVLVVPIPEILALQMPTNRKLGVLFIMLLGGLVCVVSAVRIWAFVVFTQAIDLTWVQANVFLLSSVEPAFGIVSACLPSLRPLYRRARSKITGKDSTSGTRSGTWYANSKTSRVGNSYVRFGDDTSRSGDNDDIALTSVGIGKGPQSKKPMPQNIILVRSEITQQSSIQRSRDPELDSL

SEQ ID NO: 18721 - DNA, 1945 bp, Muscodor strobelii
  misc_feature: SGI EST ID NO. CUFF.43938.0
  misc_feature: Variant of the nucleotide sequence at SEQ ID NO 18719
tcgaaagagaatttgcttccgtgaagatctttagactttgccaatttcatcccatcttaaactgaaaggggtgttcgacagaatgaattcgtagatgctatgatataagcacttgactcttgccgtgggtcttcgattctgaatagcctataattcgtcgtgtgctcctcaaaacatcaaccttgcgagttgctcatcaactacacatcattatttcctagagtcgtcggctgggctcaatgacggtggagatcgatcctattattctggcggcctttgggccgcctcccaaaggcataaacttggaggaaaatcaagcgacagcaattattgcggtggccctcgtgtccgcgggtttcgcgacggtcgccctgggtctaagaatatgggcaaggaacttccagcggttcggcatgatggcggacgattggttgatgattgttgctctcatttttacattcggtactctcgttatcactattctaggagccaaagcgggcgcgggacagcacgtatgggctcttcatccccaagatgtagccaatgtctttgaattgttatatgcgtacactttcatttatgcgggtagtgtgtcgttcacaaaaatatcgatcctgctgttctactaccgtttattcgagagggggtcgaaatggttccacgttcgcttaggcttcgcagctttcttttcgattggatacctcctctcaatctggggtgtggcagctggtctttgcatgccgactcgatatttctggacacagtttcttggtgagactggacgttgtctcgatataaatgcctccttcttgagcttgacggcgctgaacttggtcgccgacgttttagtcttagtcgtcccgattcccgagattctggctcttcagatgcccacgaacagaaaactgggagtcttattcatcatgcttcttggaggcctggtttgtgtcgtcagcgcagtccgtatctgggctttcgtcgtcttcacccaagccatcgaccttacatgggttcaagccaacgtcttcctcttatcgtcagttgagcctgcgtttggcattgtctcagcctgtctaccaagccttcgaccgctctatcgccgagcaagatcaaaaatcaccggaaaagactcgactagcggcacgcgcagtggcacatggtacgccaattcgaaaaccagccgtgttgggaatagttacgtccgctttggagacgatacctcgaggtcaggagacaatgatgacattgctttgacctctgtcggcattgggaaagggccccaatccaagaaaccgatgccccagaatatcatactcgtacgatcggaaataacacagcaatcctcaatccagagatcaagagaccctgagctggactcactctgatcatagctcgacgacacagctcaaacgtgttgggtgtttctttgtattacaacaaaaagtggtggtgggattaagaaagcatcaaacatcggatccggacatatctagcgagtctcatcacagccgaatctgactgatcatcttcgctcgcacgctgtctactatagtagcatacaagatatgcattcgattttaatgcaaatttgtagaacacgacggagaggattgtaaaatacatccatcgagacatgtttgagtcgatctcaagactgtcttttccgaggcctgataccctaaaagtttagatatacgatatttaatacacaatatatgtccataacagcttccactcgggacccatagcgtaccgtaagctaatgatgaagaccaaccccacgcttggcccgcgagaaatgcaacgcctccatggatcgccagcataccttcgcattctatcctaccattattttgacattgtcttttcgaaatacgtcgttccctgcttgaaataattgacgaaatggaatgtcaagttgtttctcaaatgaatgatactgccc

SEQ ID NO: 18722 - DNA, 1377 bp, Muscodor strobelii
  misc_feature: SGI cDNA ID NO. 566282
  misc_feature: Elevated expression when VOC is produced
  misc_feature: Encodes the peptide sequence at SEQ ID NO 18723
atgccttctgcctatgcgagccagctgccggccctcatccctttagagaaggccggtccaaaaggctatattcgatttgtctttcctatcgagctaggcgagtcatatgatgcggataaagtcttcgacctacttaaacaaggtcttgaaaatgccaaggagcgaatcccgactcttgcttgcgagggcgttccggatccagatgcgaagcaagcaggtgtgctcaagttgcaaagatatacagactatgagaccatcaccaagaaagacttgagagcttctggcgctttccctcacacatatgcgcagattaaatccaacgagttccccgtctcggcatttcctggagatctgttatgtcgtcgcttcacttggccgtctgctggtgaaaggctccccgtcattgacgcacaggcaaacttcattccaggaggcttgctcttgactttgtgctgtttccacgtcttcggcgatgctaaggcgtattatacttggcttgagacttgggcggaggaatgccgaagacttcaaggcgagacgggacctcggaatgagatccccgatgaattcttcacagacagggagaagcacatgaagccttctggccgcaatcctggcaaagccgaggatcaccctgaagttctcgtgctaccgttcacacctcccgggtttcccccaaagatgatctcacgcgaacacgtcggccaagtcttcagactgagtggtgaacaactagcaaagctgaaggcagatgcttccccagagactggattcatttccaccaacgatgctctctccgctctgatgtggcgctcggtgatgtcggcccagttctccctggaggaacttgagggagagccgacgtcattttttaacattgccgttgattcgagaccacgcaccgatccgcctgttcatccgagaaccttgggtaactggctaggatgggttggaattcaaatgcctatccgggagatcttggggcaggataacatcaaagctcctgcagttgccatccgtgagcaagtgaataaactcaacgaccagtacgtcgatgacattagtgcgctgtttgagagcgttgaagatgtcaaccgcgttgtggcaaccgcatttctggatgtacctggtttcaattgtgtacagacttcctggatcaatatgggcgtatatggccttgattggggaaatactctgggcggaaagattcaagccgtccgatcaccggatgttggtgttattaatggcggatcgctggtcttacctaagcttgctgacggtggtattgaactgatcattggtgtcgaatccaagtgcttaccgcgcttgctgaaggatcctttcttggctaagtatacaacggcaatcactatgtga

SEQ ID NO: 18723 - protein, 458 aa, Muscodor strobelii
  misc_feature: SGI Peptide ID NO. 566282
  misc_feature (39)..(450): Pfam Id: PF02458 Pfam Desc: Transferase family
  misc_feature (12)..(455): NCBI GI: 67904556 Blast Desc: AN9265.2 [Aspergillus nidulans FGSC A4] gi|40747176|gb|EAA66332.1| AN9265.2 [Aspergillus nidulans FGSC A4] gi|259488093|tpe|CBF87285.1| TPA: conserved [Aspergillus FGSC
  misc_feature (4)..(455): NCBI GI: 145236314 Blast Desc: protein product [Aspergillus niger] gi|134075257|emb|CAK44898.1| protein product [Aspergillus niger]
  misc_feature (2)..(454): NCBI GI: 255951388 Blast Desc: Pc22g25760 [Penicillium chrysogenum Wisconsin 54-1255] gi|211593478|emb|CAP99864.1| Pc22g25760 [Penicillium chrysogenum Wisconsin 54-1255]
  misc_feature (4)..(455): NCBI GI: 145254399 Blast Desc: An18g01540 [Aspergillus niger] gi|134084194|emb|CAK47227.1| protein product [Aspergillus niger]
  misc_feature (8)..(455): NCBI GI: 39967543 Blast Desc: MGG_02000 [Magnaporthe grisea 70-15] gi|145012867|gb|EDJ97508.1| MGG_02000 [Magnaporthe grisea 70-15]
  misc_feature (10)..(452): NCBI GI: 46114328 Blast Desc: FG03006.1 [Gibberella zeae PH-1]
  misc_feature (228)..(454): NCBI GI: 238490868 Blast Desc: conserved [Aspergillus flavus NRRL3357] gi|220697084|gb|EED53425.1| conserved [Aspergillus flavus NRRL3357]
  misc_feature (6)..(435): NCBI GI: 154324028 Blast Desc: BC1G_00413 [Botryotinia fuckeliana B05.10] gi|150842642|gb|EDN17835.1| BC1G_00413 [Botryotinia fuckeliana B05.10]
  misc_feature (8)..(161): NCBI GI: 238490870 Blast Desc: AFLA_108010 [Aspergillus flavus NRRL3357] gi|220697085|gb|EED53426.1| AFLA_108010 [Aspergillus flavus NRRL3357]
  misc_feature (12)..(446): NCBI GI: 46105218 Blast Desc: FG00237.1 [Gibberella zeae PH-1]
  misc_feature: Useful for introducing or modulating the production of volatile compounds
MPSAYASQLPALIPLEKAGPKGYIRFVFPIELGESYDADKVFDLLKQGLENAKERIPTLACEGVPDPDAKQAGVLKLQRYTDYETITKKDLRASGAFPHTYAQIKSNEFPVSAFPGDLLCRRFTWPSAGERLPVIDAQANFIPGGLLLTLCCFHVFGDAKAYYTWLETWAEECRRLQGETGPRNEIPDEFFTDREKHMKPSGRNPGKAEDHPEVLVLPFTPPGFPPKMISREHVGQVFRLSGEQLAKLKADASPETGFISTNDALSALMWRSVMSAQFSLEELEGEPTSFFNIAVDSRPRTDPPVHPRTLGNWLGWVGIQMPIREILGQDNIKAPAVAIREQVNKLNDQYVDDISALFESVEDVNRVVATAFLDVPGFNCVQTSWINMGVYGLDWGNTLGGKIQAVRSPDVGVINGGSLVLPKLADGGIELIIGVESKCLPRLLKDPFLAKYTTAITM

SEQ ID NO: 18724 - DNA, 1884 bp, Muscodor strobelii
  misc_feature: SGI EST ID NO. CUFF.43955.0
  misc_feature: Variant of the nucleotide sequence at SEQ ID NO 18722
acggctggaccctactttgtacttgtaaatggcggtcatggataaacctgggatgcttgaaatcagatagtaaagggggtgtctgatcgttcaagtatgccattcaggggtccaatccccagaaacgcccttggcaggccaaaaatcggtgagtctcttcattcatacaagcttcacaaagtcatatatgagcaagcaccacccagcgaagctggtgatcctttcgcacatttcattccaactgtccataactataccctttatttgaaacaaattcatacttccacccgacttaagtctcgcaaacacattgggacacgatgccttctgcctatgcgagccagctgccggccctcatccctttagagaaggccggtccaaaaggctatattcgatttgtctttcctatcgagctaggcgagtcatatgatgcggataaagtcttcgacctacttaaacaaggtcttgaaaatgccaaggagcgaatcccgactcttgcttgcgagggcgttccggatccagatgcgaagcaagcaggtgtgctcaagttgcaaagatatacagactatgagaccatcaccaagaaagacttgagagcttctggcgctttccctcacacatatgcgcagattaaatccaacgagttccccgtctcggcatttcctggagatctgttatgtcgtcgcttcacttggccgtctgctggtgaaaggctccccgtcattgacgcacaggcaaacttcattccaggaggcttgctcttgactttgtgctgtttccacgtcttcggcgatgctaaggcgtattatacttggcttgagacttgggcggaggaatgccgaagacttcaaggcgagacgggacctcggaatgagatccccgatgaattcttcacagacagggagaagcacatgaagccttctggccgcaatcctggcaaagccgaggatcaccctgaagttctcgtgctaccgttcacacctcccgggtttcccccaaagatgatctcacgcgaacacgtcggccaagtcttcagactgagtggtgaacaactagcaaagctgaaggcagatgcttccccagagactggattcatttccaccaacgatgctctctccgctctgatgtggcgctcggtgatgtcggcccagttctccctggaggaacttgagggagagccgacgtcattttttaacattgccgttgattcgagaccacgcaccgatccgcctgttcatccgagaaccttgggtaactggctaggatgggttggaattcaaatgcctatccgggagatcttggggcaggataacatcaaagctcctgcagttgccatccgtgagcaagtgaataaactcaacgaccagtacgtcgatgacattagtgcgctgtttgagagcgttgaagatgtcaaccgcgttgtggcaaccgcatttctggatgtacctggtttcaattgtgtacagacttcctggatcaatatgggcgtatatggccttgattggggaaatactctgggcggaaagattcaagccgtccgatcaccggatgttggtgttattaatggcggatcgctggtcttacctaagcttgctgacggtggtattgaactgatcattggtgtcgaatccaagtgcttaccgcgcttgctgaaggatcctttcttggctaagtatacaacggcaatcactatgtgatcatgacattgcaatagctagagtttagatagaaaatcatgtcgacaaatgaacaaaaggctaatgtcaaaatactcctgttcccgctctttaaaaacgtggattgtactcagtagaacagaatcggtacaacttctactctcttggctttcgctatctgtagcgctgcgtacatctattatgccca

SEQ ID NO: 18725 - DNA, 6030 bp, Muscodor strobelii
  misc_feature: SGI cDNA ID NO. 566283
  misc_feature: Encodes the peptide sequence at SEQ ID NO 18726
atgtctccaaatgcggttcaggacaccatggcagatcgaccagctctcgagccggtcgcaatatgcggcatgtcatgccgtcttcctggaggagtagactcggcctcctcgttttggaaaatgctggtggacaagaggacgggacagacagccaaagttccacggtctcgctttaatattgatgctcattatcaccgtgatcccgaccgtcctggctcattcaatgttcccggcggttattttcttgatggaatgccacatgattttgacccgagtttcttcagtatgacaccgatagaagctcaatggttagatccacaacaaagacgaatgctcgaagtttcttacgaatgtttggaatctgccgggctcacattagaccaggtggccggctccaacacgggagtttacgtgggttgcttcacagcggattaccagcaaatgtcggtcaaagaaccagactttcgccataactacgctgccacgggagtcgacccgggaatcataagcgaccggatcggaaatgtatttaacttgaatggtccgagtttcactatcaacactgcttgctcatcttctatatatgcgttacataccgcgtgtaatgccctccgatcgggggattgcgaagcggccatagttggtggtgtcaatctgatcctcactgtcgaccagcatatgaacacagcaaaattaggcatattatcgccaacttctacctgccataccttcgacgagagcgcagacggctacggtcgtgccgaaggggctggggctttgtatgttcggcgtttgtccgatgcaattcgggacggaaatcctatccgaggcgtcattcgcgggactgcagtcaacactaatggcaaggtggaagggatgggaattacgcaccccagcggcaaaggtcaagagaatgttgtacgcatggcgtacgcgaaagccggattagaaactcgcttcacaccatacgcggagctccacggcaccggcactccagtaggagacccaatagaagtaaaagctatatcgcaagcactgaatgattatcgatctaaggaagaaccgttacttatcggcgcagttaaacctaatatcggacatagtgaagctgctagtggcatcttcgcagtgatgaaggcagcgttaatgacagaagcggcaatcatccctggagtcgcactattcaatcgcttaaaccccaatataaaggacaaagaatggaatgtccgtattcatgcaaatacagccccttggccagaaaagtcagctttaagaagaacgagtgtttcgtccttcggttacggaggtagcaacggtcatgttatcgttgagtcaacagataatctcttacccttctatcgtcatggcgcacgtaggaagcattctcacaacgataaatcgacgacgagaccgcaacttgtctgcttttccggtcacgacaagtctacactacttcgcaacattaatgccattaagtcagtcgcttccgagtattacatgactgatctggcacataccctgaaccttcatcgtaccaaattcgcccatagagcattcgccatcatacgggagggccaagaagaagcaggttttgcgccgaatgagcttaagttaggagtcgcccctaaaattggaggagagatcgggttcattttcactggtcaaggcgcacaatggatcggcatgggaaaggttgccatagaagaatttcccctttttcaagaaacgattgagaagcttgaccgggtcttgcttaaaatcaaaccacgcccaacatttacaatctatggaatgctcactcaaaacgaaagtggaagcagattcaacgaccctgaagtggcgcagccgctgtgtacggcaattcaaatagcacttgtagatctgttcagcgaatgggacatattaccgtcggtcagtgtcggccactcatcgggcgaaattgcagctgcatatgcagctggtcttatcagtgctgcggaggcaataataatcgctttcattcgcggtcgtgcagtgcaacaagtttctagtgtgggatcaatgcttgctgttgggttgggggcaaacgaagtcgagaaatggctaccatcagaccccgaaaagatttgcatagcatgcgaaaactcaccgagcagtgtgaccttgagtggtcaggctgaggcgattaccgaactagctacaaatttgaagaaggaggatatctttgcccaggagctatcaaccggccgtgcataccattctccgcacatggctgtggtaggagatgcttacgacgtaatgctgcctctccatctagctgagctgacagaggatgatctgagctggagaaacccacgttcgccaatggtttcgtccgtcactggtgaatcaattgccggcgaatctctaactccttcgtattggagtatgaatcttcgcgagcgagtcctcttcgattccgcagtccgccgaattgggtctgacaaagactttgacaaagtaacgtcattcatcgaaatcggctgtcactctgcactctcaagagcgttcaagcaaatcaacttgactaagaagacttatatacccaccctattacgaaacaaaaatgacatggaccagcttttagcagtagcgggtctcgtcttcctagcaggttaccctgttgaccttgaggaggttaaccttgacctcgcgaaggattctagtcatgcttggaagtcgagtgttagtaaactgctggtcgacctaccgccctaccaatggaattatgagaaatcatactatgctgaagctcgtgccagcacggagtcacgaaatcgtcttttccctcgacacgatattctaggaacgcgtgtgcctgggctttctgatagttgcaaaatatggcgcaatgttcttcgacatcgggatgtaccgtggttgaaagaccacagcctcgggaacgagcccgtttttccggcggcaggttacctgtcagcagccatcgaaggactgcgacaaattcatgagattgaaagtcgccctttcagccaagtagttgctcaaaatgtggacatcaaaaaagctctcgtaattcccgaaggtgacggcatcgaaatcatgacatgccttcatactacgaatgctatggagcacaagttcacgatcgaatccatcacgtccggtgtatggactctgcattgtgagggtaccatttccacgaacaattgctctatggtggcccgaggtcaccccgtcgacgaagtggcgctcacgcaacgtgtgccaggaaagagatggtacgatgcgttccatcgagttggtttcaactatgagaacacatttcaggcacttttagaggcaaaatcagataaatcactacatcatgcggcaggcgatgtggtcatgacacaaagctcctcacttatgattgacgagtcgcgttatcttctccacccacgatcgatagatgcgtgtctacagctcatcatagtatcttgccactctggcaagtacaagacgatgccacatggcgtggttccgacacacatagcaaagtttacgttggtgatgtccgaggaccagctggacgatataggacatgcagtcgcctgggctgacgagattgatgatcggcgcttcgatactaatacatgtcttttggactcaagaggaaagctcatcatggatatcgagagtttggaatgcaccgcgtacgaagcagtggtaccaccttcacttggaccagtagcagaccccgaacccttctcgaaaatgatctggcagcccgacttcgagatgctcccagtatcagctcgagatgagaagacactaaacgatattatagagctactttgtcataagcagccagtccatgacgtgttgatttgtggcagtcctcagtctaccacggtgcgatcagcacttgatcgtttgccaagtacttgcaacgtaacgctcgggttcgcaggggagcaagagactgaggttgtaattgaggactttgaagaacgtgtatctttgaagactttgcctatgtcgttggatgcgtggtctactaatctcaatgggtctcaatccgatctcatcgtcgcagatttctctgtacccaataactccaatgcgccaggtctagtggtagcatccctcgaaccgctcttgaaagatggtggttggattattgggttgcccagtaacttctcttcgctacccagctccgctctaatgcttggtgaacattttatgttcagaaaatcgcaggcagggcagtcaacaattatggaagatagcattcgtcgcattactgtattatcatcacctaaatgcagcactacagacaccgaaaacttaataccctcgcttacagagaggggagcaaccgcacgagcagaggatcttatcacctttgtcgaagcagaaaacgaacacattattattgatgaccggactggctctacattattatcgctcaccgaagcgagataccagagactcaaggcaatcatgatatctgataacccgatcctttggctaacaagaggcgtacgagaaggtaaatctatggacggaggtatcgtggagggcttcctccgtgcattacgatctgaacacgcttcgtcgaaaattttgcttcttgatatcgattgcgatacatcgctcgaggatctgacgacgacagcgttatccacattgaatcgcctatcacgacggaaacccgatgcagataatgacttctggctgcatcacggcgttcttcacattccacgtttatatccccatgtgcagccgcgcctatccttgacaatgaaagccgacaccgcggacgaagcagaaaacatcgaaggcaacgctgaaccgaaggaggcgcttccatctttatcaagcgatggcacatacgttttggttgggtgtctaggtggaattggccgcagtctgacaacatggatgctggaacacggcgcaaaacattttgctttcatctcgagatcaggggcagacaaattagaggcagcccgggtcatcaaaaatattgagaagtctccagggacatcgacacgggtgtatcgtgcagatgcctctgatgaactagctgtacgatctattgtgttttctcttcaagcagaaagaccggtccgaggtgtagtacatgctgccatggtactcaaggatggtatgttcgagcaaatgacatacgactctttcatggcagcagtcacacccaaagtacgaggcgctatcagtcttcacaacgctttcggcaacgcgaagctagacttctttatcatgacaagttccgtctctgcagtcctcggtaatatgggtcaagccaattatagcgctgccaatagcttccttgacgcactagcccgtcatcggacagcattagggttagccgctacttcgctggctttgcccatggtactcgatgttggcgttgtggccgaaaatgatgcgattgaatcgtcgctgacaagaaagggtctttacggtattaacgaagaagagatgcttcgtggattcgaagcagccatgctgggtccgtctcggactcatccagaagaagcaactgcaccatcaaacttagtaatgggcatggaagttcgtgagcttgcccgagctattgcgtccatatcagctgaaagtgcggacctcttttgggccgacaaggcacggttctgtcatgttgtagccgcagtcaaagctgagtctgcgcagaatatgtcaagttctgataatcacggaggtgtcaaggagcagggctttgcaacggctctagaggcggcacgtgtggacggcccagaggcggtggtggcagtcatcactaaacatgttgcacgtcgcatgtctggcgtcttaatgatccctgaggatgagtttgagcttgacggcccgtcgcttgcaagctatggtttagacagcatggtaggggcagagatgcgaacctggctttacaaggagttcggtatagattactccttccagaagcttttgtcatcaactctgacctttcgagccctggcaagggtcatcgctgaacacatcggcgctattgagaagagtgaggatcagtaa

SEQ ID NO: 18726 - protein, 2009 aa, Muscodor strobelii
  misc_feature: SGI Peptide ID NO. 566283
  misc_feature (549)..(881): Pfam Id: PF00698 Pfam Desc: Acyl transferase domain
  misc_feature (1616)..(1783): Pfam Id: PF00106 Pfam Desc: short chain dehydrogenase
  misc_feature (17)..(268): Pfam Id: PF00109 Pfam Desc: Beta-ketoacyl synthase, N-terminal domain
  misc_feature (276)..(396): Pfam Id: PF02801 Pfam Desc: Beta-ketoacyl synthase, C-terminal domain
  misc_feature (1616)..(1796): Pfam Id: PF08659 Pfam Desc: KR domain
  misc_feature (184)..(214): Pfam Id: PF08545 Pfam Desc: 3-Oxoacyl-[acyl-carrier-protein (ACP)] synthase III
  misc_feature (550)..(881): Pfam Id: PF00698 Pfam Desc: Acyl transferase domain
  misc_feature (182)..(217): Pfam Id: PF00108 Pfam Desc: Thiolase, N-terminal domain
  misc_feature (3)..(1581): NCBI GI: 119483506 Blast Desc: polyketide synthase, [Neosartorya fischeri NRRL 181] gi|119409812|gb|EAW19759.1| polyketide synthase, [Neosartorya fischeri NRRL 181]
  misc_feature (24)..(1579): NCBI GI: 115387133 Blast Desc: ATEG_01894 [Aspergillus terreus NIH2624] gi|114195156|gb|EAU36856.1| ATEG_01894 [Aspergillus terreus NIH2624]
  misc_feature (16)..(1579): NCBI GI: 242783828 Blast Desc: polyketide synthase, [Talaromyces stipitatus ATCC 10500] gi|218720411|gb|EED19830.1| polyketide synthase, [Talaromyces stipitatus ATCC 10500]
  misc_feature (16)..(1579): NCBI GI: 212545621 Blast Desc: polyketide synthase, [Penicillium marneffei ATCC 18224] gi|210064484|gb|EEA18579.1| polyketide synthase, [Penicillium marneffei ATCC 18224]
  misc_feature (1)..(1585): NCBI GI: 145229619 Blast Desc: An01g06950 [Aspergillus niger] gi|134055226|emb|CAK43813.1| protein product [Aspergillus niger]
  misc_feature (3)..(1576): NCBI GI: 242823008 Blast Desc: polyketide synthase, [Talaromyces stipitatus ATCC 10500] gi|218712925|gb|EED12350.1| polyketide synthase, [Talaromyces stipitatus ATCC 10500]
  misc_feature (8)..(1576): NCBI GI: 255953389 Blast Desc: Pc21g03990 [Penicillium chrysogenum Wisconsin 54-1255] gi|211589158|emb|CAP95296.1| Pc21g03990 [Penicillium chrysogenum Wisconsin 54-1255]
  misc_feature (16)..(1623): NCBI GI: 242793230 Blast Desc: polyketide synthase, [Talaromyces stipitatus ATCC 10500] gi|218718708|gb|EED18128.1| polyketide synthase, [Talaromyces stipitatus ATCC 10500]
  misc_feature (16)..(1579): NCBI GI: 240110610 Blast Desc: polyketide synthase, [Coccidioides posadasii C735 delta SOWgp]
  misc_feature (2)..(1281): NCBI GI: 258575337 Blast Desc: UREG_01366 [Uncinocarpus reesii 1704] gi|237902116|gb|EEP76517.1| UREG_01366 [Uncinocarpus reesii 1704]
  misc_feature (17)..(1178): SWISSPROT Homolog: EC 2.3.1.161 Lovastatin nonaketide synthase
  misc_feature: Useful for fungicidal and/or biocontrol applications
MSPNAVQDTMADRPALEPVAICGMSCRLPGGVDSASSFWKMLVDKRTGQTAKVPRSRFNIDAHYHRDPDRPGSFNVPGGYFLDGMPHDFDPSFFSMTPIEAQWLDPQQRRMLEVSYECLESAGLTLDQVAGSNTGVYVGCFTADYQQMSVKEPDFRHNYAATGVDPGIISDRIGNVFNLNGPSFTINTACSSSIYALHTACNALRSGDCEAAIVGGVNLILTVDQHMNTAKLGILSPTSTCHTFDESADGYGRAEGAGALYVRRLSDAIRDGNPIRGVIRGTAVNTNGKVEGMGITHPSGKGQENVVRMAYAKAGLETRFTPYAELHGTGTPVGDPIEVKAISQALNDYRSKEEPLLIGAVKPNIGHSEAASGIFAVMKAALMTEAAIIPGVALFNRLNPNIKDKEWNVRIHANTAPWPEKSALRRTSVSSFGYGGSNGHVIVESTDNLLPFYRHGARRKHSHNDKSTTRPQLVCFSGHDKSTLLRNINAIKSVASEYYMTDLAHTLNLHRTKFAHRAFAIIREGQEEAGFAPNELKLGVAPKIGGEIGFIFTGQGAQWIGMGKVAIEEFPLFQETIEKLDRVLLKIKPRPTFTIYGMLTQNESGSRFNDPEVAQPLCTAIQIALVDLFSEWDILPSVSVGHSSGEIAAAYAAGLISAAEAIIIAFIRGRAVQQVSSVGSMLAVGLGANEVEKWLPSDPEKICIACENSPSSVTLSGQAEAITELATNLKKEDIFAQELSTGRAYHSPHMAVVGDAYDVMLPLHLAELTEDDLSWRNPRSPMVSSVTGESIAGESLTPSYWSMNLRERVLFDSAVRRIGSDKDFDKVTSFIEIGCHSALSRAFKQINLTKKTYIPTLLRNKNDMDQLLAVAGLVFLAGYPVDLEEVNLDLAKDSSHAWKSSVSKLLVDLPPYQWNYEKSYYAEARASTESRNRLFPRHDILGTRVPGLSDSCKIWRNVLRHRDVPWLKDHSLGNEPVFPAAGYLSAAIEGLRQIHEIESRPFSQVVAQNVDIKKALVIPEGDGIEIMTCLHTTNAMEHKFTIESITSGVWTLHCEGTISTNNCSMVARGHPVDEVALTQRVPGKRWYDAFHRVGFNYENTFQALLEAKSDKSLHHAAGDVVMTQSSSLMIDESRYLLHPRSIDACLQLIIVSCHSGKYKTMPHGVVPTHIAKFTLVMSEDQLDDIGHAVAWADEIDDRRFDTNTCLLDSRGKLIMDIESLECTAYEAVVPPSLGPVADPEPFSKMIWQPDFEMLPVSARDEKTLNDIIELLCHKQPVHDVLICGSPQSTTVRSALDRLPSTCNVTLGFAGEQETEVVIEDFEERVSLKTLPMSLDAWSTNLNGSQSDLIVADFSVPNNSNAPGLVVASLEPLLKDGGWIIGLPSNFSSLPSSALMLGEHFMFRKSQAGQSTIMEDSIRRITVLSSPKCSTTDTENLIPSLTERGATARAEDLITFVEAENEHIIIDDRTGSTLLSLTEARYQRLKAIMISDNPILWLTRGVREGKSMDGGIVEGFLRALRSEHASSKILLLDIDCDTSLEDLTTTALSTLNRLSRRKPDADNDFWLHHGVLHIPRLYPHVQPRLSLTMKADTADEAENIEGNAEPKEALPSLSSDGTYVLVGCLGGIGRSLTTWMLEHGAKHFAFISRSGADKLEAARVIKNIEKSPGTSTRVYRADASDELAVRSIVFSLQAERPVRGVVHAAMVLKDGMFEQMTYDSFMAAVTPKVRGAISLHNAFGNAKLDFFIMTSSVSAVLGNMGQANYSAANSFLDALARHRTALGLAATSLALPMVLDVGVVAENDAIESSLTRKGLYGINEEEMLRGFEAAMLGPSRTHPEEATAPSNLVMGMEVRELARAIASISAESADLFWADKARFCHVVAAVKAESAQNMSSSDNHGGVKEQGFATALEAARVDGPEAVVAVITKHVARRMSGVLMIPEDEFELDGPSLASYGLDSMVGAEMRTWLYKEFGIDYSFQKLLSSTLTFRALARVIAEHIGAIEKSEDQ

SEQ ID NO: 18727 - DNA, 3194 bp, Muscodor strobelii
  misc_feature: SGI EST ID NO. CUFF.43959.0
  misc_feature: Variant of the nucleotide sequence at SEQ ID NO 18725
cagccatcgaaggactgcgacaaattcatgagattgaaagtcgccctttcagccaagtagttgctcaaaatgtggacatcaaaaaagctctcgtaattcccgaaggtgacggcatcgaaatcatgacatgccttcatactacgaatgctatggagcacaagttcacgatcgaatccatcacgtccggtgtatggactctgcattgtgagggtaccatttccacgaacaattgctctatggtggcccgaggtcaccccgtcgacgaagtggcgctcacgcaacgtgtgccaggaaagagatggtacgatgcgttccatcgagttggtttcaactatgagaacacatttcaggcacttttagaggcaaaatcagataaatcactacatcatgcggcaggcgatgtggtcatgacacaaagctcctcacttatgattgacgagtcgcgttatcttctccacccacgatcgatagatgcgtgtctacagctcatcatagtatcttgccactctggcaagtacaagacgatgccacatggcgtggttccgacacacatagcaaagtttacgttggtgatgtccgaggaccagctggacgatataggacatgcagtcgcctgggctgacgagattgatgatcggcgcttcgatactaatacatgtcttttggactcaagaggaaagctcatcatggatatcgagagtttggaatgcaccgcgtacgaagcagtggtaccaccttcacttggaccagtagcagaccccgaacccttctcgaaaatgatctggcagcccgacttcgagatgctcccagtatcagctcgagatgagaagacactaaacgatattatagagctactttgtcataagcagccagtccatgacgtgttgatttgtggcagtcctcagtctaccacggtgcgatcagcacttgatcgtttgccaagtacttgcaacgtaacgctcgggttcgcaggggagcaagagactgaggttgtaattgaggactttgaagaacgtgtatctttgaagactttgcctatgtcgttggatgcgtggtctactaatctcaatgggtctcaatccgatctcatcgtcgcagatttctctgtacccaataactccaatgcgccaggtctagtggtagcatccctcgaaccgctcttgaaagatggtggttggattattgggttgcccagtaacttctcttcgctacccagctccgctctaatgcttggtgaacattttatgttcagaaaatcgcaggcagggcagtcaacaattatggaagatagcattcgtcgcattactgtattatcatcacctaaatgcagcactacagacaccgaaaacttaataccctcgcttacagagaggggagcaaccgcacgagcagaggatcttatcacctttgtcgaagcagaaaacgaacacattattattgatgaccggactggctctacattattatcgctcaccgaagcgagataccagagactcaaggcaatcatgatatctgataacccgatcctttggctaacaagaggcgtacgagaaggtaaatctatggacggaggtatcgtggagggcttcctccgtgcattacgatctgaacacgcttcgtcgaaaattttgcttcttgatatcgattgcgatacatcgctcgaggatctgacgacgacagcgttatccacattgaatcgcctatcacgacggaaacccgatgcagataatgacttctggctgcatcacggcgttcttcacattccacgtttatatccccatgtgcagccgcgcctatccttgacaatgaaagccgacaccgcggacgaagcagaaaacatcgaaggcaacgctgaaccgaaggaggcgcttccatctttatcaagcgatggcacatacgttttggttgggtgtctaggtggaattggccgcagtctgacaacatggatgctggaacacggcgcaaaacattttgctttcatctcgagatcaggggcagacaaattagaggcagcccgggtcatcaaaaatattgagaagtctccagggacatcgacacgggtgtatcgtgcagatgcctctgatgaactagctgtacgatctattgtgttttctcttcaagcagaaagaccggtccgaggtgtagtacatgctgccatggtactcaaggatggtatgttcgagcaaatgacatacgactctttcatggcagcagtcacacccaaagtacgaggcgctatcagtcttcacaacgctttcggcaacgcgaagctagacttctttatcatgacaagttccgtctctgcagtcctcggtaatatgggtcaagccaattatagcgctgccaatagcttccttgacgcactagcccgtcatcggacagcattagggttagccgctacttcgctggctttgcccatggtactcgatgttggcgttgtggccgaaaatgatgcgattgaatcgtcgctgacaagaaagggtctttacggtattaacgaagaagagatgcttcgtggattcgaagcagccatgctgggtccgtctcggactcatccagaagaagcaactgcaccatcaaacttagtaatgggcatggaagttcgtgagcttgcccgagctattgcgtccatatcagctgaaagtgcggacctcttttgggccgacaaggcacggttctgtcatgttgtagccgcagtcaaagctgagtctgcgcagaatatgtcaagttctgataatcacggaggtgtcaaggagcagggctttgcaacggctctagaggcggcacgtgtggacggcccagaggcggtggtggcagtcatcactaaacatgttgcacgtcgcatgtctggcgtcttaatgatccctgaggatgagtttgagcttgacggcccgtcgcttgcaagctatggtttagacagcatggtaggggcagagatgcgaacctggctttacaaggagttcggtatagattactccttccagaagcttttgtcatcaactctgacctttcgagccctggcaagggtcatcgctgaacacatcggcgctattgagaagagtgaggatcagtaaatgtacagtacagatagttgaagcagttcaccagcattttagttagaggtttctacgttttcacaaacacaaacgagatattcatagacatggaaagatagacaggtttcaatagcgacg

SEQ ID NO: 18728 - DNA, 6084 bp, Muscodor strobelii
  misc_feature: SGI cDNA ID NO. 566284
  misc_feature: Encodes the peptide sequence at SEQ ID NO 18729
atgtctccaaatgcggttcaggacaccatggcagatcgaccagctctcgagccggtcgcaatatgcggcatgtgtaagttcgtttgtcttcaattccaatacacacctagctcactcgattcttcagcatgccgtcttcctggaggagtagactcggcctcctcgttttggaaaatgctggtggacaagaggacgggacagacagccaaagttccacggtctcgctttaatattgatgctcattatcaccgtgatcccgaccgtcctggctcattcaatgttcccggcggttattttcttgatggaatgccacatgattttgacccgagtttcttcagtatgacaccgatagaagctcaatggttagatccacaacaaagacgaatgctcgaagtttcttacgaatgtttggaatctgccgggctcacattagaccaggtggccggctccaacacgggagtttacgtgggttgcttcacagcggattaccagcaaatgtcggtcaaagaaccagactttcgccataactacgctgccacgggagtcgacccgggaatcataagcgaccggatcggaaatgtatttaacttgaatggtccgagtttcactatcaacactgcttgctcatcttctatatatgcgttacataccgcgtgtaatgccctccgatcgggggattgcgaagcggccatagttggtggtgtcaatctgatcctcactgtcgaccagcatatgaacacagcaaaattaggcatattatcgccaacttctacctgccataccttcgacgagagcgcagacggctacggtcgtgccgaaggggctggggctttgtatgttcggcgtttgtccgatgcaattcgggacggaaatcctatccgaggcgtcattcgcgggactgcagtcaacactaatggcaaggtggaagggatgggaattacgcaccccagcggcaaaggtcaagagaatgttgtacgcatggcgtacgcgaaagccggattagaaactcgcttcacaccatacgcggagctccacggcaccggcactccagtaggagacccaatagaagtaaaagctatatcgcaagcactgaatgattatcgatctaaggaagaaccgttacttatcggcgcagttaaacctaatatcggacatagtgaagctgctagtggcatcttcgcagtgatgaaggcagcgttaatgacagaagcggcaatcatccctggagtcgcactattcaatcgcttaaaccccaatataaaggacaaagaatggaatgtccgtattcatgcaaatacagccccttggccagaaaagtcagctttaagaagaacgagtgtttcgtccttcggttacggaggtagcaacggtcatgttatcgttgagtcaacagataatctcttacccttctatcgtcatggcgcacgtaggaagcattctcacaacgataaatcgacgacgagaccgcaacttgtctgcttttccggtcacgacaagtctacactacttcgcaacattaatgccattaagtcagtcgcttccgagtattacatgactgatctggcacataccctgaaccttcatcgtaccaaattcgcccatagagcattcgccatcatacgggagggccaagaagaagcaggttttgcgccgaatgagcttaagttaggagtcgcccctaaaattggaggagagatcgggttcattttcactggtcaaggcgcacaatggatcggcatgggaaaggttgccatagaagaatttcccctttttcaagaaacgattgagaagcttgaccgggtcttgcttaaaatcaaaccacgcccaacatttacaatctatggaatgctcactcaaaacgaaagtggaagcagattcaacgaccctgaagtggcgcagccgctgtgtacggcaattcaaatagcacttgtagatctgttcagcgaatgggacatattaccgtcggtcagtgtcggccactcatcgggcgaaattgcagctgcatatgcagctggtcttatcagtgctgcggaggcaataataatcgctttcattcgcggtcgtgcagtgcaacaagtttctagtgtgggatcaatgcttgctgttgggttgggggcaaacgaagtcgagaaatggctaccatcagaccccgaaaagatttgcatagcatgcgaaaactcaccgagcagtgtgaccttgagtggtcaggctgaggcgattaccgaactagctacaaatttgaagaaggaggatatctttgcccaggagctatcaaccggccgtgcataccattctccgcacatggctgtggtaggagatgcttacgacgtaatgctgcctctccatctagctgagctgacagaggatgatctgagctggagaaacccacgttcgccaatggtttcgtccgtcactggtgaatcaattgccggcgaatctctaactccttcgtattggagtatgaatcttcgcgagcgagtcctcttcgattccgcagtccgccgaattgggtctgacaaagactttgacaaagtaacgtcattcatcgaaatcggctgtcactctgcactctcaagagcgttcaagcaaatcaacttgactaagaagacttatatacccaccctattacgaaacaaaaatgacatggaccagcttttagcagtagcgggtctcgtcttcctagcaggttaccctgttgaccttgaggaggttaaccttgacctcgcgaaggattctagtcatgcttggaagtcgagtgttagtaaactgctggtcgacctaccgccctaccaatggaattatgagaaatcatactatgctgaagctcgtgccagcacggagtcacgaaatcgtcttttccctcgacacgatattctaggaacgcgtgtgcctgggctttctgatagttgcaaaatatggcgcaatgttcttcgacatcgggatgtaccgtggttgaaagaccacagcctcgggaacgagcccgtttttccggcggcaggttacctgtcagcagccatcgaaggactgcgacaaattcatgagattgaaagtcgccctttcagccaagtagttgctcaaaatgtggacatcaaaaaagctctcgtaattcccgaaggtgacggcatcgaaatcatgacatgccttcatactacgaatgctatggagcacaagttcacgatcgaatccatcacgtccggtgtatggactctgcattgtgagggtaccatttccacgaacaattgctctatggtggcccgaggtcaccccgtcgacgaagtggcgctcacgcaacgtgtgccaggaaagagatggtacgatgcgttccatcgagttggtttcaactatgagaacacatttcaggcacttttagaggcaaaatcagataaatcactacatcatgcggcaggcgatgtggtcatgacacaaagctcctcacttatgattgacgagtcgcgttatcttctccacccacgatcgatagatgcgtgtctacagctcatcatagtatcttgccactctggcaagtacaagacgatgccacatggcgtggttccgacacacatagcaaagtttacgttggtgatgtccgaggaccagctggacgatataggacatgcagtcgcctgggctgacgagattgatgatcggcgcttcgatactaatacatgtcttttggactcaagaggaaagctcatcatggatatcgagagtttggaatgcaccgcgtacgaagcagtggtaccaccttcacttggaccagtagcagaccccgaacccttctcgaaaatgatctggcagcccgacttcgagatgctcccagtatcagctcgagatgagaagacactaaacgatattatagagctactttgtcataagcagccagtccatgacgtgttgatttgtggcagtcctcagtctaccacggtgcgatcagcacttgatcgtttgccaagtacttgcaacgtaacgctcgggttcgcaggggagcaagagactgaggttgtaattgaggactttgaagaacgtgtatctttgaagactttgcctatgtcgttggatgcgtggtctactaatctcaatgggtctcaatccgatctcatcgtcgcagatttctctgtacccaataactccaatgcgccaggtctagtggtagcatccctcgaaccgctcttgaaagatggtggttggattattgggttgcccagtaacttctcttcgctacccagctccgctctaatgcttggtgaacattttatgttcagaaaatcgcaggcagggcagtcaacaattatggaagatagcattcgtcgcattactgtattatcatcacctaaatgcagcactacagacaccgaaaacttaataccctcgcttacagagaggggagcaaccgcacgagcagaggatcttatcacctttgtcgaagcagaaaacgaacacattattattgatgaccggactggctctacattattatcgctcaccgaagcgagataccagagactcaaggcaatcatgatatctgataacccgatcctttggctaacaagaggcgtacgagaaggtaaatctatggacggaggtatcgtggagggcttcctccgtgcattacgatctgaacacgcttcgtcgaaaattttgcttcttgatatcgattgcgatacatcgctcgaggatctgacgacgacagcgttatccacattgaatcgcctatcacgacggaaacccgatgcagataatgacttctggctgcatcacggcgttcttcacattccacgtttatatccccatgtgcagccgcgcctatccttgacaatgaaagccgacaccgcggacgaagcagaaaacatcgaaggcaacgctgaaccgaaggaggcgcttccatctttatcaagcgatggcacatacgttttggttgggtgtctaggtggaattggccgcagtctgacaacatggatgctggaacacggcgcaaaacattttgctttcatctcgagatcaggggcagacaaattagaggcagcccgggtcatcaaaaatattgagaagtctccagggacatcgacacgggtgtatcgtgcagatgcctctgatgaactagctgtacgatctattgtgttttctcttcaagcagaaagaccggtccgaggtgtagtacatgctgccatggtactcaaggatggtatgttcgagcaaatgacatacgactctttcatggcagcagtcacacccaaagtacgaggcgctatcagtcttcacaacgctttcggcaacgcgaagctagacttctttatcatgacaagttccgtctctgcagtcctcggtaatatgggtcaagccaattatagcgctgccaatagcttccttgacgcactagcccgtcatcggacagcattagggttagccgctacttcgctggctttgcccatggtactcgatgttggcgttgtggccgaaaatgatgcgattgaatcgtcgctgacaagaaagggtctttacggtattaacgaagaagagatgcttcgtggattcgaagcagccatgctgggtccgtctcggactcatccagaagaagcaactgcaccatcaaacttagtaatgggcatggaagttcgtgagcttgcccgagctattgcgtccatatcagctgaaagtgcggacctcttttgggccgacaaggcacggttctgtcatgttgtagccgcagtcaaagctgagtctgcgcagaatatgtcaagttctgataatcacggaggtgtcaaggagcagggctttgcaacggctctagaggcggcacgtgtggacggcccagaggcggtggtggcagtcatcactaaacatgttgcacgtcgcatgtctggcgtcttaatgatccctgaggatgagtttgagcttgacggcccgtcgcttgcaagctatggtttagacagcatggtaggggcagagatgcgaacctggctttacaaggagttcggtatagattactccttccagaagcttttgtcatcaactctgacctttcgagccctggcaagggtcatcgctgaacacatcggcgctattgagaagagtgaggatcagtaa

SEQ ID NO: 18729 - protein, 2027 aa, Muscodor strobelii
  misc_feature: SGI Peptide ID NO. 566284
  misc_feature (567)..(899): Pfam Id: PF00698 Pfam Desc: Acyl transferase domain
  misc_feature (1634)..(1801): Pfam Id: PF00106 Pfam Desc: short chain dehydrogenase
  misc_feature (40)..(286): Pfam Id: PF00109 Pfam Desc: Beta-ketoacyl synthase, N-terminal domain
  misc_feature (294)..(414): Pfam Id: PF02801 Pfam Desc: Beta-ketoacyl synthase, C-terminal domain
  misc_feature (1634)..(1814): Pfam Id: PF08659 Pfam Desc: KR domain
  misc_feature (202)..(232): Pfam Id: PF08545 Pfam Desc: 3-Oxoacyl-[acyl-carrier-protein (ACP)] synthase III
  misc_feature (568)..(899): Pfam Id: PF00698 Pfam Desc: Acyl transferase domain
  misc_feature (43)..(286): Pfam Id: PF00109 Pfam Desc: Beta-ketoacyl synthase, N-terminal domain
  misc_feature (200)..(235): Pfam Id: PF00108 Pfam Desc: Thiolase, N-terminal domain
  misc_feature (3)..(1599): NCBI GI: 119483506 Blast Desc: polyketide synthase, [Neosartorya fischeri NRRL 181] gi|119409812|gb|EAW19759.1| polyketide synthase, [Neosartorya fischeri NRRL 181]
  misc_feature (43)..(1597): NCBI GI: 115387133 Blast Desc: ATEG_01894 [Aspergillus terreus NIH2624] gi|114195156|gb|EAU36856.1| ATEG_01894 [Aspergillus terreus NIH2624]
  misc_feature (16)..(1597): NCBI GI: 242783828 Blast Desc: polyketide synthase, [Talaromyces stipitatus ATCC 10500] gi|218720411|gb|EED19830.1| polyketide synthase, [Talaromyces stipitatus ATCC 10500]
  misc_feature (16)..(1597): NCBI GI: 212545621 Blast Desc: polyketide synthase, [Penicillium marneffei ATCC 18224] gi|210064484|gb|EEA18579.1| polyketide synthase, [Penicillium marneffei ATCC 18224]
  misc_feature (1)..(1603): NCBI GI: 145229619 Blast Desc: An01g06950 [Aspergillus niger] gi|134055226|emb|CAK43813.1| protein product [Aspergillus niger]
  misc_feature (3)..(1594): NCBI GI: 242823008 Blast Desc: polyketide synthase, [Talaromyces stipitatus ATCC 10500] gi|218712925|gb|EED12350.1| polyketide synthase, [Talaromyces stipitatus ATCC 10500]
  misc_feature (8)..(1594): NCBI GI: 255953389 Blast Desc: Pc21g03990 [Penicillium chrysogenum Wisconsin 54-1255] gi|211589158|emb|CAP95296.1| Pc21g03990 [Penicillium chrysogenum Wisconsin 54-1255]
  misc_feature (16)..(1641): NCBI GI: 242793230 Blast Desc: polyketide synthase, [Talaromyces stipitatus ATCC 10500] gi|218718708|gb|EED18128.1| polyketide synthase, [Talaromyces stipitatus ATCC 10500]
  misc_feature (16)..(1597): NCBI GI: 240110610 Blast Desc: polyketide synthase, [Coccidioides posadasii C735 delta SOWgp]
  misc_feature (2)..(1299): NCBI GI: 258575337 Blast Desc: UREG_01366 [Uncinocarpus reesii 1704] gi|237902116|gb|EEP76517.1| UREG_01366 [Uncinocarpus reesii 1704]
  misc_feature (36)..(1196): SWISSPROT Homolog: EC 2.3.1.161 Lovastatin nonaketide synthase
  misc_feature: Useful for fungicidal and/or biocontrol applications
MSPNAVQDTMADRPALEPVAICGMCKFVCLQFQYTPSSLDSSACRLPGGVDSASSFWKMLVDKRTGQTAKVPRSRFNIDAHYHRDPDRPGSFNVPGGYFLDGMPHDFDPSFFSMTPIEAQWLDPQQRRMLEVSYECLESAGLTLDQVAGSNTGVYVGCFTADYQQMSVKEPDFRHNYAATGVDPGIISDRIGNVFNLNGPSFTINTACSSSIYALHTACNALRSGDCEAAIVGGVNLILTVDQHMNTAKLGILSPTSTCHTFDESADGYGRAEGAGALYVRRLSDAIRDGNPIRGVIRGTAVNTNGKVEGMGITHPSGKGQENVVRMAYAKAGLETRFTPYAELHGTGTPVGDPIEVKAISQALNDYRSKEEPLLIGAVKPNIGHSEAASGIFAVMKAALMTEAAIIPGVALFNRLNPNIKDKEWNVRIHANTAPWPEKSALRRTSVSSFGYGGSNGHVIVESTDNLLPFYRHGARRKHSHNDKSTTRPQLVCFSGHDKSTLLRNINAIKSVASEYYMTDLAHTLNLHRTKFAHRAFAIIREGQEEAGFAPNELKLGVAPKIGGEIGFIFTGQGAQWIGMGKVAIEEFPLFQETIEKLDRVLLKIKPRPTFTIYGMLTQNESGSRFNDPEVAQPLCTAIQIALVDLFSEWDILPSVSVGHSSGEIAAAYAAGLISAAEAIIIAFIRGRAVQQVSSVGSMLAVGLGANEVEKWLPSDPEKICIACENSPSSVTLSGQAEAITELATNLKKEDIFAQELSTGRAYHSPHMAVVGDAYDVMLPLHLAELTEDDLSWRNPRSPMVSSVTGESIAGESLTPSYWSMNLRERVLFDSAVRRIGSDKDFDKVTSFIEIGCHSALSRAFKQINLTKKTYIPTLLRNKNDMDQLLAVAGLVFLAGYPVDLEEVNLDLAKDSSHAWKSSVSKLLVDLPPYQWNYEKSYYAEARASTESRNRLFPRHDILGTRVPGLSDSCKIWRNVLRHRDVPWLKDHSLGNEPVFPAAGYLSAAIEGLRQIHEIESRPFSQVVAQNVDIKKALVIPEGDGIEIMTCLHTTNAMEHKFTIESITSGVWTLHCEGTISTNNCSMVARGHPVDEVALTQRVPGKRWYDAFHRVGFNYENTFQALLEAKSDKSLHHAAGDVVMTQSSSLMIDESRYLLHPRSIDACLQLIIVSCHSGKYKTMPHGVVPTHIAKFTLVMSEDQLDDIGHAVAWADEIDDRRFDTNTCLLDSRGKLIMDIESLECTAYEAVVPPSLGPVADPEPFSKMIWQPDFEMLPVSARDEKTLNDIIELLCHKQPVHDVLICGSPQSTTVRSALDRLPSTCNVTLGFAGEQETEVVIEDFEERVSLKTLPMSLDAWSTNLNGSQSDLIVADFSVPNNSNAPGLVVASLEPLLKDGGWIIGLPSNFSSLPSSALMLGEHFMFRKSQAGQSTIMEDSIRRITVLSSPKCSTTDTENLIPSLTERGATARAEDLITFVEAENEHIIIDDRTGSTLLSLTEARYQRLKAIMISDNPILWLTRGVREGKSMDGGIVEGFLRALRSEHASSKILLLDIDCDTSLEDLTTTALSTLNRLSRRKPDADNDFWLHHGVLHIPRLYPHVQPRLSLTMKADTADEAENIEGNAEPKEALPSLSSDGTYVLVGCLGGIGRSLTTWMLEHGAKHFAFISRSGADKLEAARVIKNIEKSPGTSTRVYRADASDELAVRSIVFSLQAERPVRGVVHAAMVLKDGMFEQMTYDSFMAAVTPKVRGAISLHNAFGNAKLDFFIMTSSVSAVLGNMGQANYSAANSFLDALARHRTALGLAATSLALPMVLDVGVVAENDAIESSLTRKGLYGINEEEMLRGFEAAMLGPSRTHPEEATAPSNLVMGMEVRELARAIASISAESADLFWADKARFCHVVAAVKAESAQNMSSSDNHGGVKEQGFATALEAARVDGPEAVVAVITKHVARRMSGVLMIPEDEFELDGPSLASYGLDSMVGAEMRTWLYKEFGIDYSFQKLLSSTLTFRALARVIAEHIGAIEKSEDQ

SEQ ID NO: 18730 - DNA, 3194 bp, Muscodor strobelii; identical to SEQ ID NO: 18727
  misc_feature: SGI EST ID NO. CUFF.43959.0
  misc_feature: Variant of the nucleotide sequence at SEQ ID NO 18728

SEQ ID NO: 18731 - DNA, 1101 bp, Muscodor strobelii
  misc_feature: SGI cDNA ID NO. 566285
  misc_feature: Encodes the peptide sequence at SEQ ID NO 18732
atgagtgccagatctcttgcgtcctgctatcgagcattggcagttctcgcattcgtgcccctttggggcttatatgcttggaatggaggcttaacggcaaacctcctcgctccgttgcgtggacaactaaacgatcatgttgagctcaagaataactacaccggagtgtttctcatcgactatcccatttccgttcttatcgcattcttcttttatgcaacgaatggttccgatgaaggatatcagctcctggtcttcgagggctattctactttgcaatcagcctttgtctggctgtatgtcgagatggcacgaccagggaataagccatgggttatttcaacacctgtttttactgccatactatggcagtgtctcggtggtgccatagcccttcctctctactatgcgaagcatatcctatggatagacaatgcagagaccctgcaggtgcgggacacgtctatcgcgaaggccttaccgttctcgttccttttgggtgcagttctccctgcgattttggggctcgcgccgacgtgggaagggccaggatctcgatccccagaagctcatcagacctatcttgcattctttcaagtcgatccgttgtgggtaatgctcactcaagcgatattgacggaagcgtttcgtcaattgcgcagcacaagtagcgacctccaacaagcttccaagtccactcggaattggactcgagcagcgtatatagcagcagcggcttcgtccacgctaggtcatctctacaccgttgctagagtatacagtagcccggatgagagcaccaacataatacggatgagattgccatcgtctctgtatggccccactggaggagtcccggacatgctggcacgaggacctttcctttatttgcagtttgatattgtcatcttcgacgttgctagtctggtctgggcattcacgctgctatcgaggctcccgaatcgccgtatgtccaatacgacattggcgatggccatgttgacagggtggattctcattggtgctggaggtactgtctccttggctcttttgcttcgtgaagggcttcttccggagaaatcatcggcagcagggaagtga

SEQ ID NO: 18732 - protein, 366 aa, Muscodor strobelii
  misc_feature: SGI Peptide ID NO. 566285
  misc_feature (1)..(357): NCBI GI: 242783833 Blast Desc: conserved [Talaromyces stipitatus ATCC 10500] gi|218720412|gb|EED19831.1| conserved [Talaromyces stipitatus ATCC 10500]
  misc_feature (22)..(359): NCBI GI: 119483508 Blast Desc: NFIA_093800 [Neosartorya fischeri NRRL 181] gi|119409813|gb|EAW19760.1| conserved [Neosartorya fischeri NRRL 181]
  misc_feature (1)..(360): NCBI GI: 212545619 Blast Desc: conserved [Penicillium marneffei ATCC 18224] gi|210064483|gb|EEA18578.1| conserved [Penicillium marneffei ATCC 18224]
  misc_feature (10)..(266): NCBI GI: 115387135 Blast Desc: [Aspergillus terreus NIH2624] gi|114195157|gb|EAU36857.1| [Aspergillus terreus NIH2624]
  misc_feature (10)..(363): NCBI GI: 116179226 Blast Desc: [Chaetomium globosum CBS 148.51] gi|88184538|gb|EAQ92006.1| [Chaetomium globosum CBS 148.51]
  misc_feature (4)..(317): NCBI GI: 242793235 Blast Desc: conserved [Talaromyces stipitatus ATCC 10500] gi|218718709|gb|EED18129.1| conserved [Talaromyces stipitatus ATCC 10500]
  misc_feature (27)..(360): NCBI GI: 255953391 Blast Desc: [Penicillium chrysogenum Wisconsin 54-1255] gi|211589159|emb|CAP95297.1| [Penicillium chrysogenum Wisconsin 54-1255]
  misc_feature (21)..(354): NCBI GI: 269996428 Blast Desc: [Alternaria brassicicola]
  misc_feature (41)..(366): NCBI GI: 226292013 Blast Desc: conserved [Paracoccidioides brasiliensis Pb18]
  misc_feature (41)..(366): NCBI GI: 225681274 Blast Desc: conserved [Paracoccidioides brasiliensis Pb03]
MSARSLASCYRALAVLAFVPLWGLYAWNGGLTANLLAPLRGQLNDHVELKNNYTGVFLIDYPISVLIAFFFYATNGSDEGYQLLVFEGYSTLQSAFVWLYVEMARPGNKPWVISTPVFTAILWQCLGGAIALPLYYAKHILWIDNAETLQVRDTSIAKALPFSFLLGAVLPAILGLAPTWEGPGSRSPEAHQTYLAFFQVDPLWVMLTQAILTEAFRQLRSTSSDLQQASKSTRNWTRAAYIAAAASSTLGHLYTVARVYSSPDESTNIIRMRLPSSLYGPTGGVPDMLARGPFLYLQFDIVIFDVASLVWAFTLLSRLPNRRMSNTTLAMAMLTGWILIGAGGTVSLALLLREGLLPEKSSAAGK

SEQ ID NO: 18733 - DNA, 1734 bp, Muscodor strobelii
  misc_feature: SGI cDNA ID NO. 566286
  misc_feature: Reduced expression when VOC is produced
  misc_feature: Encodes the peptide sequence at SEQ ID NO 18734
atggcgtcggaaagcatctcacagtttgacgtcgtaatcattggtgcaggatggtacggtcttgtagctgcgagaacttacctccgattggaaccttcgacaaaactactcatcatcgactcagataacagcgttggcggagtatggagcaaagatcgcttatatccaaacctggtagcacaggttagacttggtcttttcaattactccgataccccaatgatgccaaacaatgggaattcgaaggatccccgagtgacgggcgagatgattcatgattacatgcaaaaatatgccgaagaccatgatattttgcgacgcatacggtttaagacctttgtcacagacgcaaaaaaatgcaatgggggttggaggctttcattagagggaactgatgaagtcattgggacagaaaaattgctggttgccaccggagtcacgtcaattcccagttggcctagcctcgacctttcgtctagtacgttgcccgtcatccattcccgtgatttgggtacgcacttcgaagaaatgaagagcgctgccgtcaaagaagtagtcgtggtaggcgccgcgaagtctgcatatgatgctgtctacctgcttctcagcatgggtaagaaagtcacatgggtcattcgccgagaaggtggcggccccctaagtctcttaccattccgagtcctcaaccttgtgcactcgatagcctttggctcgactcgactgatgtcacatttaagcccatgcattttgaatacaaaagggtcactctatcgatttttccacaagtcttcgacgggccggtggtgtgtaggtcgattctgggactttcttgataaagttagtaggtccaacgccggtttctcgaaaggcgaccatgtcgctctcttgaaacctgatattgagcgccagagtgtcttttgggcaaattcaggacttggtgttgccacattacctaattactgggaaatgttacacagtccaaacctaactgtccggcgcgggaagattgacaacataaaaggacagacaattaaactcagttcgacggaaagcctggaagcggactatatggtcatgtgcaccggctggggagatcactttgaaatgtttgactcagatcataaagccatgattggtctgccaataagcggtcagaaatcagactctcccaaaagtgatgatgggatcgattgggaaagacattacaactcagcgaacaagacagtcgacgagaaactgccctttcttgctaatcatcccgaagtccgatatccacagggacttgacccctctctacagcgaaagttcaatctgtacagacggtgtgtacctgtgtccatggccgcgaagggcgataggtctctagccatactcggccaaatccacacgatccagactcctttggtgtcggaagtacagtctctatgggctattctctacctactaggggaaattgacgtaccggatgtcaacactatggccgaagaggtgtcactttggaatacttggacccgcaagagatatctcactcagggacagaagaatccttactcactatttgacttccttccgtacattgacggcatattcgaggatttgaagctaaatagtcgccgcaagtcaaactttctgtcggagcttttcagcccttatgaagctggtgacttcaatgggtttgttgacgagtatatgagaacacgaaatcaaaagcgtgattcgaagatggaggtctga

SEQ ID NO: 18734 - protein, 577 aa, Muscodor strobelii
  misc_feature: SGI Peptide ID NO. 566286
  misc_feature (1)..(564): NCBI GI: 119483520 Blast Desc: NFIA_093860 [Neosartorya fischeri NRRL 181] gi|119409819|gb|EAW19766.1| NFIA_093860 [Neosartorya fischeri NRRL 181]
  misc_feature (1)..(577): NCBI GI: 242783838 Blast Desc: dimethylaniline monooxygenase, [Talaromyces stipitatus ATCC 10500] gi|218720413|gb|EED19832.1| dimethylaniline monooxygenase, [Talaromyces stipitatus ATCC 10500]
  misc_feature (10)..(577): NCBI GI: 212545617 Blast Desc: dimethylaniline monooxygenase, [Penicillium marneffei ATCC 18224] gi|210064482|gb|EEA18577.1| dimethylaniline monooxygenase, [Penicillium marneffei ATCC 18224]
  misc_feature (74)..(567): NCBI GI: 115387145 Blast Desc: [Aspergillus terreus NIH2624] gi|114195162|gb|EAU36862.1| [Aspergillus terreus NIH2624]
  misc_feature (8)..(570): NCBI GI: 242793240 Blast Desc: monooxygenase, [Talaromyces stipitatus ATCC 10500] gi|218718710|gb|EED18130.1| monooxygenase, [Talaromyces stipitatus ATCC 10500]
  misc_feature (9)..(570): NCBI GI: 255953393 Blast Desc: Pc21g04010 [Penicillium chrysogenum Wisconsin 54-1255] gi|211589160|emb|CAP95298.1| Pc21g04010 [Penicillium chrysogenum Wisconsin 54-1255]
  misc_feature (17)..(571): NCBI GI: 116179234 Blast Desc: CHGG_00245 [Chaetomium globosum CBS 148.51] gi|88184542|gb|EAQ92010.1| CHGG_00245 [Chaetomium globosum CBS 148.51]
  misc_feature (6)..(570): NCBI GI: 258575339 Blast Desc: [Uncinocarpus reesii 1704] gi|237902117|gb|EEP76518.1| [Uncinocarpus reesii 1704]
  misc_feature (6)..(567): NCBI GI: 240110609 Blast Desc: Flavin-binding monooxygenase-like family protein [Coccidioides posadasii C735 delta SOWgp]
  misc_feature (6)..(567): NCBI GI: 269996425 Blast Desc: monooxygenase [Alternaria brassicicola]
  misc_feature: Useful for introducing or modulating the production of volatile compounds
MASESISQFDVVIIGAGWYGLVAARTYLRLEPSTKLLIIDSDNSVGGVWSKDRLYPNLVAQVRLGLFNYSDTPMMPNNGNSKDPRVTGEMIHDYMQKYAEDHDILRRIRFKTFVTDAKKCNGGWRLSLEGTDEVIGTEKLLVATGVTSIPSWPSLDLSSSTLPVIHSRDLGTHFEEMKSAAVKEVVVVGAAKSAYDAVYLLLSMGKKVTWVIRREGGGPLSLLPFRVLNLVHSIAFGSTRLMSHLSPCILNTKGSLYRFFHKSSTGRWCVGRFWDFLDKVSRSNAGFSKGDHVALLKPDIERQSVFWANSGLGVATLPNYWEMLHSPNLTVRRGKIDNIKGQTIKLSSTESLEADYMVMCTGWGDHFEMFDSDHKAMIGLPISGQKSDSPKSDDGIDWERHYNSANKTVDEKLPFLANHPEVRYPQGLDPSLQRKFNLYRRCVPVSMAAKGDRSLAILGQIHTIQTPLVSEVQSLWAILYLLGEIDVPDVNTMAEEVSLWNTWTRKRYLTQGQKNPYSLFDFLPYIDGIFEDLKLNSRRKSNFLSELFSPYEAGDFNGFVDEYMRTRNQKRDSKMEV

SEQ ID NO: 18735 - DNA, 2386 bp, Muscodor strobelii
  misc_feature: SGI EST ID NO. CUFF.43995.0
  misc_feature: Variant of the nucleotide sequence at SEQ ID NO 18733
gttcactctccaattcttcttccaaggcctgcatgccgtctgcgatgcaccatgataggaaggtggtgattcatttcattcttttcgaggcacgcaaggatctccaattccatgtcaatagccgaacttggatgattcctttccgtcggtgaacaaaagaaccagagcgtcgggtcaatgttcaaaaccagacgctgtcagaaacaagaaccaaagtgtcgggtcgtgatcgagtaggcctcattccagataccacattaccgggttttgacatatcatacctctatcctcggtccgaatcaccgacatatcttctcaaatggcgtcggaaagcatctcacagtttgacgtcgtaatcattggtgcaggatggtacggtcttgtagctgcgagaacttacctccgattggaaccttcgacaaaactactcatcatcgactcagataacagcgttggcggagtatggagcaaagatcgcttatatccaaacctggtagcacaggttagacttggtcttttcaattactccgataccccaatgatgccaaacaatgggaattcgaaggatccccgagtgacgggcgagatgattcatgattacatgcaaaaatatgccgaagaccatgatattttgcgacgcatacggtttaagacctttgtcacagacgcaaaaaaatgcaatgggggttggaggctttcattagagggaactgatgaagtcattgggacagaaaaattgctggttgccaccggagtcacgtcaattcccagttggcctagcctcgacctttcgtctagtacgttgcccgtcatccattcccgtgatttgggtacgcacttcgaagaaatgaagagcgctgccgtcaaagaagtagtcgtggtaggcgccgcgaagtctgcatatgatgctgtctacctgcttctcagcatgggtaagaaagtcacatgggtcattcgccgagaaggtggcggccccctaagtctcttaccattccgagtcctcaaccttgtgcactcgatagcctttggctcgactcgactgatgtcacatttaagcccatgcattttgaatacaaaagggtcactctatcgatttttccacaagtcttcgacgggccggtggtgtgtaggtcgattctgggactttcttgataaagttagtaggtccaacgccggtttctcgaaaggcgaccatgtcgctctcttgaaacctgatattgagcgccagagtgtcttttgggcaaattcaggacttggtgttgccacattacctaattactgggaaatgttacacagtccaaacctaactgtccggcgcgggaagattgacaacataaaaggacagacaattaaactcagttcgacggaaagcctggaagcggactatatggtcatgtgcaccggctggggagatcactttgaaatgtttgactcagatcataaagccatgattggtctgccaataagcggtcagaaatcagactctcccaaaagtgatgatgggatcgattgggaaagacattacaactcagcgaacaagacagtcgacgagaaactgccctttcttgctaatcatcccgaagtccgatatccacagggacttgacccctctctacagcgaaagttcaatctgtacagacggtgtgtacctgtgtccatggccgcgaagggcgataggtctctagccatactcggccaaatccacacgatccagactcctttggtgtcggaagtacagtctctatgggctattctctacctactaggggaaattgacgtaccggatgtcaacactatggccgaagaggtgtcactttggaatacttggacccgcaagagatatctcactcagggacagaagaatccttactcactatttgacttccttccgtacattgacggcatattcgaggatttgaagctaaatagtcgccgcaagtcaaactttctgtcggagcttttcagcccttatgaagctggtgacttcaatgggtttgttgacgagtatatgagaacacgaaatcaaaagcgtgattcgaagatggaggtctgatatacactactcagagttgcttatagatgcgctataacctaaattcgtgatgctacacccctcaggtatagtatttttcacggagcttatcttttcatccaccttattgaaaaaaagaacatttaatctcacgagaaatatgatcatagagagcagggcaaccgtacatgtatcattagttgctcagaattctcacagggctagcgtaacctagctcgtagactcttatatacatgaaacaacacgctacaatgaatgattctacgctccgaaatgacaatacattggtattggtaataagttataaacagtgtctgtcgccatcggccttcg

SEQ ID NO: 18736 - DNA, 1515 bp, Muscodor strobelii
  misc_feature: SGI cDNA ID NO. 566287
  misc_feature: Reduced expression when VOC is produced
  misc_feature: Encodes the peptide sequence at SEQ ID NO 18737
atgccatttcattccggaacagcaggaagacatggcctcttttcaaaccatgtccatgacgttggtttcatgaaagagattttaggcagatgggtgtccggccttgatactacacgactgggcagtcttgccgcctgtataagcgttgtgcccgtcgtgtggcgctttgtcactgcaacatggaccgacacctggcactggatacgccaattcttcgttgcatccgtaagagtaccgggaagagaccctctgaataggagtgtcatgagctgggttatgacgcaaattgtaaagcaccgcgaaaaccggtcgttcacagcgcgtactcaagtacagggaggcgaattgattgaccgagctgcactcctgaaaagaaaacggagagatatccaatacctcccacactttgagactacttggttctggcatgatgggtccttgttcttcgtttcacgatcattggatgattttcacgaatcgatgacggatccatcatatgatggcattggtggcgaagagctcgttctcggccgcctcggccgctctacagagcctatcaaaaaacttatccagacgtgccaggactattctgacaggcagaccgaatatttcgtgatcatttacgcccgggacaggtatggaatgtcatggcagcctaaagctagaaagccgattcgacgcctttcaacagttcatttcgacgatactgtgaagcaagccctgctttctgatatgcgaaagtaccttgatccaaatacaaaaaggctatatcaaagtcgtagtatgccctatcggcgaggctatctcttcttcggtccccctggcacgggtaaatcatccctttcgactgctctggcgggtgaatttggattggacctttacgaaatcaagatcccatgcgtggcaacagaccaagacttagagcttatgtttcaagaagtgcctccgcagtgtattgtgctcctggaagatgtcgatgccatttggacagatcgggactcggataaagacgatcaaaagtctatctctagatcaagctgcacactgtcaggtctgcttaatgccctcgatggcgtaggtacacaagaaggccggatagtgattatgactaccaataagccagagcgtctagatagcgcgctcattcgtcccggtcgtgttgacttaaaggtcatgcttggaaatatcagtcgtaaatccgccgaagagatgtttattcggatgtttacgccggatatcgaagagtcgcctctcattgttaaaagcgatatggaaggaatagccgttcacgatacagcagtggcagacgacgagcatttacatgcacttgccgctcaattttcaaaacacatccccaacgacacgctttcgccctcacagctccagggattctttcagctacacctggacaacgcaagcgaagccgtcgcccaattccccggctggatagagagagagttgtcaaagacagctcttgacgatgacatttggatcgttagcgggggaaaatcgtag

SEQ ID NO: 18737 - protein, 504 aa, Muscodor strobelii
  misc_feature: SGI Peptide ID NO. 566287
  misc_feature (267)..(438): Pfam Id: PF00004 Pfam Desc: ATPase family associated with various cellular activities (AAA)
  misc_feature (45)..(231): Pfam Id: PF08740 Pfam Desc: BCS1 N terminal
  misc_feature (267)..(405): Pfam Id: PF00004 Pfam Desc: ATPase family associated with various cellular activities (AAA)
  misc_feature (7)..(503): NCBI GI: 46110661 Blast Desc: FG02212.1 [Gibberella zeae PH-1]
  misc_feature (1)..(491): NCBI GI: 256724970 Blast Desc: [Nectria haematococca mpVI 77-13-4]
  misc_feature (3)..(504): NCBI GI: 261360566 Blast Desc: mitochondrial chaperone BCS1 [Verticillium albo-atrum VaMs.102]
  misc_feature (3)..(489): NCBI GI: 212536558 Blast Desc: mitochondrial chaperone bcs1, [Penicillium marneffei ATCC 18224] gi|210070834|gb|EEA24924.1| mitochondrial chaperone bcs1, [Penicillium marneffei ATCC 18224]
  misc_feature (4)..(491): NCBI GI: 242796075 Blast Desc: metalloprotease m41 ftsh, [Talaromyces stipitatus ATCC 10500] gi|218719311|gb|EED18731.1| metalloprotease m41 ftsh, [Talaromyces stipitatus ATCC 10500]
  misc_feature (60)..(487): NCBI GI: 116191483 Blast Desc: CHGG_05459 [Chaetomium globosum CBS 148.51] gi|88181372|gb|EAQ88840.1| CHGG_05459 [Chaetomium globosum CBS 148.51]
  misc_feature (21)..(489): NCBI GI: 39941778 Blast Desc: MGG_10738 [Magnaporthe grisea 70-15] gi|145012189|gb|EDJ96845.1| MGG_10738 [Magnaporthe grisea 70-15]
  misc_feature (41)..(486): NCBI GI: 46126333 Blast Desc: FG07544.1 [Gibberella zeae PH-1]
  misc_feature (72)..(484): NCBI GI: 256724802 Blast Desc: NECHADRAFT_63271 [Nectria haematococca mpVI 77-13-4]
  misc_feature (34)..(483): NCBI GI: 256727737 Blast Desc: NECHADRAFT_1988 [Nectria haematococca mpVI 77-13-4]
  misc_feature: Useful for introducing or modulating the production of volatile compounds
MPFHSGTAGRHGLFSNHVHDVGFMKEILGRWVSGLDTTRLGSLAACISVVPVVWRFVTATWTDTWHWIRQFFVASVRVPGRDPLNRSVMSWVMTQIVKHRENRSFTARTQVQGGELIDRAALLKRKRRDIQYLPHFETTWFWHDGSLFFVSRSLDDFHESMTDPSYDGIGGEELVLGRLGRSTEPIKKLIQTCQDYSDRQTEYFVIIYARDRYGMSWQPKARKPIRRLSTVHFDDTVKQALLSDMRKYLDPNTKRLYQSRSMPYRRGYLFFGPPGTGKSSLSTALAGEFGLDLYEIKIPCVATDQDLELMFQEVPPQCIVLLEDVDAIWTDRDSDKDDQKSISRSSCTLSGLLNALDGVGTQEGRIVIMTTNKPERLDSALIRPGRVDLKVMLGNISRKSAEEMFIRMFTPDIEESPLIVKSDMEGIAVHDTAVADDEHLHALAAQFSKHIPNDTLSPSQLQGFFQLHLDNASEAVAQFPGWIERELSKTALDDDIWIVSGGKS

SEQ ID NO: 18738 - DNA, 2789 bp, Muscodor strobelii
  misc_feature: SGI EST ID NO. CUFF.43992.0
  misc_feature: Variant of the nucleotide sequence at SEQ ID NO 18736
tgaaacactaatgtgagctaatgcaataagctgtatctatgcagtacgtttgaacaaattgataacaaaactctaagaacaacccaaggtcttgtggggaaggagatcgcaaatacgcaatcatgtttagaatagttgcaaatacacttgtttaagaacctaattttccatcctatgaagtaagtttatatggttcgttattgtcgtcattcgctaacttcatgtataatgtgtgcatgctgtgaatcattgtttcggtataagctccctttgactagtgttaatgatgtagggaatcattgagttgtgttaagacactacagcaatcagccccaatattacgtgccaaatttttgagatttaggcgttttataagaagtgtagatgattatctaggataaacatgtccaaattttttcctaaatcgcagtatcaaatacattgcaaaagctcagtctaatacgtccatagctagtagttgaagtggcctacctagcagtcgaaatgtggcggtgcgtgtggctgtctatcaaatcccacctcctccggctgcaaatggctctctcagtcgctcagtcatatctgtcgttacgtctgtctgtacgaatattagaggacaatgtgttggaagtttttaatttgaaaatctaaatgcctttctttaatgacttttccatttcttacgttcttttacccccgcaatctgcagacggtgcttcactggtctgacctattttgtccgattttttcaggtggaaccatccgagtcacatgttctagctggtcatgccatttcattccggaacagcaggaagacatggcctcttttcaaaccatgtccatgacgttggtttcatgaaagagattttaggcagatgggtgtccggccttgatactacacgactgggcagtcttgccgcctgtataagcgttgtgcccgtcgtgtggcgctttgtcactgcaacatggaccgacacctggcactggatacgccaattcttcgttgcatccgtaagagtaccgggaagagaccctctgaataggagtgtcatgagctgggttatgacgcaaattgtaaagcaccgcgaaaaccggtcgttcacagcgcgtactcaagtacagggaggcgaattgattgaccgagctgcactcctgaaaagaaaacggagagatatccaatacctcccacactttgagactacttggttctggcatgatgggtccttgttcttcgtttcacgatcattggatgattttcacgaatcgatgacggatccatcatatgatggcattggtggcgaagagctcgttctcggccgcctcggccgctctacagagcctatcaaaaaacttatccagacgtgccaggactattctgacaggcagaccgaatatttcgtgatcatttacgcccgggacaggtatggaatgtcatggcagcctaaagctagaaagccgattcgacgcctttcaacagttcatttcgacgatactgtgaagcaagccctgctttctgatatgcgaaagtaccttgatccaaatacaaaaaggctatatcaaagtcgtagtatgccctatcggcgaggctatctcttcttcggtccccctggcacgggtaaatcatccctttcgactgctctggcgggtgaatttggattggacctttacgaaatcaagatcccatgcgtggcaacagaccaagacttagagcttatgtttcaagaagtgcctccgcagtgtattgtgctcctggaagatgtcgatgccatttggacagatcgggactcggataaagacgatcaaaagtctatctctagatcaagctgcacactgtcaggtctgcttaatgccctcgatggcgtaggtacacaagaaggccggatagtgattatgactaccaataagccagagcgtctagatagcgcgctcattcgtcccggtcgtgttgacttaaaggtcatgcttggaaatatcagtcgtaaatccgccgaagagatgtttattcggatgtttacgccggatatcgaagagtcgcctctcattgttaaaagcgatatggaaggaatagccgttcacgatacagcagtggcagacgacgagcatttacatgcacttgccgctcaattttcaaaacacatccccaacgacacgctttcgccctcacagctccagggattctttcagctacacctggacaacgcaagcgaagccgtcgcccaattccccggctggatagagagagagttgtcaaagacagctcttgacgatgacatttggatcgttagcgggggaaaatcgtagcgatcttgtaatcctacgcttcgtagttcatgtacaacgcttgtattataattttgttattgttggcgtaggtcgtttgcatatagatatctagactgtgtccggtataaagtggcctggactagaacgggaaaattatcggaaagtagacatgaggcatatcttacaatattgatgggtggagcgagcattggggtggttctggacagcaagtcgaccagctggaaaagctgccgcctgatttcgaattcagcatacccaatgcaatttgttgctgttgctctacctaggtacctacattttgcaagtactgagctggttttaagtatagagaatcatccaggaactcgcaataccaatcgttaatgctagttacctaacaacataggctagggcagaatcttttgtaatcataatcagaaatttatggcacattctcaatagatcgctgattaatgcagagccacagtgaaaatataaacagttac

SEQ ID NO: 18739 - DNA, 1035 bp, Muscodor strobelii
  misc_feature: SGI cDNA ID NO. 566288
  misc_feature: Encodes the peptide sequence at SEQ ID NO 18740
atgacggatccatcatatgatggcattggtggcgaagagctcgttctcggccgcctcggccgctctacagagcctatcaaaaaacttatccagacgtgccaggactattctgacaggcagaccgaatatttcgtgatcatttacgcccgggacaggtatggaatgtcatggcagcctaaagctagaaagccgattcgacgcctttcaacagttcatttcgacgatactgtgaagcaagccctgctttctgatatgcgaaagtaccttgatccaaatacaaaaaggctatatcaaagtcgtagtatgccctatcggcgaggctatctcttcttcggtccccctggcacgggtaaatcatccctttcgactgctctggcgggtgaatttggattggacctttacgaaatcaagatcccatgcgtggcaacagaccaagacttagagcttatgtttcaagaagtgcctccgcagtgtattgtgctcctggaagatgtcgatgccatttggacagatcgggactcggataaagacgatcaaaagtctatctctagatcaagctgcacactgtcaggtctgcttaatgccctcgatggcgtaggtacacaagaaggccggatagtgattatgactaccaataagccagagcgtctagatagcgcgctcattcgtcccggtcgtgttgacttaaaggtcatgcttggaaatatcagtcgtaaatccgccgaagagatgtttattcggatgtttacgccggatatcgaagagtcgcctctcattgttaaaagcgatatggaaggaatagccgttcacgatacagcagtggcagacgacgagcatttacatgcacttgccgctcaattttcaaaacacatccccaacgacacgctttcgccctcacagctccagggattctttcagctacacctggacaacgcaagcgaagccgtcgcccaattccccggctggatagagagagagttgtcaaagacagctcttgacgatgacatttggatcgttagcgggggaaaatcgtag

SEQ ID NO: 18740 - protein, 344 aa, Muscodor strobelii
  misc_feature: SGI Peptide ID NO. 566288
  misc_feature (107)..(278): Pfam Id: PF00004 Pfam Desc: ATPase family associated with various cellular activities (AAA)
  misc_feature (107)..(245): Pfam Id: PF00004 Pfam Desc: ATPase family associated with various cellular activities (AAA)
  misc_feature (1)..(71): Pfam Id: PF08740 Pfam Desc: BCS1 N terminal
  misc_feature (1)..(331): NCBI GI: 46110661 Blast Desc: FG02212.1 [Gibberella zeae PH-1]
  misc_feature (1)..(331): NCBI GI: 256724970 Blast Desc: [Nectria haematococca mpVI 77-13-4]
  misc_feature (1)..(344): NCBI GI: 261360566 Blast Desc: mitochondrial chaperone BCS1 [Verticillium albo-atrum VaMs.102]
  misc_feature (1)..(329): NCBI GI: 212536558 Blast Desc: mitochondrial chaperone bcs1, [Penicillium marneffei ATCC 18224] gi|210070834|gb|EEA24924.1| mitochondrial chaperone bcs1, [Penicillium marneffei ATCC 18224]
  misc_feature (2)..(331): NCBI GI: 242796075 Blast Desc: metalloprotease m41 ftsh, [Talaromyces stipitatus ATCC 10500] gi|218719311|gb|EED18731.1| metalloprotease m41 ftsh, [Talaromyces stipitatus ATCC 10500]
  misc_feature (10)..(327): NCBI GI: 116191483 Blast Desc: CHGG_05459 [Chaetomium globosum CBS 148.51] gi|88181372|gb|EAQ88840.1| CHGG_05459 [Chaetomium globosum CBS 148.51]
  misc_feature (6)..(308): NCBI GI: 39941778 Blast Desc: MGG_10738 [Magnaporthe grisea 70-15] gi|145012189|gb|EDJ96845.1| MGG_10738 [Magnaporthe grisea 70-15]
  misc_feature (8)..(326): NCBI GI: 46126333 Blast Desc: FG07544.1 [Gibberella zeae PH-1]
  misc_feature (12)..(324): NCBI GI: 256724802 Blast Desc: NECHADRAFT_63271 [Nectria haematococca mpVI 77-13-4]
  misc_feature (12)..(327): NCBI GI: 256726326 Blast Desc: NECHADRAFT_62313 [Nectria haematococca mpVI 77-13-4]
MTDPSYDGIGGEELVLGRLGRSTEPIKKLIQTCQDYSDRQTEYFVIIYARDRYGMSWQPKARKPIRRLSTVHFDDTVKQALLSDMRKYLDPNTKRLYQSRSMPYRRGYLFFGPPGTGKSSLSTALAGEFGLDLYEIKIPCVATDQDLELMFQEVPPQCIVLLEDVDAIWTDRDSDKDDQKSISRSSCTLSGLLNALDGVGTQEGRIVIMTTNKPERLDSALIRPGRVDLKVMLGNISRKSAEEMFIRMFTPDIEESPLIVKSDMEGIAVHDTAVADDEHLHALAAQFSKHIPNDTLSPSQLQGFFQLHLDNASEAVAQFPGWIERELSKTALDDDIWIVSGGKS

SEQ ID NO: 18741 - DNA, 2789 bp, Muscodor strobelii; identical to SEQ ID NO: 18738
  misc_feature: SGI EST ID NO. CUFF.43992.0
  misc_feature: Variant of the nucleotide sequence at SEQ ID NO 18739

SEQ ID NO: 18742 - DNA, 1485 bp, Muscodor strobelii
  misc_feature: SGI cDNA ID NO. 566289
  misc_feature: Reduced expression when VOC is produced
  misc_feature: Encodes the peptide sequence at SEQ ID NO 18743
atgaccaatcaacagcacgggttgccgccttatggcaacatatcgagtgatatttttcgctccgattggaatttctttccaaacccatggaacgaggacctggaacctttcctcggaagagaaccctcttcagaacctgatgagcaaccggcagaagagcaacagcctgacaacggaggatttaacagccttgtgattggacagccgcacaccggccagcatctgcctgtccctctcccctttcgtcaatatccaacctcgacggttgcccaggatctaacacctgcaggtggatctgatagcaactgggattacgtgatcgaagtttggcctgtcaacggtgctcacattcgcaacaacactgaacgcactgccattaacagcaatatacaacatatacaactggccctcgcgaaaaagaatttgttatacgaatttgttatctgcgaccctgtcgatcaccgcgatctcgctagtcatgggcagtgccgtcggtatttgataccccgcatatatagagactacgagcgttcacgtctcgaattcctccagatattcagcaccaacaggccatataaccgagctcttaacggttaccgcttcaagatggcagttgtgttcgaatctggacgcttcagctcgtctgagtcctatccttcaggcatcaacaataacaacaatgagctctcccatttcaaccccttaaatccgaacggagatcctacactcatcccttcagatacaccatcaccttcagctagtagtcttgcacctgctactccccccgcactgcaggcatcttcacctaatgactcaagtcacaacacctcaaggaagacctcatcacgcatgaaacctgtcccgaagcctcaacgacaagtcgtcaagaatcgagatggcaagttcatgtgcaactgggccgactgcaccgagccagtcaaagaattcgcccgcaaatgtgaatggagcaagcacatggacaagcatgaacggccttacaagtgccaagctcagggctgcgagaaacttccaggtttcacgtacgctggaggactccttcggcacggccgcgaagtccacaatcaacacggcggtcctaagaatcccctgttttgccctcacgcaaactgcaaacgctacaacggcaaggagttcgctcgtctcgagaacttgaacgagcatctacgccgatgccacacggatccgaacaatggtaccggctcgcccgctgccacccccgtcgatccgggacagtcgtccatgtcaccactccctttgcgccctatgagtcctcagatcggcgataagcggaaggcggacgacgatgaagatcttcgcgaggaggttaaacgcctcagagccgagaacgtgggcttgaaaagccagcagatggcgatgatgcaacagctggaagaacatcggcgccatatcaatcaacttcaaacccagcttcagtcctatcagtcctcgaaagacacttcctag

SEQ ID NO: 18743 - protein, 494 aa, Muscodor strobelii
  misc_feature: SGI Peptide ID NO. 566289
  misc_feature (281)..(472): NCBI GI: 256731872 Blast Desc: NECHADRAFT_104560 [Nectria haematococca mpVI 77-13-4]
  misc_feature (256)..(484): NCBI GI: 116206746 Blast Desc: CHGG_02666 [Chaetomium globosum CBS 148.51] gi|88183263|gb|EAQ90731.1| CHGG_02666 [Chaetomium globosum CBS 148.51]
  misc_feature (203)..(472): NCBI GI: 261352105 Blast Desc: conserved [Verticillium albo-atrum VaMs.102]
  misc_feature (212)..(481): NCBI GI: 154304785 Blast Desc: BC1G_08978 [Botryotinia fuckeliana B05.10] gi|150853840|gb|EDN29032.1| BC1G_08978 [Botryotinia fuckeliana B05.10]
  misc_feature (203)..(481): NCBI GI: 156044346 Blast Desc: SS1G_10276 [Sclerotinia sclerotiorum 1980] gi|154694665|gb|EDN94403.1| SS1G_10276 [Sclerotinia sclerotiorum 1980]
  misc_feature (283)..(472): NCBI GI: 46137689 Blast Desc: FG10360.1 [Gibberella zeae PH-1]
  misc_feature (281)..(469): NCBI GI: 164425332 Blast Desc: NCU04619 [Neurospora crassa OR74A] gi|21622512|emb|CAD37059.1| [Neurospora crassa] gi|157070885|gb|EAA28939.2| [Neurospora crassa OR74A]
  misc_feature (240)..(480): NCBI GI: 171692251 Blast Desc: protein product [Podospora anserina] gi|170946074|emb|CAP72875.1| protein product [Podospora anserina]
  misc_feature (283)..(483): NCBI GI: 39968763 Blast Desc: MGG_02474 [Magnaporthe grisea 70-15] gi|145013917|gb|EDJ98558.1| MGG_02474 [Magnaporthe grisea 70-15]
  misc_feature (232)..(472): NCBI GI: 169613683 Blast Desc: SNOG_09974 [Phaeosphaeria nodorum SN15] gi|160707208|gb|EAT82309.2| SNOG_09974 [Phaeosphaeria nodorum SN15]
  misc_feature: Useful for introducing or modulating the production of volatile compounds
MTNQQHGLPPYGNISSDIFRSDWNFFPNPWNEDLEPFLGREPSSEPDEQPAEEQQPDNGGFNSLVIGQPHTGQHLPVPLPFRQYPTSTVAQDLTPAGGSDSNWDYVIEVWPVNGAHIRNNTERTAINSNIQHIQLALAKKNLLYEFVICDPVDHRDLASHGQCRRYLIPRIYRDYERSRLEFLQIFSTNRPYNRALNGYRFKMAVVFESGRFSSSESYPSGINNNNNELSHFNPLNPNGDPTLIPSDTPSPSASSLAPATPPALQASSPNDSSHNTSRKTSSRMKPVPKPQRQVVKNRDGKFMCNWADCTEPVKEFARKCEWSKHMDKHERPYKCQAQGCEKLPGFTYAGGLLRHGREVHNQHGGPKNPLFCPHANCKRYNGKEFARLENLNEHLRRCHTDPNNGTGSPAATPVDPGQSSMSPLPLRPMSPQIGDKRKADDDEDLREEVKRLRAENVGLKSQQMAMMQQLEEHRRHINQLQTQLQSYQSSKDTS

SEQ ID NO: 18744 - DNA, 2585 bp, Muscodor strobelii
  misc_feature: SGI EST ID NO. CUFF.44370.0
  misc_feature: Variant of the nucleotide sequence at SEQ ID NO 18742
tggcaacatatcgagtggtataaccgggcgaaacatcgatgcgcaggcagcagggatgctgatgttgacttacagatatttttcgctccgattggaatttctttccaaacccatggaacgaggacctggaacctttcctcggaagagaaccctcttcagaacctgatgagcaaccggcagaagagcaacagcctgacaacggaggatttaacagccttgtgattggacagccgcacaccggccagcatctgcctgtccctctcccctttcgtcaatatccaacctgtgagtcatgcaagcctggtgccgcaatgtgcctagtgaatctccacatcatcgacagtgatgagactcacgggggcctattgaaatgcacaaaggactgactatataaacagcgacggttgcccaggatctaacacctgcaggtggatctgatagcaactgggattacgtgatcgaagtttggcctgtcaacggtgctcacattcgcaacaacactgaacgcactgccattaacagcaatatacaacatatacaactggccctcgcgaaaaagaatttgttatacgaatttgttatctgcgaccctgtcgatcaccgcgatctcgctagtcatgggcagtgccgtcggtatttgataccccgcatatatagagactacgagcgttcacgtctcgaattcctccagatattcagcaccaacaggccatataaccgagctcttaacggttaccgcttcaagatggcagttgtgttcgaatctggacgcttcagctcgtctgagtcctatccttcaggcatcaacaataacaacaatgagctctcccatttcaaccccttaaatccgaacggagatcctacactcatcccttcagatacaccatcaccttcagctagtagtcttgcacctgctactccccccgcactgcaggcatcttcacctaatgactcaagtcacaacacctcaaggaagacctcatcacgcatgaaacctgtcccgaagcctcaacgacaagtcgtcaagaatcgagatggcaagttcatgtgcaactgggccgactgcaccgagccagtcaaagaattcgcccgcaaatgtgaatggagcaagcacatggacaagcatgaacggccttacaagtgccaagctcagggctgcgagaaacttccaggtttcacgtacgctggaggactccttcggcacggccgcgaagtccacaatcaacacggcggtcctaagaatcccctgttttgccctcacgcaaactgcaaacgctacaacggcaaggagttcgctcgtctcgagaacttgaacgagcatctacgccgatgccacacggatccgaacaatggtaccggctcgcccgctgccacccccgtcgatccgggacagtcgtccatgtcaccactccctttgcgccctatgagtcctcagatcggcgataagcggaaggcggacgacgatgaagatcttcgcgaggaggttaaacgcctcagagccgagaacgtgggcttgaaaagccagcagatggcgatgatgcaacagctggaagaacatcggcgccatatcaatcaacttcaaacccagcttcagtcctatcagtcctcgaaagacacttcctagttcgaagattttccatgggccagatagaaacgtccacctcgtttctcgatcacaaccgctgccagcctccaccagagtttctccgacactgcggaaccatggcacaaatgtgcgggcaaacgagccctgcaaacccaatatgcctatgtctcacgacaatggcacacccctaccgagtttataaactcacattaatttcctatgtttcgataccgaggcaacactcctcttttcagagctgccctggtgtttctacgtgtcattcccgcacgaaaccaagattggtgatgcatttgcttgcgggttggagacacatactctgcatttgaggcgcatttggcccaagcaaggcgtctgatttttctttgcttttcccctctgacgacatcacgttggcatgaaccgaccactccgattcccccttgtacgctacgctactacttttgacgtctaatgcatttggcggaggttgcagaatgaatgagtacttgtactagtatagataggatgatgataccccctcatagagctagtcttttgctgctcccgtgttttccgctacggagtttgggtgtatctacctacttaatgtcaatgtttatttactgtatatctgaacttgtcttcttgttcaatttgatgtctcttgggtgttggatttctatagaggtggtagtgaataatttacccatcgagactatgcagctttgctacgacattgcttcgttactgccgactgctactattttcaactacctaaggactaacgacaataggtatcgaacattgcgttcaactgccgtactcaatgatgaatcaaatccatctgcgctgatacatttgatcagcgcggaactacggattcgaatcccgcgagtcgtttgatatagataccagcaatacaccgcaattgccgagaatccagagagacggtttaccaagagatcaaagcgtgccttta

SEQ ID NO: 18745 - DNA, 1629 bp, Muscodor strobelii
  misc_feature: SGI cDNA ID NO. 566290
  misc_feature: Reduced expression when VOC is produced
  misc_feature: Encodes the peptide sequence at SEQ ID NO 18746
atggctgataaggagctcaccgaggccgagaaggccgagaagctggccgctgccaggaaacgtgctgcgcaaatggccaagaagaagaaaggcggcgccgcgaagaaggacaagaaggaagctaaagaagaagcacaacccgaggccgagccagaatccaccgctgccgaagacgctgtgcccgaagcggctcccgctgctgatgatcctcctgaagacgccgccgttgaagagccctcctcgccaacccaagctctcccctccctttctcagcagtccaaactcagatcctcctctttcagacaagggccgctgtcccccgtcggcggtctgttgagccctgatggcgagaccgcaccagacatctaccgaaagcaggtcgcacgtatcgaagacctcgagaaagagaacaaacgcctcgccaaagaagccagcgatgcagagaagagatataagaaagccgaggaagatctcgctgatctgcaggaggccgatcgcgatggttcagaaaatagccaagtcgaaaagctgaaagctgaaatcgcagcactccaaagacacaactcacagcttcagtcagcagcaacaaagcgacacggttcttcgccatccatcgccatggccacaccaccagacgaattacaggcacaacttgcatccaagtcctccaccatcgagacaatggaactagagatctcgcgcctccgcgcccaagccgagagacaggcctccgcaggcggaacggatcgagaacagatcgtagctctagaagaaaagctcgcgcgctcagaacaagccgccatgaaagcccagcgggagctgggcgacctgaagaagaatctcgagcgagccacagagcgcgccgtaaaagagggaagtgccaaaacaagcgcagagactaaactaaaatctctcgagcgcgatgttgagcaactgaacgccgaaaaagccgaactggaaaagaaagccgaggcattcgacaaaaaagtcgcagcattgggaactctacacaaagaaaacgacagccgctcacaagccctacgcaaagaaaaagagcgcgcagaaaaggaagcccaagaagccacatccaagatggagaaactagaagccgagaacgcccgtctgcggaagaaagacgcagccgaaggcggcggagacgacggcatggacgagctagaagacgaagagcgcgcacgcatggagaagaagatccgcgatctagagacggagaactacgacctacggagaggtatctggcatcagaagcgcagggacatggaacccggcgctgaagaagatttcacgaatatcgacctgggtaacgggtcttcgcctacgagcgtgcggaaggctagtacgaagggcttcagtgactacctgacgagtggcattaatgcgctgactggggttggtgcggatgagaatgagggattcttgaatgatgatgatgatttagattttgacgaggacgcatttaggaaggcgaaggaggaggatgggaaaaggaggttggagaggatgaaggagttgaaacgcggactgaagaattgggagggttggagattggatctcgttgatgctcggagaggaggtggtgggtttggtgctggggagatctttgaggtgtag

SEQ ID NO: 18746 - protein, 542 aa, Muscodor strobelii
  misc_feature: SGI Peptide ID NO. 566290
  misc_feature (87)..(542): NCBI GI: 154305408 Blast Desc: BC1G_08473 [Botryotinia fuckeliana B05.10] gi|150853260|gb|EDN28452.1| BC1G_08473 [Botryotinia fuckeliana B05.10]
  misc_feature (1)..(542): NCBI GI: 46137665 Blast Desc: FG10348.1 [Gibberella zeae PH-1]
  misc_feature (60)..(527): NCBI GI: 116206714 Blast Desc: CHGG_02650 [Chaetomium globosum CBS 148.51] gi|88183247|gb|EAQ90715.1| CHGG_02650 [Chaetomium globosum CBS 148.51]
  misc_feature (1)..(542): NCBI GI: 256732252 Blast Desc: NECHADRAFT_104554 [Nectria haematococca mpVI 77-13-4]
  misc_feature (83)..(526): NCBI GI: 85102887 Blast Desc: NCU01327 [Neurospora crassa OR74A] gi|11595597|emb|CAC18217.1| [Neurospora crassa] gi|28922958|gb|EAA32177.1| [Neurospora crassa OR74A]
  misc_feature (69)..(542): NCBI GI: 39968761 Blast Desc: MGG_02473 [Magnaporthe grisea 70-15] gi|145013918|gb|EDJ98559.1| MGG_02473 [Magnaporthe grisea 70-15]
  misc_feature (23)..(542): NCBI GI: 169778243 Blast Desc: [Aspergillus oryzae RIB40] gi|83772324|dbj|BAE62454.1| protein product [Aspergillus oryzae]
  misc_feature (23)..(542): NCBI GI: 238495518 Blast Desc: myosin heavy chain, embryonic smooth muscle isoform, [Aspergillus flavus NRRL3357] gi|220695645|gb|EED51988.1| myosin heavy chain, embryonic smooth muscle isoform, [Aspergillus flavus
  misc_feature (64)..(542): NCBI GI: 255944655 Blast Desc: Pc20g05610 [Penicillium chrysogenum Wisconsin 54-1255] gi|211587830|emb|CAP85890.1| Pc20g05610 [Penicillium chrysogenum Wisconsin 54-1255]
  misc_feature (45)..(542): NCBI GI: 70988877 Blast Desc: conserved [Aspergillus fumigatus Af293] gi|66846921|gb|EAL87252.1| conserved [Aspergillus fumigatus Af293] gi|159128704|gb|EDP53818.1| conserved [Aspergillus A1163]
  misc_feature: Useful for introducing or modulating the production of volatile compounds
MADKELTEAEKAEKLAAARKRAAQMAKKKKGGAAKKDKKEAKEEAQPEAEPESTAAEDAVPEAAPAADDPPEDAAVEEPSSPTQALPSLSQQSKLRSSSFRQGPLSPVGGLLSPDGETAPDIYRKQVARIEDLEKENKRLAKEASDAEKRYKKAEEDLADLQEADRDGSENSQVEKLKAEIAALQRHNSQLQSAATKRHGSSPSIAMATPPDELQAQLASKSSTIETMELEISRLRAQAERQASAGGTDREQIVALEEKLARSEQAAMKAQRELGDLKKNLERATERAVKEGSAKTSAETKLKSLERDVEQLNAEKAELEKKAEAFDKKVAALGTLHKENDSRSQALRKEKERAEKEAQEATSKMEKLEAENARLRKKDAAEGGGDDGMDELEDEERARMEKKIRDLETENYDLRRGIWHQKRRDMEPGAEEDFTNIDLGNGSSPTSVRKASTKGFSDYLTSGINALTGVGADENEGFLNDDDDLDFDEDAFRKAKEEDGKRRLERMKELKRGLKNWEGWRLDLVDARRGGGGFGAGEIFEV

SEQ ID NO: 18747 - DNA, 2396 bp, Muscodor strobelii
  misc_feature: SGI EST ID NO. CUFF.43999.0
  misc_feature: Variant of the nucleotide sequence at SEQ ID NO 18745
tcaggttcttccagccccttggagcctctgtgaaatcgtgactcgttttgcattaggtcctacaaattatgtcgcatttttatacaatcgcagcgcatcgtcgatgttgacgactctgaatacctgtatgggtgtccgaaacgcgaataggtacctgtaattgaatactatcgatatagacaggcccgtgcactgcgctgacagaggcgttgggtcgctggagcgaacactggagcttccccatacccgcctcgccagtgacacaagcggctccgccagcgttcgcggcacggcttctggccagataaactcctcccagcagcgacgattacttgtcagctaaatgcaagtcccgcaaccacatcaccacgaagctatagactacgcataggactagacatagatgacgaacctttcattttcaacaaaaccaacggcaagacgcgactaatccctcaatatggctgataaggagctcaccgaggccgagaaggccgagaagctggccgctgccaggaaacgtgctgcgcaaatggccaagaagaagaaaggcggcgccgcgaagaaggacaagaaggaagctaaagaagaagcacaacccgaggccgagccagaatccaccgctgccgaagacgctgtgcccgaagcggctcccgctgctgatgatcctcctgaagacgccgccgttgaagagccctcctcgccaacccaagctctcccctccctttctcagcagtccaaactcagatcctcctctttcagacaagggccgctgtcccccgtcggcggtctgttgagccctgatggcgagaccgcaccagacatctaccgaaagcaggtcgcacgtatcgaagacctcgagaaagagaacaaacgcctcgccaaagaagccagcgatgcagagaagagatataagaaagccgaggaagatctcgctgatctgcaggaggccgatcgcgatggttcagaaaatagccaagtcgaaaagctgaaagctgaaatcgcagcactccaaagacacaactcacagcttcagtcagcagcaacaaagcgacacggttcttcgccatccatcgccatggccacaccaccagacgaattacaggcacaacttgcatccaagtcctccaccatcgagacaatggaactagagatctcgcgcctccgcgcccaagccgagagacaggcctccgcaggcggaacggatcgagaacagatcgtagctctagaagaaaagctcgcgcgctcagaacaagccgccatgaaagcccagcgggagctgggcgacctgaagaagaatctcgagcgagccacagagcgcgccgtaaaagagggaagtgccaaaacaagcgcagagactaaactaaaatctctcgagcgcgatgttgagcaactgaacgccgaaaaagccgaactggaaaagaaagccgaggcattcgacaaaaaagtcgcagcattgggaactctacacaaagaaaacgacagccgctcacaagccctacgcaaagaaaaagagcgcgcagaaaaggaagcccaagaagccacatccaagatggagaaactagaagccgagaacgcccgtctgcggaagaaagacgcagccgaaggcggcggagacgacggcatggacgagctagaagacgaagagcgcgcacgcatggagaagaagatccgcgatctagagacggagaactacgacctacggagaggtatctggcatcagaagcgcagggacatggaacccggcgctgaagaagatttcacgaatatcgacctgggtaacgggtcttcgcctacgagcgtgcggaaggctagtacgaagggcttcagtgactacctgacgagtggcattaatgcgctgactggggttggtgcggatgagaatgagggattcttgaatgatgatgatgatttagattttgacgaggacgcatttaggaaggcgaaggaggaggatgggaaaaggaggttggagaggatgaaggagttgaaacgcggactgaagaattgggagggttggagattggatctcgttgatgctcggagaggaggtggtgggtttggtgctggggagatctttgaggtgtagggctacaatagattgcgctgatagaggtcattcggatgtacaattttgtacgataggtgtttgaggaatgatcattacattatttcgtatttgcttctatatgctatatttgcctacctattttgtggctggcctcaaagtccggcatgagtcaaatggtggcgaggctgacgattgccttaataggtacttgggtagttaggtagttgggggcgaaagattcaatttataccttgcctatagtaggtgtcacgccgcaagtaaaaaaaatctcttagatctagttgctaactgagtcatagacttt

SEQ ID NO: 18748 - DNA, 1089 bp, Muscodor strobelii
  misc_feature: SGI cDNA ID NO. 566291
  misc_feature: Encodes the peptide sequence at SEQ ID NO 18749
atgaaaacattcaaataccctactggcccagctctaagactgggggcctcaagcttcccaaatttcagcctgctgccagcagagctgagactcggcatctgggaagaggcaatccgtgaagaggccgccaatcgcctagtaatcttggtcgaaactcacgtcgtccctaccaagaacctcatcagccctttcctgtccgtcaatcaagacagccgcaaatgcgcgattaaggtgtacaacaccaagctcaacatctacgaagtcccatctcccgaattgaatgaatattggattgccaggcgcaatgatttggccgcgtctatctttgaggggtttgaaaattatgacgaggacggctttggcgacggctttagatggtttggtgctagggacgcttccatgttattccatatggacaccgaaagaatcattcacagcatcgaggagcgaggactcagttcagggaatctctatctaagcgccaaatacgactcattcgttattacgacttgtctgagatcgcagagatcgtcgaacgagagactaactaggaagttggcttttcaagatgacctgtacgcgctgcggccgttctatgttcaggctatcgcgcgcttgggcaagaagccacttgataccgagctgtcgtggaaatacatcaccgcaagacttccttcttctacactcctggatgttcaaaccgtagtacttgccgagtcccaccgcggcaacgagcgcatgaatccggtccgtgagacaaaaataatctcctctatccccgaaattgactatcaccacttctgtaagaaccattggtatcgtacaaaagagggcaaagcgagtcaactttggcggtccgatacctttcagggcctgaagttctggaagcacttgtggtactatgaagacgtccgtacgctttatagggatattatgaacggacgagatatacgaatcggacattggtatactcgtaaagcggcagacgtaccgctcgagacggacctctggggctgggacaatgaagatggtgaccgcctataccgagacatgaaccggcggttggacatgttgttatcgcaagaataa

SEQ ID NO: 18749 - protein, 362 aa, Muscodor strobelii
  misc_feature: SGI Peptide ID NO. 566291
MKTFKYPTGPALRLGASSFPNFSLLPAELRLGIWEEAIREEAANRLVILVETHVVPTKNLISPFLSVNQDSRKCAIKVYNTKLNIYEVPSPELNEYWIARRNDLAASIFEGFENYDEDGFGDGFRWFGARDASMLFHMDTERIIHSIEERGLSSGNLYLSAKYDSFVITTCLRSQRSSNERLTRKLAFQDDLYALRPFYVQAIARLGKKPLDTELSWKYITARLPSSTLLDVQTVVLAESHRGNERMNPVRETKIISSIPEIDYHHFCKNHWYRTKEGKASQLWRSDTFQGLKFWKHLWYYEDVRTLYRDIMNGRDIRIGHWYTRKAADVPLETDLWGWDNEDGDRLYRDMNRRLDMLLSQE

SEQ ID NO: 18750 - DNA, 212 bp, Muscodor strobelii
  misc_feature: SGI EST ID NO. CUFF.44001.0
  misc_feature: Variant of the nucleotide sequence at SEQ ID NO 18748
actcagttcagggaatctctatctaagcgccaaatacgactcattcgttattacgacttgtctgagatcgcagagatcgtcgaacgagagactaactaggaagttggcttttcaagatgacctgtacgcgctgcggccgttctatgttcaggctatcgcgcgcttgggcaagaagccacttgataccgagctgtcgtggaaatacatcaccg

SEQ ID NO: 18751 - DNA, 960 bp, Muscodor strobelii
  misc_feature: SGI cDNA ID NO. 566292
  misc_feature: Elevated expression when VOC is produced
  misc_feature: Encodes the peptide sequence at SEQ ID NO 18752
atgatggacacttctctcgaccccgcaatcgtggcaggtttgtacaacatcaccgtgctgggtgcaacttgggccgacggacatagagttgaaatcaaagcgggggatgagaagctggaatattacctgaagatatacaaggaaatcgcgcactttgaactagctcgtggcgagtttgagggtcagaaagaattacagaaatacatcccagacaatgtggccgtccctttagcgtacgggaagctcgagcggggtgctcctgcgtccttcttcctgacgccttttcgcaacttggacgaggagatcgatgtctctccggaatacctggctcaagttcttagcagactgcataaactatcttcttcgccaaatggaaagttcggatttcacctaccaacattcaatggcgtcgtgccaatggtcaacgactggtgcgacacgtgggaagagttctacggtcgacagatgaggtcagatgttcggtggctacacagtgtttgtggaccggactctgagttcgacgagatatttgaggaattctccgagaaggtgatcaccagactactacggccactagaaaccggtggtcgaagtatcaagcccacgcttttacatggagatgcatggtcaggaaatatacagacagatgaagaaacagggcaagtcatcttgtttgactcttgttgcttctatggccataatgagcttgatctcgggatgatgagtgaccctcgttaccacttcggcgaggaacacgtgaaagcgtaccaagagcatgtacccaagtcagagccgcaagaggactttcctgatcgtcagttaatctatgcgatgcgcgataacatcatcaacctcggcctccattatgacagaatatcctacttcagagacgaaattattaaggaaatgcggcgcctcatcagcaaatatcctgacggcttcgatagctttgacggctga

SEQ ID NO: 18752 - protein, 319 aa, Muscodor strobelii
  misc_feature: SGI Peptide ID NO. 566292
  misc_feature (17)..(302): Pfam Id: PF03881 Pfam Desc: Fructosamine kinase
  misc_feature (3)..(308): NCBI GI: 85114984 Blast Desc: NCU00873 [Neurospora crassa OR74A] gi|28926583|gb|EAA35553.1| conserved [Neurospora crassa OR74A]
  misc_feature (6)..(289): NCBI GI: 145605954 Blast Desc: MGG_11859 [Magnaporthe grisea 70-15] gi|145013692|gb|EDJ98333.1| MGG_11859 [Magnaporthe grisea 70-15]
  misc_feature (57)..(317): NCBI GI: 240108761 Blast Desc: conserved [Coccidioides posadasii C735 delta SOWgp]
  misc_feature (59)..(318): NCBI GI: 119176150 Blast Desc: CIMG_09820 [Coccidioides immitis RS]
  misc_feature (2)..(278): NCBI GI: 255946231 Blast Desc: Pc20g14050 [Penicillium chrysogenum Wisconsin 54-1255] gi|211588618|emb|CAP86734.1| Pc20g14050 [Penicillium chrysogenum Wisconsin 54-1255]
  misc_feature (54)..(290): NCBI GI: 171679237 Blast Desc: protein product [Podospora anserina] gi|170939244|emb|CAP64472.1| protein product [Podospora anserina]
  misc_feature (24)..(278): NCBI GI: 115385086 Blast Desc: conserved [Aspergillus terreus NIH2624] gi|114196782|gb|EAU38482.1| conserved [Aspergillus terreus NIH2624]
  misc_feature (6)..(281): NCBI GI: 169765035 Blast Desc: [Aspergillus oryzae RIB40] gi|83764843|dbj|BAE54987.1| protein product [Aspergillus oryzae]
  misc_feature (8)..(278): NCBI GI: 116179188 Blast Desc: CHGG_00222 [Chaetomium globosum CBS 148.51] gi|88184519|gb|EAQ91987.1| CHGG_00222 [Chaetomium globosum CBS 148.51]
  misc_feature (2)..(309): NCBI GI: 256720827 Blast Desc: NECHADRAFT_85528 [Nectria haematococca mpVI 77-13-4]
  misc_feature: Useful for introducing or modulating the production of volatile compounds
MMDTSLDPAIVAGLYNITVLGATWADGHRVEIKAGDEKLEYYLKIYKEIAHFELARGEFEGQKELQKYIPDNVAVPLAYGKLERGAPASFFLTPFRNLDEEIDVSPEYLAQVLSRLHKLSSSPNGKFGFHLPTFNGVVPMVNDWCDTWEEFYGRQMRSDVRWLHSVCGPDSEFDEIFEEFSEKVITRLLRPLETGGRSIKPTLLHGDAWSGNIQTDEETGQVILFDSCCFYGHNELDLGMMSDPRYHFGEEHVKAYQEHVPKSEPQEDFPDRQLIYAMRDNIINLGLHYDRISYFRDEIIKEMRRLISKYPDGFDSFDG

SEQ ID NO: 18753 - DNA, 1286 bp, Muscodor strobelii
  misc_feature: SGI EST ID NO. CUFF.44008.0
  misc_feature: Variant of the nucleotide sequence at SEQ ID NO 18751
gcatagtgttgcccgaaatttgccaagtcatttcagtaacgagacatggaaaaggtagttgggccgacggacatagagttgaaatcaaagcgggggatgagaagctggaatattacctgaagatatacaaggaaatcgcgcactttgaactagctcgtggcgagtttgagggtcagaaagaattacagaaatacatcccagacaatgtggccgtccctttagcgtacgggaagctcgagcggggtgctcctgcgtccttcttcctgacgccttttcgcaacttggacgaggagatcgatgtctctccggaatacctggctcaagttcttagcagactgcataaactatcttcttcgccaaatggaaagttcggatttcacctaccaacattcaatggcgtcgtgccaatggtcaacgactggtgcgacacgtgggaagagttctacggtcgacagatgaggtcagatgttcggtggctacacagtgtttgtggaccggactctgagttcgacgagatatttgaggaattctccgagaaggtgatcaccagactactacggccactagaaaccggtggtcgaagtatcaagcccacgcttttacatggagatgcatggtcaggaaatatacagacagatgaagaaacagggcaagtcatcttgtttgactcttgttgcttctatggccataatgagcttgatctcgggatgatgagtgaccctcgttaccacttcggcgaggaacacgtgaaagcgtaccaagagcatgtacccaagtcagagccgcaagaggactttcctgatcgtcagttaatctatgcgatgcgcgataacatcatcaacctcggcctccattatgacagaatatcctacttcagagacgaaattattaaggaaatgcggcgcctcatcagcaaatatcctgacggcttcgatagctttgacggctgatacagccactgaaggctgctacggttcggagagaatttacggttgttcccttgctcaggcttgagaaaatatttatatgcattggaagtctctgagctgacgtggggacctgcattagtctgcaattttgtgctgttttacttgtgtactagttgaagactttactttgaaacataggtattagatcgtaggttgatgcgtagaactatttgttataggcatttgtggtttatgtggcacgtccaatctttcaataatctgtttctggtcaaaatcttagggcatggggttgttgagtgaatagcagaacagtttgcatcttcacgtgagctgtcg

SEQ ID NO: 18754 - DNA, 390 bp, Muscodor strobelii
  misc_feature: SGI cDNA ID NO. 566293
  misc_feature: Elevated expression when VOC is produced
  misc_feature: Encodes the peptide sequence at SEQ ID NO 18755
atgagaatctcgccgccggtactggctctgagagcaatccgcaggacaactaccgagttgtatgcgcagctctacgaatgggagtacacactctcacggttctctaaggttctcatcgaacgccttcgcagaatcaaagtacaggaggttataaccatagagcaagccgaggccatagaccaggcaatcaacgaactggagaccgctcgtgccgcatacctccgggcttctggaccttgctttcgcttctctcgtcccaaccatcccgagcaggtgactaccgagcaagagtcaaccctgaagagcaatctgcaggttgccgtcgatgccatacgcgacgctatcacgaaggggaaggaggtgctcgcttcctacggaatcacatattag

SEQ ID NO: 18755 - protein, 129 aa, Muscodor strobelii
  misc_feature: SGI Peptide ID NO. 566293
  misc_feature: Useful for introducing or modulating the production of volatile compounds
MRISPPVLALRAIRRTTTELYAQLYEWEYTLSRFSKVLIERLRRIKVQEVITIEQAEAIDQAINELETARAAYLRASGPCFRFSRPNHPEQVTTEQESTLKSNLQVAVDAIRDAITKGKEVLASYGITY

SEQ ID NO: 18756 - DNA, 1548 bp, Muscodor strobelii
  misc_feature: SGI cDNA ID NO. 566294
  misc_feature: Encodes the peptide sequence at SEQ ID NO 18757
atgtccgacggcaactttgccccgcgctccatgaagcgccggaatgtcaagggtctcgctctggccgcacccaaacctcctccgaccgccagcagctcaagtaatggctcgggctggggagctggtggctccagggcagacgatggcggcaacgaggcacagctggagatcggcatcgagttcaacctcgacatccgccctgaagatttggatattgtgaaggagttgggttctggcaacggaggaactgtcagtaaggtgaagcatcagcctaccggaaccaccatggcacgaaaggttatccacgtcgaggcgaataaagagttgcgaaagcgcatcgtccgcgagctcgagatcatgcacggttgccagtccgattatattgtcaccttctacggcgccttcctgaacgaccacaacgatgtcataatgtgcatggagtacatggatgttggttctcttgaccgagtgtcccgtgtttttggacctatccgcgtcgatgtactcggcaagatagcagaagccacgcttggaggcttgacctacctgtactctaaattccacatcatgcaccgagacattaaaccctccaacatcctcaccaactccaagggccatatcaagctctgtgactttggtgtttcgggcgagcttgtgaactcgatcgccgacacgttcgtcggcacatcgacctacatggcgcctgagcgaattcagggcgagaagtacacggttaaatcagatgtgtggagtttcggcctcacaatcatggagctggctataggaaagttcccattcgccgcaagcgaacagctctctgatggtgacggtgcccccgctggtatccttgacctgctacaacaaattgtccacgagccggcgccgaggctccctaagagtgatgccttcccgtctatcctcgaggacatgatccagaagtgtctttacaaggaccctagcgaacgaccgacccctcagcagctctttgaccatgataatttcgtgcaggcagcaaagcgaacccccgtcgatctccgggcttgggctgtcggtcttatggagaaggacaaccgcaagtcgcatctggcaccacagctgtctcccgctactcaagaactcttgagatccaaagattcgccaaaccaagctggcgacaacaacccggcattcacaccgacgtcaggagagatacctattgccggtgccttggtctcaccccgagaccactacggtcacgcaccgagccgttcgcccactagaaacgggattggcagtatggggcgacctggcggatccagcgtgcatccaggcttgggccagagatctgctacttctggctcgatacccaaagtcgggactcccgacccatcacttcccgctagcgcaggcgctgctactttcaccttgcctgtgcgaccggcaccaccaggcggtcctttgcctccccctcccccacgcaaggagacgcccgatgagatgcgacgacaggcggcatacgcgccgtcatctaatggcaactacggggcaatgggctatccacgcaaatag

SEQ ID NO: 18757 - protein, 515 aa, Muscodor strobelii
  misc_feature: SGI Peptide ID NO. 566294
  misc_feature (70)..(334): Pfam Id: PF00069 Pfam Desc: Protein kinase domain
  misc_feature (188)..(267): Pfam Id: PF07714 Pfam Desc: Protein tyrosine kinase
  misc_feature (70)..(155): Pfam Id: PF07714 Pfam Desc: Protein tyrosine kinase
  misc_feature (6)..(513): NCBI GI: 49036113 Blast Desc: mitogen activated protein kinase kinase 2 [Cryphonectria parasitica]
  misc_feature (6)..(496): NCBI GI: 256732080 Blast Desc: [Nectria haematococca mpVI 77-13-4]
  misc_feature (1)..(508): NCBI GI: 46136775 Blast Desc: FG09903.1 [Gibberella zeae PH-1]
  misc_feature (6)..(447): NCBI GI: 85091342 Blast Desc: NCU04612 [Neurospora crassa OR74A] gi|21622505|emb|CAD37052.1| MAP kinase kinase [Neurospora crassa] gi|28920243|gb|EAA29619.1| NCU04612 [Neurospora crassa OR74A]
  misc_feature (11)..(496): NCBI GI: 5901729 Blast Desc: AF169643_1 MAP kinase kinase [Glomerella cingulata] gi|5901731|gb|AAD55386.1|AF169644_1 MAP kinase kinase [Glomerella cingulata]
  misc_feature (1)..(512): NCBI GI: 154316783 Blast Desc: BC1G_03809 [Botryotinia fuckeliana B05.10] gi|150845421|gb|EDN20614.1| BC1G_03809 [Botryotinia fuckeliana B05.10]
  misc_feature (1)..(512): NCBI GI: 156043577 Blast Desc: SS1G_10792 [Sclerotinia sclerotiorum 1980] gi|154695179|gb|EDN94917.1| SS1G_10792 [Sclerotinia sclerotiorum 1980]
  misc_feature (1)..(395): NCBI GI: 171691803 Blast Desc: protein product [Podospora anserina] gi|170945850|emb|CAP72651.1| protein product [Podospora anserina]
  misc_feature (1)..(420): NCBI GI: 11991500 Blast Desc: mitogen-activated protein kinase kinase [Blumeria graminis]
  misc_feature (1)..(394): NCBI GI: 116179806 Blast Desc: CHGG_00531 [Chaetomium globosum CBS 148.51] gi|88184828|gb|EAQ92296.1| CHGG_00531 [Chaetomium globosum CBS 148.51]
  misc_feature (53)..(352): SWISSPROT Homolog: EC 2.7.12.2 Mitogen-activated protein kinase kinase
MSDGNFAPRSMKRRNVKGLALAAPKPPPTASSSSNGSGWGAGGSRADDGGNEAQLEIGIEFNLDIRPEDLDIVKELGSGNGGTVSKVKHQPTGTTMARKVIHVEANKELRKRIVRELEIMHGCQSDYIVTFYGAFLNDHNDVIMCMEYMDVGSLDRVSRVFGPIRVDVLGKIAEATLGGLTYLYSKFHIMHRDIKPSNILTNSKGHIKLCDFGVSGELVNSIADTFVGTSTYMAPERIQGEKYTVKSDVWSFGLTIMELAIGKFPFAASEQLSDGDGAPAGILDLLQQIVHEPAPRLPKSDAFPSILEDMIQKCLYKDPSERPTPQQLFDHDNFVQAAKRTPVDLRAWAVGLMEKDNRKSHLAPQLSPATQELLRSKDSPNQAGDNNPAFTPTSGEIPIAGALVSPRDHYGHAPSRSPTRNGIGSMGRPGGSSVHPGLGQRSATSGSIPKVGTPDPSLPASAGAATFTLPVRPAPPGGPLPPPPPRKETPDEMRRQAAYAPSSNGNYGAMGYPRK

SEQ ID NO: 18758 - DNA, 2979 bp, Muscodor strobelii
  misc_feature: SGI EST ID NO. CUFF.44287.1
  misc_feature: Variant of the nucleotide sequence at SEQ ID NO 18756
ctttgcctgggtactggtctgcagcagtctgcagcagctttgttcctcgggtctcactctttcctgagtttgtcttatcatacaaatccaactctctgttcacctttatcttcctgtcatcgtcgctcgcttggccgttggtacctgaggcggcccaaaaaaacagaaaccttgaatcccaggccaagggaccagacccagacccaggcccgcagtgtcccaccaccgcacctcccattccatcccaccaacgttacacgtcgtacctgcccttgcactcacagcggaggaggtacctgaacgcatccccaatcccaacctatcgtcgccgtatctggttgcgcttgccccccaattcgcagctgttgcggcccatgcagagagacacagacactctgttgcgcatcttgttctctgtcactcgcttctgcagcaaacacccacgccttctttgaccctatcctgcctatcttctccaaagcggccccttcttgaaaccgtcccgtcagcgttgcggtccgagtccgcattcaagtcctgtatcctacgtatatatcgcgcccgtcgtcgtcatcccaggtcgtcgctgctgccgcactctcccctcagcatcccgcctctgcccttgcactcgcagtcagtgaggggctcccccgagcaggtcaggccacaccactcagcaccccacgcttttctcggtgggagatgctttgagtctgtatttctagtcccaatacccagccacgcccgatccgactcctccccgattccactgcgctctgtcgctccgtcttccttcatccgacgctaccctgaacttctccgcccaacatgtccgacggcaactttgccccgcgctccatgaagcgccggaatgtcaagggtctcgctctggccgcacccaaacctcctccgaccgccagcagctcaagtaatggctcgggctggggagctggtggctccagggcagacgatggcggcaacgaggcacagctggagatcggcatcgagttcaacctcgacatccgccctgaagatttggatattgtgaaggagttgggttctggcaacggaggaactgtcagtaaggtgaagcatcagcctaccggaaccaccatggcacgaaaggtaacgaagcattgcaagcattgcaccgtgacatccttactcccttgactatctgtgtctgaccccatcctaggttatccacgtcgaggcgaataaagagttgcgaaagcgcatcgtccgcgagctcgagatcatgcacggttgccagtccgattatattgtcaccttctacggcgccttcctgaacgaccacaacgatgtcataatgtgcatggagtacatggatgttggttctcttgaccgagtgtcccgtgtttttggacctatccgcgtcgatgtactcggcaagatagcagaagccacgcttggaggcttgacctacctgtactctaaattccacatcatgcaccgagacattaaaccctccaacatcctcaccaactccaagggccatatcaagctctgtgactttggtgtttcgggcgagcttgtgaactcgatcgccgacacgttcgtcggcacatcgacctacatggcgcctgagcgaattcagggcgagaagtacacggttaaatcagatgtgtggagtttcggcctcacaatcatggagctggctataggaaagttcccattcgccgcaagcgaacagctctctgatggtgacggtgcccccgctggtatccttgacctgctacaacaaattgtccacgagccggcgccgaggctccctaagagtgatgccttcccgtctatcctcgaggacatgatccagaagtgtctttacaaggaccctagcgaacgaccgacccctcagcagctctttgaccatgataatttcgtgcaggcagcaaagcgaacccccgtcgatctccgggcttgggctgtcggtcttatggagaaggacaaccgcaagtcgcatctggcaccacagctgtctcccgctactcaagaactcttgagatccaaagattcgccaaaccaagctggcgacaacaacccggcattcacaccgacgtcaggagagatacctattgccggtgccttggtctcaccccgagaccactacggtcacgcaccgagccgttcgcccactagaaacgggattggcagtatggggcgacctggcggatccagcgtgcatccaggcttgggccagagatctgctacttctggctcgatacccaaagtcgggactcccgacccatcacttcccgctagcgcaggcgctgctactttcaccttgcctgtgcgaccggcaccaccaggcggtcctttgcctccccctcccccacgcaaggagacgcccgatgagatgcgacgacaggcggcatacgcgccgtcatctaatggcaactacggggcaatgggctatccacgcaaatagaacttattggactcattccgcaccgatagatttagttggccggacgctctcgctaagccgcgccagttgttgcattcttaccagaagcaccgaagactccgctcgaacgactcaaaggctagcaagtctagcaaggagtcaaaatccagccaaaagtaacagcacttcattccggaactaactacgccacatcccacgctgaaagtgccgcatcatcagagctacagcagacggcctctgccctcgatttgggcgacttaatcttgcttattttgccgcacaaaagacatcaaatatcaggaagataccgcccattgctctgcatatactcgccgatagatgagtgaggaatttccaaaagataggtagaactcgatgttcctaccatgtacctataagcttaccgacttgctaagaacaatggacaagcatacacccgcatgatgatagaacggccagcatatgagtgaatgcaggattgaaaacagatagtgaaatcaaatataggcacatgacctgactgccaa

SEQ ID NO: 18759 - DNA, 4206 bp, Muscodor strobelii
  misc_feature: SGI cDNA ID NO. 566295
  misc_feature: Encodes the peptide sequence at SEQ ID NO 18760
atgagtacctcgatgagagatctggtcgacggggaggccgagctcgacgacgaagaggatgacgagtcttttgatgaagagaacggcgagccccgcgagaggaaccgagatcgcgacgaggacatgaacgactccagcgaggaagacgacgacgatgatgacgaagaggaggctagaaagatccgcgaaggattcatcgtcgacgaggacgaagatgaagacgaagaaatcgatgacgaggaagcccgcaggagaagaaagcgcaagcgtaggcaggagcgcaaagaggaggaagagcttgacgaggaagatctcgacctcatcggcgagtctatccccgagtggcagcgcaaacagcccacccagagcaagttcaagcgactcaagcgtggccaccgcgacgaagaggcccgcggcaccgagcatcgtggccttgagcagatgttctccgacgacgacgatgaggccacgaatgaaaggccatatggcgcacgctccagccaccgtaacgctgccgatgagatggacggcttcatcgaaaacgactactccgaagacgaagacgaactccaacgccagagagaagacgaggaggtcgcacggccccgagacaagggtgttggcagtattatcgaccgaaccggacttgatcgcgatgcgctggaggacatggatgccattttcggcaacggtgaggaatacgactgggctctagccgatgaagaggaggaggagcgtcgtcagcaagaagaacaggctctcgagctaaaggatgtcttcgaaccctctcagctcaaggagaagctcttgacagacgaagacaacgacatccgcacggtcgatgagcctgagcgcttccaactagatcgcaagcccttcaagcatcttctgctcaccaccgatcagttcaaggaagagacgcattgggttgcgggcctgatgtggccgaagaagcagctccccggcgacctgcaatccccgtttcacaaggcacaccgcaaggactatttgattcatgcgcgtaagatccggaatccagaccaccacgatgatcctgaagcacctgaatacattgtcaatgccgagaagctgctcacgcaagatgatctctggcgtatcctggaactcgatatcaagttccgttcgctcatcgacaaaaggaacgccctcgagaagacgtatgacaacctgaaactaggcagagacgtcgaggacgagatgattccgaagttgattacacaagccgagaatatggaagagctccaggatattcaggattatatcaacttccagtacacggcagagctgaaggatattgctgccatgaacggaaacatcaaggcaacaaaacgacccggcaccaaagcatccatcttcgacagagtcaagaaatcgagggcttacagattcgtgaaagcttatggcatatctcccgatagacttgcactgaatgcgctacgcgaaggcaagaaagtcattgcagacgatgagcagagcttgcccgtggatctcgctgatggccttaccgatgagagcttcctcactagtgaacaggtcatacaaaatgcgagacaagcctacgccgaagaattattcatgagcccaagaatgcgcaagtatgtccgcgttcagttctacaatatgggcctcattagctgcaagagaacggataagggtctccgcaaaattgacgagggtcatccatactacgatatcaagtatttaatcaaccaggagctcccagatttggctcgtcggcctgagctgtttttgaagatgatgaaggccgaggaagaaggacttgtgcaagtcaacctgcacttacaaaatcaagacgaatttttccgtcgtctacacaatgaatttgcgtcagataactacagcgagcttgctgatgcctggaatgacgagcgcatgcaggtactcaagattgccttccccaagctatcgaaggtagtcatcaagggtgtcaaagatcaactgcgcacagcttgtcaagaagagcttctgaaacaatgtcgcgaagaatatctgaagcgacttgatcaggctcctctgaaacccaagggaatgattttgggtaccacgcctcgtgtccttgccttgtctaacggcatgggtgacccaaatcgcgatcccatattctgggcctgggtagacgatgatgggcgagtccttgataacggtaaattcgaaaatctggtccgtaatgagagccagcgtgacgcattcgccgatctggtagagctcaggaagcccgacgttattgccatctcgggtttctcaaccgaaagcaataaattggtacgggacttggaagcacttgtcgtggaaaagggcttgaaggggcccgaattcgccgaccccaaaaccgacgagtatatcaccgaggctctcgacgtcatcattgtgaacgatgaagtcgctcgcctctataaggacagcccacgagctcttgcggagcacccgaatttgcactccgttacaaggtactgtgtagcgcttgcaaaatatctgcagaacccgatgaaagagtacgccgcactcggaaaagatgctgctactcttttgttcaatccttgccagcaccttctaccacaagacaaactttggaaggtcctagaaacagcgatggtcgacatggtgaacctctgcggtgttgatatcaacgaagctgtcggcgatgcctacaccgcaaaccttctcccgtatgttgcgggcttaggtctacgaaaggctgctgccgtgataaagacaatcaacactaatggtggagttgttaatacacgagaagaactcgtcggtgatccggataataagaagcttccggttgtgggacctcgagtttggaacaactgcgccagtttcctactcatagagtacgatgctaccaactcgagctcagagcctctagacaacactcgtgtccatcccgaagactacgaactcgggcgtaaaatggcagctgatgctctggagcttgacgaagaagatgtgaaggctgaaaccgacgagaacggacctggtgccattgttcgcaagctctttagggaagacgaacaagaaaaggtcaacgagttgattctcgaagaatatgcggaacagctggagaagaacttcaatcaacggaagcgggccacgctggaaaccatcagggcagaattgcaagtcccgtacgaggaactccggcggccgatcgcgccgctcacagcggaccagatattcgtcatgtttacaggtgaaaccaaagaatcgcttgctgaaggcatgaacattgccgtcaatcttcgtgttgtcaaggaagatttcgccattgcgaaattggattgcggcatcgagggacgcatcgagactcacgatgttacaattcctcgtaatgcttctatgcgggatgtcctccacgccggtcagacagtccaagcgaagctgcttgacctcaaccggaaagatttcaatgcgaaactttcggtccgcgaagacgtagttcgaagaccctacagacgtcccaatgaccacgcatatggtaggacttgggataccgtccaggaagacaaggaccgggacgagctgcaagaaaaagacaaagttaccggacgaactcagagagtcataaagcacccactattccgcccattcaacggcactcaggcgcaggagtatttgggctctcaagcttctggcgatgtgatcattcgcccatcaccaaagggtaacgatcatctgaccgttacttggaaagtcgcggacagcgtcttccaacacatcgacgtccttgagttggataaagagactgaactcacggtcggtcgacaattgcgaatcggtggcaagtatcagtattccgatcttgatgagttgatcgtggaccatgtcaaagcgatggcaaagaaggtcgacgaattgatgggccatgagaagttccagaagggaagcatgcaggaacttgaaaaatggctcacgacgtacaccgatgccaacccacaccgctcgatgtacaaattctgcatcgatcccaaacatccaggctacttctgcctgtgcttcaaggccagccgttcatcgccgatcaacatgtggcgcgtcaaggttgtgccgcatgctttcgagatgatgaacaaccagtaccccgatatgcgtgcgctgtgcaatggctttaagttgaggttccagagtgagctggcgaagcagcagcagggcaggagatag

SEQ ID NO: 18760 - protein, 1401 aa, Muscodor strobelii
  misc_feature: SGI Peptide ID NO. 566295
  misc_feature (1209)..(1290): Pfam Id: PF00017 Pfam Desc: SH2 domain
  misc_feature (1213)..(1290): Pfam Id: PF00017 Pfam Desc: SH2 domain
  misc_feature (1)..(1398): NCBI GI: 46136777 Blast Desc: FG09904.1 [Gibberella zeae PH-1] gi|116256793|sp|Q4HYQ4.1|SPT6_GIBZE RecName: Full=Transcription elongation factor SPT6; AltName: Full=Chromatin elongation factor
  misc_feature (1)..(1399): NCBI GI: 116179808 Blast Desc: CHGG_00532 [Chaetomium globosum CBS 148.51] gi|88184829|gb|EAQ92297.1| CHGG_00532 [Chaetomium globosum CBS 148.51]
  misc_feature (1)..(1401): NCBI GI: 256731701 Blast Desc: transcription elongation factor SPT6 [Nectria haematococca mpVI 77-13-4]
  misc_feature (5)..(1398): NCBI GI: 261351799 Blast Desc: transcription elongation factor SPT6 [Verticillium albo-atrum VaMs.102]
  misc_feature (1)..(1401): NCBI GI: 85091340 Blast Desc: NCU04611 [Neurospora crassa OR74A] gi|28920242|gb|EAA29618.1| NCU04611 [Neurospora crassa OR74A]
  misc_feature (1)..(1401): NCBI GI: 74629950 Blast Desc: SPT6_NEUCR RecName: Full=Transcription elongation factor spt-6; AltName: Full=Chromatin elongation factor spt-6 gi|21622504|emb|CAD37051.1| related to transcriptional regulator
  misc_feature (4)..(1396): NCBI GI: 156043573 Blast Desc: SS1G_10790 [Sclerotinia sclerotiorum 1980] gi|154695177|gb|EDN94915.1| SS1G_10790 [Sclerotinia sclerotiorum 1980]
  misc_feature (4)..(1396): NCBI GI: 154316781 Blast Desc: BC1G_03808 [Botryotinia fuckeliana B05.10] gi|150845420|gb|EDN20613.1| BC1G_03808 [Botryotinia fuckeliana B05.10]
  misc_feature (108)..(1395): NCBI GI: 171691805 Blast Desc: protein product [Podospora anserina] gi|170945851|emb|CAP72652.1| protein product [Podospora anserina]
  misc_feature (99)..(1399): NCBI GI: 145610927 Blast Desc: MGG_11491 [Magnaporthe grisea 70-15] gi|145018262|gb|EDK02541.1| MGG_11491 [Magnaporthe grisea 70-15]
MSTSMRDLVDGEAELDDEEDDESFDEENGEPRERNRDRDEDMNDSSEEDDDDDDEEEARKIREGFIVDEDEDEDEEIDDEEARRRRKRKRRQERKEEEELDEEDLDLIGESIPEWQRKQPTQSKFKRLKRGHRDEEARGTEHRGLEQMFSDDDDEATNERPYGARSSHRNAADEMDGFIENDYSEDEDELQRQREDEEVARPRDKGVGSIIDRTGLDRDALEDMDAIFGNGEEYDWALADEEEEERRQQEEQALELKDVFEPSQLKEKLLTDEDNDIRTVDEPERFQLDRKPFKHLLLTTDQFKEETHWVAGLMWPKKQLPGDLQSPFHKAHRKDYLIHARKIRNPDHHDDPEAPEYIVNAEKLLTQDDLWRILELDIKFRSLIDKRNALEKTYDNLKLGRDVEDEMIPKLITQAENMEELQDIQDYINFQYTAELKDIAAMNGNIKATKRPGTKASIFDRVKKSRAYRFVKAYGISPDRLALNALREGKKVIADDEQSLPVDLADGLTDESFLTSEQVIQNARQAYAEELFMSPRMRKYVRVQFYNMGLISCKRTDKGLRKIDEGHPYYDIKYLINQELPDLARRPELFLKMMKAEEEGLVQVNLHLQNQDEFFRRLHNEFASDNYSELADAWNDERMQVLKIAFPKLSKVVIKGVKDQLRTACQEELLKQCREEYLKRLDQAPLKPKGMILGTTPRVLALSNGMGDPNRDPIFWAWVDDDGRVLDNGKFENLVRNESQRDAFADLVELRKPDVIAISGFSTESNKLVRDLEALVVEKGLKGPEFADPKTDEYITEALDVIIVNDEVARLYKDSPRALAEHPNLHSVTRYCVALAKYLQNPMKEYAALGKDAATLLFNPCQHLLPQDKLWKVLETAMVDMVNLCGVDINEAVGDAYTANLLPYVAGLGLRKAAAVIKTINTNGGVVNTREELVGDPDNKKLPVVGPRVWNNCASFLLIEYDATNSSSEPLDNTRVHPEDYELGRKMAADALELDEEDVKAETDENGPGAIVRKLFREDEQEKVNELILEEYAEQLEKNFNQRKRATLETIRAELQVPYEELRRPIAPLTADQIFVMFTGETKESLAEGMNIAVNLRVVKEDFAIAKLDCGIEGRIETHDVTIPRNASMRDVLHAGQTVQAKLLDLNRKDFNAKLSVREDVVRRPYRRPNDHAYGRTWDTVQEDKDRDELQEKDKVTGRTQRVIKHPLFRPFNGTQAQEYLGSQASGDVIIRPSPKGNDHLTVTWKVADSVFQHIDVLELDKETELTVGRQLRIGGKYQYSDLDELIVDHVKAMAKKVDELMGHEKFQKGSMQELEKWLTTYTDANPHRSMYKFCIDPKHPGYFCLCFKASRSSPINMWRVKVVPHAFEMMNNQYPDMRALCNGFKLRFQSELAKQQQGRR

SEQ ID NO: 18761 - DNA, 4898 bp, Muscodor strobelii
  misc_feature: SGI EST ID NO. CUFF.44071.0
  misc_feature: Variant of the nucleotide sequence at SEQ ID NO 18759
gggcaggcctggaattaattccacgaggctgaagtttgactgcagcaaacgcgatcgaggcgacttctccaagaattgctcgagaccgcaaactacctgtctcgtttcttttctaatacttctctgccatcatcgaacgtaggcagtgagtcataccgtatccccgctcagtgtttgtcaccacgtctgcctcgttggtcggggcagtctcatccaaaccatcgccgcatctccctcccgattcccctctgctgcctgcgaccatcgtccatcgtccaacttcggtcgcgtccgcaaactccacagtccatctggccagcgctctagaatcttttcctttcgccgtctgcgctgcccaggatgagtacctcgatgagagatctggtcgacggggaggccgagctcgacgacgaagaggatgacgagtcttttgatgaagagaacggcgagccccgcgagaggaaccgagatcgcgacgaggacatgaacgactccagcgaggaagacgacgacgatgatgacgaagaggaggctagaaagatccgcgaaggattcatcgtcgacgaggacgaagatgaagacgaagaaatcgatgacgaggaagcccgcaggagaagaaagcgcaagcgtaggcaggagcgcaaagaggaggaagagcttgacgaggaagatctcgacctcatcggcgagtctatccccgagtggcagcgcaaacagcccacccagagcaagttcaagcgactcaagcgtggccaccgcgacgaagaggcccgcggcaccgagcatcgtggccttgagcagatgttctccgacgacgacgatgaggccacgaatgaaaggccatatggcgcacgctccagccaccgtaacgctgccgatgagatggacggcttcatcgaaaacgactactccgaagacgaagacgaactccaacgccagagagaagacgaggaggtcgcacggccccgagacaagggtgttggcagtattatcgaccgaaccggacttgatcgcgatgcgctggaggacatggatgccattttcggcaacggtgaggaatacgactgggctctagccgatgaagaggaggaggagcgtcgtcagcaagaagaacaggctctcgagctaaaggatgtcttcgaaccctctcagctcaaggagaagctcttgacagacgaagacaacgacatccgcacggtcgatgagcctgagcgcttccaactagatcgcaagcccttcaagcatcttctgctcaccaccgatcagttcaaggaagagacgcattgggttgcgggcctgatgtggccgaagaagcagctccccggcgacctgcaatccccgtttcacaaggcagtcggcgaaagtgctcgagtatttctgctttgaaggattggaggttccatacgtcttccagcaccgcaaggactatttgattcatgcgcgtaagatccggaatccagaccaccacgatgatcctgaagcacctgaatacattgtcaatgccgagaagctgctcacgcaagatgatctctggcgtatcctggaactcgatatcaagttccgttcgctcatcgacaaaaggaacgccctcgagaagacgtatgacaacctgaaactaggcagagacgtcgaggacgagatgattccgaagttgattacacaagccgagaatatggaagagctccaggatattcaggattatatcaacttccagtacacggcagagctgaaggatattgctgccatgaacggaaacatcaaggcaacaaaacgacccggcaccaaagcatccatcttcgacagagtcaagaaatcgagggcttacagattcgtgaaagcttatggcatatctcccgatagacttgcactgaatgcgctacgcgaaggcaagaaagtcattgcagacgatgagcagagcttgcccgtggatctcgctgatggccttaccgatgagagcttcctcactagtgaacaggtcatacaaaatgcgagacaagcctacgccgaagaattattcatgagcccaagaatgcgcaagtatgtccgcgttcagttctacaatatgggcctcattagctgcaagagaacggataagggtctccgcaaaattgacgagggtcatccatactacgatatcaagtatttaatcaaccaggagctcccagatttggctcgtcggcctgagctgtttttgaagatgatgaaggccgaggaagaaggacttgtgcaagtcaacctgcacttacaaaatcaagacgaatttttccgtcgtctacacaatgaatttgcgtcagataactacagcgagcttgctgatgcctggaatgacgagcgcatgcaggtactcaagattgccttccccaagctatcgaaggtagtcatcaagggtgtcaaagatcaactgcgcacagcttgtcaagaagagcttctgaaacaatgtcgcgaagaatatctgaagcgacttgatcaggctcctctgaaacccaagggaatgattttgggtaccacgcctcgtgtccttgccttgtctaacggcatgggtgacccaaatcgcgatcccatattctgggcctgggtagacgatgatgggcgagtccttgataacggtaaattcgaaaatctggtccgtaatgagagccagcgtgacgcattcgccgatctggtagagctcaggaagcccgacgttattgccatctcgggtttctcaaccgaaagcaataaattggtacgggacttggaagcacttgtcgtggaaaagggcttgaaggggcccgaattcgccgaccccaaaaccgacgagtatatcaccgaggctctcgacgtcatcattgtgaacgatgaagtcgctcgcctctataaggacagcccacgagctcttgcggagcacccgaatttgcactccgttacaaggtactgtgtagcgcttgcaaaatatctgcagaacccgatgaaagagtacgccgcactcggaaaagatgctgctactcttttgttcaatccttgccagcaccttctaccacaagacaaactttggaaggtcctagaaacagcgatggtcgacatggtgaacctctgcggtgttgatatcaacgaagctgtcggcgatgcctacaccgcaaaccttctcccgtatgttgcgggcttaggtctacgaaaggctgctgccgtgataaagacaatcaacactaatggtggagttgttaatacacgagaagaactcgtcggtgatccggataataagaagcttccggttgtgggacctcgagtttggaacaactgcgccagtttcctactcatagagtacgatgctaccaactcgagctcagagcctctagacaacactcgtgtccatcccgaagactacgaactcgggcgtaaaatggcagctgatgctctggagcttgacgaagaagatgtgaaggctgaaaccgacgagaacggacctggtgccattgttcgcaagctctttagggaagacgaacaagaaaaggtcaacgagttgattctcgaagaatatgcggaacagctggagaagaacttcaatcaacggaagcgggccacgctggaaaccatcagggcagaattgcaagtcccgtacgaggaactccggcggccgatcgcgccgctcacagcggaccagatattcgtcatgtttacaggtgaaaccaaagaatcgcttgctgaaggcatgaacattgccgtcaatcttcgtgttgtcaaggaagatttcgccattgcgaaattggattgcggcatcgagggacgcatcgagactcacgatgttacaattcctcgtaatgcttctatgcgggatgtcctccacgccggtcagacagtccaagcgaagctgcttgacctcaaccggaaagatttcaatgcgaaactttcggtccgcgaagacgtagttcgaagaccctacagacgtcccaatgaccacgcatatggtaggacttgggataccgtccaggaagacaaggaccgggacgagctgcaagaaaaagacaaagttaccggacgaactcagagagtcataaagcacccactattccgcccattcaacggcactcaggcgcaggagtatttgggctctcaagcttctggcgatgtgatcattcgcccatcaccaaagggtaacgatcatctgaccgttacttggaaagtcgcggacagcgtcttccaacacatcgacgtccttgagttggataaagagactgaactcacggtcggtcgacaattgcgaatcggtggcaagtatcagtattccgatcttgatgagttgatcgtggaccatgtcaaagcgatggcaaagaaggtcgacgaattgatgggccatgagaagttccagaagggaagcatgcaggaacttgaaaaatggctcacgacgtacaccgatgccaacccacaccgctcgatgtacaaattctgcatcgatcccaaacatccaggctacttctgcctgtgcttcaaggccagccgttcatcgccgatcaacatgtggcgcgtcaaggttgtgccgcatgctttcgagatgatgaacaaccagtaccccgatatgcgtgcgctgtgcaatggctttaagttgaggttccagagtgagctggcgaagcagcagcagggcaggagatagagcattggtattatcggcttcggtaacagattgggctggtgtctagggtccgcgaactgtgctgcgctgggggtttgagggagagagcaagaagaaaaaatatgtatgatattattatgcaaaaaataggtctctggctatcgtcgattgctagttgatgtggcatatggactaagctctctttcctcggctgcatagatagataccgaaaatggtagattgggaatatcaataaatgcggtgtctctctatgatctttgttagactacgc

SEQ ID NO: 18762 - DNA, 960 bp, Muscodor strobelii
  misc_feature: SGI cDNA ID NO. 566296
  misc_feature: Elevated expression when VOC is produced
  misc_feature: Encodes the peptide sequence at SEQ ID NO 18763
atgccgcctaagcataagtccaacagtgccagtcgggcgcatgacgaggagcagaggaacacaaatgtaaacgcgacgtatgggactaataaatcatccgatcactcccaaagacccaagcaagatatccgatcccaccatcaagagcatcagagtctccctattaaaaaagaacattactcacagagtacccagaaggctttagatacattcagagcctcaagcacgctcaataccacggccttgagtccatcccagagaatagcacgatctaaaggccgagcgcagtcgactgactccggatcctcagaagcggagtcatcggacaatgatggtgattcggcttacggaggtgatgtcgagtctgatcatgaaaactttgagaatgaccagctatatcattatattcaaagctcggtcgacaatctttggctggcggctgagcgtcttgaagattcgtttcataccgtgatgaagtataaaggaccaatcctgagggccctatgcaagaagcgcggtatgaaagaagaagacatcccaaatcccggttatacaatcatcccattgtatgaagataactacgaagaaaagcctttgtacgattctgaagaagagttcggagttaacttcaacactatcacagaacgctttggtgtcattaaagcgatgccatgcatcatgattcaaattccaagcatctattgcgatatagttaacgatctgcaccgggctatgcgaccggagcctatttccaatgatgttgatgcgattgatgaatgtggaaggtgggctagtctcttctacttcccgaaaatggagttgccagagaataggaagacgtcgttgttctatccatcaaaacaacaatggaaatacgagaaactaggcgtggttcctggatataggaatcttatctgggagcagtttatccaaagtaatattagatggggaggaacataa

SEQ ID NO: 18763 - protein, 319 aa, Muscodor strobelii
  misc_feature: SGI Peptide ID NO. 566296
  misc_feature: Useful for introducing or modulating the production of volatile compounds
MPPKHKSNSASRAHDEEQRNTNVNATYGTNKSSDHSQRPKQDIRSHHQEHQSLPIKKEHYSQSTQKALDTFRASSTLNTTALSPSQRIARSKGRAQSTDSGSSEAESSDNDGDSAYGGDVESDHENFENDQLYHYIQSSVDNLWLAAERLEDSFHTVMKYKGPILRALCKKRGMKEEDIPNPGYTIIPLYEDNYEEKPLYDSEEEFGVNFNTITERFGVIKAMPCIMIQIPSIYCDIVNDLHRAMRPEPISNDVDAIDECGRWASLFYFPKMELPENRKTSLFYPSKQQWKYEKLGVVPGYRNLIWEQFIQSNIRWGGT

SEQ ID NO: 18764 - DNA, 1141 bp, Muscodor strobelii
  misc_feature: SGI EST ID NO. CUFF.44048.0
  misc_feature: Variant of the nucleotide sequence at SEQ ID NO 18762
tcattaaaacgcggtatattggcttgaaaatagagcattatataattagcagctcaaaatgccgcctaagcataagtccaacagtgccagtcgggcgcatgacgaggagcagaggaacacaaatgtaaacgcgacgtatgggactaataaatcatccgatcactcccaaagacccaagcaagatatccgatcccaccatcaagagcatcagagtctccctattaaaaaagaacattactcacagagtacccagaaggctttagatacattcagagcctcaagcacgctcaataccacggccttgagtccatcccagagaatagcacgatctaaaggccgagcgcagtcgactgactccggatcctcagaagcggagtcatcggacaatgatggtgattcggcttacggaggtgatgtcgagtctgatcatgaaaactttgagaatgaccagctatatcattatattcaaagctcggtcgacaatctttggctggcggctgagcgtcttgaagattcgtttcataccgtgatgaagtataaaggaccaatcctgagggccctatgcaagaagcgcggtatgaaagaagaagacatcccaaatcccggttatacaatcatcccattgtatgaagataactacgaagaaaagcctttgtacgattctgaagaagagttcggagttaacttcaacactatcacagaacgctttggtgtcattaaagcgatgccatgcatcatgattcaaattccaagcatctattgcgatatagttaacgatctgcaccgggctatgcgaccggagcctatttccaatgatgttgatgcgattgatgaatgtggaaggtgggctagtctcttctacttcccgaaaatggagttgccagagaataggaagacgtcgttgttctatccatcaaaacaacaatggaaatacgagaaactaggcgtggttcctggatataggaatcttatctgggagcagtttatccaaagtaatattagatggggaggaacataacgaaaatctacaccacgacgaaaccaagcattacagggctttagaggagagcagtctagacggggtccttcgttaatttgctacaaagtttatttattttcttttttgttcctaaagttgaat

SEQ ID NO: 18765 - DNA, 342 bp, Muscodor strobelii
  misc_feature: SGI cDNA ID NO. 566297
  misc_feature: Encodes the peptide sequence at SEQ ID NO 18766
atgggatccttctcacgtgccaccaccgttccctctctctacgggtcaatcttctcgataacgaaaatgccgaatatccccaccgagccaggagaagccagtctatacaacccggaattcggaagcagagcacttctcacgaaaatagtacgagtcgcaagaaacacgaacatgagaagaaacatagtaccaaggatcatcatgatgagcaaagacgcaaagaaaaaaatatcagtcatcgcgaccatcgacgagtttcccatgacaggactcgtgaatcttcacctcctacggaatctgatgatcgcggtgatccaacaacttaccggagaggaaacgtga

SEQ ID NO: 18766 - protein, 113 aa, Muscodor strobelii
  misc_feature: SGI Peptide ID NO. 566297
MGSFSRATTVPSLYGSIFSITKMPNIPTEPGEASLYNPEFGSRALLTKIVRVARNTNMRRNIVPRIIMMSKDAKKKISVIATIDEFPMTGLVNLHLLRNLMIAVIQQLTGEET

SEQ ID NO: 18767 - DNA, 174 bp, Muscodor strobelii
  misc_feature: SGI EST ID NO. CUFF.44063.0
  misc_feature: Variant of the nucleotide sequence at SEQ ID NO 18765
cagataacgaaaatgccgaatatccccaccgagccaggagaagccagtctatacaacccggaattcggaagcagagcacttctcacgaaaatagtacgagtcgcaagaaacacgaacatgagaagaaacatagtaccaaggatcatcatgatgagcaaagacgcaaagaaaaaa

SEQ ID NO: 18768 - DNA, 786 bp, Muscodor strobelii
  misc_feature: SGI cDNA ID NO. 566298
  misc_feature: Encodes the peptide sequence at SEQ ID NO 18769
atgcctggaagaaacagcgtcagagcgctattcaagccagatgccctgggtggcacacgtattgtatgtgtgcagtattgggctagtggtgaatggaaggatcttgcacaactcaccattcccgagcctgagcgatcgcaccagacagacaccggcactacacctgcgaaatcttcggatagccgtcctcaacctgcggatcctgacccatatccctcacgtcgtgctataccgttgtccccgaaacgtcgcatcgttcgtcatgctgcggcaccagagggggaaattttcgcaccggaatgttgcagagtagtccgtgattattatgatcccaatcagggggctgccccgcggcttgaaaatgacatggttgagattacgtactctacgggtgaagagagtgctagtagtgcgcctagacaacgccatcgggatggggctacgcaaggacagggcaacggttgtgatgatcgtcgccactcgacaacgagaagacataccaacagagtgaggagacaaggaactgcgaacaacgatgggagtcgccggcctactgagcggcaatccgcccctgctgagacgagaccgggatatggtcggtctggacaaagtcagcctgtgtatcagcaagcattcgactggcaagcccataattttatccttcctatcccgactactatcggcggttgccccactgatatcaaagaggatgaagacaatgctacgactattgatttcgagatatggaagttggaaccagagtatccggggccactatcaatctga

SEQ ID NO: 18769 - protein, 261 aa, Muscodor strobelii
  misc_feature: SGI Peptide ID NO. 566298
MPGRNSVRALFKPDALGGTRIVCVQYWASGEWKDLAQLTIPEPERSHQTDTGTTPAKSSDSRPQPADPDPYPSRRAIPLSPKRRIVRHAAAPEGEIFAPECCRVVRDYYDPNQGAAPRLENDMVEITYSTGEESASSAPRQRHRDGATQGQGNGCDDRRHSTTRRHTNRVRRQGTANNDGSRRPTERQSAPAETRPGYGRSGQSQPVYQQAFDWQAHNFILPIPTTIGGCPTDIKEDEDNATTIDFEIWKLEPEYPGPLSI

SEQ ID NO: 18770 - DNA, 2712 bp, Muscodor strobelii
  misc_feature: SGI cDNA ID NO. 566299
  misc_feature: Reduced expression when VOC is produced
  misc_feature: Encodes the peptide sequence at SEQ ID NO 18771
atgaacggtaatcatctgccggctgggcagcccatgcctggcggcgcagcatcagggcaaggcatgaacggaggaggtcgaggaggtcgccgcccgcagcagagcgcatacgccgggcaccaccaaggctatcaccctcaccaacaccagcagcagcatggcgggccgatgtattccagcggctacaacatgaacccctacgccgctgcatattatccctcgcatatggccgcgcagatggggaatccatatcagaatggccacatgccgcccactccctcatacaacatgcctcaatacaacccctatgctcagcaacgctcgccaccgcctgcccatccacatcccatatatcctatcgtcgtttcttccagcatgcagactccttcgcagacccagtccttcgcacgaactcctcagcaaccttctcccgctttgtccacgcccccgcgcataccgtatgcgacgacggttcttcaggctcctcccagtgccgaaccctttcctcttccacgccaaccatctccgccaacccaggctactgccactcctcctaatactgctgtacctgagaaatcgccatcgcccaaacctgagcccaagcaggtttctatatctgctgatccgacaccacacaccagaccagcttatcgtcaccctttaccttggctctcaaataaggatgagcccttccctacaaggacccccaaatctaggcggagaaggcgtgcactaaaggaaggctctggtggagtagagcttccacctaatccggtagttggagatgatggcaaagcgacctcagttgattctccatcaagcctcaagacgccaaaagccagtccggctcagcataaagctgggcaacacgaagatcaggcatcatctacatcgccttcgacaccagcatcagtcaaggccgcaccgtcttctgtgacatccaccagctcaccaaaacctaacaaacccgccgctcgtactgctgtccctgcccttcctgtagtgcctaaggctgcctcgaaagagaccataaatgctgccagcccggaagagaagaatgcacctcagtcgtctgccgctgaaaacggtgaggcagtaccctctcccgaaacgcctgtcgccgacaacaaggccgagtcgactactcccgctgttgctgggctggcgaatactccctcggcctcatcacaagccgagggccctgcagcaaatggctctggtccagcaacatctacgaagtcaaatgcaagttccctggctgaagcattccgaggttataatgctacagcgaaccacaaaatcgccttcctggagccgagaggtctgatcaacactggaaatatgtgttatatgaattccgttttgcaagttttgatgttctgccctcccttctacgacttcctggaccaggtgaacaaaaagtcgacccacagcttcaagagtgaaacacctctgattgatgctatggtcatgttcatgcgcgagtacaaggtgattgactctgctgtttccgtcgatcagctacggaggcgtttgaagagtgaagaattggaacaatatggtgaagcattcactcccgagtttgtctacgatgcaattagacagctacctcgctttgcgagcatgcagcgtggccaccaacaggatgctgaggagttcctcggatttctcttggagtcccttcacgatgaatgcgctcatgtgatgcggcatctgaatgatacccctgcgccgacggctggcaattcatctactgccacgcccaccgccacttcgtcgcctactagcactactgacgcgagtgattggcttgaggtcggtcgaaagcaacgagctgccgtcacccgttcttctggccatccgatcgataattctcctctaacaaagatctttggtggtcaactgcgatccgagttgagggtgtcaggcctcaaagactcagtcactcttgagcccttccaaccattgcaactcgacatcggttcgcctcaaattcgcaatattgttgatgctctgaagaatctgactcggcctgaaaccattcgaggagatttcagctcgccccgtgggccagacgctgtggcaaccaagcaagttctcattgaatctgtacctccggttctgatcctccacttaaaacggttccaatttgatgcgaccggaaccggcaccgtcaagatatggaagaagatcggctacccacttgagcttgaacttcccaaagagctcttttcgcgccagaagaggaatgcgctcaacgccgaaggcgcaggcttcccgaagtataggctgatggcggcggtctaccatcacggaaagaatgcaagtggtggtcactacacagtcgatctacggcgccaagatggacgtgaatggatccgtctcgatgataccgtgatcagacgcatccgaagcgaagacgtcgccgagggtggcatggaagaggatgccacaaaacccacttggacggacaagaaggagaacactgtcactcctgcatccggcaaccggtttgaaggcatcggagacgacaatgccggcgatgacgatggctggaataaagtcagcactgccgcgaacgggaccaagaagtggagtgccattgtcaatgagggcggcccaaagaatggtacaccggtaaagcccaaaccggtgaaagacaacagcaaggataacaaagtcgcctacctgctgttttacatgaagatctaa

SEQ ID NO: 18771 - protein, 903 aa, Muscodor strobelii
  misc_feature: SGI Peptide ID NO. 566299
  misc_feature (437)..(900): Pfam Id: PF00443 Pfam Desc: Ubiquitin carboxyl-terminal hydrolase
  misc_feature (1)..(903): NCBI GI: 39976155 Blast Desc: MGG_05996 [Magnaporthe grisea 70-15] gi|145011730|gb|EDJ96386.1| MGG_05996 [Magnaporthe grisea 70-15]
  misc_feature (221)..(903): NCBI GI: 171694367 Blast Desc: protein product [Podospora anserina] gi|170947132|emb|CAP73937.1| protein product [Podospora anserina]
  misc_feature (413)..(903): NCBI GI: 85098196 Blast Desc: NCU04333 [Neurospora crassa OR74A] gi|28922080|gb|EAA31344.1| [Neurospora crassa OR74A]
  misc_feature (1)..(903): NCBI GI: 154304421 Blast Desc: BC1G_09086 [Botryotinia fuckeliana B05.10] gi|150854066|gb|EDN29258.1| BC1G_09086 [Botryotinia fuckeliana B05.10]
  misc_feature (1)..(870): NCBI GI: 156055008 Blast Desc: SS1G_04855 [Sclerotinia sclerotiorum 1980] gi|154702640|gb|EDO02379.1| SS1G_04855 [Sclerotinia sclerotiorum 1980]
  misc_feature (217)..(903): NCBI GI: 256731836 Blast Desc: NECHADRAFT_41715 [Nectria haematococca mpVI 77-13-4]
  misc_feature (214)..(903): NCBI GI: 212538153 Blast Desc: ubiquitin hydrolase, [Penicillium marneffei ATCC 18224] gi|210068974|gb|EEA23065.1| ubiquitin hydrolase, [Penicillium marneffei ATCC 18224]
  misc_feature (56)..(903): NCBI GI: 116197711 Blast Desc: CHGG_07011 [Chaetomium globosum CBS 148.51] gi|88178290|gb|EAQ85758.1| CHGG_07011 [Chaetomium globosum CBS 148.51]
  misc_feature (1)..(903): NCBI GI: 46137553 Blast Desc: FG10292.1 [Gibberella zeae PH-1]
  misc_feature (214)..(903): NCBI GI: 242807459 Blast Desc: ubiquitin C-terminal hydrolase, [Talaromyces stipitatus ATCC 10500] gi|218715585|gb|EED15007.1| ubiquitin C-terminal hydrolase, [Talaromyces stipitatus ATCC 10500]
  misc_feature: Useful for introducing or modulating the production of volatile compounds
MNGNHLPAGQPMPGGAASGQGMNGGGRGGRRPQQSAYAGHHQGYHPHQHQQQHGGPMYSSGYNMNPYAAAYYPSHMAAQMGNPYQNGHMPPTPSYNMPQYNPYAQQRSPPPAHPHPIYPIVVSSSMQTPSQTQSFARTPQQPSPALSTPPRIPYATTVLQAPPSAEPFPLPRQPSPPTQATATPPNTAVPEKSPSPKPEPKQVSISADPTPHTRPAYRHPLPWLSNKDEPFPTRTPKSRRRRRALKEGSGGVELPPNPVVGDDGKATSVDSPSSLKTPKASPAQHKAGQHEDQASSTSPSTPASVKAAPSSVTSTSSPKPNKPAARTAVPALPVVPKAASKETINAASPEEKNAPQSSAAENGEAVPSPETPVADNKAESTTPAVAGLANTPSASSQAEGPAANGSGPATSTKSNASSLAEAFRGYNATANHKIAFLEPRGLINTGNMCYMNSVLQVLMFCPPFYDFLDQVNKKSTHSFKSETPLIDAMVMFMREYKVIDSAVSVDQLRRRLKSEELEQYGEAFTPEFVYDAIRQLPRFASMQRGHQQDAEEFLGFLLESLHDECAHVMRHLNDTPAPTAGNSSTATPTATSSPTSTTDASDWLEVGRKQRAAVTRSSGHPIDNSPLTKIFGGQLRSELRVSGLKDSVTLEPFQPLQLDIGSPQIRNIVDALKNLTRPETIRGDFSSPRGPDAVATKQVLIESVPPVLILHLKRFQFDATGTGTVKIWKKIGYPLELELPKELFSRQKRNALNAEGAGFPKYRLMAAVYHHGKNASGGHYTVDLRRQDGREWIRLDDTVIRRIRSEDVAEGGMEEDATKPTWTDKKENTVTPASGNRFEGIGDDNAGDDDGWNKVSTAANGTKKWSAIVNEGGPKNGTPVKPKPVKDNSKDNKVAYLLFYMKI

SEQ ID NO: 18772 - DNA, 3775 bp, Muscodor strobelii
  misc_feature: SGI EST ID NO. CUFF.44231.0
  misc_feature: Variant of the nucleotide sequence at SEQ ID NO 18770
ggagcacataaatatcatgacaagtcttggtctccggctccttgctttggtctttgtttgttagtggacaccttggtgttctaactgtaacgtaaaggtgacactgggtactacgctttagtgcacgtttcttgcagcttatcgatttccctcggtcgcggaccactatcggagcagctgcgaacattgcgcaggcgtaactgcacctgcacctgacaaaataataatcaacgacgcgcccatccgagccctcgtcgacctgcaccacctccaccacaacctcgcagatcggtgacacttgttgcgcctttctcttgcgcacacgctacctcatcggcgacgcactgcggctcactcattatccctcatctgcagtgggagaccaccgcgcccaccccctaagccggcacgatgaacggtaatcatctgccggctgggcagcccatgcctggcggcgcagcatcagggcaaggcatgaacggaggaggtcgaggaggtcgccgcccgcagcagagcgcatacgccgggcaccaccaaggctatcaccctcaccaacaccagcagcagcatggcgggccgatgtattccagcggctacaacatgaacccctacgccgctgcatattatccctcgcatatggccgcgcagatggggaatccatatcagaatggccacatgccgcccactccctcatacaacatgcctcaatacaacccctatgctcagcaacgctcgccaccgcctgcccatccacatcccatatatcctatcgtcgtttcttccagcatgcagactccttcgcagacccagtccttcgcacgaactcctcagcaaccttctcccgctttgtccacgcccccgcgcataccgtatgcgacgacggttcttcaggctcctcccagtgccgaaccctttcctcttccacgccaaccatctccgccaacccaggctactgccactcctcctaatactgctgtacctgagaaatcgccatcgcccaaacctgagcccaagcaggtttctatatctgctgatccgacaccacacaccagaccagcttatcgtcaccctttaccttggctctcaaataaggatgagcccttccctacaaggacccccaaatctaggcggagaaggcgtgcactaaaggaaggctctggtggagtagagcttccacctaatccggtagttggagatgatggcaaagcgacctcagttgattctccatcaagcctcaagacgccaaaagccagtccggctcagcataaagctgggcaacacgaagatcaggcatcatctacatcgccttcgacaccagcatcagtcaaggccgcaccgtcttctgtgacatccaccagctcaccaaaacctaacaaacccgccgctcgtactgctgtccctgcccttcctgtagtgcctaaggctgcctcgaaagagaccataaatgctgccagcccggaagagaagaatgcacctcagtcgtctgccgctgaaaacggtgaggcagtaccctctcccgaaacgcctgtcgccgacaacaaggccgagtcgactactcccgctgttgtgcctccgaaaacggctcccaagtcctggagtgctttattccagcgtgctgccccccaagcacgccctcctctgccgccaaccaggctgggctggcgaatactccctcggcctcatcacaagccgagggccctgcagcaaatggctctggtccagcaacatctacgaagtcaaatgcaagttccctggctgaagcattccgaggttataatgctacagcgaaccacaaaatcgccttcctggagccgagaggtctgatcaacactggaaatatgtgttatatgaattccgttttgcaagttttgatgttctgccctcccttctacgacttcctggaccaggtgaacaaaaagtcgacccacagcttcaagagtgaaacacctctgattgatgctatggtcatgttcatgcgcgagtacaaggtgattgactctgctgtttccgtcgatcagctacggaggcgtttgaagagtgaagaattggaacaatatggtgaagcattcactcccgagtttgtctacgatgcaattagacagctacctcgctttgcgagcatgcagcgtggccaccaacaggatgctgaggagttcctcggatttctcttggagtcccttcacgatgaatgcgctcatgtgatgcggcatctgaatgatacccctgcgccgacggctggcaattcatctactgccacgcccaccgccacttcgtcgcctactagcactactgacgcgagtgattggcttgaggtcggtcgaaagcaacgagctgccgtcacccgttcttctggccatccgatcgataattctcctctaacaaagatctttggtggtcaactgcgatccgagttgagggtgtcaggcctcaaagactcagtcactcttgagcccttccaaccattgcaactcgacatcggttcgcctcaaattcgcaatattgttgatgctctgaagaatctgactcggcctgaaaccattcgaggagatttcagctcgccccgtgggccagacgctgtggcaaccaagcaagttctcattgaatctgtacctccggttctgatcctccacttaaaacggttccaatttgatgcgaccggaaccggcaccgtcaagatatggaagaagatcggctacccacttgagcttgaacttcccaaagagctcttttcgcgccagaagaggaatgcgctcaacgccgaaggcgcaggcttcccgaagtataggctgatggcggcggtctaccatcacggaaagaatgcaagtggtggtcactacacagtcgatctacggcgccaagatggacgtgaatggatccgtctcgatgataccgtgatcagacgcatccgaagcgaagacgtcgccgagggtggcatggaagaggatgccacaaaacccacttggacggacaagaaggagaacactgtcactcctgcatccggcaaccggtttgaaggcatcggagacgacaatgccggcgatgacgatggctggaataaagtcagcactgccgcgaacgggaccaagaagtggagtgccattgtcaatgagggcggcccaaagaatggtacaccggtaaagcccaaaccggtgaaagacaacagcaaggataacaaagtcgcctacctgctgttttacatgaagatctaatcttgtccttcttgactactttcaatttttctaggggaaatttggaaggctcatagttctctcaactggaacgagccagaggtcaaaaagcacataaatcataatagtgcacagttggtccgaaaacgaacacagcttggttgttctatttcagacgtcaaaactgcagtgatgagcgccttgggcgttcgatttgagaattaagatgctgttgagaggaagggtatatgcatgagatgtcatgaccgaaaacgctgtcaaatgattgacgggtcaaagcggaagtttcatgcgagggggtgctgggaaaaaaaggaattggaatgcatgatacctcttcacatggccaggagtatgggtggacgatttattttcactcatgctttacggctttcttctctatacgccacgaatctcgaccccctttttcgtctgtccgattagatactcgtatctgaggatagctcgttgtgcattaacctcacctagagtcatggtataccctctgttgtaaagtaacaccccaaaagtctttgatgacactaatacaatacttccaatctgcc

SEQ ID NO: 18773 - DNA, 2067 bp, Muscodor strobelii
  misc_feature: SGI cDNA ID NO. 566300
  misc_feature: Encodes the peptide sequence at SEQ ID NO 18774
atggacgattggtttgccgacgtaggtagaagacttctcagcgaagctctctcagatgcttgcgaccaggtcaacggtgagttcaaagccgcttacgccaggcacaatgccgggccagctcttgagctagcagtcttgaggcgcaaagcttctagagtacaagaattggaggaagaaaacgagatattgaaagctgaaatcgtaaaattgaaagcggcaaattccaaggggtctcatcacttcaacaatggttctatgcatgcaaaagatggctctgctttacggactccccttgcgcctaaatctgtcaaccagattcctgcatcggcaccgtcctctaaatctaaacgcgtggatccagagacgttgtcgttaacagaattgaaggcagaatatttgcggatagattctagcaaagcgaagcttcagacagcgtatctcgagatgcaggctgcatttgaggaatcaaaacaagcacttcgcagacaaaaagaacttggtcgacaatggacagagacagcggctgagttgggtgaacaatccgccaagcgccagcggagaattaaaagacttgagaccaagttgactgagttatcccatgatccgctcaatatgagtttttcgtcagatgccggagatgatagaggctcgacagagttcgaagccacttcggcaaatgactcccttgacacgcggtctgatgaaacacgaacgaagaccatcggaacagagagcatgcatcagggtgctcggcgtcttaatcgggacattagaagaacgcccccactacctcccataccgcggcagcacgtgccggttgagataggaattcatatcaagtctgaaccatcttcagacgggcctgttgtcgtatcggagcgctgcgtacggaaacggaggaacgatgtcgaaggtggtgtaacacaacaaccctcgaggcggctcaaatatgaagatcgatctcaggtccaagccatcgacgagcatatccgcttttatccccacgagagcattgatttcgatagcgaagagcgcattgttcggacaccaaagaaacattcacgatttcgcgatcctaacaacccgcacgcgaacgaaataaacatctccgatgctaggagtaacattcctactgaattgcgcgatggaaacagcagaaagaatgacgaggatcaataccagaacgacattcgaagcgacaataatcatgtagcttcaagctcacgtcatggtgatcaattaccagattcagaggaacgggacgatcacattcaacgaaaaagaagaaaactttcgcaaggcatatctagacttgcggaggagaacaacgcagctgctgacgcaactcccaaacccaggaccaagaatttaggaccagccaagctagaccgtcttctaaacagatcagaagacacggaaggaggtcaagctaatagtgcacttcttcgtagactaaaatctaatgttgaacgtttgtcgaagatgcctatagaatcactcattactccgaggtctacagcagtaaagaagccagaaaagcccaaaggtccagctctacgcaagaagcccatgtcattattacggcgagacgacttcaagattaaccccgacgccaatgagggttataattacgccttcatcgacgtagtacgaaacaaggccgaacgtgcttgcttgtcaggctgtgtcaaagacaactgctgtggcgcgaaatatcgcaagctagcagaagcatcccgtgcgtctgctggcccccacgaatttcagtctcttctggaagagtatcttggagatgattgccatcgacttgccaccatgcctagcgaagaaaaagagagattgtgggtcaaagccaagacacgagaattgtcaaatgcaagcagtacgcatcgtgagagatttcctcgtcagacaacgcctcccggcttttggagatccgatttcccaagcacccaggaaggcgaagagtacaacgaggcggcgaggaagctcgaacgcgatatagttgaggagcgctatcgagaggcaatgagaccaggcgggacctggatctttcgtgacgaatag

SEQ ID NO: 18774 - protein, 688 aa, Muscodor strobelii
  misc_feature: SGI Peptide ID NO. 566300
  misc_feature (485)..(688): Pfam Id: PF08573 Pfam Desc: DNA repair protein SAE2
  misc_feature (531)..(688): Pfam Id: PF08573 Pfam Desc: DNA repair protein SAE2
  misc_feature (1)..(688): NCBI GI: 46137551 Blast Desc: FG10291.1 [Gibberella zeae PH-1]
  misc_feature (1)..(688): NCBI GI: 261352055 Blast Desc: conserved [Verticillium albo-atrum VaMs.102]
  misc_feature (1)..(688): NCBI GI: 256731835 Blast Desc: NECHADRAFT_41513 [Nectria haematococca mpVI 77-13-4]
  misc_feature (3)..(688): NCBI GI: 116197713 Blast Desc: CHGG_07012 [Chaetomium globosum CBS 148.51] gi|88178291|gb|EAQ85759.1| CHGG_07012 [Chaetomium globosum CBS 148.51]
  misc_feature (243)..(688): NCBI GI: 85088732 Blast Desc: NCU10077 [Neurospora crassa OR74A] gi|28919110|gb|EAA28629.1| [Neurospora crassa OR74A]
  misc_feature (514)..(688): NCBI GI: 156055034 Blast Desc: SS1G_04868 [Sclerotinia sclerotiorum 1980] gi|154702653|gb|EDO02392.1| SS1G_04868 [Sclerotinia sclerotiorum 1980]
  misc_feature (514)..(688): NCBI GI: 154304453 Blast Desc: BC1G_09102 [Botryotinia fuckeliana B05.10] gi|150854082|gb|EDN29274.1| BC1G_09102 [Botryotinia fuckeliana B05.10]
  misc_feature (513)..(688): NCBI GI: 171694369 Blast Desc: protein product [Podospora anserina] gi|170947133|emb|CAP73938.1| protein product [Podospora anserina]
  misc_feature (374)..(688): NCBI GI: 189195330 Blast Desc: conserved [Pyrenophora tritici-repentis Pt-1C-BFP] gi|187979882|gb|EDU46508.1| conserved [Pyrenophora tritici-repentis Pt-1C-BFP]
  misc_feature (511)..(681): NCBI GI: 115385937 Blast Desc: conserved [Aspergillus terreus NIH2624] gi|114187962|gb|EAU29662.1| conserved [Aspergillus terreus NIH2624]
MDDWFADVGRRLLSEALSDACDQVNGEFKAAYARHNAGPALELAVLRRKASRVQELEEENEILKAEIVKLKAANSKGSHHFNNGSMHAKDGSALRTPLAPKSVNQIPASAPSSKSKRVDPETLSLTELKAEYLRIDSSKAKLQTAYLEMQAAFEESKQALRRQKELGRQWTETAAELGEQSAKRQRRIKRLETKLTELSHDPLNMSFSSDAGDDRGSTEFEATSANDSLDTRSDETRTKTIGTESMHQGARRLNRDIRRTPPLPPIPRQHVPVEIGIHIKSEPSSDGPVVVSERCVRKRRNDVEGGVTQQPSRRLKYEDRSQVQAIDEHIRFYPHESIDFDSEERIVRTPKKHSRFRDPNNPHANEINISDARSNIPTELRDGNSRKNDEDQYQNDIRSDNNHVASSSRHGDQLPDSEERDDHIQRKRRKLSQGISRLAEENNAAADATPKPRTKNLGPAKLDRLLNRSEDTEGGQANSALLRRLKSNVERLSKMPIESLITPRSTAVKKPEKPKGPALRKKPMSLLRRDDFKINPDANEGYNYAFIDVVRNKAERACLSGCVKDNCCGAKYRKLAEASRASAGPHEFQSLLEEYLGDDCHRLATMPSEEKERLWVKAKTRELSNASSTHRERFPRQTTPPGFWRSDFPSTQEGEEYNEAARKLERDIVEERYREAMRPGGTWIFRDE

SEQ ID NO: 18775 - DNA, 2395 bp, Muscodor strobelii
  misc_feature: SGI EST ID NO. CUFF.44075.0
  misc_feature: Variant of the nucleotide sequence at SEQ ID NO 18773
ttttgcggctcaatggtaatggctcgataatatcttccgaactctcgacctattgataccaaatccaatctttcaaatcctccaagtctttaacgtcttttcttttggtcatcttgttattcgaaaattcggagtgtggagcatgctctggtaggaagaaagtgcacagaactttgttggttcttggtccaatggacgattggtttgccgacgtaggtagaagacttctcagcgaagctctctcagatgcttgcgaccaggtcaacggtgagttcaaagccgcttacgccaggcacaatgccgggccagctcttgagctagcagtcttgaggcgcaaagcttctagagtacaagaattggaggaagaaaacgagatattgaaagctgaaatcgtaaaattgaaagcggcaaattccaaggggtctcatcacttcaacaatggttctatgcatgcaaaagatggctctgctttacggactccccttgcgcctaaatctgtcaaccagattcctgcatcggcaccgtcctctaaatctaaacgcgtggatccagagacgttgtcgttaacagaattgaaggcagaatatttgcggatagattctagcaaagcgaagcttcagacagcgtatctcgagatgcaggctgcatttgaggaatcaaaacaagcacttcgcagacaaaaagaacttggtcgacaatggacagagacagcggctgagttgggtgaacaatccgccaagcgccagcggagaattaaaagacttgagaccaagttgactgagttatcccatgatccgctcaatatgagtttttcgtcagatgccggagatgatagaggctcgacagagttcgaagccacttcggcaaatgactcccttgacacgcggtctgatgaaacacgaacgaagaccatcggaacagagagcatgcatcagggtgctcggcgtcttaatcgggacattagaagaacgcccccactacctcccataccgcggcagcacgtgccggttgagataggaattcatatcaagtctgaaccatcttcagacgggcctgttgtcgtatcggagcgctgcgtacggaaacggaggaacgatgtcgaaggtggtgtaacacaacaaccctcgaggcggctcaaatatgaagatcgatctcaggtccaagccatcgacgagcatatccgcttttatccccacgagagcattgatttcgatagcgaagagcgcattgttcggacaccaaagaaacattcacgatttcgcgatcctaacaacccgcacgcgaacgaaataaacatctccgatgctaggagtaacattcctactgaattgcgcgatggaaacagcagaaagaatgacgaggatcaataccagaacgacattcgaagcgacaataatcatgtagcttcaagctcacgtcatggtgatcaattaccagattcagaggaacgggacgatcacattcaacgaaaaagaagaaaactttcgcaaggcatatctagacttgcggaggagaacaacgcagctgctgacgcaactcccaaacccaggaccaagaatttaggaccagccaagctagaccgtcttctaaacagatcagaagacacggaaggaggtcaagctaatagtgcacttcttcgtagactaaaatctaatgttgaacgtttgtcgaagatgcctatagaatcactcattactccgaggtctacagcagtaaagaagccagaaaagcccaaaggtccagctctacgcaagaagcccatgtcattattacggcgagacgacttcaagattaaccccgacgccaatgagggttataattacgccttcatcgacgtagtacgaaacaaggccgaacgtgcttgcttgtcaggctgtgtcaaagacaactgctgtggcgcgaaatatcgcaagctagcagaagcatcccgtgcgtctgctggcccccacgaatttcagtctcttctggaagagtatcttggagatgattgccatcgacttgccaccatgcctagcgaagaaaaagagagattgtgggtcaaagccaagacacgagaattgtcaaatgcaagcagtacgcatcgtgagagatttcctcgtcagacaacgcctcccggcttttggagatccgatttcccaagcacccaggaaggcgaagagtacaacgaggcggcgaggaagctcgaacgcgatatagttgaggagcgctatcgagaggcaatgagaccaggcgggacctggatctttcgtgacgaatagctgtgctggtccaaacttgtgcggcagtatgttttctgtagacttctgtaggagacagctgagacgaattcaagattataagacctgtcatagacaagcagtaaatgattattatgcaataaaactcatgacgtttg

SEQ ID NO: 18776 - DNA, 582 bp, Muscodor strobelii
  misc_feature: SGI cDNA ID NO. 566301
  misc_feature: Reduced expression when VOC is produced
  misc_feature: Encodes the peptide sequence at SEQ ID NO 18777
atgtccggcatggatttcgccggtggcaacgcacgtcagtgcttcacttgtggacagaccactcatcaagcccgtgactgccccaaccgtggtgccgctaagtgctacaactgtggcaatgaaggccacatgagccgtgactgtcctgagggtcctaaggataccaaaacatgctatcgctgtggtcaggccggtcacatctctcgcgagtgccctcagggtggcggtcccatgggcggttcaggaggtggcggtggctcccaggagtgctacaagtgtggcaagatgggtcacatcgctcgcaactgccctgatgcttatggcagtggaggttcgtacggcggctactctggcggcggcggttactccggtggtggcggccagggcaagacttgctactcttgcggtggctatggacacatgtctcgcgaatgtgtcaacggatccaagtgctacaactgtggcgagaacggtcacttctctcgtgactgccccaaggagtcatccggtggagagaagatctgctacaagtgccagcaggctggccatatccagtcccagtgccctaacgtcggcaactaa

SEQ ID NO: 18777 - protein, 193 aa, Muscodor strobelii
  misc_feature: SGI Peptide ID NO. 566301
  misc_feature (33)..(50): Pfam Id: PF00098 Pfam Desc: Zinc knuckle
  misc_feature (149)..(166): Pfam Id: PF00098 Pfam Desc: Zinc knuckle
  misc_feature (56)..(73): Pfam Id: PF00098 Pfam Desc: Zinc knuckle
  misc_feature (88)..(105): Pfam Id: PF00098 Pfam Desc: Zinc knuckle
  misc_feature (173)..(190): Pfam Id: PF00098 Pfam Desc: Zinc knuckle
  misc_feature (12)..(29): Pfam Id: PF00098 Pfam Desc: Zinc knuckle
  misc_feature (130)..(147): Pfam Id: PF00098 Pfam Desc: Zinc knuckle
  misc_feature (11)..(191): NCBI GI: 85098402 Blast Desc: NCU08923 [Neurospora crassa OR74A] gi|28922111|gb|EAA31369.1| conserved [Neurospora crassa OR74A]
  misc_feature (4)..(191): NCBI GI: 261352054 Blast Desc: cellular nucleic acid-binding protein [Verticillium albo-atrum VaMs.102]
  misc_feature (21)..(190): NCBI GI: 116197715 Blast Desc: CHGG_07013 [Chaetomium globosum CBS 148.51] gi|88178292|gb|EAQ85760.1| CHGG_07013 [Chaetomium globosum CBS 148.51]
  misc_feature (4)..(190): NCBI GI: 145603572 Blast Desc: MGG_05948 [Magnaporthe grisea 70-15] gi|145011784|gb|EDJ96440.1| MGG_05948 [Magnaporthe grisea 70-15]
  misc_feature (14)..(189): NCBI GI: 46137541 Blast Desc: FG10286.1 [Gibberella zeae PH-1]
  misc_feature (4)..(190): NCBI GI: 259484556 Blast Desc: TPA: zinc knuckle domain protein (Byr3), (AFU_orthologue; AFUA_1G07630) [Aspergillus nidulans FGSC A4]
  misc_feature (4)..(190): NCBI GI: 121702271 Blast Desc: zinc knuckle domain protein [Aspergillus clavatus NRRL 1] gi|119397543|gb|EAW07974.1| zinc knuckle domain protein [Aspergillus clavatus NRRL 1]
  misc_feature (4)..(190): NCBI GI: 261192892 Blast Desc: zinc knuckle domain-containing protein [Ajellomyces dermatitidis SLH14081] gi|239588987|gb|EEQ71630.1| zinc knuckle domain-containing protein [Ajellomyces dermatitidis SLH14081]
  misc_feature (4)..(190): NCBI GI: 67537882 Blast Desc: AN5111.2 [Aspergillus nidulans FGSC A4] gi|40743102|gb|EAA62292.1| AN5111.2 [Aspergillus nidulans FGSC A4]
  misc_feature (4)..(190): NCBI GI: 255931619 Blast Desc: Pc12g05190 [Penicillium chrysogenum Wisconsin 54-1255] gi|211581985|emb|CAP80146.1| Pc12g05190 [Penicillium chrysogenum Wisconsin 54-1255]
  misc_feature: Useful for introducing or modulating the production of volatile compounds
MSGMDFAGGNARQCFTCGQTTHQARDCPNRGAAKCYNCGNEGHMSRDCPEGPKDTKTCYRCGQAGHISRECPQGGGPMGGSGGGGGSQECYKCGKMGHIARNCPDAYGSGGSYGGYSGGGGYSGGGGQGKTCYSCGGYGHMSRECVNGSKCYNCGENGHFSRDCPKESSGGEKICYKCQQAGHIQSQCPNVGN

SEQ ID NO: 18778 - DNA, 4905 bp, Muscodor strobelii
  misc_feature: SGI EST ID NO. CUFF.44406.0
  misc_feature: Variant of the nucleotide sequence at SEQ ID NO 18776
tggcgatcagctatcttgtccacatcacggagaaaaaaatccatcgaacctctctctacatcatcaccatcttcgattgtagtctcgaagttctctcactcactaccgcaccctccgctcttgatccatcgcaatcgatcgaaatcttcactaaggcaaactattcccgactttcaacgacaccgatacagtcgacatcactatgtccggcatggatttcgccggtggcaacgcacgtcagtgcttcacttgtggacagaccactcatcaagcccgtgactgccccaaccgtggtgccgctaagtgctacaactgtggcaatgaaggccacatgagccgtgactgtcctgagggtcctaaggataccaaaacatgctatcgctgtggtcaggccggtcacatctctcgcgagtgccctcagggtggcggtcccatgggcggttcaggaggtggcggtggctcccaggagtgctacaagtgtggcaagatgggtcacatcgctcgcaactgccctgatgcttatggcagtggaggttcgtacggcggctactctggcggcggcggttactccggtggtggcggccagggcaagacttgctactcttgcggtggctatggacacatgtctcgcgaatgtgtcaacggatccaagtgctacaactgtggcgagaacggtcacttctctcgtgactgccccaaggagtcatccggtggagagaagatctgctacaagtgccagcaggctggccatatccagtcccagtgccctaacgtcggcaactaagatgtatgactctttggacgattcaaaggggttgtcacatccggtcgaatgctcatgagtatttgaaaagagatggttgacttgatcttgaaatcggttcagatacccgggattttcttccttctgattcatctggcatcgagtgcggctcaagaggggcaaaaatggattcatatcacaaaagtggtcatttcgggagtaaggtcgttgcgtttttctcggacacgatggtttcatgagatgcaaaaaacacagaatggtgctggatttaacctttcacaaacgaacgtcgatgactagtagtttaggttacaccatttgataggtctacggacacatgatcaatgcgaaaatacgatcaatacaacaggagctcgttttgagaccatatccgcgcgtgtctaagcctgtgatgtgatcccgtcgaagtgcgttcctctaaaatgtggtcattgtaagtaactctatcaatcctgaaatagattatggaagaggttacgatgtgtcggtagtaatcttagcttatggtgtctccttacaaatcgaatgagcgatgactggaagtagattggtgttaacccccagcatgtcacataacaaaactgacgagagcgggatgtttttgagagaagactgtaggtatgttttctcactgcattgggtattattgacacaaaacatgatggtctttgcgatgcacagtggtaatgtgtgtctaatttgtgtcgtcggagattgttctgtgttcttctgatgccaacgcctgtgtataacactctagcgtccataaatttatcgtgccatgcctaacaccgtacccaacgccgtatccaacgccatcaatgctgtgttcacgttctgaattctccgactctcacattctcttacattctagcgatatcaaagcaaaacacggctggtattccgtatatcctacccgtgatacgcaatccttcgtaataccaacccaggatcttatctggtaggtatttcaagaaaaccgaccattattaggagttctcgtcccctgggaagtgtcgttatccttcatcttgtacatcttcgctctcacctcgcgattacataggagttgcgagcagaggaagtgcgacacgtcttcgtcttgccagtagctcatatgtgaggctattgtgtttatcgggttgaagtctagtgcgctcctgttttgaatcgttagtatcatgtatttgtatatcgagggagtagaaagggtagaatagaagagaggagagcaaggaaggggttgggatgggagaaagtccgaaatgcgtgggattgagaagaggatgggattggatgggtagaacggaagaggaaaaagaatatgtcatgtgcgaaaaggtaataaagagatccaactcactcctgaatactataatccaccctcccattccagttcagcgcacgaaccttcaactcctccctcctaagtttctgggccttaagttcctccgcagcccacttctcacccaattcctgaccctcgttctcattatctttatgctgctccacacgtttcttctgaaacttcgcgtacaacgtctcaaggtcatcatcaataagcgtcgagtcattagacgcttgtgtagggtcaccagaatcagtgctttgtctcgcaagcgctcttttcctcgcgtctgtcttctctgattgtgcggcggcatcggagaccacgtttgtgccggatttgacggcggggtctggcgtttgttcgggaaggagaggtgcatttgacgcgtttagtttcgccatgtcttcgttcgttatgcccagactgcggttaagcagggagctagcgattccggcgctgaaacttgaccagagaccactgacactctggccaactttgacgcctattcctgagagaccttggggtgctactgcgccgaatatccctttcttggtgtatggcagggcctggggctttaatgatgacatagctggggatatgagaggctcgatacggtaggcgataggatctgaggggtggaaaacattgaataactgtgctactttgggtgatgacatggagaatggtaggcctgtcacaggagatacgtgctgggttgggtcgacggttgctgacatgaacggatcatcgccatatcgagtgctcagggggctttctgctggcccggcgttgggctggtgtcgggcggcgattgtgcgtcctttgagcatttgaaatagcccgacgggcgaaccgaggcaatagaagtcttctacgtcgaattcaaatgacattccatgtgtatttcgacgccggtcggcgcgctctgaagcaggtaggaagcgaagagggtcaaagaggggtctggagttcttcagagattctttctgtcgacacaggatgtcgaacatgatggccgatcctagggaatgacctatgatgtggacctttcctttaaaattgggattacgctcgaggaagagcttatataccctatttgactcttgaaggacaatctccgtaatttgttttctatagtcgctctggtataacaaaacatcgagggcaagatcgctgatcaaggatctggcaaaagccattccttcaaccgtgatgtcttcaagagaaggatctggtgcgaagttaatttcgtgaagaatataaatggtttgatactctcattgcttacattcgttttcatcttcttgcgcctcacttaaatcggtctcgcccttcctttcttgtcttttggggaaatcgaggagatgcctccagcacacaggaagtacttggattctagagttgccgggccctttgccagtctctgcatttagtgctttcaaatcttccgagtgggcatagactgctttgaaggtcttcctgaggttgtttacgtcgtggacaaagttgacgctctccatcctgccgtgtacgaaatgttagacaaatggaattggtgtgcgcgaaagttgaaacaaaaagctcacctgaggctcaggagctgaccgatcccgtgagtgactaatactaggtgttcgatttctcgtccttgtgtttctccgtctagacctgtgtaatcatcctggatctcttgctcttcgcgctgtctgatctgctcctcttgtttgtcgggatcatcagcactctccatatacgacgagaactcgcgcttgagttgcttagatcgtcgctccatgtctgtcatcgtctcgtctgcagccccgtcgtcctgtataggatctgagcgcggagctgccggcgccgaccgtcgcttgagtgctttgtcaagtttatcgtcaggagtcaactggggtggcaacgttgcagttgtcggcgtcggtgggcgtttgatatctctggcatcctttgttttctttggttctgagtagccacggacaagcttgattccgttcatatagccaccaccggcgaatctttggtacactgtcgaagtcacccagttgaagacgctatcagaggatagccatactgttgtagagtcctgataagtagccacgctgttcatgtatgtaccgaatagtcgatatgtctgcggctgatgagtagaaatgggctgcagcgagctttcaccttgtgctttagctgttgcttttagattctctactgatgctttcggcgtgatgtccttaacacctgaattgctgcgaaccctagctgcaggatacgtccagggtttaattttgaggtatccttcctccagttgggcagccaaattttcctcgcacggtctcaacgatgatccttcttgatagaaccacgtgccacgccggacatcgtagactgggcccagccagtatactggggtcagctcccgctgttcgatatcgacgtcaaacaaaaagtcctcattcaccggtacccgcaagcctggtgagtcgagatcgctctttgatccgtcctcgcgtgatgcagctcgtggccgtcgggtgctcgagcgagcacgcatatgctgctgtctattatcgctaatacgctcgttctctaactcctccaacagcgtttggtatgcattttcgagagagcgggagtcgatcttggtgaaggaggcgaatttcttggggaccgcgggcttggtatttggaggatcctttttcttgcccttgaggaattcgggcttgcgtttcggtac

SEQ ID NO: 18779 - DNA, 3054 bp, Muscodor strobelii
  misc_feature: SGI cDNA ID NO. 566302
  misc_feature: Reduced expression when VOC is produced
  misc_feature: Encodes the peptide sequence at SEQ ID NO 18780
atgcctcccggtcccgatgccagcagcaacttgccacaggacaaagatggcgaccagaaagggaagaagaaggtcgagaagtcgtacctagccactgccgtcgactctatctacccctggtccacgacccgcgctccagcttctgccgacacctcagccctgtccaccccgaaacctgagcctgctagcttcaagagctatcctgccgactgcccgcctctcaatgtcctgtggttccacgccgttgacgtaccgaaacgcaagcccgaattcctcaagggcaagaaaaaggatcctccaaataccaagcccgcggtccccaagaaattcgcctccttcaccaagatcgactcccgctctctcgaaaatgcataccaaacgctgttggaggagttagagaacgagcgtattagcgataatagacagcagcatatgcgtgctcgctcgagcacccgacggccacgagctgcatcacgcgaggacggatcaaagagcgatctcgactcaccaggcttgcgggtaccggtgaatgaggactttttgtttgacgtcgatatcgaacagcgggagctgaccccagtatactggctgggcccagtctacgatgtccggcgtggcacgtggttctatcaagaaggatcatcgttgagaccgtgcgaggaaaatttggctgcccaactggaggaaggatacctcaaaattaaaccctggacgtatcctgcagctagggttcgcagcaattcaggtgttaaggacatcacgccgaaagcatcagtagagaatctaaaagcaacagctaaagcacaaggtgaaagctcgctgcagcccatttctactcatcagccgcagacatatcgactattcggtacatacatgaacagcgtggctacttatcaggactctacaacagtatggctatcctctgatagcgtcttcaactgggtgacttcgacagtgtaccaaagattcgccggtggtggctatatgaacggaatcaagcttgtccgtggctactcagaaccaaagaaaacaaaggatgccagagatatcaaacgcccaccgacgccgacaactgcaacgttgccaccccagttgactcctgacgataaacttgacaaagcactcaagcgacggtcggcgccggcagctccgcgctcagatcctatacaggacgacggggctgcagacgagacgatgacagacatggagcgacgatctaagcaactcaagcgcgagttctcgtcgtatatggagagtgctgatgatcccgacaaacaagaggagcagatcagacagcgcgaagagcaagagatccaggatgattacacaggtctagacggagaaacacaaggacgagaaatcgaacacctagtattagtcactcacgggatcggtcagctcctgagcctcaggatggagagcgtcaactttgtccacgacgtaaacaacctcaggaagaccttcaaagcagtctatgcccactcggaagatttgaaagcactaaatgcagagactggcaaagggcccggcaactctagaatccaagtacttcctgtgtgctggaggcatctcctcgatttccccaaaagacaagaaaggaagggcgagaccgatttaagtgaggcgcaagaagatgaaaacgaatatccttctcttgaagacatcacggttgaaggaatggcttttgccagatccttgatcagcgatcttgccctcgatgttttgttataccagagcgactatagaaaacaaattacggagattgtccttcaagagtcaaatagggtatataagctcttcctcgagcgtaatcccaattttaaaggaaaggtccacatcataggtcattccctaggatcggccatcatgttcgacatcctgtgtcgacagaaagaatctctgaagaactccagacccctctttgaccctcttcgcttcctacctgcttcagagcgcgccgaccggcgtcgaaatacacatggaatgtcatttgaattcgacgtagaagacttctattgcctcggttcgcccgtcgggctatttcaaatgctcaaaggacgcacaatcgccgcccgacaccagcccaacgccgggccagcagaaagccccctgagcactcgatatggcgatgatccgttcatgtcagcaaccgtcgacccaacccagcacgtatctcctgtgacaggcctaccattctccatgtcatcacccaaagtagcacagttattcaatgttttccacccctcagatcctatcgcctaccgtatcgagcctctcatatccccagctatgtcatcattaaagccccaggccctgccatacaccaagaaagggatattcggcgcagtagcaccccaaggtctctcaggaataggcgtcaaagttggccagagtgtcagtggtctctggtcaagtttcagcgccggaatcgctagctccctgcttaaccgcagtctgggcataacgaacgaagacatggcgaaactaaacgcgtcaaatgcacctctccttcccgaacaaacgccagaccccgccgtcaaatccggcacaaacgtggtctccgatgccgccgcacaatcagagaagacagacgcgaggaaaagagcgcttgcgagacaaagcactgattctggtgaccctacacaagcgtctaatgactcgacgcttattgatgatgaccttgagacgttgtacgcgaagtttcagaagaaacgtgtggagcagcataaagataatgagaacgagggtcaggaattgggtgagaagtgggctgcggaggaacttaaggcccagaaacttaggagggaggagttgaaggttcgtgcgctgaactggaatgggagggtggattatagtattcaggagagcgcactagacttcaacccgataaacacaatagcctcacatatgagctactggcaagacgaagacgtgtcgcacttcctctgctcgcaactcctatgtaatcgcgaggtgagagcgaagatgtacaagatgaaggataacgacacttcccaggggacgagaactcctaataatggtcggttttcttga

SEQ ID NO: 18780 - protein, 1017 aa, Muscodor strobelii
  misc_feature: SGI Peptide ID NO. 566302
  misc_feature (664)..(988): Pfam Id: PF02862 Pfam Desc: DDHD domain
  misc_feature (737)..(776): Pfam Id: PF02862 Pfam Desc: DDHD domain
  misc_feature (930)..(988): Pfam Id: PF02862 Pfam Desc: DDHD domain
  misc_feature (12)..(993): NCBI GI: 85080610 Blast Desc: NCU03987 [Neurospora crassa OR74A] gi|28917641|gb|EAA27336.1| [Neurospora crassa OR74A]
  misc_feature (22)..(993): NCBI GI: 171677865 Blast Desc: protein product [Podospora anserina] gi|170937001|emb|CAP61659.1| protein product [Podospora anserina]
  misc_feature (21)..(990): NCBI GI: 116201489 Blast Desc: CHGG_08629 [Chaetomium globosum CBS 148.51] gi|88177147|gb|EAQ84615.1| CHGG_08629 [Chaetomium globosum CBS 148.51]
  misc_feature (21)..(990): NCBI GI: 256732012 Blast Desc: NECHADRAFT_104386 [Nectria haematococca mpVI 77-13-4]
  misc_feature (23)..(996): NCBI GI: 154301036 Blast Desc: BC1G_10656 [Botryotinia fuckeliana B05.10] gi|150856404|gb|EDN31596.1| BC1G_10656 [Botryotinia fuckeliana B05.10]
  misc_feature (23)..(955): NCBI GI: 46136689 Blast Desc: FG09860.1 [Gibberella zeae PH-1]
  misc_feature (84)..(996): NCBI GI: 156043171 Blast Desc: SS1G_10588 [Sclerotinia sclerotiorum 1980] gi|154694976|gb|EDN94714.1| SS1G_10588 [Sclerotinia sclerotiorum 1980]
  misc_feature (67)..(987): NCBI GI: 239606510 Blast Desc: DDHD domain-containing protein [Ajellomyces dermatitidis ER-3]
  misc_feature (67)..(987): NCBI GI: 261197103 Blast Desc: DDHD domain-containing protein [Ajellomyces dermatitidis SLH14081] gi|239595584|gb|EEQ78165.1| DDHD domain-containing protein [Ajellomyces dermatitidis SLH14081]
  misc_feature (67)..(977): NCBI GI: 226293843 Blast Desc: DDHD domain-containing protein [Paracoccidioides brasiliensis Pb18]
  misc_feature: Useful for introducing or modulating the production of volatile compounds
MPPGPDASSNLPQDKDGDQKGKKKVEKSYLATAVDSIYPWSTTRAPASADTSALSTPKPEPASFKSYPADCPPLNVLWFHAVDVPKRKPEFLKGKKKDPPNTKPAVPKKFASFTKIDSRSLENAYQTLLEELENERISDNRQQHMRARSSTRRPRAASREDGSKSDLDSPGLRVPVNEDFLFDVDIEQRELTPVYWLGPVYDVRRGTWFYQEGSSLRPCEENLAAQLEEGYLKIKPWTYPAARVRSNSGVKDITPKASVENLKATAKAQGESSLQPISTHQPQTYRLFGTYMNSVATYQDSTTVWLSSDSVFNWVTSTVYQRFAGGGYMNGIKLVRGYSEPKKTKDARDIKRPPTPTTATLPPQLTPDDKLDKALKRRSAPAAPRSDPIQDDGAADETMTDMERRSKQLKREFSSYMESADDPDKQEEQIRQREEQEIQDDYTGLDGETQGREIEHLVLVTHGIGQLLSLRMESVNFVHDVNNLRKTFKAVYAHSEDLKALNAETGKGPGNSRIQVLPVCWRHLLDFPKRQERKGETDLSEAQEDENEYPSLEDITVEGMAFARSLISDLALDVLLYQSDYRKQITEIVLQESNRVYKLFLERNPNFKGKVHIIGHSLGSAIMFDILCRQKESLKNSRPLFDPLRFLPASERADRRRNTHGMSFEFDVEDFYCLGSPVGLFQMLKGRTIAARHQPNAGPAESPLSTRYGDDPFMSATVDPTQHVSPVTGLPFSMSSPKVAQLFNVFHPSDPIAYRIEPLISPAMSSLKPQALPYTKKGIFGAVAPQGLSGIGVKVGQSVSGLWSSFSAGIASSLLNRSLGITNEDMAKLNASNAPLLPEQTPDPAVKSGTNVVSDAAAQSEKTDARKRALARQSTDSGDPTQASNDSTLIDDDLETLYAKFQKKRVEQHKDNENEGQELGEKWAAEELKAQKLRREELKVRALNWNGRVDYSIQESALDFNPINTIASHMSYWQDEDVSHFLCSQLLCNREVRAKMYKMKDNDTSQGTRTPNNGRFS

SEQ ID NO: 18781 - DNA, 6786 bp, Muscodor strobelii
  misc_feature: SGI EST ID NO. CUFF.44407.1
  misc_feature: Variant of the nucleotide sequence at SEQ ID NO 18779
cgcgagtctacgtgatctatgatttacatgaccaaaacaacttgcaggcatgccttcgtcttatcgttgttctcagcattcgaagctgctctttactgcccacctactagcaaactagcatacctcatgttgaagcaattaatacacattccttcgcccttccttaatttcattcatcctgctactgtccagttgccttccgccgtgacctcaccctgactcccaccgattattaccccattagtacatgaccgtcctttgcctttatcagctgctgtaagcacgtatctcgtcggctctctgatagacagatatctgtcctttctagtcctctcatccgacctgttttcaacccattccagtgacgttggcgcaaatacccagccgagtgttgcatagcttcatccgaccgcctcctccccgccatcgactgcccgccactcgtctatcgcgaaccagtcaaagagccctattcggttggcccttcggccgggctgacactatgcctcccggtcccgatgccagcagcaacttgccacaggacaaagatggcgaccagaaagggaagaagaaggtcgagaagtcgtacctagccactgccgtcgactctatctacccctggtccacgacccgcgctccagcttctgccgacacctcagccctgtccaccccgaaacctgagcctgctgtctccaaggcagatgggatcatgctacaaactccctgtacggccagagcttcaagagctatcctgccgactgcccgcctctcaatgtcctgtggttccacgccgttgacgtaccgaaacgcaagcccgaattcctcaagggcaagaaaaaggatcctccaaataccaagcccgcggtccccaagaaattcgcctccttcaccaagatcgactcccgctctctcgaaaatgcataccaaacgctgttggaggagttagagaacgagcgtattagcgataatagacagcagcatatgcgtgctcgctcgagcacccgacggccacgagctgcatcacgcgaggacggatcaaagagcgatctcgactcaccaggcttgcgggtaccggtgaatgaggactttttgtttgacgtcgatatcgaacagcgggagctgaccccagtatactggctgggcccagtctacgatgtccggcgtggcacgtggttctatcaagaaggatcatcgttgagaccgtgcgaggaaaatttggctgcccaactggaggaaggatacctcaaaattaaaccctggacgtatcctgcagctagggttcgcagcaattcaggtgttaaggacatcacgccgaaagcatcagtagagaatctaaaagcaacagctaaagcacaaggtgaaagctcgctgcagcccatttctactcatcagccgcagacatatcgactattcggtacatacatgaacagcgtggctacttatcaggactctacaacagtatggctatcctctgatagcgtcttcaactgggtgacttcgacagtgtaccaaagattcgccggtggtggctatatgaacggaatcaagcttgtccgtggctactcagaaccaaagaaaacaaaggatgccagagatatcaaacgcccaccgacgccgacaactgcaacgttgccaccccagttgactcctgacgataaacttgacaaagcactcaagcgacggtcggcgccggcagctccgcgctcagatcctatacaggacgacggggctgcagacgagacgatgacagacatggagcgacgatctaagcaactcaagcgcgagttctcgtcgtatatggagagtgctgatgatcccgacaaacaagaggagcagatcagacagcgcgaagagcaagagatccaggatgattacacaggtctagacggagaaacacaaggacgagaaatcgaacacctagtattagtcactcacgggatcggtcagctcctgagcctcaggatggagagcgtcaactttgtccacgacgtaaacaacctcaggaagaccttcaaagcagtctatgcccactcggaagatttgaaagcactaaatgcagagactggcaaagggcccggcaactctagaatccaagtacttcctgtgtgctggaggcatctcctcgatttccccaaaagacaagaaaggaagggcgagaccgatttaagtgaggcgcaagaagatgaaaacgaatatccttctcttgaagacatcacggttgaaggaatggcttttgccagatccttgatcagcgatcttgccctcgatgttttgttataccagagcgactatagaaaacaaattacggagattgtccttcaagagtcaaatagggtatataagctcttcctcgagcgtaatcccaattttaaaggaaaggtccacatcataggtcattccctaggatcggccatcatgttcgacatcctgtgtcgacagaaagaatctctgaagaactccagacccctctttgaccctcttcgcttcctacctgcttcagagcgcgccgaccggcgtcgaaatacacatggaatgtcatttgaattcgacgtagaagacttctattgcctcggttcgcccgtcgggctatttcaaatgctcaaaggacgcacaatcgccgcccgacaccagcccaacgccgggccagcagaaagccccctgagcactcgatatggcgatgatccgttcatgtcagcaaccgtcgacccaacccagcacgtatctcctgtgacaggcctaccattctccatgtcatcacccaaagtagcacagttattcaatgttttccacccctcagatcctatcgcctaccgtatcgagcctctcatatccccagctatgtcatcattaaagccccaggccctgccatacaccaagaaagggatattcggcgcagtagcaccccaaggtctctcaggaataggcgtcaaagttggccagagtgtcagtggtctctggtcaagtttcagcgccggaatcgctagctccctgcttaaccgcagtctgggcataacgaacgaagacatggcgaaactaaacgcgtcaaatgcacctctccttcccgaacaaacgccagaccccgccgtcaaatccggcacaaacgtggtctccgatgccgccgcacaatcagagaagacagacgcgaggaaaagagcgcttgcgagacaaagcactgattctggtgaccctacacaagcgtctaatgactcgacgcttattgatgatgaccttgagacgttgtacgcgaagtttcagaagaaacgtgtggagcagcataaagataatgagaacgagggtcaggaattgggtgagaagtgggctgcggaggaacttaaggcccagaaacttaggagggaggagttgaaggttcgtgcgctgaactggaatgggagggtggattatagtattcaggagagcgcactagacttcaacccgataaacacaatagcctcacatatgagctactggcaagacgaagacgtgtcgcacttcctctgctcgcaactcctatgtaatcgcgaggtgagagcgaagatgtacaagatgaaggataacgacacttcccaggggacgagaactcctaataatggtcggttttcttgaaatacctaccagataagatcctgggttggtattacgaaggattgcgtatcacgggtaggatatacggaataccagccgtgttttgctttgatatcgctagaatgtaagagaatgtgagagtcggagaattcagaacgtgaacacagcattgatggcgttggatacggcgttgggtacggtgttaggcatggcacgataaatttatggacgctagagtgttatacacaggcgttggcatcagaagaacacagaacaatctccgacgacacaaattagacacacattaccactgtgcatcgcaaagaccatcatgttttgtgtcaataatacccaatgcagtgagaaaacatacctacagtcttctctcaaaaacatcccgctctcgtcagttttgttatgtgacatgctgggggttaacaccaatctacttccagtcatcgctcattcgatttgtaaggagacaccataagctaagattactaccgacacatcgtaacctcttccataatctatttcaggattgatagagttacttacaatgaccacattttagaggaacgcacttcgacgggatcacatcacaggcttagacacgcgcggatatggtctcaaaacgagctcctgttgtattgatcgtattttcgcattgatcatgtgtccgtagacctatcaaatggtgtaacctaaactactagtcatcgacgttcgtttgtgaaaggttaaatccagcaccattctgtgttttttgcatctcatgaaaccatcgtgtccgagaaaaacgcaacgaccttactcccgaaatgaccacttttgtgatatgaatccatttttgcccctcttgagccgcactcgatgccagatgaatcagaaggaagaaaatcccgggtatctgaaccgatttcaagatcaagtcaaccatctcttttcaaatactcatgagcattcgaccggatgtgacaacccctttgaatcgtccaaagagtcatacatcttagttgccgacgttagggcactgggactggatatggccagcctgctggcacttgtagcagatcttctctccaccggatgactccttggggcagtcacgagagaagtgaccgttctcgccacagttgtagcacttggatccgttgacacattcgcctatcacgttgttactaaccatgctggttgacgtcgtgatacagagaaaaacttacgagacatgtgtccatagccaccgcaagagtagcaagtcttgccctggccgccaccaccggagtaaccgccgccgccagagtagccgccgtacgaacctccactgccataagcatcagggcagttgcgagcgatgtgacccatcttgccacactgaaagatattaggctttgcacactaaaggggcttctagatctagctcaccttgtagcactcctgggagccaccgccacctcctgaaccgcccatgggaccgccaccctgagggcactcgcgagagatgtgaccggcctgaccacagcgatagcatgttttggtatccttaggaccctcaggacagtcacggcctatcagagacaacatattaaactcgaaatccggttataaacgagcggagacttactcatgtggccttcattgccacagttgtagctaaaagaacgatcagcgcgattcattaagatgacagattagggggaaataccacttagcggcaccacggttggggcagtcacgggcctgatggaagatatcagtcagtacgagccgagggcaaatcaagacttctccttccgtcgctgattccaagagtcctctttcatcttacttgatgagtggtctgtccacctaaacaacacatttctcaagtcagatcatcacgccacccgccgaatgaaatcaatttgcgcagatatgaggtttcaagatcaaagatgatctccggtgagatcaatcttacaagcctgagttgagacgaagcggaggacagacatgatacaggcaatgctgttccagtatcgtgagaagcaggtctgccttcaagccaaccatacaatacacaacttgaatcgccaatgagcgatatgctgcaggcatatggtttgatgcgtctggatcgggaataatggagagaaaatggacgagattggagatctgaaaaagacaaagccaacataatgtcaagtctgaacttacaagtgaagcactgacgtgcgttgccaccggcgaaatccatgccggacatagtgatgtcgactgtatcggtgtcgttgaaagtcgggaatagtttgcctgacggtcaatgtcaatgtttattgctcgcagatcaagacaacgatcgtgagcgttccaagtcgttgaaacgaaagagtgggagactaattgaggtagtggccgttgaaaataacggcgacagataatagagtttgacgatgtgtgtaagtgcgaggagagtgagggcgaaaactttcccaacggaaagcttgtcagtgcaggccaatcagaagccagcgcaattgggtctggggattgaagtgggcaggatatgatgcacaagtgggaaagttgtcaccgagtggtaacagacaagggactgcacagcaggttgcagtacaggaaagcgcgggggcaggttatgataagatcattccagtgagactcggtccctcgtctgtttttgttgtgtggttgcagggcatgtgtgacacatcaatggattggatggggaaacagagacaatgcaaggtacagaaaacacccacacctagagaagccgtccagcgatgactctatttcctgtgacgaatgaaacaatcgggtgtgttggcaatgaggccgcgctgatgtgatatgttgacgtgtaacgcaatacaagacgtgggacagttcaggcccaacgtcactgagtgctggtgacggtgttggaaagtggtagatggtggggttgatggaggggctcgcaaaaaactacgaggaacacaatgcggcgcaaaagggccgcggaggagatgttggattcaatgttcgagagacttaaaataatacgtaccttagtgaagatttcgatcgattgcgatggatcaagagcggagggtgcggtagtgagtgagagaacttcgagactacaatcgaagatggtgatgatgtagagagaggttcgatggatttttttctccgtgatgtggacaagatagctgatcgcca

SEQ ID NO: 18782 - DNA, 4788 bp, Muscodor strobelii
  misc_feature: SGI cDNA ID NO. 566303
  misc_feature: Encodes the peptide sequence at SEQ ID NO 18783
atggcgacgacgatgacgatggcgaccagtgctgcggcgccggtcaagcaccaagtcgcggaccggctgcccaagaagttcaagaacctcaagttcggggtgcagtcgaaccaggacatcgtcaaccagggggtgatggaggtgtcggaccgcagcatgtacgacatcgacaagggccgcgagccgaccgttaacggcgtgttggacaagcgcctcggcacctcgagcaagacgggcgtctgccagacctgcaaccagcgcctcaacgagtgcaccggccacttcggccacgtccgcctgccgctgcccgccttccacatcggctacatcaagttcaccatggccatcctgcaggagatctgcaaggactgctcccgcgtgctgctgcaggagcccgaccgccgcgccttcctccgcgagctgcgccgccccaacatcgacaacatgaagcgcaccgccatctgcaagaagatcaacgaccagtgccgcaagtgcaagaactgcccctactgcggcgccctcaacggccagatccgcaaggtcggcgccctcaagctcgtccacgacaagttcgtcgtcttcaacaagtccacctccgccaagaagcagccgcccccctccaagatcgcctttgacgcctctttcgccgaggcccgcaagcacaacgccgacctcgacaagcatatccgcaaggccttcgaggacctcaaccccctgcgcgtgctcaacctcttcaaggccatcaccccggacgactgcgagctgctcggcctcaacccctccgagggacggcccgagatgtttctctggcagtatctgcccgctccccccgtctgcatccggccctccgtcgcccaggagggggccagcaacgaggacgacatcactacccgcctgggagatattgtgtttgcctgtggcctcatccgcgctgccatgcagaagggcacctccatgcagaccctcatggagcagtgggagtatctgcagctacagattgccgtgtacgtcaacagcgatgtgcccggccttcgcgacagcaccgtcaccaagactatgcgaggcttctgtcagcggttgaagggcaagcagggtcgtttccgtggcaatctttccggaaagcgtgtcgacttctcgggccgaaccgtcatctcacctgaccctaacttggcggtgaatcaggttgccgtgcctatcctggtcgccaagaacctcacttatcccgagagagctcatcgtgagaatatggcgaagctgcggaaatgcatcctcaagggccccaatgaccaccctggtgcgcaggctgtcctcaaagtcgagggggaccacccacctttccgcgtctcgctcagattcggtgacagagccatggtagcgagagaacttcgtatcggtgatatagtcgagcggcatctagaggatggagacatcgtgctctttaaccgtcagccatcccttcacaggctcagtatcatgagtcatttggccaagatccgtccctggagaaccttccgtctcaacgagtgtgcatgcgggccatacaatgcagattttgacggtgacgagatgaaccttcatgtgccccagacagaagaggcgcgtgccgaggctctcactctgatgggggtgaagcacaatcttgcgacacccaaaaacggagagcccatcattgctgccacacaagatttcatcacggccgcctatctccttagtggcaaggatatctttttcgacaggagaacatttacgtacattgtcatgcacatgttggatggcgacacgcaaattgatctgccacccccagctatcttggctcctagacgactatggaccggcaaacaggtcttcagcatgatgatgaagcctaataaagctacacccgtcatgatcaatctagatgccaaatgcagagaatatgaggatcctaatctaggtgccggtcctctgcctggccacaggcgaaaagccccagatttgtgtccgaacgacggttggcttgtcgtgaggaactctcaagtcatgtgcggccgaatggacaagtctacggtgggagcaggcaagaaagactctattttctatgtcatcctcagagattacggcccggatgctgctgtggccacgatgaatcgccttgccaaactctgtgccagggccctcacaaatcgcggtttctccatcggcattggagacgtgtttcctagcgaagccctcactgcaacaaaggagaaccttatcagagatgcatatgaggtgtctgacaagttgattatgagctataatcaaaagacgctggagaaatctacaggatgtaccttggaggagacgttggaagctgaaatttctaagcttcttagtgatgtacggacgagggccggttcggcttgcatcagcgccttgagccccaacaatgccccttgggtcatggcatcgtctggatcgaaaggctccaacatcaatgtggcgcaaatgattacagttgtcggacagcagattatcggcggttctcgcgtagtagacggcttccaagaccgaacactacctcattttcataaaaacacacggcacgcgcttgccaagggcttcgtgagaaacagcttctatactggacttctccctaccgagttcatctttcacgccatgtctggaagagaaggtctggtcgatacagccgtcaagacggccgaaactggttacatgtctcgccgtctcatgaaatcacttgaggatctgtccacgaaatacgatgacacagtacgcacatctggcgatggtgttgtccaatttcaatttggagccgacaaattggaccccattgatatggagggcaaagcattacctgttaacttcgaacgtaccttctctcatgccgagaacctcacttggaacaacgccgaccgtgcattgttaccgttcgagatcatcgctctctgtgaatctatgctcaaaaaggaacggctccgctatccaagacgtgggttgctttacggagaacctctcaagtacactgacactaccgaatacggcgtggatgaacacgagagtggccgaaacttccttcggaccatcgagaaacacgttcatggcttggctcaacggtttgcgaagttgcgcgatctcgctggccttgatgctctgcttgttaggccagaaacggcctctacatcgctcgataaggaacaacgacaggagcttgccacgctgacttccgaagttgagaaaataaaggtcaagcaggcggctcggctggcgactgcaaatgagcaccaaaggcccaattacactgtccatacgaaatctaaagctgtgagcaagatgacctatgacgatctcctgaagctcaagccagcgctcgacgagcttagtttttaccagccccacaagcccaagactcctatggaaaaggaagagtcttcaaaacttgccgatatcaacgcaagactggacaagctagagttggcctatctcatgcgtttggcttacgatatcgagggacaagaaaaagaccttgtagccaaattggctccagagagagcaggcaaagtatcggagaaaacacttcgccagtttatcgggtcttgcctagaaaaatacagcaaggcgcaaaccgaacctggacacgctgtaggtgctgtaggcgctcagtcgatcggtgaaccgggaacacaaatgacacttaagacttttcattttgctggtgtcgccggcatgagtatcacgcagggtgtaccacgtatcaaagagatcataaatgcatccaaattgatcagtactccagtaattacctgtccgctcgaaaacccacattccgaggaagcggcgttgatcgtgcgatctcgcattgagaaaacatacattgaggacgtactccgccacttggacgatgagtggcagccaactcggtccttcattactttgcatatcaacaccgagacattggaaagcatgcatcttggaatcggactaaacgacattgccaagtccattatcaagcagaagaagctcaagatccttgcttccgacatgcaagtattcgaacaagatgccaccatcgagattaatgtgagaggtctcgatgtagatgcaacggccaaaagatcagcaagaaccaaggccgccacggaagcattgtctgatgtcgcagtacgtatcagtcaactgaagcgggcattaccatctatcgcaatatcagggtaccccgaggccacacgtgcgattgtacaaaaggacgataacaaagagaatccaagttataaagtcttggttgaaggatatggtctgcgggcatgcatgaacacccaaggggtggttggtaccaaagccagaaccaacggtgtgttggaatgcagagacgttcttggaatcgaggcggcacgcaccacgattgccaaagaaatcagcgacgtcatggataccatgggcatcgatcatcgtcacatggatctgctcgccgatctgatgacctacaaaggtgagattctaggtatcacacgtttcggtctttccaagatgcgtgacagtgtactgcagctcgcttcgtttgagaaaacagccgatcacttgttcgacgccgcatctggcatgaagacggacccgattgagggtgtgtccgagaagattattatgggagagaccatgtccgtcggaactggttctttccaggttgttcgacgactcggcttgagcgacgaacacttcacacagttaccgaccatctttgaggatgtgtggaaccaagagaatggcaaggacaagctgcaagcgaagcgcaccaagaaaacaattccctag

SEQ ID NO: 18783 - protein, 1595 aa, Muscodor strobelii
  misc_feature: SGI Peptide ID NO. 566303
  misc_feature (24)..(371): Pfam Id: PF04997 Pfam Desc: RNA polymerase Rpb1, domain 1
  misc_feature (373)..(543): Pfam Id: PF00623 Pfam Desc: RNA polymerase Rpb1, domain 2
  misc_feature (546)..(731): Pfam Id: PF04983 Pfam Desc: RNA polymerase Rpb1, domain 3
  misc_feature (756)..(862): Pfam Id: PF05000 Pfam Desc: RNA polymerase Rpb1, domain 4
  misc_feature (869)..(1510): Pfam Id: PF04998 Pfam Desc: RNA polymerase Rpb1, domain 5
  misc_feature (15)..(1065): NCBI GI: 50426995 Blast Desc: DEHA0G13849g [Debaryomyces hansenii CBS767]
  misc_feature (15)..(1060): NCBI GI: 241955144 Blast Desc: DNA-directed RNA polymerase III subunit, [Candida dubliniensis CD36] gi|223643634|emb|CAX42517.1| DNA-directed RNA polymerase III subunit, [Candida dubliniensis CD36]
  misc_feature (15)..(1082): NCBI GI: 156841103 Blast Desc: Kpol_1016p9 [Vanderwaltozyma polyspora DSM 70294] gi|156114557|gb|EDO16069.1| Kpol_1016p9 [Vanderwaltozyma polyspora DSM 70294]
  misc_feature (15)..(1082): NCBI GI: 6324690 Blast Desc: RNA polymerase III subunit C160, part of core enzyme; similar to bacterial beta-prime subunit [Saccharomyces cerevisiae] gi|133356|sp|P04051.1|RPC1_YEAST RecName: RNA III III
  misc_feature (15)..(1082): NCBI GI: 256272995 Blast Desc: Rpo31p [Saccharomyces cerevisiae JAY291]
  misc_feature (15)..(1082): NCBI GI: 190407445 Blast Desc: DNA-directed RNA polymerase III largest subunit [Saccharomyces cerevisiae RM11-1a] gi|207341165|gb|EDZ69295.1| YOR116Cp-like protein [Saccharomyces cerevisiae AWRI1631] Rpo31p
  misc_feature (15)..(1069): NCBI GI: 255717220 Blast Desc: KLTH0F16236p [Lachancea thermotolerans] gi|238936274|emb|CAR24454.1| KLTH0F16236p [Lachancea thermotolerans]
  misc_feature (15)..(1079): NCBI GI: 238881190 Blast Desc: DNA-directed RNA polymerase III largest subunit [Candida albicans WO-1]
  misc_feature (15)..(1074): NCBI GI: 254573222 Blast Desc: RNA polymerase III subunit C160, part of core enzyme [Pichia pastoris GS115] gi|238033519|emb|CAY71541.1| RNA polymerase III subunit C160, part of core enzyme [Pichia pastoris
  misc_feature (15)..(1079): NCBI GI: 68481134 Blast Desc: CaO19.10615 [Candida albicans SC5314] gi|46437106|gb|EAK96458.1| CaO19.10615 [Candida albicans SC5314]
  misc_feature (15)..(974): SWISSPROT Homolog: EC 2.7.7.6 DNA-directed RNA polymerase
MATTMTMATSAAAPVKHQVADRLPKKFKNLKFGVQSNQDIVNQGVMEVSDRSMYDIDKGREPTVNGVLDKRLGTSSKTGVCQTCNQRLNECTGHFGHVRLPLPAFHIGYIKFTMAILQEICKDCSRVLLQEPDRRAFLRELRRPNIDNMKRTAICKKINDQCRKCKNCPYCGALNGQIRKVGALKLVHDKFVVFNKSTSAKKQPPPSKIAFDASFAEARKHNADLDKHIRKAFEDLNPLRVLNLFKAITPDDCELLGLNPSEGRPEMFLWQYLPAPPVCIRPSVAQEGASNEDDITTRLGDIVFACGLIRAAMQKGTSMQTLMEQWEYLQLQIAVYVNSDVPGLRDSTVTKTMRGFCQRLKGKQGRFRGNLSGKRVDFSGRTVISPDPNLAVNQVAVPILVAKNLTYPERAHRENMAKLRKCILKGPNDHPGAQAVLKVEGDHPPFRVSLRFGDRAMVARELRIGDIVERHLEDGDIVLFNRQPSLHRLSIMSHLAKIRPWRTFRLNECACGPYNADFDGDEMNLHVPQTEEARAEALTLMGVKHNLATPKNGEPIIAATQDFITAAYLLSGKDIFFDRRTFTYIVMHMLDGDTQIDLPPPAILAPRRLWTGKQVFSMMMKPNKATPVMINLDAKCREYEDPNLGAGPLPGHRRKAPDLCPNDGWLVVRNSQVMCGRMDKSTVGAGKKDSIFYVILRDYGPDAAVATMNRLAKLCARALTNRGFSIGIGDVFPSEALTATKENLIRDAYEVSDKLIMSYNQKTLEKSTGCTLEETLEAEISKLLSDVRTRAGSACISALSPNNAPWVMASSGSKGSNINVAQMITVVGQQIIGGSRVVDGFQDRTLPHFHKNTRHALAKGFVRNSFYTGLLPTEFIFHAMSGREGLVDTAVKTAETGYMSRRLMKSLEDLSTKYDDTVRTSGDGVVQFQFGADKLDPIDMEGKALPVNFERTFSHAENLTWNNADRALLPFEIIALCESMLKKERLRYPRRGLLYGEPLKYTDTTEYGVDEHESGRNFLRTIEKHVHGLAQRFAKLRDLAGLDALLVRPETASTSLDKEQRQELATLTSEVEKIKVKQAARLATANEHQRPNYTVHTKSKAVSKMTYDDLLKLKPALDELSFYQPHKPKTPMEKEESSKLADINARLDKLELAYLMRLAYDIEGQEKDLVAKLAPERAGKVSEKTLRQFIGSCLEKYSKAQTEPGHAVGAVGAQSIGEPGTQMTLKTFHFAGVAGMSITQGVPRIKEIINASKLISTPVITCPLENPHSEEAALIVRSRIEKTYIEDVLRHLDDEWQPTRSFITLHINTETLESMHLGIGLNDIAKSIIKQKKLKILASDMQVFEQDATIEINVRGLDVDATAKRSARTKAATEALSDVAVRISQLKRALPSIAISGYPEATRAIVQKDDNKENPSYKVLVEGYGLRACMNTQGVVGTKARTNGVLECRDVLGIEAARTTIAKEISDVMDTMGIDHRHMDLLADLMTYKGEILGITRFGLSKMRDSVLQLASFEKTADHLFDAASGMKTDPIEGVSEKIIMGETMSVGTGSFQVVRRLGLSDEHFTQLPTIFEDVWNQENGKDKLQAKRTKKTIP

SEQ ID NO: 18784 - DNA, 6197 bp, Muscodor strobelii
  misc_feature: SGI EST ID NO. CUFF.44086.0
  misc_feature: Variant of the nucleotide sequence at SEQ ID NO 18782
ctagctctcgccagtcttcaccttttttccatgctgcaaacccgtgatagctgcgcgacgacgacaacgcatgagacaccacaattgtcgtagcccgtggatagacctctctgcctgcggtgcagctaagtcatcaactatgaagtggtgacattgactcgcacactgaggcagcaacgcgcgatcctcggcactttcagcatcgctacttcctccatcctccatcgtcaacaccacattgcagagcccaccctccccgcctccccgcctcctctaaccaacacctacctaccattgccgacaatcccccttacactacgtacgccgactctttcgacctcgactctgttcgatctcaccaccgacccatcgctcgtcatggcgacgacgatgacgatggcgaccagtgctgcggcgccggtcaagcaccaagtcgcggaccggctgcccaagaagttcaagaacctcaagttcggggtgcagtcgaaccaggacatcgtcaaccagggggtgatggaggtgtcggaccgcagcatgtacgacatcgacaagggccgcgagccgaccgttaacggcgtgttggacaagcgcctcggcacctcgagcaagacgggcgtctgccagacctgcaaccagcgcctcaacgagtgcaccggccacttcggccacgtccgcctgccgctgcccgccttccacatcggctacatcaagttcaccatggccatcctgcaggagatctgcaaggactgctcccgcgtgctgctgcaggagcccgaccgccgcgccttcctccgcgagctgcgccgccccaacatcgacaacatgaagcgcaccgccatctgcaagaagatcaacgaccagtgccgcaagtgcaagaactgcccctactgcggcgccctcaacggccagatccgcaaggtcggcgccctcaagctcgtccacgacaagttcgtcgtcttcaacaagtccacctccgccaagaagcagccgcccccctccaagatcgcctttgacgcctctttcgccgaggcccgcaagcacaacgccgacctcgacaagcatatccgcaaggccttcgaggacctcaaccccctgcgcgtgctcaacctcttcaaggccatcaccccggacgactgcgagctgctcggcctcaacccctccgagggacggcccgagatgtttctctggcagtatctgcccgctccccccgtctgcatccggccctccgtcgcccaggagggggccagcaacgaggacgacatcactacccgcctgggagatattgtgtttgcctgtggcctcatccgcgctgccatgcagaagggcacctccatgcagaccctcatggagcagtgggagtatctgcagctacagattgccgtgtacgtcaacagcgatgtgcccggccttcgcgacagcaccgtcaccaagactatgcgaggcttctgtcagcggttgaagggcaagcagggtcgtttccgtggcaatctttccggaaagcgtgtcgacttctcgggccgaaccgtcatctcacctgaccctaacttggcggtgaatcaggttgccgtgcctatcctggtcgccaagaacctcacttatcccgagagagctcatcgtgagaatatggcgaagctgcggaaatgcatcctcaagggccccaatgaccaccctggtgcgcaggctgtcctcaaagtcgagggggaccacccacctttccgcgtctcgctcagattcggtgacagagccatggtagcgagagaacttcgtatcggtgatatagtcgagcggcatctagaggatggagacatcgtgctctttaaccgtcagccatcccttcacaggctcagtatcatgagtcatttggccaagatccgtccctggagaaccttccgtctcaacgagtgtgcatgcgggccatacaatgcagattttgacggtgacgagatgaaccttcatgtgccccagacagaagaggcgcgtgccgaggctctcactctgatgggggtgaagcacaatcttgcgacacccaaaaacggagagcccatcattgctgccacacaagatttcatcacggccgcctatctccttagtggcaaggatatctttttcgacaggagaacatttacgtacattgtcatgcacatgttggatggcgacacgcaaattgatctgccacccccagctatcttggctcctagacgactatggaccggcaaacaggtcttcagcatgatgatgaagcctaataaagctacacccgtcatgatcaatctagatgccaaatgcagagaatatgaggatcctaatctaggtgccggtcctctgcctggccacaggcgaaaagccccagatttgtgtccgaacgacggttggcttgtcgtgaggaactctcaagtcatgtgcggccgaatggacaagtctacggtgggagcaggcaagaaagactctattttctatgtcatcctcagagattacggcccggatgctgctgtggccacgatgaatcgccttgccaaactctgtgccagggccctcacaaatcgcggtttctccatcggcattggagacgtgtttcctagcgaagccctcactgcaacaaaggagaaccttatcagagatgcatatgaggtgtctgacaagttgattatgagctataatcaaaagacgctggagaaatctacaggatgtaccttggaggagacgttggaagctgaaatttctaagcttcttagtgatgtacggacgagggccggttcggcttgcatcagcgccttgagccccaacaatgccccttgggtcatggcatcgtctggatcgaaaggctccaacatcaatgtggcgcaaatgattacagttgtcggacagcagattatcggcggttctcgcgtagtagacggcttccaagaccgaacactacctcattttcataaaaacacacggcacgcgcttgccaagggcttcgtgagaaacagcttctatactggacttctccctaccgagttcatctttcacgccatgtctggaagagaaggtctggtcgatacagccgtcaagacggccgaaactggttacatgtctcgccgtctcatgaaatcacttgaggatctgtccacgaaatacgatgacacagtacgcacatctggcgatggtgttgtccaatttcaatttggagccgacaaattggaccccattgatatggagggcaaagcattacctgttaacttcgaacgtaccttctctcatgccgagaacctcacttggaacaacgccgaccgtgcattgttaccgttcgagatcatcgctctctgtgaatctatgctcaaaaaggaacggctccgctatccaagacgtgggttgctttacggagaacctctcaagtacactgacactaccgaatacggcgtggatgaacacgagagtggccgaaacttccttcggaccatcgagaaacacgttcatggcttggctcaacggtttgcgaagttgcgcgatctcgctggccttgatgctctgcttgttaggccagaaacggcctctacatcgctcgataaggaacaacgacaggagcttgccacgctgacttccgaagttgagaaaataaaggtcaagcaggcggctcggctggcgactgcaaatgagcaccaaaggcccaattacactgtccatacgaaatctaaagctgtgagcaagatgacctatgacgatctcctgaagctcaagccagcgctcgacgagcttagtttttaccagccccacaagcccaagactcctatggaaaaggaagagtcttcaaaacttgccgatatcaacgcaagactggacaagctagagttggcctatctcatgcgtttggcttacgatatcgagggacaagaaaaagaccttgtagccaaattggctccagagagagcaggcaaagtatcggagaaaacacttcgccagtttatcgggtcttgcctagaaaaatacagcaaggcgcaaaccgaacctggacacgctgtaggtgctgtaggcgctcagtcgatcggtgaaccgggaacacaaatgacacttaagacttttcattttgctggtgtcgccggcatgagtatcacgcagggtgtaccacgtatcaaagagatcataaatgcatccaaattgatcagtactccagtaattacctgtccgctcgaaaacccacattccgaggaagcggcgttgatcgtgcgatctcgcattgagaaaacatacattgaggacgtactccgccacttggacgatgagtggcagccaactcggtccttcattactttgcatatcaacaccgagacattggaaagcatgcatcttggaatcggactaaacgacattgccaagtccattatcaagcagaagaagctcaagatccttgcttccgacatgcaagtattcgaacaagatgccaccatcgagattaatgtgagaggtctcgatgtagatgcaacggccaaaagatcagcaagaaccaaggccgccacggaagcattgtctgatgtcgcagtacgtatcagtcaactgaagcgggcattaccatctatcgcaatatcagggtaccccgaggccacacgtgcgattgtacaaaaggacgataacaaagagaatccaagttataaagtcttggttgaaggatatggtctgcgggcatgcatgaacacccaaggggtggttggtaccaaagccagaaccaacggtgtgttggaatgcagagacgttcttggaatcgaggcggcacgcaccacgattgccaaagaaatcagcgacgtcatggataccatgggcatcgatcatcgtcacatggatctgctcgccgatctgatgacctacaaaggtgagattctaggtatcacacgtttcggtctttccaagatgcgtgacagtgtactgcagctcgcttcgtttgagaaaacagccgatcacttgttcgacgccgcatctggcatgaagacggacccgattgagggtgtgtccgagaagattattatgggagagaccatgtccgtcggaactggttctttccaggttgttcgacgactcggcttgagcgacgaacacttcacacagttaccgaccatctttgaggatgtgtggaaccaagagaatggcaaggacaagctgcaagcgaagcgcaccaagaaaacaattccctaggtgggaactaatcgggctcgcttgcaggagtttcagagggaagtagaagctcaccaaagagttatcattacaactgctgaagaacccgcccgggctcaccatgaacccgccggtcctcctgaatcaggagcggtgagtaatctgtcgattcactcgcggcaggacacgaatgacgaggaagagagtgatgagccggccgatggtgaggaggacttgttccagataccggagaattcatacgttgctccggaggagagagaagaaaaatggaatcagatgtctgatggcattacagatgccgaattcacgtcgccgccatcagctagccaagcaagtgcggaagctcctccggtcatgtcgcgtagatctacacgttcacgcaagcgcaaagcagagacacagccagaaccggaggtgaagagtccgcagactccagagattaaagaagagcctgaggaggacgaagtacggccgaagaggaaacagccgacgagaagcgcgaagaaaaggaagacctagtgggtgttgtttgggttttcgatggtgttgttgttccgctggctataggagttgctgagggatttgcttcctatatacctacgtgcggaactttgtacggattatgaaaattaggtgccaggcactgcgcactgaggcgaaagggctttgagcagtgctgaatgggcaatgcgaaatgctaaaaaattgagaatattatcaatcagaaaaagttaaaatctaagttgatgctgtcatttgtgatatgtgcactggtggacgactgcgtttcgtaataactacaccttgccactagattgaagttagaataaagaagagataaagttttaaagtgctgatgctatggttcgtgatctgtggcttgaaaaaggatcactatcatggtgttttgccttaaagttgcatgaactgtgatattctcctacgaagttaggttcttacttggcgtttacgtggagagaggctacgaaaggtggttgtggtttggagtttggtgcttcattagagttttg

SEQ ID NO: 18785 - DNA, 366 bp, Muscodor strobelii
  misc_feature: SGI cDNA ID NO. 566304
  misc_feature: Encodes the peptide sequence at SEQ ID NO 18786
atgaacccgccggtcctcctgaatcaggagcgtgatgagccggccgatggtgaggaggacttgttccagataccggagaattcatacgttgctccggaggagagagaagaaaaatggaatcagatgtctgatggcattacagatgccgaattcacgtcgccgccatcagctagccaagcaagtgcggaagctcctccggtcatgtcgcgtagatctacacgttcacgcaagcgcaaagcagagacacagccagaaccggaggtgaagagtccgcagactccagagattaaagaagagcctgaggaggacgaagtacggccgaagaggaaacagccgacgagaagcgcgaagaaaaggaagacctag

SEQ ID NO: 18786 - protein, 121 aa, Muscodor strobelii
  misc_feature: SGI Peptide ID NO. 566304
MNPPVLLNQERDEPADGEEDLFQIPENSYVAPEEREEKWNQMSDGITDAEFTSPPSASQASAEAPPVMSRRSTRSRKRKAETQPEPEVKSPQTPEIKEEPEEDEVRPKRKQPTRSAKKRKT

SEQ ID NO: 18787 - DNA, 2337 bp, Muscodor strobelii
  misc_feature: SGI cDNA ID NO. 566305
  misc_feature: Encodes the peptide sequence at SEQ ID NO 18788
atgaccatcgatccccgaatatctcaatatgaaacgccacctgaaaagaactcgccttcaaactcgcagctgagctctgaagacttcccttctccacatacccgactggatggactggatgatattatgcaaatcgggcacgatttcatggcacaagacccaaactaccaggatatgttcagttggtccgattatcccctggacttggatatttatccgagcaatgtgccgctcggccctgtcgacgtgcctatgccaacatttgcagaccttagcgacatgtcatcgtcaaattcggaacatataggctcttctcggggatctatacacacgagaagtacgtctatcatgtcgattggagattttgagcaagcaatcaagcctgctgatatgagcatggccactccaacagatgctacagttccagaattcgaggtcgtcattgccgctgagtctgcatggccgctagctcgatgcaatcctctagtatactctggagcatgcccgagaactgccatcgttcacttagaatgtctcgagcaaaagtcgaaacatgagggcacatggaatgccctagagcaatatcttgaacgggtcgattgggatgcatccgatttggcatcagtagtgccaatgaactcaagaacacgcgacaagatgctcgcaattacgcaaacgtttcttcacaaagctctcgagatccatcgcggaggtatacatagccagaataagcgttatgcaagtccaggactgctcacattcctagtactacctccttctaaaattttggagtacttcctacgaagctatgtccgaaatttatcattcttctactctttggttttctccggctgtgtagatccaaatgagatgattcaaaacaaccaagcggcaacactattggtattgcttatgattgcgcaaggcgccaacgccgttccaacagcagaagctcgggcgctttctgcgggattgatagagacttgtagaatctccctcttcgacatcattgagaaggatattgagatgtgtgccgacccgatagtcttacgctgtgctcttctgttcacattacttggcgcatggagtggtgataagtggctaatggacattgccatgggacagcgcggcatgtacctttcgatgttgaagcatgccggaatgttcgaccggcaaccctccatggtaccctccttgagcagccctgtgaatgtcgagttggcatggcgttcttggctgcatcgagagacccaaaatcgtctagcttacaactgggtcatggttgatcaagaacttagccttttccatgacacagccccaatgttggctgtcagtgacctctgtgctccgttgccgagtccagaagcactgttcatgtcggccactgctgatcaatggatgcttgccattcaatccatatacgcctgtccaaccaataccaacccgcaactcatctcaacatcatctctggcgccatcactttttgatttattccaggatttcctcaatgactctttaccccgacaacatacgagtcctacgccgcatcagctgaggctcctcttgcatcccctgcagtcgctactgtgccacttgcggcaaatgctctcatgcttctctgacgtattgaatacgaggattccctcctcaaggacagtcacgaaagcgtccaccatgtcacgcctggaggaagtgcaggcccttctccaaagatggtatgaactcagcatcacctacttcaaggccaatccaacttgcgctattagcaagacaaaccttgttttgtatcatcttatctcacttaacgccgtaaccaacttcgctgagatagagcgtctcgcgcggagggagggattcgagggatcatactgggagcttggtctgcgtcacaagcgctgcatctaccagcgcgaagaagcaatatttcactgtggccaagtgttgcggctcgtacggacaatgccagtggatcggcggccgtcctggtggagcgcagcaatatatcgcgcctcgcttattctctggacggatagtatctcacgactggaccctaacttccagaaacgagatgagacaggatctcctgtggctatcgatcaagtaacgccagaagatccggtggtaattgcatacctctggagcggcaaaggtgttccagtgctaatgcaacgaaatggctctgcgactagtctggacaagccatccgacattcttgactacgcaacaaagacactcgaaagtggtgtcagctcccgttttagtgatggcatcagacggaagctcattgctctgaacaataattggagcattgatgagctcaacgtcgccagtctttag

SEQ ID NO: 18788 - protein, 778 aa, Muscodor strobelii
  misc_feature: SGI Peptide ID NO. 566305
  misc_feature (2)..(777): NCBI GI: 4520324 Blast Desc: CMR1 [Colletotrichum lagenarium]
  misc_feature (8)..(770): NCBI GI: 7141324 Blast Desc: AF230811_1 transcription factor Pig1p [Magnaporthe grisea]
  misc_feature (8)..(770): NCBI GI: 39971799 Blast Desc: MGG_07215 [Magnaporthe grisea 70-15] gi|145019710|gb|EDK03938.1| MGG_07215 [Magnaporthe grisea 70-15]
  misc_feature (104)..(769): NCBI GI: 1055333 Blast Desc: pig1 [Magnaporthe grisea]
  misc_feature (67)..(774): NCBI GI: 116179822 Blast Desc: CHGG_00539 [Chaetomium globosum CBS 148.51] gi|88184836|gb|EAQ92304.1| CHGG_00539 [Chaetomium globosum CBS 148.51]
  misc_feature (33)..(768): NCBI GI: 171691737 Blast Desc: protein product [Podospora anserina] gi|170945817|emb|CAP72617.1| protein product [Podospora anserina]
  misc_feature (138)..(764): NCBI GI: 189194625 Blast Desc: transcription factor Cmr1 [Pyrenophora tritici-repentis Pt-1C-BFP] gi|187979215|gb|EDU45841.1| transcription factor Cmr1 [Pyrenophora tritici-repentis
  misc_feature (113)..(764): NCBI GI: 161958693 Blast Desc: transcription factor Bmr1 [Bipolaris oryzae]
  misc_feature (113)..(764): NCBI GI: 114809982 Blast Desc: transcription factor Cmr1 [Cochliobolus heterostrophus]
  misc_feature (1)..(420): NCBI GI: 261352047 Blast Desc: CMR1 [Verticillium albo-atrum VaMs.102]
MTIDPRISQYETPPEKNSPSNSQLSSEDFPSPHTRLDGLDDIMQIGHDFMAQDPNYQDMFSWSDYPLDLDIYPSNVPLGPVDVPMPTFADLSDMSSSNSEHIGSSRGSIHTRSTSIMSIGDFEQAIKPADMSMATPTDATVPEFEVVIAAESAWPLARCNPLVYSGACPRTAIVHLECLEQKSKHEGTWNALEQYLERVDWDASDLASVVPMNSRTRDKMLAITQTFLHKALEIHRGGIHSQNKRYASPGLLTFLVLPPSKILEYFLRSYVRNLSFFYSLVFSGCVDPNEMIQNNQAATLLVLLMIAQGANAVPTAEARALSAGLIETCRISLFDIIEKDIEMCADPIVLRCALLFTLLGAWSGDKWLMDIAMGQRGMYLSMLKHAGMFDRQPSMVPSLSSPVNVELAWRSWLHRETQNRLAYNWVMVDQELSLFHDTAPMLAVSDLCAPLPSPEALFMSATADQWMLAIQSIYACPTNTNPQLISTSSLAPSLFDLFQDFLNDSLPRQHTSPTPHQLRLLLHPLQSLLCHLRQMLSCFSDVLNTRIPSSRTVTKASTMSRLEEVQALLQRWYELSITYFKANPTCAISKTNLVLYHLISLNAVTNFAEIERLARREGFEGSYWELGLRHKRCIYQREEAIFHCGQVLRLVRTMPVDRRPSWWSAAIYRASLILWTDSISRLDPNFQKRDETGSPVAIDQVTPEDPVVIAYLWSGKGVPVLMQRNGSATSLDKPSDILDYATKTLESGVSSRFSDGIRRKLIALNNNWSIDELNVASL

SEQ ID NO: 18789 - DNA, 289 bp, Muscodor strobelii
  misc_feature: SGI EST ID NO. CUFF.44122.0
  misc_feature: Variant of the nucleotide sequence at SEQ ID NO 18787
gattgatagagacttgtagaatctccctcttcgacatcattgagaaggatattgagatgtgtgccgacccgatagtcttacgctgtgctcttctgttcacattacttggcgcatggagtggtgataagtggctaatggacattgccatgggacagcgcggcatgtacctttcgatgttgaagcatgccggaatgttcgaccggcaaccctccatggtaccctccttgagcagccctgtgaatgtcgagttggcatggcgttcttggctgcatcgagagacccaaaatcg

SEQ ID NO: 18790 - DNA, 846 bp, Muscodor strobelii
  misc_feature: SGI cDNA ID NO. 566306
  misc_feature: Encodes the peptide sequence at SEQ ID NO 18791
atgtctccttcagccatgacagactcagtgccagccagctctgctgcccagcctatgagtaaccaatcgaaaccgttggccgggaaagttgctctgattaccggagctggtcggggaataggtcgtggcatcgccctagagctcggcaaacgcggagcgtccattgctgtcaattatggccgcagctccagttccgcagatgccgtcgtaggcgagctggcgaagcttggctctaagtctgtagcccttcaagccgacatttccaagccaacagaggtcgccgctctctttgacaaggctttagcacactttggacatattgactacgtcatctctaattcgggtatggaggtgtggtgcgaggaaaccgatgtgacaccagagttgtttgaccaagttttcaacctcaactgccgcggacagttcttcgttgcccagcagggtctcaagcactgcagcgagggcgggcgcattgtcttaacatcgtcaattgctgcacagatggccgggatcccaaaccacgctttatacgctgggtccaaagctgcagtagaaggcttcacgcgtgcgttcgcagtggactgcggtcgcaagcgcattacatgcaatgctatcgcacctggtggtattcaaaccgatatgttcgatgagaacagttggcattatgttcccggcgggtacaaggggatggatatcgatactatcaaaaatggccttcgcaagatgtgcccgcttgatcgtgtcggcgagccagctgatatcggcaaggccgtatattgtctgatcagcgacgaaggcgaatggatcaatggccaagttatccgatgctccggcggcggtgtctaa

SEQ ID NO: 18791 - protein, 281 aa, Muscodor strobelii
  misc_feature: SGI Peptide ID NO. 566306
  misc_feature (29)..(196): Pfam Id: PF00106 Pfam Desc: short chain dehydrogenase
  misc_feature (1)..(280): NCBI GI: 261352039 Blast Desc: versicolorin reductase [Verticillium albo-atrum VaMs.102]
  misc_feature (1)..(281): NCBI GI: 39971801 Blast Desc: MGG_07216 [Magnaporthe grisea 70-15] gi|13570027|gb|AAG29497.2|AF290182_1 tetrahydroxynaphthalene reductase [Magnaporthe grisea] gi|57639516|gb|AAW55622.1| grisea]
  misc_feature (1)..(279): NCBI GI: 14333986 Blast Desc: hydroxynaphthalene reductase [Ophiostoma floccosum]
  misc_feature (1)..(281): NCBI GI: 15988305 Blast Desc: hydroxynaphthalene reductase [Ophiostoma floccosum]
  misc_feature (1)..(273): NCBI GI: 37787186 Blast Desc: tetrahydroxynaphthalene reductase [Ceratocystis resinifera]
  misc_feature (23)..(281): NCBI GI: 212537923 Blast Desc: versicolorin reductase, [Penicillium marneffei ATCC 18224] gi|210068859|gb|EEA22950.1| versicolorin reductase, [Penicillium marneffei ATCC 18224]
  misc_feature (24)..(280): NCBI GI: 156034759 Blast Desc: SS1G_13315 [Sclerotinia sclerotiorum 1980] gi|154698718|gb|EDN98456.1| SS1G_13315 [Sclerotinia sclerotiorum 1980]
  misc_feature (18)..(279): NCBI GI: 85092151 Blast Desc: tetrahydroxynaphthalene reductase [Neurospora crassa OR74A] gi|28920655|gb|EAA30016.1| tetrahydroxynaphthalene reductase [Neurospora crassa OR74A]
  misc_feature (26)..(279): NCBI GI: 171678996 Blast Desc: protein product [Podospora anserina] gi|170937569|emb|CAP62226.1| protein product [Podospora anserina]
  misc_feature (18)..(279): NCBI GI: 154936774 Blast Desc: tetrahydroxynaphthalene reductase [Sordaria macrospora]
  misc_feature (8)..(279): SWISSPROT Homolog: EC 1.1.1.252 Tetrahydroxynaphthalene reductase
MSPSAMTDSVPASSAAQPMSNQSKPLAGKVALITGAGRGIGRGIALELGKRGASIAVNYGRSSSSADAVVGELAKLGSKSVALQADISKPTEVAALFDKALAHFGHIDYVISNSGMEVWCEETDVTPELFDQVFNLNCRGQFFVAQQGLKHCSEGGRIVLTSSIAAQMAGIPNHALYAGSKAAVEGFTRAFAVDCGRKRITCNAIAPGGIQTDMFDENSWHYVPGGYKGMDIDTIKNGLRKMCPLDRVGEPADIGKAVYCLISDEGEWINGQVIRCSGGGV

SEQ ID NO: 18792 - DNA, 1244 bp, Muscodor strobelii
  misc_feature: SGI EST ID NO. CUFF.44131.0
  misc_feature: Variant of the nucleotide sequence at SEQ ID NO 18790
tcgacggctactgtgcccaacttccccaaacaaagtcctgtccattgccggagctccagagatgagggacccaccacctgttataagtgatggaggctctagaaagtctcaagcagcgtgaagtgtgtctcctgtacttttcccttctgtttcgtatcatcccaattattcaaggtaaccttctctttaccaacttgaaatatttaacctcaaagctccgtccctgttcaacatcaaaatgtctccttcagccatgacagactcagtgccagccagctctgctgcccagcctatgagtaaccaatcgaaaccgttggccgggaaagttgctctgattaccggagctggtcggggaataggtcgtggcatcgccctagagctcggcaaacgcggagcgtccattgctgtcaattatggccgcagctccagttccgcagatgccgtcgtaggcgagctggcgaagcttggctctaagtctgtagcccttcaagccgacatttccaagccaacagaggtcgccgctctctttgacaaggctttagcacactttggacatattgactacgtcatctctaattcgggtatggaggtgtggtgcgaggaaaccgatgtgacaccagagttgtttgaccaagttttcaacctcaactgccgcggacagttcttcgttgcccagcagggtctcaagcactgcagcgagggcgggcgcattgtcttaacatcgtcaattgctgcacagatggccgggatcccaaaccacgctttatacgctgggtccaaagctgcagtagaaggcttcacgcgtgcgttcgcagtggactgcggtcgcaagcgcattacatgcaatgctatcgcacctggtggtattcaaaccgatatgttcgatgagaacagttggcattatgttcccggcgggtacaaggggatggatatcgatactatcaaaaatggccttcgcaagatgtgcccgcttgatcgtgtcggcgagccagctgatatcggcaaggccgtatattgtctgatcagcgacgaaggcgaatggatcaatggccaagttatccgatgctccggcggcggtgtctaaggttgatcgattttcgtcgcaatacaggaaagcaggagctctctcacgtcagatagtggcatatgatgcatcagaagagaatgtaaagctaaaataacatagagaagtcagcatggttttgagtaggattcgttcaatgtgcccaatagaattacacaag

SEQ ID NO: 18793 - DNA, 828 bp, Muscodor strobelii
  misc_feature: SGI cDNA ID NO. 566307
  misc_feature: Encodes the peptide sequence at SEQ ID NO 18794
atgtctccttcagccatgacagactcagtgccagccagctctgctgcccagcctatgagtaaccaatcgaaaccgttggccgggaaagttgctctgattaccggagctggtcggggaataggtcgtggcatcgccctagagctcggcaaacgcggagcgtccattgctgtcaattatggccgcagctccagttccgcagatgccgtcgtaggcgagctggcgaagcttggctctaagtctgtagcccttcaagccgacatttccaagccaacagaggtcgccgctctctttgacaaggctttagcacactttggacatattgactacgtcatctctaattcgggtatggaggtgtggtgcgaggaaaccgatgtgacaccagagttgtttgaccaagttttcaacctcaactgccgcggacagttcttcgttgcccagcagggtctcaagcactgcagcgagggcgggcgcattgtcttaacatcgtcaattgctgcacagatggccgggatcccaaaccacgctttatacgctgggtccaaagctgcagtagaaggcttcacgcgtgcgttcgcagtggactgcggtcgcaagcgcattacatgcaatgctatcgcacctggtggtattcaaaccgatatgttcgatgagaacagttggcattatgttcccggcgggtacaaggggatggatatcgatactatcaaaaatggccttcgcaagatgtgcccgcttgatcgtgtcggcgagccagctgatatcggcaaggccgtatattgtctgatcagcgacgaaggcgaatggatcaatggtaggttgttttcctga

SEQ ID NO: 18794 - protein, 275 aa, Muscodor strobelii
  misc_feature: SGI Peptide ID NO. 566307
  misc_feature (29)..(196): Pfam Id: PF00106 Pfam Desc: short chain dehydrogenase
  misc_feature (1)..(274): NCBI GI: 261352039 Blast Desc: versicolorin reductase [Verticillium albo-atrum VaMs.102]
  misc_feature (1)..(273): NCBI GI: 37787186 Blast Desc: tetrahydroxynaphthalene reductase [Ceratocystis resinifera]
  misc_feature (1)..(274): NCBI GI: 14333986 Blast Desc: hydroxynaphthalene reductase [Ophiostoma floccosum]
  misc_feature (1)..(274): NCBI GI: 39971801 Blast Desc: MGG_07216 [Magnaporthe grisea 70-15] gi|13570027|gb|AAG29497.2|AF290182_1 tetrahydroxynaphthalene reductase [Magnaporthe grisea] gi|57639516|gb|AAW55622.1| grisea]
  misc_feature (1)..(274): NCBI GI: 15988305 Blast Desc: MGG_07216 [Magnaporthe grisea 70-15] gi|13570027|gb|AAG29497.2|AF290182_1 tetrahydroxynaphthalene reductase [Magnaporthe grisea] gi|57639516|gb|AAW55622.1| grisea]
  misc_feature (23)..(274): NCBI GI: 212537923 Blast Desc: versicolorin reductase, [Penicillium marneffei ATCC 18224] gi|210068859|gb|EEA22950.1| versicolorin reductase, [Penicillium marneffei ATCC 18224]
  misc_feature (24)..(274): NCBI GI: 156034759 Blast Desc: SS1G_13315 [Sclerotinia sclerotiorum 1980] gi|154698718|gb|EDN98456.1| SS1G_13315 [Sclerotinia sclerotiorum 1980]
  misc_feature (18)..(275): NCBI GI: 85092151 Blast Desc: tetrahydroxynaphthalene reductase [Neurospora crassa OR74A] gi|28920655|gb|EAA30016.1| tetrahydroxynaphthalene reductase [Neurospora crassa OR74A]
  misc_feature (26)..(275): NCBI GI: 171678996 Blast Desc: protein product [Podospora anserina] gi|170937569|emb|CAP62226.1| protein product [Podospora anserina]
  misc_feature (18)..(275): NCBI GI: 154936774 Blast Desc: tetrahydroxynaphthalene reductase [Sordaria macrospora]
  misc_feature (8)..(274): SWISSPROT Homolog: EC 1.1.1.252 Tetrahydroxynaphthalene reductase
MSPSAMTDSVPASSAAQPMSNQSKPLAGKVALITGAGRGIGRGIALELGKRGASIAVNYGRSSSSADAVVGELAKLGSKSVALQADISKPTEVAALFDKALAHFGHIDYVISNSGMEVWCEETDVTPELFDQVFNLNCRGQFFVAQQGLKHCSEGGRIVLTSSIAAQMAGIPNHALYAGSKAAVEGFTRAFAVDCGRKRITCNAIAPGGIQTDMFDENSWHYVPGGYKGMDIDTIKNGLRKMCPLDRVGEPADIGKAVYCLISDEGEWINGRLFS

SEQ ID NO: 18795 - DNA, 1244 bp, Muscodor strobelii; identical to SEQ ID NO: 18792
  misc_feature: SGI EST ID NO. CUFF.44131.0
  misc_feature: Variant of the nucleotide sequence at SEQ ID NO 18793

SEQ ID NO: 18796 - DNA, 1260 bp, Muscodor strobelii
  misc_feature: SGI cDNA ID NO. 566308
  misc_feature: Elevated expression when VOC is produced
  misc_feature: Encodes the peptide sequence at SEQ ID NO 18797
atggcaagcaacggaaaatctcgacagccccgtttgcgagcatcatgtgatggatgttttctggccaaggtcaaatgctcgaaagctcgacctatctgttcccgctgtctagcctgtggaatcgtatgtcactattcaccctcaagcagagctggcaagccaaaattagaccatagccttaactcgcaccaaagcggacacccggatcttcaacagcaaatgcattcactcattgatgaaaagtcgagtccatattccacattacaacaggcaccaccagaccagatgttcccattcgagacaggctggactacaccaccagccagcgtggagggatccatgagcaggaatccatcgatatcacatggcctgcccttactcagtattgacgaaaggacattgagtgaccaagaaccaatgtcagccccttcagaactatattcggccacgatgccttggacccctccgacagatgttccatgcacagtatttcccgatatgccagttacagttgctcatatgcaggttccgcatgcccgatctcagtcatttgataccggaatgtctgtgcctatctcatggaacgatcctctttcacatgacatgatctcgtattctcaaatacaaactcctactatgccgtctaattattttcctagccctaccgcaacgccaactatgcggtcaatagcgtcacatcaaaaaggcacgccaaccagctcgtgtacttgcttcagcagctgtctacaatctctccaggcactgcacaacgcctcgtcgccgaatttgcctccttttgacctcgtcctatctctgaatcgcaaggctgttgaaggatgtggcgccatgcttggttgcaacgtttgcttcaggcggtcgggagctcacactgctacgatgctcttggctacaattatcggcaaagtcacatccttttacaaagccgcaactcattcttatttcgaatccggcaatatgaagattatggaaagcaatgccagtaatggtactggaagcttgggtgtcagttttggtgcttaccaactcaatggagaagatggacaatggtttcagcttgagattttggctcgtgagctgcgtaagctcgaggaagtttacgtcaaatttcgagatgtgtgcaatgatgcgtctgatgatcccgaggtcactcaagtcgtgattgggcatcttggatacaatctgggctcggcccttgacgttgttagccaaaggaaaggagacggcaaattcatggcttga

SEQ ID NO: 18797 - protein, 419 aa, Muscodor strobelii
  misc_feature: SGI Peptide ID NO. 566308
  misc_feature (14)..(52): Pfam Id: PF00172 Pfam Desc: Fungal Zn(2)-Cys(6) binuclear cluster domain
  misc_feature (3)..(417): NCBI GI: 110556601 Blast Desc: transcription factor [Colletotrichum lagenarium]
  misc_feature (1)..(414): NCBI GI: 171691739 Blast Desc: protein product [Podospora anserina] gi|170945818|emb|CAP72618.1| protein product [Podospora anserina]
  misc_feature (1)..(414): NCBI GI: 145612573 Blast Desc: MGG_07218 [Magnaporthe grisea 70-15] gi|145019713|gb|EDK03941.1| MGG_07218 [Magnaporthe grisea 70-15]
  misc_feature (6)..(412): NCBI GI: 24415984 Blast Desc: [Glarea lozoyensis]
  misc_feature (5)..(371): NCBI GI: 212538731 Blast Desc: AflR-like C6 zinc cluster transcription factor, [Penicillium marneffei ATCC 18224] gi|210069263|gb|EEA23354.1| AflR-like C6 zinc cluster transcription factor, [Penicillium ATCC
  misc_feature (4)..(55): NCBI GI: 28629054 Blast Desc: AF487263_5 Zn-II 2Cys6 regulatory protein [Leptosphaeria maculans]
  misc_feature (7)..(385): NCBI GI: 115433817 Blast Desc: [Aspergillus terreus NIH2624] gi|114189897|gb|EAU31597.1| [Aspergillus terreus NIH2624]
  misc_feature (11)..(334): NCBI GI: 119499678 Blast Desc: C6 zinc finger domain protein [Neosartorya fischeri NRRL 181] gi|119414761|gb|EAW24699.1| C6 zinc finger domain protein [Neosartorya fischeri NRRL 181]
  misc_feature (3)..(54): NCBI GI: 169616446 Blast Desc: SNOG_11395 [Phaeosphaeria nodorum SN15] gi|111059983|gb|EAT81103.1| SNOG_11395 [Phaeosphaeria nodorum SN15]
  misc_feature (3)..(53): NCBI GI: 212539031 Blast Desc: PMAA_100910 [Penicillium marneffei ATCC 18224] gi|210069413|gb|EEA23504.1| PMAA_100910 [Penicillium marneffei ATCC 18224]
  misc_feature: Useful for introducing or modulating the production of volatile compounds
MASNGKSRQPRLRASCDGCFLAKVKCSKARPICSRCLACGIVCHYSPSSRAGKPKLDHSLNSHQSGHPDLQQQMHSLIDEKSSPYSTLQQAPPDQMFPFETGWTTPPASVEGSMSRNPSISHGLPLLSIDERTLSDQEPMSAPSELYSATMPWTPPTDVPCTVFPDMPVTVAHMQVPHARSQSFDTGMSVPISWNDPLSHDMISYSQIQTPTMPSNYFPSPTATPTMRSIASHQKGTPTSSCTCFSSCLQSLQALHNASSPNLPPFDLVLSLNRKAVEGCGAMLGCNVCFRRSGAHTATMLLATIIGKVTSFYKAATHSYFESGNMKIMESNASNGTGSLGVSFGAYQLNGEDGQWFQLEILARELRKLEEVYVKFRDVCNDASDDPEVTQVVIGHLGYNLGSALDVVSQRKGDGKFMA

SEQ ID NO: 18798 - DNA, 2649 bp, Muscodor strobelii
  misc_feature: SGI EST ID NO. CUFF.44143.0
  misc_feature: Variant of the nucleotide sequence at SEQ ID NO 18796
ccatgcccaggtacaggcgctttcagtattgccaagagcctttagcatgccacatacgtatccttgcgcctcgaaacctagcctagcatagtctgaatgtgtatgaccgcgttgcgcttagtagtcttcctcacagggaccagagtcctcagccgtttgctgcagccaggccacatcccagcacctgcatgcatacactgccttgggaagtagtttgacctttgccgtcttcttatccttacgagctatgctctctgctagccctgcgagatccagattttcagtgcagatgagagcgtgacccccctttgatgggctggcctcccactatgttggagcctatccaaaaggctttcaatcagcaagatttacgctcaaatagctccatgatccgatgtttggtttttccttccccatatttcatcagacattaatgactttctcatctgaccaagcctgcaagattccattttgcctttgacgtaccctgtaatgaggatagcacataccgcccgttctgcgtgaagaccaacttccacctcctacctggtcctcatctagctctcgacatacattcttgtaagcttcgtgctaccatctacgaaatcgagtcctggctgtacacagcatgcccaacctatattacgtctctcgcttctgcgacctgctcatctgaaaaacagccagtatctattttactctctaacaatgacatcgacttgtataaacgctgtcgtctcattactttatgagtgttaagtaacatcactatggcaagcaacggaaaatctcgacagccccgtttgcgagcatcatgtgatggatgttttctggccaaggtcaaatgctcgaaagctcgacctatctgttcccgctgtctagcctgtggaatcgtatgtcactattcaccctcaagcagagctggcaagccaaaattagaccatagccttaactcgcaccaaagcggacacccggatcttcaacagcaaatgcattcactcattgatgaaaagtcgagtccatattccacattacaacaggcaccaccagaccagatgttcccattcgagacaggctggactacaccaccagccagcgtggagggatccatgagcaggaatccatcgatatcacatggcctgcccttactcagtattgacgaaaggacattgagtgaccaagaaccaatgtcagccccttcagaactatattcggccacgatgccttggacccctccgacagatgttccatgcacagtatttcccgatatgccagttacagttgctcatatgcaggttccgcatgcccgatctcagtcatttgataccggaatgtctgtgcctatctcatggaacgatcctctttcacatgacatgatctcgtattctcaaatacaaactcctactatgccgtctaattattttcctagccctaccgcaacgccaactatgcggtcaatagcgtcacatcaaaaaggcacgccaaccagctcgtgtacttgcttcagcagctgtctacaatctctccaggcactgcacaacgcctcgtcgccgaatttgcctccttttgacctcgtcctatctctgaatcgcaaggctgttgaaggatgtggcgccatgcttggttgcaacgtttgcttcaggcggtcgggagctcacactgctacgatgctcttggctacaattatcggcaaagtcacatccttttacaaagccgcaactcattcttatttcgaatccggcaatatgaagattatggaaagcaatgccagtaatggtactggaagcttgggtgtcagttttggtgcttaccaactcaatggagaagatggacaatggtttcagcttgagattttggctcgtgagctgcgtaagctcgaggaagtttacgtcaaatttcgagatgtgtgcaatgatgcgtctgatgatcccgaggtcactcaagtcgtgattgggcatcttggatacaatctgggctcggcccttgacgttgttagccaaaggaaaggagacggcaaattcatggcttgagacactttattcgaacgttccacacaacagcgtcaactataagaattagaagtgcgtggagaaccacgaaggcgggcttcaaagtatcgatctttgttactacccgttacgctcttttgagagacgagacttttataaagacacggacgcggaatcatttacaggtgaaccgatgttagggcaataaaatgcagcgagagaggataagacggaagagaaatgacgaagacataatgaccctgcgtttatgagaaattgaggacggtgtatggctagcggatgtttcagtctacgatatgatggcttacgatataaattataaggatctgtttacgatgacagttgcgatacctttgcctcagtttttgggtactatttccatcgatccttcgagggaaacatccgcatgagttcatatctctgtccggcgtctctcaccgctcctcgcctgatagatggcagttttcaataagacatacatcatttgtttcacagcctgttgtcactagatcgtcatacgtgaggctcacaatggccacgaatatgctcccagcgtcaggacaacctacctgaccacttgatattgggtgagatggtccgcgtccatgcctcagaaatg

SEQ ID NO: 18799 - DNA, 6489 bp, Muscodor strobelii
  misc_feature: SGI cDNA ID NO. 566309
  misc_feature: Encodes the peptide sequence at SEQ ID NO 18800
atggctgaccaaatggcatttctcctatttggagatcagtcactagatacacacggattcctcgccgactttttccgacaaggaaacccaagcgtgctttcgagggaatttctcaggttagccggcgatgctctgagagaggagatagatcagttgcctcgagttgagaggcacaagataccgctattccgaacattacagcaacttaatgagcaatatcattcacagagtatcaagagcccaggcattgatagcgccttactatgtatagcacagctggctcattacatcgatcggtcggagaaggaacatgaagatgtaacaaaacctgagaatacaaaactttctgggctttgtactggtctctttgccgcgactgcgattgcatcgagcccttcgctttcttcactcctccctatcgcagtgcaggtcgtactgatggcattccggaccggatgccatgttgcctcgctatctgagaggctcagcccatcgactgaaaaatcggagagctggacatatgttgttccttcggtcaatgatgtcgaagcgaagagcgtacttttagacttccacaagagtgaaggaatctcacaagcatcacaagcctacatcagcgcagtctcggcgagtaatattgccatatcagggccgccatccacattgaaaactttgctcagcaaaaacctgtttgattcaaggccaaccgctatccccgtgtacgggccttatcatgccccacatttacacgggtcggtgaatattgcgcagatgctacgtctcgatgacgagaaagtgacgactgctttgagcggttcaagacctcgaagtggtgtcatgtcatgcgtcactggccgcgccttcacagataccgataccaagtctcttctcacttctgttgttcatgaaatactcagcgagcctcttttctttcacaaagcgctgaaaggaagcgtcgacgaggctcgtcaatttcaagggtctcgcatcttggtgattccatttgggcctacccaagctgccagcacgctggccaatgtgctcaagaatgagaccaagctcgaagttgtcttgcggtcacctcctcaggtatccagggctagtagtgccacgagaattggcaatcatggttctacaggaaagtgcaagttagctatcgtgggcatggccggtcgctttccagactctgagagcgttgaagctttatgggaccttctcgagaaaggtattgacgcccaccgagttattcctgcagatcgattccctgtcgaaactcatgtcgacatcactggaaaggcaatcaacacaagtcatacgccaaacggcaactggatcaagaacccgggccactttgacccacgtttctttaatatgtctccacgtgaggcattccaaacggatccaatgcagcggatggctctgttgactgcttatgaggctttggaaatgtctggttatgtgccaaatcggacaccgtcaactaggcttgaccgtgttggtacattttacggccagacttcagatgattggcgagaaattaatgccgcacaagaagtagacacctacttcatcacgggtggtgtgcgagctttcggacctggccgtatcaactatcattttggcttcagtgggccaagtctgaatatcgataccgcttgctcatctagcgctgcagccttgcaagttgcctgcacgtccctttgggcgaaagaatgtgatactgctatctgtggaggtctgtcgtgcatgaccaactcggatatcttctcgggccttagccgcggacagttcctttcgaagaataacaactgcaacacatttgacaatgatgcagacggatattgtagagctgatgcctgcgcttccattgtagtcaaacgacttgatgacgccgtggccgataaggacaatattttggctgtgatcttgggttctcagaccaatcactcagccgatgccatatcaatcacacatccacatggtccgacgcaatcactgctatcttcggcaattttagatgaggcaggtgtggatcctcacgatgttgattatgttgagatgcacggtacaggtacgcaggctggtgatggcacagagatggtgtccgtcacgagtgtctttgcccctgctgaacgtcaccgaccagtggacaggccgttgtaccttggcgcgatcaagtcaaacgtcggacacggcgaagctgcttccggtgtaactgccttgattaaagttctgatgatgctaaagaagaacgctatcccgcctcatatcggcatcaagggagagatcaacaagactttcccaaaggacctaggagagcgaggcgtgaatatcgcattccataagactcctttcgctcgaaaagatgggaaaccccgcagagtgtttgtgaacaatttcagcgctgccggaggtaacactggccttctccttgaagacggcccacgatataagaatgctgtcatagacccaagaagtcaacacgtgataaccataactgccaagtccaaagctgcgatgatacgcaacgctgaacagttagtcaggtggatggaggagaacccctcaacctccgtctctcatgttgcttacaccacaactgctcgtcggattcaacactattggcgcatgaatgtcactgccggaagcctgatagaagcacaggaagccatcaaagaacgcttaaaatctaatttcgttcccgtttcacccgaacagcccaaggttgcattcatgtttaccggtcaaggctcacactatgctgcacttggcaaggagttgtacaattactactcggtcttccgtcaagcaattgacgagtataatcagcttgcggtgattcatggcttcccgtctttcttgcctctcatcgatggtagcgagcctgaggtccacaagttgtcccctgtgattgttcaacttggcctggcttcgttcgaaatggctctggccaaactctggaaatcttggggcattgagcctggcgttgtcctaggccatagtctcggtgaatatgctgcgttgcatgttgcaggcgttttatctgcgagcgacactatatatctcgtcggggctcgcgcacagctcttggtacaaaaatgcaccgctggtactcatgcaatgcttgcagtccagggatcggtcgagacggtgacagaggccttaggtgctcgcgcgaaatcgactaacattgcctgcatcaatggtccccgtgagaccgttctgagtgggacgtctacagaagcggcacaaattgccgatcaacttagtgccgccggcttcaagtgcactcaactcaaggttccgtttgctttccattctgaacaagtcgtgcccattctagatgatttcgagaaactcgcacgatcagtcaaattccacagacctcaagtgccggtgatttcgcctctgcttgggaaactggtcgaaaacgaaccaatcgatcctctgtacctccgaaatcacgcccgagaagccgtcaatttcctcggtggccttgtttcggcacaggaatcaggcgtcattgacgaaaagacggtatggctcgaggtcgggccccatccggtttgcgccaacatggttaaggccgcctttggtgcaaccaccattgcggtcccttcgcttcgtcgcaacgaacctcctttcagaaccctcagtgccactctgtgcacgcttcactcggcgggtcttaatctggattggaacgaataccatcgcgatttcgattcaagcgtccgcctcttggatctaccaagctatgcttttgatctgaaaaattattggctgcaatacactggcgattggtgcatcacaaagaatcgtggggcgcttgcagcacccacgtctggaaccgtggactcatcagtcaagcccaagttgtccactacaaccgtgcagaagatcacgaaggaagaagtccaaggtgatgttgtcattctggagactgaatcagatctaaccgaggagaatatgcgaaagatatgccttggtcatcgcgtcaatggtactacacttaccccatcaacactctacggcgatatggccatgaccatctgcgattatggctataaacttgttcgccctaacgttgagaatgtgggcataaacgtcagtcaagtcgaggtgccaaagactctcatctttgacaccaaggcgaccagtcagattttgagaatgtctgtcaaactcaatgctgctgaaaatacggccgcaatttcatggactactggtgagggtgccaagaagcaggagcacgcgacttgtacagttctctttggcgataagcaagagtggctaaatgagttcgaacgtgttagctatctaatcaaggcacgcatcgatggtctcaaagcagccgagcagcgcggagatgcttccaagctcggtcgaggtcttgcctacaaacttttcactgcccttgtggactacgatcatcgttataaaggcatggaatctgtcattgttgatagtgagacgtgcgaggcgactgccacagtcaaattccagacgagccccgaagatggtgtgtttttccaagcaccttactggctggattcagcgtgccacatatcgggttttatctgcaatgccaccgacgcggtcgactctcgcgagcaagtgtacatatctcacggttggggtacaatgcggtttgctgaaatgctggaacgccacaaaacatatcagagctatattcgcatgcagaatgtcaaaggcactaagatgatggccggcgatgcatatgtcttcgatggggatcgactcatcggcatagctggtgatattaggttccaggccatccctcgcaaggtgttaaatattgtgcttccacctcaaggtgctaccgccgccgccgccgctactcctactcgtgtcgctaaagctatcccagccaaggcccagaacaaagagaagaagcaagtcacttcgaagaacctacccaccgtgaataagaagctcaccaagacgtctgtcgttgtccaagttatggatattgtcgccaaggaaacaggcgttggccacgatgagcttgctgacaatattgcattctcagaccttggtgtcgattcacttatgggcttgaccataagcggtcgccttcgagaggaacttgagctcaatgttgattctcatgctttcaatgatcatgctactgtcggcgccttcaagaaatttcttgttcaattcgagtcgacttcggtcgtcgtcgaagagtccagcaactcgggcggtagcgaaaatagtgatgacgacgatatgtcgtcagattccgaagtcactacaccgccagacgatagtgagaaaggctctatcaaaggcgacggcgcccgagccgattctggaaacaatgcagagctacgtcaaatcattcgggacacaatatgctctgagatgggcgtagaagttgaggaggtcattgccgctcctgatttggctgcacttggtatggattcactcatgagtctgtctattctcggtatcctacgagagaagactggcctcaacattcccggtgatctgttgggccacaatccatcattgaagttcatcgagcggactcttggagtggaggatgcacccaagaaagtttcaccagcgaagctctccgaatcgaagtcgacgaaaactgtcgtcaagaaagaatcgacaagtctgacagtgtccaagtccgaggcatctatcgttgatgcatatcctcaccgcaaggcttcctcagtgcttctacaaggcaatcatcgtactgctgcccgtcaactattcatgattcccgatggaagtggtagtgcgacatcatacaccgagattacagagctaggccctgacgtcgccgtgtggggcatgttttcaccttttatgaagactccagaagagtacaaatgtggtgtctacggtatggcttcgaagtttattcaagagatgaagcggcgtcagcctgaagggccatatgccgttgctggttggtcagccggtggtgtcatcgcgtatgaaattgtgaatcaacttacgaaggccgacgacgaggtttcccatcttctgatcatcgatgcaccttgccccatcactatcgaacctctccctgctggcctccatgcttggtttgcttccattggacttttgggcgagggggattccccggaagccaagaaaatcccttcatggctactacctcactttgctgcctcagtcacagccttgtccaactatactgcagagcctatcgccaaggataaatgtccgcaggtcatggctatttggtgtgaagacggtgtctgcaaactacccaccgatccccgccctgatccttatcccacgggccatgctttgttcctcctagacaacagagacgattttggtcctaaccgctgggatgagtatctcgatgtgagcaaaatgacgttccgccatatgcctggaaatcatttctcaatgatgcatggcgacttagccaagcaacttggtggattcatgaaagaaggcattcatttgtaa

SEQ ID NO: 18800 - protein, 2162 aa, Muscodor strobelii
  misc_feature: SGI Peptide ID NO. 566309
  misc_feature (910)..(1232): Pfam Id: PF00698 Pfam Desc: Acyl transferase domain
  misc_feature (382)..(631): Pfam Id: PF00109 Pfam Desc: Beta-ketoacyl synthase, N-terminal domain
  misc_feature (639)..(760): Pfam Id: PF02801 Pfam Desc: Beta-ketoacyl synthase, C-terminal domain
  misc_feature (1660)..(1726): Pfam Id: PF00550 Pfam Desc: Phosphopantetheine attachment site
  misc_feature (1788)..(1854): Pfam Id: PF00550 Pfam Desc: Phosphopantetheine attachment site
  misc_feature (1917)..(2156): Pfam Id: PF00975 Pfam Desc: Thioesterase domain
  misc_feature (1)..(2156): NCBI GI: 159130150 Blast Desc: polyketide synthetase PksP [Aspergillus fumigatus A1163]
  misc_feature (1)..(2156): NCBI GI: 3136092 Blast Desc: polyketide synthase [Aspergillus fumigatus]
  misc_feature (1)..(2156): NCBI GI: 71002828 Blast Desc: conidial pigment polyketide synthase PksP/Alb1 [Aspergillus fumigatus Af293] gi|66853733|gb|EAL94057.1| conidial pigment polyketide synthase PksP/Alb1 [Aspergillus fumigatus
  misc_feature (5)..(2160): NCBI GI: 212537927 Blast Desc: polyketide synthase, [Penicillium marneffei ATCC 18224] gi|210068861|gb|EEA22952.1| polyketide synthase, [Penicillium marneffei ATCC 18224]
  misc_feature (7)..(2156): NCBI GI: 211909601 Blast Desc: polyketide synthase Alb1p [Aspergillus fumigatus]
  misc_feature (1)..(2156): NCBI GI: 3163925 Blast Desc: polyketide synthase [Aspergillus fumigatus]
  misc_feature (11)..(2156): NCBI GI: 211909591 Blast Desc: polyketide synthase Alb1p [Aspergillus fumigatus]
  misc_feature (1)..(2160): NCBI GI: 119482413 Blast Desc: polyketide synthetase PksP [Neosartorya fischeri NRRL 181] gi|119409389|gb|EAW19338.1| polyketide synthetase PksP [Neosartorya fischeri NRRL 181]
  misc_feature (9)..(2160): NCBI GI: 169776467 Blast Desc: [Aspergillus oryzae RIB40] gi|83771435|dbj|BAE61567.1| protein product [Aspergillus oryzae]
  misc_feature (9)..(2160): NCBI GI: 238503167 Blast Desc: polyketide synthetase PksP [Aspergillus flavus NRRL3357] gi|220691627|gb|EED47975.1| polyketide synthetase PksP [Aspergillus flavus NRRL3357]
  misc_feature: Useful for fungicidal and/or biocontrol applications
MADQMAFLLFGDQSLDTHGFLADFFRQGNPSVLSREFLRLAGDALREEIDQLPRVERHKIPLFRTLQQLNEQYHSQSIKSPGIDSALLCIAQLAHYIDRSEKEHEDVTKPENTKLSGLCTGLFAATAIASSPSLSSLLPIAVQVVLMAFRTGCHVASLSERLSPSTEKSESWTYVVPSVNDVEAKSVLLDFHKSEGISQASQAYISAVSASNIAISGPPSTLKTLLSKNLFDSRPTAIPVYGPYHAPHLHGSVNIAQMLRLDDEKVTTALSGSRPRSGVMSCVTGRAFTDTDTKSLLTSVVHEILSEPLFFHKALKGSVDEARQFQGSRILVIPFGPTQAASTLANVLKNETKLEVVLRSPPQVSRASSATRIGNHGSTGKCKLAIVGMAGRFPDSESVEALWDLLEKGIDAHRVIPADRFPVETHVDITGKAINTSHTPNGNWIKNPGHFDPRFFNMSPREAFQTDPMQRMALLTAYEALEMSGYVPNRTPSTRLDRVGTFYGQTSDDWREINAAQEVDTYFITGGVRAFGPGRINYHFGFSGPSLNIDTACSSSAAALQVACTSLWAKECDTAICGGLSCMTNSDIFSGLSRGQFLSKNNNCNTFDNDADGYCRADACASIVVKRLDDAVADKDNILAVILGSQTNHSADAISITHPHGPTQSLLSSAILDEAGVDPHDVDYVEMHGTGTQAGDGTEMVSVTSVFAPAERHRPVDRPLYLGAIKSNVGHGEAASGVTALIKVLMMLKKNAIPPHIGIKGEINKTFPKDLGERGVNIAFHKTPFARKDGKPRRVFVNNFSAAGGNTGLLLEDGPRYKNAVIDPRSQHVITITAKSKAAMIRNAEQLVRWMEENPSTSVSHVAYTTTARRIQHYWRMNVTAGSLIEAQEAIKERLKSNFVPVSPEQPKVAFMFTGQGSHYAALGKELYNYYSVFRQAIDEYNQLAVIHGFPSFLPLIDGSEPEVHKLSPVIVQLGLASFEMALAKLWKSWGIEPGVVLGHSLGEYAALHVAGVLSASDTIYLVGARAQLLVQKCTAGTHAMLAVQGSVETVTEALGARAKSTNIACINGPRETVLSGTSTEAAQIADQLSAAGFKCTQLKVPFAFHSEQVVPILDDFEKLARSVKFHRPQVPVISPLLGKLVENEPIDPLYLRNHAREAVNFLGGLVSAQESGVIDEKTVWLEVGPHPVCANMVKAAFGATTIAVPSLRRNEPPFRTLSATLCTLHSAGLNLDWNEYHRDFDSSVRLLDLPSYAFDLKNYWLQYTGDWCITKNRGALAAPTSGTVDSSVKPKLSTTTVQKITKEEVQGDVVILETESDLTEENMRKICLGHRVNGTTLTPSTLYGDMAMTICDYGYKLVRPNVENVGINVSQVEVPKTLIFDTKATSQILRMSVKLNAAENTAAISWTTGEGAKKQEHATCTVLFGDKQEWLNEFERVSYLIKARIDGLKAAEQRGDASKLGRGLAYKLFTALVDYDHRYKGMESVIVDSETCEATATVKFQTSPEDGVFFQAPYWLDSACHISGFICNATDAVDSREQVYISHGWGTMRFAEMLERHKTYQSYIRMQNVKGTKMMAGDAYVFDGDRLIGIAGDIRFQAIPRKVLNIVLPPQGATAAAAATPTRVAKAIPAKAQNKEKKQVTSKNLPTVNKKLTKTSVVVQVMDIVAKETGVGHDELADNIAFSDLGVDSLMGLTISGRLREELELNVDSHAFNDHATVGAFKKFLVQFESTSVVVEESSNSGGSENSDDDDMSSDSEVTTPPDDSEKGSIKGDGARADSGNNAELRQIIRDTICSEMGVEVEEVIAAPDLAALGMDSLMSLSILGILREKTGLNIPGDLLGHNPSLKFIERTLGVEDAPKKVSPAKLSESKSTKTVVKKESTSLTVSKSEASIVDAYPHRKASSVLLQGNHRTAARQLFMIPDGSGSATSYTEITELGPDVAVWGMFSPFMKTPEEYKCGVYGMASKFIQEMKRRQPEGPYAVAGWSAGGVIAYEIVNQLTKADDEVSHLLIIDAPCPITIEPLPAGLHAWFASIGLLGEGDSPEAKKIPSWLLPHFAASVTALSNYTAEPIAKDKCPQVMAIWCEDGVCKLPTDPRPDPYPTGHALFLLDNRDDFGPNRWDEYLDVSKMTFRHMPGNHFSMMHGDLAKQLGGFMKEGIHL

SEQ ID NO: 18801 - DNA, 1030 bp, Muscodor strobelii
  misc_feature: SGI EST ID NO. CUFF.44174.0
  misc_feature: Variant of the nucleotide sequence at SEQ ID NO 18799
gagagctggacatatgttgttccttcggtcaatgatgtcgaagcgaagagcgtacttttagacttccacaagagtgaaggaatctcacaagcatcacaagcctacatcagcgcagtctcggcgagtaatattgccatatcagggccgccatccacattgaaaactttgctcagcaaaaacctgtttgattcaaggccaaccgctatccccgtgtacgggccttatcatgccccacatttacacgggtcggtgaatattgcgcagatgctacgtctcgatgacgagaaagtgacgactgctttgagcggttcaagacctcgaagtggtgtcatgtcatgcgtcactggccgcgccttcacagataccgataccaagtctcttctcacttctgttgttcatgaaatactcagcgagcctcttttctttcacaaagcgctgaaaggaagcgtcgacgaggctcgtcaatttcaagggtctcgcatcttggtgattccatttgggcctacccaagctgccagcacgctggccaatgtgctcaagaatgagaccaagctcgaagttgtcttgcggtcacctcctcaggtatccagggctagtagtgccacgagaattggcaatcatggttctacaggaaagtgcaagttagctatcgtgggcatggccggtcgctttccagactctgagagcgttgaagctttatgggaccttctcgagaaaggtattgacgcccaccgagttattcctgcagatcgattccctgtcgaaactcatgtcgacatcactggaaaggcaatcaacacaagtcatacgccaaacggcaactggatcaagaacccgggccactttgacccacgtttctttaatatgtctccacgtgaggcattccaaacggatccaatgcagcggatggctctgttgactgcttatgaggctttggaaatgtctggttatgtgccaaatcggacaccgtcaactaggcttgaccgtgttggtacattttacggccagacttcagatgattggcgagaaa

SEQ ID NO: 18802 - DNA, 1680 bp, Muscodor strobelii
  misc_feature: SGI cDNA ID NO. 566310
  misc_feature: Encodes the peptide sequence at SEQ ID NO 18803
atgattcgaggatatatatttgccctggcacatgcctcggcagctttggcctcaacggtcacttacaactggacaaccacgtgggtatgggcctctccggacggtacctacagaccggtcataggcataaacggcacatggccctgtccaaagatcgaggcaaatgtcaatgacaccattgtcatcaatctgtcgaatgatcttgggaacgagacaacgggcattcactttcacggcatcaatcaggtcaacacgaactatatggatggagccgtcgggaccaatcaatgccccctacccccgggcaaaaatgtgacttacagcttcgtagctgattctgcgggttcattctggtatcattcccatgacattggtcagtatccagatggattccggggaccgctgattgtccacgatcctaacgatccatacttggatcaatatgatgacgatgtcatcattaccgtcacagactggtatcatgatcagagtccaacgctcgttcaaaacatgttggagactaacaacacaaatgacgaccccccacgacccaaggcaattcttgtgaacgagggcagcaatggtcaaatacccgttgaggctggcaagacatatcggttccggattatgaacttttcagcattaactgcggctttctttgtcattaattctctatcgatggatgtcattatgactgatgcttcctatacacaaaaattgtcgacaaatcagttgcgccttggggctgctcagcgatacgatgttcttgtgaccattggtaacaatgatacacagaactatccgtttttgtttgcattagacaccaatgcagattacacaaatgcaaattcggaccctgccgttgcctaccacaataactttacagggcagctggtcactgattccagcggtgatctgagtggaacagaagtcgtggatagttggaccccattggacgatatgacattgctaccatacaacaatcagacggcttacggtcccgtgacctcgcaatgggtgcttgacttcgacttttgtaccgacgcaaatggatacccacgtgcatgtttcaatgggacaacattcatcgaccaaaaggttccttccttgtattcggcggtgtcgctgggatcgaataatactgaggtcacagcatacggccaagtgaatgcatttactgtcgcctatggcgaggtcctggaaatcgtgataaacaaccatgatgctgcaatccatccattccatctccatggtcaccagttccagatcatcgagcgcccagcgagcaatggaggaaactggactggcaatacaaccgtccctaatatgccagtacagcgagacgttgttactgttttcgcgagttcatacgccgtcatacgtatcgtcgccaacaatccgggtgtctacctttttcattgccatatcgagtggcatgcggcaatgggactcactgcgacacttatcgaagctcccgagaaacttaccaatattacgatcccgcaggacatgatcgacatttgcggggaccagggtattccagtcaccggcaacgctgctggcaatgagctttggtctaacacaacgggcttcgtgaccatcaatcctactacgtgggtgggtgcattatggacaggctcagcaacagcctcaagtgcagccacatctgccaccgcttaa

SEQ ID NO: 18803 - protein, 559 aa, Muscodor strobelii
  misc_feature: SGI Peptide ID NO. 566310
  misc_feature (150)..(293): Pfam Id: PF00394 Pfam Desc: Multicopper oxidase
  misc_feature (362)..(494): Pfam Id: PF07731 Pfam Desc: Multicopper oxidase
  misc_feature (25)..(142): Pfam Id: PF07732 Pfam Desc: Multicopper oxidase
  misc_feature (150)..(267): Pfam Id: PF00394 Pfam Desc: Multicopper oxidase
  misc_feature (1)..(544): NCBI GI: 261352043 Blast Desc: iron transport multicopper oxidase FET3 [Verticillium albo-atrum VaMs.102]
  misc_feature (9)..(544): NCBI GI: 28950033 Blast Desc: related to Conidial Pigment Biosynthesis protein brown1 [Neurospora crassa]
  misc_feature (1)..(541): NCBI GI: 116179830 Blast Desc: CHGG_00543 [Chaetomium globosum CBS 148.51] gi|88184840|gb|EAQ92308.1| CHGG_00543 [Chaetomium globosum CBS 148.51]
  misc_feature (9)..(524): NCBI GI: 164425354 Blast Desc: NCU04593 [Neurospora crassa OR74A] gi|157070894|gb|EAA28691.2| conserved [Neurospora crassa OR74A]
  misc_feature (17)..(544): NCBI GI: 39971809 Blast Desc: MGG_07220 [Magnaporthe grisea 70-15] gi|145019715|gb|EDK03943.1| MGG_07220 [Magnaporthe grisea 70-15]
  misc_feature (8)..(559): NCBI GI: 171691745 Blast Desc: protein product [Podospora anserina] gi|170945821|emb|CAP72621.1| protein product [Podospora anserina]
  misc_feature (12)..(524): NCBI GI: 189208736 Blast Desc: iron transport multicopper oxidase FET3 precursor [Pyrenophora tritici-repentis Pt-1C-BFP] gi|187976794|gb|EDU43420.1| iron transport multicopper oxidase
  misc_feature (7)..(530): NCBI GI: 46110521 Blast Desc: FG02142.1 [Gibberella zeae PH-1]
  misc_feature (7)..(523): NCBI GI: 212535096 Blast Desc: conidial pigment biosynthesis oxidase Abr1/brown 1 [Penicillium marneffei ATCC 18224] gi|210070103|gb|EEA24193.1| conidial pigment biosynthesis oxidase Abr1/brown 1 [Penicillium
  misc_feature (9)..(522): NCBI GI: 115433032 Blast Desc: iron transport multicopper oxidase FET3 precursor [Aspergillus terreus NIH2624] gi|114189505|gb|EAU31205.1| iron transport multicopper oxidase FET3 precursor [Aspergillus terreus
  misc_feature (32)..(508): SWISSPROT Homolog: EC 1.10.3.2 Laccase
MIRGYIFALAHASAALASTVTYNWTTTWVWASPDGTYRPVIGINGTWPCPKIEANVNDTIVINLSNDLGNETTGIHFHGINQVNTNYMDGAVGTNQCPLPPGKNVTYSFVADSAGSFWYHSHDIGQYPDGFRGPLIVHDPNDPYLDQYDDDVIITVTDWYHDQSPTLVQNMLETNNTNDDPPRPKAILVNEGSNGQIPVEAGKTYRFRIMNFSALTAAFFVINSLSMDVIMTDASYTQKLSTNQLRLGAAQRYDVLVTIGNNDTQNYPFLFALDTNADYTNANSDPAVAYHNNFTGQLVTDSSGDLSGTEVVDSWTPLDDMTLLPYNNQTAYGPVTSQWVLDFDFCTDANGYPRACFNGTTFIDQKVPSLYSAVSLGSNNTEVTAYGQVNAFTVAYGEVLEIVINNHDAAIHPFHLHGHQFQIIERPASNGGNWTGNTTVPNMPVQRDVVTVFASSYAVIRIVANNPGVYLFHCHIEWHAAMGLTATLIEAPEKLTNITIPQDMIDICGDQGIPVTGNAAGNELWSNTTGFVTINPTTWVGALWTGSATASSAATSATA

SEQ ID NO: 18804 - DNA, 574 bp, Muscodor strobelii
  misc_feature: SGI EST ID NO. CUFF.44204.0
  misc_feature: Variant of the nucleotide sequence at SEQ ID NO 18802
aaagatcgaggcaaatgtcaatgacaccattgtcatcaatctgtcgaatgatcttgggaacgagacaacgggcattcactttcacggcatcaatcaggtcaacacgaactatatggatggagccgtcgggaccaatcaatgccccctacccccgggcaaaaatgtgacttacagcttcgtagtacgtccaaccctcgtgggtcaattaacacccctgactaacgtatctccacacaggctgattctgcgggttcattctggtgtaaggaaacatagtcgcatcttccatgtcaactaatcagatgctaacataatataaacagatcattcccatgacattggtcagtatccagatggattccggggaccgctgattgtccacgatcctaacgatccatacttggatcaatatgatgacgatgtcatcattaccgtcacagactggtatcatgatcagagtccaacgctcgttcaaaacatgttggagactaacaacacaaatgacgaccccccacgacccaaggcaattcttgtgaacgagggcagcaatggtcaaatacccgttgaggctggc

SEQ ID NO: 18805 - DNA, 1149 bp, Muscodor strobelii
  misc_feature: SGI cDNA ID NO. 566311
  misc_feature: Encodes the peptide sequence at SEQ ID NO 18806
atgaaagccatcatcgccatccccgcaacgctcggcctttgttacagagcctattcaaaaaactctctaacgccacttggcactttcgttgccggcctcacagctttcgctcacgctcttcacccctggaatttgccattcgttctgcttggcgtgttcttccttgctggcagccgcgccacctccatcaagaaagatgttaaggctggcttaactctgcatgcgcaaggctctggcggcgaaggtccacggacccaggttcaagtgctcgctaactccttgatggcgtccatctttaccttgatgcatgcctatcagctaagccaaaggcgtgacgcccttcgcaacgggcaagctccagagggttctctgtgctacagttggggtggtgacctcctaatggttggtgtcatctgtaattacgcggcggtgtgcgccgatacattttcgtcagagctaggaattctgtcccgtaccgagcctaggctgatcacttctctcacgctgcgaaaggtgccacgaggaacaaatggtggtgttaccgtctggggacttttcgccggcctcatgggctctatgctcattgtcgcagcctctttgatgtttctacccttttgcaacgccgatatgagccagatgattggaggggggcagccttggaagcaggatgaaaagatcaagttcgttttcggactgacgttttggggtgctctgggaagtgttctggatagctttctcggtggctggtttcaatcaagcgtgaaggatgtgagatctgggaagatcgtagaaggagaaggcggcgtgcgcgtcctcatatccaaagacgcaaacgacaactctgcacaacaaatcaagaaaactgccaccgccaagtctaagctcgtcagcggagagggtaaagcagctgtcgaggatacttcggcgattgacgatgatgccccagccgaggaccgttacaacccccaggacaagaatcgcaagtcaagtttcggagataacaagcccacaagagtctctgagaatgggtgggatctactcgacaacaacgatgtgaacttcctgatggctttcacaatgagtgctggcggaattattttggctgctatttattggggtgttcctctttcttcgatactcaaggcttag

SEQ ID NO: 18806 - protein, 382 aa, Muscodor strobelii
  misc_feature: SGI Peptide ID NO. 566311
  misc_feature (1)..(272): Pfam Id: PF01940 Pfam Desc: Integral membrane protein DUF92
  misc_feature (129)..(195): Pfam Id: PF01940 Pfam Desc: Integral membrane protein DUF92
  misc_feature (1)..(380): NCBI GI: 116179816 Blast Desc: CHGG_00536 [Chaetomium globosum CBS 148.51] gi|88184833|gb|EAQ92301.1| CHGG_00536 [Chaetomium globosum CBS 148.51]
  misc_feature (1)..(380): NCBI GI: 28950005 Blast Desc: conserved [Neurospora crassa]
  misc_feature (1)..(380): NCBI GI: 256732062 Blast Desc: [Nectria haematococca mpVI 77-13-4]
  misc_feature (1)..(380): NCBI GI: 46137499 Blast Desc: FG10265.1 [Gibberella zeae PH-1]
  misc_feature (1)..(380): NCBI GI: 171691755 Blast Desc: protein product [Podospora anserina] gi|170945826|emb|CAP72626.1| protein product [Podospora anserina]
  misc_feature (24)..(380): NCBI GI: 164425378 Blast Desc: NCU11040 [Neurospora crassa OR74A] gi|157070904|gb|EDO65137.1| conserved [Neurospora crassa OR74A]
  misc_feature (1)..(381): NCBI GI: 39974103 Blast Desc: MGG_00802 [Magnaporthe grisea 70-15] gi|145018260|gb|EDK02539.1| MGG_00802 [Magnaporthe grisea 70-15]
  misc_feature (1)..(379): NCBI GI: 156055844 Blast Desc: SS1G_05274 [Sclerotinia sclerotiorum 1980] gi|154703058|gb|EDO02797.1| SS1G_05274 [Sclerotinia sclerotiorum 1980]
  misc_feature (1)..(379): NCBI GI: 154302424 Blast Desc: BC1G_09996 [Botryotinia fuckeliana B05.10] gi|150855484|gb|EDN30676.1| BC1G_09996 [Botryotinia fuckeliana B05.10]
  misc_feature (1)..(381): NCBI GI: 240106345 Blast Desc: CPC735_059080 [Coccidioides posadasii C735 delta SOWgp]
MKAIIAIPATLGLCYRAYSKNSLTPLGTFVAGLTAFAHALHPWNLPFVLLGVFFLAGSRATSIKKDVKAGLTLHAQGSGGEGPRTQVQVLANSLMASIFTLMHAYQLSQRRDALRNGQAPEGSLCYSWGGDLLMVGVICNYAAVCADTFSSELGILSRTEPRLITSLTLRKVPRGTNGGVTVWGLFAGLMGSMLIVAASLMFLPFCNADMSQMIGGGQPWKQDEKIKFVFGLTFWGALGSVLDSFLGGWFQSSVKDVRSGKIVEGEGGVRVLISKDANDNSAQQIKKTATAKSKLVSGEGKAAVEDTSAIDDDAPAEDRYNPQDKNRKSSFGDNKPTRVSENGWDLLDNNDVNFLMAFTMSAGGIILAAIYWGVPLSSILKA

SEQ ID NO: 18807 - DNA, 1593 bp, Muscodor strobelii
  misc_feature: SGI EST ID NO. CUFF.44215.0
  misc_feature: Variant of the nucleotide sequence at SEQ ID NO 18805
ctggcactcatgattactgggcaatctaccaaagcggcacagtcgcgttgcatcgagacattgaatttataatatttcggtcatcctctctgtcattttcttttccttattcttgcaattgagagaattcacaaaaggacctcacgcataggtctgtcgcagattcgagtccaaggtacagaggtctgataaacgccatcatgaaagccatcatcgccatccccgcaacgctcggcctttgttacagagcctattcaaaaaactctctaacgccacttggcactttcgttgccggcctcacagctttcgctcacgctcttcacccctggaatttgccattcgttctgcttggcgtgttcttccttgctggcagccgcgccacctccatcaagaaagatgttaaggctggcttaactctgcatgcgcaaggctctggcggcgaaggtccacggacccaggttcaagtgctcgctaactccttgatggcgtccatctttaccttgatgcatgcctatcagctaagccaaaggcgtgacgcccttcgcaacgggcaagctccagagggttctctgtgctacagttggggtggtgacctcctaatggttggtgtcatctgtaattacgcggcggtgtgcgccgatacattttcgtcagagctaggaattctgtcccgtaccgagcctaggctgatcacttctctcacgctgcgaaaggtgccacgaggaacaaatggtggtgttaccgtctggggacttttcgccggcctcatgggctctatgctcattgtcgcagcctctttgatgtttctacccttttgcaacgccgatatgagccagatgattggaggggggcagccttggaagcaggatgaaaagatcaagttcgttttcggactgacgttttggggtgctctgggaagtgttctggatagctttctcggtggctggtttcaatcaagcgtgaaggatgtgagatctgggaagatcgtagaaggagaaggcggcgtgcgcgtcctcatatccaaagacgcaaacgacaactctgcacaacaaatcaagaaaactgccaccgccaagtctaagctcgtcagcggagagggtaaagcagctgtcgaggatacttcggcgattgacgatgatgccccagccgaggaccgttacaacccccaggacaagaatcgcaagtcaagtttcggagataacaagcccacaagagtctctgagaatgggtgggatctactcgacaacaacgatgtgaacttcctgatggctttcacaatgagtgctggcggaattattttggctgctatttattggggtgttcctctttcttcgatactcaaggcttaggaagaatctcaaagcaatacatactatatagagaatatttccctcgctaccgtaatcctcccgtcgtctaacatcttgttgctccaatatcatcgatcataaccctagagcatcaagatgatcgcctccgtacgatgtacacgtagatctttcaagcgagctgaatctctcactgcataacattgttacctgtgcttgaactgtattaggttcatttcggaaacgatgccgactgagactggag

SEQ ID NO: 18808 - DNA, 2484 bp, Muscodor strobelii
  misc_feature: SGI cDNA ID NO. 566313
  misc_feature: Encodes the peptide sequence at SEQ ID NO 18809
atggcctcgaacagctactttgcgaacaagccatataatcgatactcacaacattccttaaatcacaaagtctcgaacctatccgatagttctgactcgccgggacctttgcgaggacgcgagtcccttgtttcccttcagtccttctacgatccgtcaccgtcagccccttcatcctcgacggagtctgttcctgagccacgagactatggcagaggaacgtggacgagccctttcctaggaaatgaccatggagggcaataccagcccgtcactccaccaacgccaccgacctccaacttcggccgtttcaagagttttagagatcgtaaccgtgcgcacgagacaatttacgaagatgaaagtattgatatgtcgttgctgagctcggccgcgcctcctgctcgctctggctcgtataaagcggtacctgaggatgaaccagccgaacccgcttttgatatgacttcattctcgggtccaatgggactgcaagatcaagaatttcttaaatctttacaagctcaagaagcaataggcaagctcacgggtggattgggacaaggtgaagggcctggcaggatcgtcacgggagaggaactacttgcaaagagtcccactacaaaaagaagtttgacacggtctttttcaagattggccgcggcaaactcgtactcgaggccaggatggagcgatttgggacaagaagaagccaacaagaggggtgaagtgatcgaagtggtcatggaggaacctacggacgtcgacctaagtaccatggttggtccaaatagcgttggaatggatcaaggtgcaaagccatcacccattacgcaaacattctacccacggcctaattggaaacccttcaccatgagatggccatatttgcttttcctcatcatcctctctgtcgccctgggtattgtccaagagctggtgtaccaaaagtcaaatcgagaacagggcctgatcaagttcgaaaatgccaaacaactggagcctggctactactttattttcaaatttgttcccactattgtcacagtcacttacggtgttttgtggcagaacacagactttgaagtgaagcgcttagaagcatatcatcaaatgtcaaaagtcggtggtgctctagcgaccgagtcacttaacgtcgactacattacgatgttcaacttcactatcccatttctggcgataacccgcagacactacgctgtagccatatcatcaatcgcaaccctacttgccgtgtctcttgttccgactctcgggtccgctgctctcgttattgagccccttgaagacgagcattcgaaagttgttacagtgaacccgattctatctcgagtacttactgctacattcttcgtcatctcgatatacggctcctttcttttctatcagctaacgacacgacggtcgggtctcttagccgacgtgaaaggcatcgcgggaatcgcttcgatggctgtcgttagtcatattatggtcgattttcaggatatggatgtggcgaagcctaaagatattcaccacaaactgaagagccgtcgatacgagctgcgtaacaactccttattctcagattcggcgccagtgaatgcaagggctcgaggtgataatgtgcatctccccgataatccgcatcctctcatgcttcggaaggaagcagctattcccttcatcatcggcatcatcttgtttctcgggtttataccggtattcttattcacacccgctagagttattaccgacagagcaccttgggctgtaaccgccctcgcagtcatcattaaattgagctggggaagtttggagacatcgatccgcatgatggagccatactacatcctctccaagcgtcatgctcctccgaaaaccctagtactcgattacaccgcgttgccgtttgccgcagtcgcatttcgtgctttcttcaatcgtcactggatcgtcttcatcgtcgggcttggtaccatactcgtcgagggacttacgattttcgccacaagtctagcacaagtcgatggtttggtctttctcaatatagtcacacaaagtggtaaggtgctcaacgagggcttaggcgttggagctgagacagttcggtcatttattattacacttgccgtctccgttttcatcctcttgtacctcttcatcgttgctgcagtggtatttgtccgccgacgccatccgttcctcccgcgccagccgaatacgattgccagcgttctggcattcatgcaccaatcgaagatgctgtacgactttgtaggaaccgccaagctcaatagtatgcagatgcgcgagaagcttgataaactcggcaagacgtacggcttgggttggttcaatggccgtgatggtcagacacattgtggtgttgatgaagaagagctcaacaataactacaaacacggtgttgattattcccgaggaaataatccgtggttgaccgagtggcaaacgttttaa

SEQ ID NO: 18809 - protein, 827 aa, Muscodor strobelii
  misc_feature: SGI Peptide ID NO. 566313
  misc_feature (1)..(827): NCBI GI: 256731765 Blast Desc: NECHADRAFT_80472 [Nectria haematococca mpVI 77-13-4]
  misc_feature (16)..(827): NCBI GI: 46137305 Blast Desc: FG10168.1 [Gibberella zeae PH-1]
  misc_feature (142)..(827): NCBI GI: 261351862 Blast Desc: conserved [Verticillium albo-atrum VaMs.102]
  misc_feature (23)..(824): NCBI GI: 164426208 Blast Desc: NCU01044 [Neurospora crassa OR74A] gi|157071241|gb|EAA32420.2| conserved [Neurospora crassa OR74A]
  misc_feature (23)..(824): NCBI GI: 18376185 Blast Desc: [Neurospora crassa]
  misc_feature (23)..(823): NCBI GI: 171691917 Blast Desc: protein product [Podospora anserina] gi|170945907|emb|CAP72708.1| protein product [Podospora anserina]
  misc_feature (105)..(827): NCBI GI: 156044090 Blast Desc: SS1G_10148 [Sclerotinia sclerotiorum 1980] gi|154694537|gb|EDN94275.1| SS1G_10148 [Sclerotinia sclerotiorum 1980]
  misc_feature (140)..(827): NCBI GI: 154299361 Blast Desc: BC1G_11166 [Botryotinia fuckeliana B05.10] gi|150857431|gb|EDN32623.1| BC1G_11166 [Botryotinia fuckeliana B05.10]
  misc_feature (23)..(765): NCBI GI: 116180034 Blast Desc: CHGG_00645 [Chaetomium globosum CBS 148.51] gi|88184942|gb|EAQ92410.1| CHGG_00645 [Chaetomium globosum CBS 148.51]
  misc_feature (232)..(820): NCBI GI: 242781887 Blast Desc: conserved [Talaromyces stipitatus ATCC 10500] gi|218720038|gb|EED19457.1| conserved [Talaromyces stipitatus ATCC 10500]
MASNSYFANKPYNRYSQHSLNHKVSNLSDSSDSPGPLRGRESLVSLQSFYDPSPSAPSSSTESVPEPRDYGRGTWTSPFLGNDHGGQYQPVTPPTPPTSNFGRFKSFRDRNRAHETIYEDESIDMSLLSSAAPPARSGSYKAVPEDEPAEPAFDMTSFSGPMGLQDQEFLKSLQAQEAIGKLTGGLGQGEGPGRIVTGEELLAKSPTTKRSLTRSFSRLAAANSYSRPGWSDLGQEEANKRGEVIEVVMEEPTDVDLSTMVGPNSVGMDQGAKPSPITQTFYPRPNWKPFTMRWPYLLFLIILSVALGIVQELVYQKSNREQGLIKFENAKQLEPGYYFIFKFVPTIVTVTYGVLWQNTDFEVKRLEAYHQMSKVGGALATESLNVDYITMFNFTIPFLAITRRHYAVAISSIATLLAVSLVPTLGSAALVIEPLEDEHSKVVTVNPILSRVLTATFFVISIYGSFLFYQLTTRRSGLLADVKGIAGIASMAVVSHIMVDFQDMDVAKPKDIHHKLKSRRYELRNNSLFSDSAPVNARARGDNVHLPDNPHPLMLRKEAAIPFIIGIILFLGFIPVFLFTPARVITDRAPWAVTALAVIIKLSWGSLETSIRMMEPYYILSKRHAPPKTLVLDYTALPFAAVAFRAFFNRHWIVFIVGLGTILVEGLTIFATSLAQVDGLVFLNIVTQSGKVLNEGLGVGAETVRSFIITLAVSVFILLYLFIVAAVVFVRRRHPFLPRQPNTIASVLAFMHQSKMLYDFVGTAKLNSMQMREKLDKLGKTYGLGWFNGRDGQTHCGVDEEELNNNYKHGVDYSRGNNPWLTEWQTF

SEQ ID NO: 18810 - DNA, 3862 bp, Muscodor strobelii
  misc_feature: SGI EST ID NO. CUFF.44267.0
  misc_feature: Variant of the nucleotide sequence at SEQ ID NO 18808
tttacgcatcacgacaagctttgctcggctcaaaatccttcgttctccagactgtcagtcgctattctagtcaaaccgactgtgaaagtgagaaactgtctgatgcctgaaagatcccagcggggttgtttatgacaagtcgttgggggcgagataaccagcgagcgtttgcgttattgttgcctattttcggactcatcactctcaaagtatcggcgatctgtgacggaacatgacatctttctagaagagacccgaatacccgaaacatcgctccccaaacgcgcagcaactctggtatatcccttcgcaactgtcttgggttgtacagaacattgctttagttgtgtgacagttggcccgagcgatcggaagtaccacttcacgcatggaatctctctgaggtggtattcttgctggaatgaggcgcatcaccgtggatgagaacctcaccatatctattgagcaagcgcagaggcgttaggcgctaggtggggtgggattgtcgaacccatcttctatctttgcgcaacagaaataccaacaccatatttcgattacatgcacaagccgactgctgcagaattctttgacgacaagaatatacaaagcaaggagaattacatttaactgcgcgttatgaattaggtacctaagtagctatggcctcgaacagctactttgcgaacaagccatataatcgatactcacaacattccttaaatcacaaagtctcgaacctatccgatagttctgactcgccgggacctttgcgaggacgcgagtcccttgtttcccttcagtccttctacgatccgtcaccgtcagccccttcatcctcgacggagtctgttcctgagccacgagactatggcagaggaacgtggacgagccctttcctaggaaatgaccatggagggcaataccagcccgtcactccaccaacgccaccgacctccaacttcggccgtttcaagagttttagagatcgtaaccgtgcgcacgagacaatttacgaagatgaaagtattgatatgtcgttgctgagctcggccgcgcctcctgctcgctctggctcgtataaagcggtacctgaggatgaaccagccgaacccgcttttgatatgacttcattctcgggtccaatgggactgcaagatcaagaatttcttaaatctttacaagctcaagaagcaataggcaagctcacgggtggattgggacaaggtgaagggcctggcaggatcgtcacgggagaggaactacttgcaaagagtcccactacaaaaagaagtttgacacggtctttttcaagattggccgcggcaaactcgtactcgaggccaggatggagcgatttgggacaagaagaagccaacaagaggggtgaagtgatcgaagtggtcatggaggaacctacggacgtcgacctaagtaccatggttggtccaaatagcgttggaatggatcaaggtgcaaagccatcacccattacgcaaacattctacccacggcctaattggaaacccttcaccatgagatggccatatttgcttttcctcatcatcctctctgtcgccctgggtattgtccaagagctggtgtaccaaaagtcaaatcgagaacagggcctgatcaagttcgaaaatgccaaacaactggagcctggctactactttattttcaaatttgttcccactattgtcacagtcacttacggtgttttgtggcagaacacagactttgaagtgaagcgcttagaagcatatcatcaaatgtcaaaagtcggtggtgctctagcgaccgagtcacttaacgtcgactacattacgatgttcaacttcactatcccatttctggcgataacccgcagacactacgctgtagccatatcatcaatcgcaaccctacttgccgtgtctcttgttccgactctcgggtccgctgctctcgttattgagccccttgaagacgagcattcgaaagttgttacagtgaacccgattctatctcgagtacttactgctacattcttcgtcatctcgatatacggctcctttcttttctatcagctaacgacacgacggtcgggtctcttagccgacgtgaaaggcatcgcgggaatcgcttcgatggctgtcgttagtcatattatggtcgattttcaggatatggatgtggcgaagcctaaagatattcaccacaaactgaagagccgtcgatacgagctgcgtaacaactccttattctcagattcggcgccagtgaatgcaagggctcgaggtgataatgtgcatctccccgataatccgcatcctctcatgcttcggaaggaagcagctattcccttcatcatcggcatcatcttgtttctcgggtttataccggtattcttattcacacccgctagagttattaccgacagagcaccttgggctgtaaccgccctcgcagtcatcattaaattgagctggggaagtttggagacatcgatccgcatgatggagccatactacatcctctccaagcgtcatgctcctccgaaaaccctagtactcgattacaccgcgttgccgtttgccgcagtcgcatttcgtgctttcttcaatcgtcactggatcgtcttcatcgtcgggcttggtaccatactcgtcgagggacttacgattttcgccacaagtctagcacaagtcgatggtttggtctttctcaatatagtcacacaaagtggtaaggtgctcaacgagggcttaggcgttggagctgagacagttcggtcatttattattacacttgccgtctccgttttcatcctcttgtacctcttcatcgttgctgcagtggtatttgtccgccgacgccatccgttcctcccgcgccagccgaatacgattgccagcgttctggcattcatgcaccaatcgaagatgctgtacgactttgtaggaaccgccaagctcaatagtatgcagatgcgcgagaagcttgataaactcggcaagacgtacggcttgggttggttcaatggccgtgatggtcagacacattgtggtgttgatgaagaagagctcaacaataactacaaacacggtgttgattattcccgaggaaataatccgtggttgaccgagtggcaaacgttttaatcagtgtgtttaaagacaaagactttgagttgaagcttcaccgttgtgtttttcaagaactacaacttgtcatgctcgcattggacggcgtttaggattccatactaacagcatttggaatgcatgcttggtccgcaaagagcgaggccaaacattgacggaataatgatattttactactcaatgtaaattgatactacaagctcttttgttcagcatgattaaatgctaccatcgacaccaacgattatgtagtcaaggtgaagatgaatcgggccaaaagcaattatgaacgcgtcactcacttttcatttctccagttgacatgctaatcagctttatgctgatgtatctcgtgatttgtacatctaatggaactgatcctcagtaacacctttacccatagccgccgtagagctaatgccgcccgttaccatcttctggagctcatcgacataggtagcgccactccacttctggtgcttgacaacgtcgacaccagcagccatctcaggctcttgaacaagctcaccataagcacgcatgccgttcttcgcatacgcggctgcgaagcgatcagatatcaacgcagttgtgtgtaatccagccaatgtgatgaactgccagcaatatcccagactcgctagacggcggatatatgtctcctgctcagcgctcggcatggctgtcttccagttgaatgagggcgatagatt

SEQ ID NO: 18811 - DNA, 1644 bp, Muscodor strobelii
  misc_feature: SGI cDNA ID NO. 566314
  misc_feature: Encodes the peptide sequence at SEQ ID NO 18812
atggcgtcgaataacatgataaacacggcgatcgaccccaatattgaagatgagctttttgcaaaagaggtggaagccgtaaaaaagtggtggagtgaaccaagatggcgatacaccaaacgaccattcacggccgagcaaattgtttcgaaacgaggccatctgcctatcgaatatccaagcaacacccaatccaagaagttattcaggatactggagaacagattcaagaatcgcgatgcaagttacacatacggttgcttagaaccaacaatgatcacccaaatggcgaagtaccttgacactgtctatgtttcgggctggcaatcgtcgtctactgcctcgtcttccgatgagcctggcccagatctggcggattatccttataccaccgtaccgaacaaagtcaagcacctgttcatggcacagctcttccatgaccggaagcagcgtcaagaacgcctgagcgcaacgaaatctgagcgcgcaaagcttgccaatatcgattacctgcgacctattatagccgatgcggatacaggacatggcggtttgacagctgtgatgaaattgacgaagcttttcgttgagcagggtgcggcaggtattcacatcgaagaccaggcaccaggtacgaagaaatgcggacatatggcgggcaaggtcctcgtgcctatacaagaacatatcaacagacttgtcgctattcgtgctcaggcagatatcatgggttcagatcttctagcgattgcaagaacggatgctgaggcggctacgctcatcacgacatcgattgaccctcgtgatcatgcgttcattctgggaagcacgaatcctaacctccagcctcttaacgatcttatgattgccgctgagcaagcaggcaagagtggcgagcaattgcaagccattgaagatgcttggattaaggacgcgagcctcaagcgattcgatgatgctgtcgttgacactatcgcatcatcgcaattggctggtgacaagaagaccctccagcaaaagtatattcagcaagcgaagggtaagagtctctctgagtcgcgtgcaatcgctcgtggtatcttgggcatcgatgttttctttgactgggatgcgccacgtactcgtgagggctactatcgcttaaagggtggatgcgattgtgctgtcaaccgcgcaattgcttatgcgccatactgcgatgccatttggatggagagcaaactgcctgactacaagcaggcgaaggagtttgccgatggtgtccatgctgtctggccagagcaaaaactggcgtacaatctatcgccctcattcaactggaagacagccatgccgagcgctgagcaggagacatatatccgccgtctagcgagtctgggatattgctggcagttcatcacattggctggattacacacaactgcgttgatatctgatcgcttcgcagccgcgtatgcgaagaacggcatgcgtgcttatggtgagcttgttcaagagcctgagatggctgctggtgtcgacgttgtcaagcaccagaagtggagtggcgctacctatgtcgatgagctccagaagatggtaacgggcggcattagctctacggcggctatgggtaaaggtgttactgaggatcagttccattag

SEQ ID NO: 18812 - protein, 547 aa, Muscodor strobelii
  misc_feature: SGI Peptide ID NO. 566314
  misc_feature (23)..(546): Pfam Id: PF00463 Pfam Desc: Isocitrate lyase family
  misc_feature (16)..(546): NCBI GI: 67538928 Blast Desc: ACEA_EMENI Isocitrate lyase (Isocitrase) (Isocitratase) (ICL) [Aspergillus nidulans FGSC A4] gi|146345355|sp|P28298.3|ACEA_EMENI RecName: Full=Isocitrate A,
  misc_feature (16)..(546): NCBI GI: 115389810 Blast Desc: isocitrate lyase [Aspergillus terreus NIH2624] gi|114194806|gb|EAU36506.1| isocitrate lyase [Aspergillus terreus NIH2624]
  misc_feature (16)..(546): NCBI GI: 54035713 Blast Desc: ACEA_LEPMC RecName: Full=Isocitrate lyase; Short=ICL; Short=Isocitratase; Short=Isocitrase gi|23664452|gb|AAM89498.1| isocitrate lyase [Leptosphaeria maculans]
  misc_feature (2)..(547): NCBI GI: 156055248 Blast Desc: isocitrate lyase [Sclerotinia sclerotiorum 1980] gi|154702760|gb|EDO02499.1| isocitrate lyase [Sclerotinia sclerotiorum 1980]
  misc_feature (16)..(546): NCBI GI: 169605209 Blast Desc: SNOG_05626 [Phaeosphaeria nodorum SN15] gi|111065570|gb|EAT86690.1| SNOG_05626 [Phaeosphaeria nodorum SN15]
  misc_feature (16)..(546): NCBI GI: 145230077 Blast Desc: An01g09270 [Aspergillus niger] gi|85691195|gb|ABC73716.1| methyl isocitrate lyase [Aspergillus niger] gi|134055462|emb|CAK43977.1| protein product [Aspergillus
  misc_feature (16)..(546): NCBI GI: 189193029 Blast Desc: isocitrate lyase [Pyrenophora tritici-repentis Pt-1C-BFP] gi|187978417|gb|EDU45043.1| isocitrate lyase [Pyrenophora tritici-repentis Pt-1C-BFP]
  misc_feature (16)..(546): NCBI GI: 238838473 Blast Desc: isocitrate lyase [Microsporum canis CBS 113480]
  misc_feature (16)..(546): NCBI GI: 261197303 Blast Desc: isocitrate lyase [Ajellomyces dermatitidis SLH14081] gi|239595684|gb|EEQ78265.1| isocitrate lyase [Ajellomyces dermatitidis SLH14081] gi|239606677|gb|EEQ83664.1| isocitrate
  misc_feature (16)..(546): NCBI GI: 225682450 Blast Desc: isocitrate lyase [Paracoccidioides brasiliensis Pb03]
  misc_feature (1)..(547): SWISSPROT Homolog: EC 4.1.3.1 Isocitrate lyase
MASNNMINTAIDPNIEDELFAKEVEAVKKWWSEPRWRYTKRPFTAEQIVSKRGHLPIEYPSNTQSKKLFRILENRFKNRDASYTYGCLEPTMITQMAKYLDTVYVSGWQSSSTASSSDEPGPDLADYPYTTVPNKVKHLFMAQLFHDRKQRQERLSATKSERAKLANIDYLRPIIADADTGHGGLTAVMKLTKLFVEQGAAGIHIEDQAPGTKKCGHMAGKVLVPIQEHINRLVAIRAQADIMGSDLLAIARTDAEAATLITTSIDPRDHAFILGSTNPNLQPLNDLMIAAEQAGKSGEQLQAIEDAWIKDASLKRFDDAVVDTIASSQLAGDKKTLQQKYIQQAKGKSLSESRAIARGILGIDVFFDWDAPRTREGYYRLKGGCDCAVNRAIAYAPYCDAIWMESKLPDYKQAKEFADGVHAVWPEQKLAYNLSPSFNWKTAMPSAEQETYIRRLASLGYCWQFITLAGLHTTALISDRFAAAYAKNGMRAYGELVQEPEMAAGVDVVKHQKWSGATYVDELQKMVTGGISSTAAMGKGVTEDQFH

SEQ ID NO: 18813 - DNA, 5523 bp, Muscodor strobelii
  misc_feature: SGI EST ID NO. CUFF.44268.1
  misc_feature: Variant of the nucleotide sequence at SEQ ID NO 18811
gaaaaacatgtaacttaaacttggtgttgtagcccgagtaagtcgtggtacagtcctctcaaacttacatttccgtcagtagagactcttcatatacctttcgattttttgtctcctataacattgtctcgtttcccagcggtctggactctaagtcgcctctgacgtgatacatcccacattccacctaggccaaagcttgtggcattgaccaggcagtgactacattcctatattcatacacacagaggtaaacagtgacactgtcttagaagacaagtgtatccaattgcgtggcaaacatggcgtcgaataacatgataaacacggcgatcgaccccaatattgaagatgagctttttgcaaaagaggtggaagccgtaaaaaagtggtggagtgaaccaagatggcgatacaccaaacgaccattcacggccgagcaaattgtttcgaaacgaggccatctgcctatcgaatatccaagcaacacccaatccaagaagttattcaggatactggagaacagattcaagaatcgcgatgcaagttacacatacggttgcttagaaccaacaatgatcacccaaatggcgaagtaccttgacactgtctatgtttcgggctggcaatcgtcgtctactgcctcgtcttccgatgagcctggcccagatctggcggattatccttataccaccgtaccgaacaaagtcaagcacctgttcatggcacagctcttccatgaccggaagcagcgtcaagaacgcctgagcgcaacgaaatctgagcgcgcaaagcttgccaatatcgattacctgcgacctattatagccgatgcggatacaggacatggcggtttgacagctgtgatgaaattgacgaagcttttcgttgagcagggtgcggcaggtattcacatcgaagaccaggcaccaggtacgaagaaatgcggacatatggcgggcaaggtcctcgtgcctatacaagaacatatcaacagacttgtcgctattcgtgctcaggcagatatcatgggttcagatcttctagcgattgcaagaacggatgctgaggcggctacgctcatcacgacatcgattgaccctcgtgatcatgcgttcattctgggaagcacgaatcctaacctccagcctcttaacgatcttatgattgccgctgagcaagcaggcaagagtggcgagcaattgcaagccattgaagatgcttggattaaggacgcgagcctcaagcgattcgatgatgctgtcgttgacactatcgcatcatcgcaattggctggtgacaagaagaccctccagcaaaagtatattcagcaagcgaagggtaagagtctctctgagtcgcgtgcaatcgctcgtggtatcttgggcatcgatgttttctttgactgggatgcgccacgtactcgtgagggctactatcgcttaaagggtggatgcgattgtgctgtcaaccgcgcaattgcttatgcgccatactgcgatgccatttggatggagagcaaactgcctgactacaagcaggcgaaggagtttgccgatggtgtccatgctgtctggccagagcaaaaactggcgtacaatctatcgccctcattcaactggaagacagccatgccgagcgctgagcaggagacatatatccgccgtctagcgagtctgggatattgctggcagttcatcacattggctggattacacacaactgcgttgatatctgatcgcttcgcagccgcgtatgcgaagaacggcatgcgtgcttatggtgagcttgttcaagagcctgagatggctgctggtgtcgacgttgtcaagcaccagaagtggagtggcgctacctatgtcgatgagctccagaagatggtaacgggcggcattagctctacggcggctatgggtaaaggtgttactgaggatcagttccattagatgtacaaatcacgagatacatcagcataaagctgattagcatgtcaactggagaaatgaaaagtgagtgacgcgttcataattgcttttggcccgattcatcttcaccttgactacataatcgttggtgtcgatggtagcatttaatcatgctgaacaaaagagcttgtagtatcaatttacattgagtagtaaaatatcattattccgtcaatgtttggcctcgctctttgcggaccaagcatgcattccaaatgctgttagtatggaatcctaaacgccgtccaatgcgagcatgacaagttgtagttcttgaaaaacacaacggtgaagcttcaactcaaagtctttgtctttaaacacactgattaaaacgtttgccactcggtcaaccacggattatttcctcgggaataatcaacaccgtgtttgtagttattgttgagctcttcttcatcaacaccacaatgtgtctgaccatcacggccattgaaccaacccaagccgtacgtcttgccgagtttatcaagcttctcgcgcatctgcatactattgagcttggcggttcctacaaagtcgtacagcatcttcgattggtgcatgaatgccagaacgctggcaatcgtattcggctggcgcgggaggaacggatggcgtcggcggacaaataccactgcagcaacgatgaagaggtacaagaggatgaaaacggagacggcaagtgtaataataaatgaccgaactgtctcagctccaacgcctaagccctcgttgagcaccttaccactttgtgtgactatattgagaaagaccaaaccatcgacttgtgctagacttgtggcgaaaatcgtaagtccctcgacgagtatggtaccaagcccgacgatgaagacgatccagtgacgattgaagaaagcacgaaatgcgactgcggcaaacggcaacgcggtgtaatcgagtactagggttttcggaggagcatgacgcttggagaggatgtactagatcgaagtcagtgttcccacatagagaatgggatatagatctcttgtgatagtacttacgtatggctccatcatgcggatcgatgtctccaaacttccccagctcaatttaatgatgactgcgagggcggttacagcccaaggtgctctgtcggtaataactctagcgggtgtgaataagaataccggtataaacccgagaaacaagatgatgccgatgatgaagggaatagctgcttccttccgaagcatgagaggatgcggattatcggggagatgcacattatcacctcgagcccttgcattcactggcgccgaatctgagaataaggagttgttacgcagctcgtatcgacggctcttcagtttgtggtgaatatctttaggcttcgccacatccatatcctgaaaatcgaccataatatgactaacgacagccatcgaagcgattcccgcgatgcctttcacgtcggctaagagacccgaccgtcgtgtcgttagctgatagaaaagaaaggagccgtatatcgagatgacgaagaatgtagcagtaagtactcgagatagaatcgggttcactgtaacaactttcgaatgctcgtcttcaaggggctcaataacgagagcagcggacccgagagtcggaacaagagacacggcaagtagggttgcgattgatgatatggctacagcgtagtgtctgcgggttatcgccagaaatgggatagtgaagttgaacatcgtaatgtagtcgacgttaagtgactcggtcgctagagcaccaccgacttttgacatttgatgatatgcttctaagcgcttcacttcaaagtctgtgttctgccacaaaacaccgtaagtgactgtgacaatagtgggaacaaatttgaaaataaagtagtagccaggctccagttgtttggcattttcgaacttgatcaggccctgttctcgatttgacttttggtacaccagctcttggacaatacccagggcgacagagaggatgatgaggaaaagcaaatatggccatctcatggtgaagggtttccaattaggccgtgggtagaatgtttgcgtaatgggtgatggctttgcaccttgatccattccaacgctatttggaccaaccatggtacttaggtcgacgtccgtaggttcctccatgaccacttcgatcacttcacccctcttgttggcttcttcttgtcccaaatcgctccatcctggcctcgagtacgagtttgccgcggccaatcttgaaaaagaccgtgtcaaacttctttttgtagtgggactctttgcaagtagttcctctcccgtgacgatcctgccaggcccttcaccttgtcccaatccacccgtgagcttgcctattgcttcttgagcttgtaaagatttaagaaattcttgatcttgcagtcccattggacccgagaatgaagtcatatcaaaagcgggttcggctggttcatcctcaggtaccgctttatacgagccagagcgagcaggaggcgcggccgagctcagcaacgacatatcaatactttcatcttcgtaaattgtctcgtgcgcacggttacgatctctaaaactcttgaaacggccgaagttggaggtcggtggcgttggtggagtgacgggctggtattgccctccatggtcatttcctaggaaagggctcgtccacgttcctctgccatagtctcgtggctcaggaacagactccgtcgaggatgaaggggctgacggtgacggatcgtagaaggactgaagggaaacaagggactcgcgtcctcgcaaaggtcccggcgagtcagaactatcggataggttcgagactttgtgatttaaggaatgttgtgagtatcgattatatggcttgttcgcaaagtagctgttcgaggccatagctacttaggtacctaattcataacgcgcagttaaatgtaattctccttgctttgtatattcttgtcgtcaaagaattctgcagcagtcggcttgtgcatgtaatcgaaatatggtgttggtatttctgttgcgcaaagatagaagatgggttcgacaatcccaccccacctagcgcctaacgcctctgcgcttgctcaatagatatggtgaggttctcatccacggtgatgcgcctcattccagcaagaataccacctcagagagattccatgcgtgaagtggtacttccgatcgctcgggccaactgtcacacaactaaagcaatgttctgtacaacccaagacagttgcgaagggatataccagagttgctgcgcgtttggggagcgatgtttcgggtattcgggtctcttctagaaagatgtcatgttccgtcacagatcgccgatactttgagagtgatgagtccgaaaataggcaacaataacgcaaacgctcgctggttatctcgcccccaacgacttgtcataaacaaccccgctgggatctttcaggcatcagacagtttctcactttcacagtcggtttgactagaatagcgactgacagtctggagaacgaaggattttgagccgagcaaagcttgtcgtgatgcgtaaa

SEQ ID NO: 18814 - DNA, 2244 bp, Muscodor strobelii
  misc_feature: SGI cDNA ID NO. 566315
  misc_feature: Encodes the peptide sequence at SEQ ID NO 18815
atgtcggatatcgtgacaagcccagtcacaagaactcggcgcggcgattcgaatgctagtaacgaggatcgcagcgtcttcgtcgacgcaaaaacatactatgcccctgattacaaacaaatagaccggcatcacaagcgacacagcacgtactctcaggatggcatccattgggagctagaacgcaagggactccagggcagatatcgacgaggtagccatgatgaggctagtagaccgcactcgcgccagttcttgatcgatgtcgaccataccatagagagtctccaagcccaagaagataccgataacaatatgcaaatcaccatcgaggatactggccctaaggtcttgtcactacgaactgctgcatcaggagggcacaatcgtttcgatattcgggggacctatatgctgtccaacctcttgcaagaattatccctcgcaaaggaatacggtagaaagcgaatagtccttgatatcggtcgcctcaatgaaaatcccgttagcagattatctagactcatcaagaaccaattttgggacggtctaactcgccgcatcgacgcctcaagtatcgaagtcgcggccaaagacgcgaaggactggaccgaaaacccgcgtccgcgtatatacattccaaaaggtgcgcctgaacaatacgaatactatacgaagttagccaaggctagacccgagataaacttggacgtgcagtggttgccgcaagccatcacagcagacgtagtccgaaacttgaacgaccatcccggccctgggttactcgcagttgatatggaggaatacatcgatcaagacactggagacaaaacactgaaaggcgtgcctttcgttgttcctggtggtcgcttcaacgaactgtatggctgggatagctacatggaatccttggggcttcttgtcaatgataaagctcatttggccaaagccatggtgcaaaacttctgtttctgtttaaagcactatggtaaaattctgaacgcaactagatcatattatctcacgaggtcacagccaccctttctgacagacatggccctacgtgtatacgagaagattcaacatcaacctgatgccaagtactttctcaaggaagcgacctatgctgcaatcaaagaatactatactgtttggatggccgaaccacgactcgaccgcaagacagggttgtccagataccgaccggaaggacgtggcgtcccgcctgaaacggaggctgatcacttcttccacatcctagagccctatgcgaagaagcacggtacgagcttcaaagaatttgtgaaggcttataattatggtgaagtcaacgaaccggatctcgatgagtacttcctccacgatcgtgcggtccgagaatccggacatgatacttcctacaggctcgagagggtttgcgcgaaccttgccactatcgatttgaactcattgatatacaagtatgagatggacattgcaaggacgatccgcagtgtcttcggcgatcgcctggagcttcccgctgaatggtgtgctggatcgatgcggcctggtcaggtagagacatcggctatttgggatcgccgctggaagcgtcgcagggctgccatacacaagtactgctggaatgagaaagaaggaatgtatttcgactatgacactgtgaaacaggagcaatgcacatacgaatcgtgtacaacgttttggcctctatgggctggtgtccccgaccctgagaaggcggctaaagtcgtcaataacgctatccccaaatttgaagcctatggtggactggtgtcgggaacagagaagtctcgcggcgaagtcggcatagatagaccaaacagacagtgggattacccatatggctgggcgcctcagcaaatgctcgcatggaccggattataccgctatggctacgcggatctcgcgcagaagttggcgtataaatggctattcatgatcacgaaggctttctttgacttcaatggtgtggttgtagagaagtacgatgttacatgcccggttgatcctcatcgtgtagatgccgagtatggtaatcagggtcttgatttcaagggtgttgctaaagaagggttcggttgggtcaacgccagctacgtttacggcctccatttcatcaatacagagatgaagagagcgctcggtacactcactccctatgagacatatgaaaaggcacagcgagcaagggaggaaagaatcctacaagacttagtatag

SEQ ID NO: 18815 - protein, 747 aa, Muscodor strobelii
  misc_feature: SGI Peptide ID NO. 566315
  misc_feature (150)..(715): Pfam Id: PF01204 Pfam Desc: Trehalase
  misc_feature (93)..(122): Pfam Id: PF07492 Pfam Desc: Neutral trehalase Ca2+ binding domain
  misc_feature (8)..(747): NCBI GI: 116197925 Blast Desc: neutral trehalase [Chaetomium globosum CBS 148.51] gi|88178397|gb|EAQ85865.1| neutral trehalase [Chaetomium globosum CBS 148.51]
  misc_feature (19)..(747): NCBI GI: 39960831 Blast Desc: neutral trehalase [Magnaporthe grisea 70-15] gi|148887444|sp|O42622.2|TREB_MAGGR RecName: Full=Neutral trehalase; AltName: Full=Alpha,alpha-trehalase; AltName: neutral
  misc_feature (19)..(747): NCBI GI: 2688970 Blast Desc: trehalase [Magnaporthe grisea]
  misc_feature (23)..(747): NCBI GI: 171693795 Blast Desc: protein product [Podospora anserina] gi|170946846|emb|CAP73650.1| protein product [Podospora anserina]
  misc_feature (4)..(747): NCBI GI: 85099783 Blast Desc: neutral trehalase [Neurospora crassa OR74A] gi|67477348|sp|O42783.2|TREB_NEUCR RecName: Full=Neutral trehalase; AltName: Full=Alpha,alpha-trehalase; AltName: neutral
  misc_feature (21)..(746): NCBI GI: 11544717 Blast Desc: neutral trehalase [Metarhizium anisopliae var. anisopliae] gi|11544719|emb|CAC17620.1| neutral trehalase [Metarhizium anisopliae var. anisopliae] neutral trehalase
  misc_feature (21)..(746): NCBI GI: 45550219 Blast Desc: neutral trehalase [Metarhizium acridum] gi|45550221|gb|AAS67889.1| neutral trehalase [Metarhizium acridum]
  misc_feature (4)..(730): NCBI GI: 2832294 Blast Desc: alpha, alpha trehalose glucohydrolase [Neurospora crassa]
  misc_feature (18)..(727): NCBI GI: 34559863 Blast Desc: neutral trehalase [Metarhizium anisopliae]
  misc_feature (21)..(728): NCBI GI: 34559861 Blast Desc: neutral trehalase [Metarhizium anisopliae]
  misc_feature (19)..(747): SWISSPROT Homolog: EC 3.2.1.28 Alpha,alpha-trehalase
MSDIVTSPVTRTRRGDSNASNEDRSVFVDAKTYYAPDYKQIDRHHKRHSTYSQDGIHWELERKGLQGRYRRGSHDEASRPHSRQFLIDVDHTIESLQAQEDTDNNMQITIEDTGPKVLSLRTAASGGHNRFDIRGTYMLSNLLQELSLAKEYGRKRIVLDIGRLNENPVSRLSRLIKNQFWDGLTRRIDASSIEVAAKDAKDWTENPRPRIYIPKGAPEQYEYYTKLAKARPEINLDVQWLPQAITADVVRNLNDHPGPGLLAVDMEEYIDQDTGDKTLKGVPFVVPGGRFNELYGWDSYMESLGLLVNDKAHLAKAMVQNFCFCLKHYGKILNATRSYYLTRSQPPFLTDMALRVYEKIQHQPDAKYFLKEATYAAIKEYYTVWMAEPRLDRKTGLSRYRPEGRGVPPETEADHFFHILEPYAKKHGTSFKEFVKAYNYGEVNEPDLDEYFLHDRAVRESGHDTSYRLERVCANLATIDLNSLIYKYEMDIARTIRSVFGDRLELPAEWCAGSMRPGQVETSAIWDRRWKRRRAAIHKYCWNEKEGMYFDYDTVKQEQCTYESCTTFWPLWAGVPDPEKAAKVVNNAIPKFEAYGGLVSGTEKSRGEVGIDRPNRQWDYPYGWAPQQMLAWTGLYRYGYADLAQKLAYKWLFMITKAFFDFNGVVVEKYDVTCPVDPHRVDAEYGNQGLDFKGVAKEGFGWVNASYVYGLHFINTEMKRALGTLTPYETYEKAQRAREERILQDLV

SEQ ID NO: 18816 - DNA, 2454 bp, Muscodor strobelii
  misc_feature: SGI EST ID NO. CUFF.44237.0
  misc_feature: Variant of the nucleotide sequence at SEQ ID NO 18814
cggcgattcgaatgctagtaacgaggatcgcagcgtcttcgtcgacgcaaaaacatactatgcccctgattacaaacaaatagaccggcatcacaagcgacacagcacgtactctcaggatggcatccattgggagctagaacgcaagggactccagggcagatatcgacgaggtagccatgatgaggctagtagaccgcactcgcgccagttcttgatcgatgtcgaccataccatagagagtctccaagcccaagaagataccgataacaatatgcaaatcaccatcgaggatactggccctaaggtcttgtcactacgaactgctgcatcaggagggcacaatcgtttcgatattcgggggacctatatgctgtccaacctcttgcaagaattatccctcgcaaaggaatacggtagaaagcgaatagtccttgatatcggtcgcctcaatgaaaatcccgttagcagattatctagactcatcaagaaccaattttgggacggtctaactcgccgcatcgacgcctcaagtatcgaagtcgcggccaaagacgcgaaggactggaccgaaaacccgcgtccgcgtatatacattccaaaaggtgcgcctgaacaatacgaatactatacgaagttagccaaggctagacccgagataaacttggacgtgcagtggttgccgcaagccatcacagcagacgtagtccgaaacttgaacgaccatcccggccctgggttactcgcagttgatatggaggaatacatcgatcaagacactggagacaaaacactgaaaggcgtgcctttcgttgttcctggtggtcgcttcaacgaactgtatggctgggatagctacatggaatccttggggcttcttgtcaatgataaagctcatttggccaaagccatggtgcaaaacttctgtttctgtttaaagcactatggtaaaattctgaacgcaactagatcatattatctcacgaggtcacagccaccctttctgacagacatggccctacgtgtatacgagaagattcaacatcaacctgatgccaagtactttctcaaggaagcgacctatgctgcaatcaaagaatactatactgtttggatggccgaaccacgactcgaccgcaagacagggttgtccagataccgaccggaaggacgtggcgtcccgcctgaaacggaggctgatcacttcttccacatcctagagccctatgcgaagaagcacggtacgagcttcaaagaatttgtgaaggcttataattatggtgaagtcaacgaaccggatctcgatgagtacttcctccacgatcgtgcggtccgagaatccggacatgatacttcctacaggctcgagagggtttgcgcgaaccttgccactatcgatttgaactcattgatatacaagtatgagatggacattgcaaggacgatccgcagtgtcttcggcgatcgcctggagcttcccgctgaatggtgtgctggatcgatgcggcctggtcaggtagagacatcggctatttgggatcgccgctggaagcgtcgcagggctgccatacacaagtactgctggaatgagaaagaaggaatgtatttcgactatgacactgtgaaacaggagcaatgcacatacgaatcgtgtacaacgttttggcctctatgggctggtgtccccgaccctgagaaggcggctaaagtcgtcaataacgctatccccaaatttgaagcctatggtggactggtgtcgggaacagagaagtctcgcggcgaagtcggcatagatagaccaaacagacagtgggattacccatatggctgggcgcctcagcaaatgctcgcatggaccggattataccgctatggctacgcggatctcgcgcagaagttggcgtataaatggctattcatgatcacgaaggctttctttgacttcaatggtgtggttgtagagaagtacgatgttacatgcccggttgatcctcatcgtgtagatgccgagtatggtaatcagggtcttgatttcaagggtgttgctaaagaagggttcggttgggtcaacgccagctacgtttacggcctccatttcatcaatacagagatgaagagagcgctcggtacactcactccctatgagacatatgaaaaggcacagcgagcaagggaggaaagaatcctacaagacttagtatagacgagtgctgtgcgctcgtcgcaagagcaattcacctgccatagttgcttgactgttggacttattggcgtttgttcggtttgaatctggcgcttcatgaggagcagttgggcggtttgtgaagtatatactacaaatcatcagtagagcatcattcattagatcacctatatagcaatcctgccctgggtatatgtgcgcctatcaagtagctgaagaaacagtaaccgtcggcatctccaggagctaga

SEQ ID NO: 18817 - DNA, 2763 bp, Muscodor strobelii
  misc_feature: SGI cDNA ID NO. 566316
  misc_feature: Encodes the peptide sequence at SEQ ID NO 18818
atgagcttcctcaagtcctactttgcccctggcaaaggcaaaggcaaagatgagagcgagaaaaagggaaaagggaacaaagcttctcaagcgtctcaagtggtcagcgagactgatatgaagacgctccgacctgatggacgaggagtcatgagaggacctgcagcaacaccaaacactttaatttcaggtacagcgacaccgatgagttttaacggttcgcgacctgcctctttgtatcctggttccacattccctagcggtgactttcgaaatgccgagtccctagtcgatatcaaagccgatgtgatgtgcagttggctctatcaacagcaactggaaagacagtatgcaactggcatattaccgggagagggtgtcattctcaagaaggggcgtagcaattatgcctgctgtcctccgcagctgcaggacatgaagtatggcttgttcgacatggccatggagctcaatgtcagatgcgccatgaccgtcaataccagagtcataaacgttatcctagcttccaggcggacaaactacgattatattccacttcccgacggtttacggttacaagtcctgcctagcatgcgtgaacttcccaagtgtcagaaacatcacttcgcggcattcattcaggatctacagatcatggtggtttgggatgacgaacctaagaaggtgctcgctcgtgcagatgttctggaacgccaactcatgaagatgatatggggaaccggagatgaagaggaagaggaagacgaaacagagaaaggcgaaaagggccaaggggtcgaagttgacgtggcccccgtcgatctcgaatctggaagcgacgcaaaagacaggcgagtaaagctgacaagccctcttggtgttgctttgactctagcattctccatttctgttatcggcatcggatacaggaaactcgctttcgaggttgccactgaccattcatacgttcgattggccttagtagcagtcagtccaatccagctatgggtaggattcttcttcttccagacgatcatcatgaatttgttccaggttttcggtcccatctcagccgtcaacaataatagcaagaactactccggagctcctccgaaacgactcgaccgcgagtttcataacttgccgcacgtcacgattcaaatgccagtgtataaggaaggcttgagaggtgtcatcataccgaccgttcagtcgttgaagcagtgcatctctacctatgagcttcagggcggttccgctaacatcttcgtcaacgatgacggaatgcaactcatctccgaggaagaaggccaagcccgccgggacttctatgacgagaataacatcggctgggtttcccgtcccaaacataaccccaagcctgagaacggagagcgagcattccagcgtcgcggcaagttcaagaaggcatcgaacatgaactacgctctaatggtcagcaaccgggtcgaagacaaactggttcagacgcaaagatctagtacatggacacaggaagacgagctcgccgcttatgaacggtgtctcacagagattctcgaagaggatgagggtcgcacttgggctgagggaaatatccgcattggtgactacatactgcttattgactctgatacccgtgttcctgaagactgtctactcgacgctgttagtgagatggaacaatccccttcggttgccattttacaattttcctctggcgtcatgaaagtctcggagtcattcttcgaaggaggtgtcgagtggttcaccaacctgatctattccgctatcacattctgcgtatctatcggtgactccgtccctttcgtcggccacaacgccgtgctccgttggtctgctgtacaagaagccgcttcctacaccgatgaggacggctacgagaaattctggtccgagtcccacgtgtctgaggatttcgatatgtctctccgtctccaatgtgcaggctacgactgccggttcgcctcatacacgggcggtggctttaaagagggtgtctccctaactgtatatgatgagctcgcacgttgggagaaatacgcctacggctgtaacgaattgctgttccaccctctgcgatactggccaactcgcggccccatcacgcctctcttccgcaaattcatcggctcgtgcattgatctgcccaagaagatcacgatctgcagttatatcggtacctactacgccatcgcttcggcctggatcctcaccctcctcaactacttcttgactggttggttctacggtctagtcgacaagtactacctcgactctttcgccatcttcgtctccatcgtcgtcgttttcaccgcattcggaaatgtctcgcttgctgtcctgcggtatagactcaacgaacagagtctcctctcagccttctgggacaacttcaagtggatccccctcttcaccatcttcatgggtggtctctccctccacgtttcacaagctcttctatgccatttcttcagcatcgacatgacatggggtgccacggcaaaggaagtcgaagaagtcaacttcgtcgaagaggtaccccgtctcctgaagcgtttcaagggtacattcgtcttctgcttcgtcgtcactggtctgattatcgccggatactacggcttccctcacgagtggcgcatcacgtacttcgcgtctatttggcctctcggaatgacggctgttctgcacttcctcttgcctgtcgtgcttaaccccgctttgatggtgttcgcctggtag

SEQ ID NO: 18818 - protein, 920 aa, Muscodor strobelii
  misc_feature: SGI Peptide ID NO. 566316
  misc_feature (20)..(920): NCBI GI: 116197907 Blast Desc: CHGG_07109 [Chaetomium globosum CBS 148.51] gi|88178388|gb|EAQ85856.1| CHGG_07109 [Chaetomium globosum CBS 148.51]
  misc_feature (1)..(920): NCBI GI: 21622366 Blast Desc: [Neurospora crassa]
  misc_feature (1)..(877): NCBI GI: 156055236 Blast Desc: SS1G_04969 [Sclerotinia sclerotiorum 1980] gi|154702754|gb|EDO02493.1| SS1G_04969 [Sclerotinia sclerotiorum 1980]
  misc_feature (1)..(920): NCBI GI: 164426471 Blast Desc: NCU04223 [Neurospora crassa OR74A] gi|157071348|gb|EAA31611.2| conserved [Neurospora crassa OR74A]
  misc_feature (1)..(920): NCBI GI: 261358014 Blast Desc: conserved [Verticillium albo-atrum VaMs.102]
  misc_feature (96)..(920): NCBI GI: 261360281 Blast Desc: conserved [Verticillium albo-atrum VaMs.102]
  misc_feature (1)..(810): NCBI GI: 171693803 Blast Desc: protein product [Podospora anserina] gi|170946850|emb|CAP73654.1| protein product [Podospora anserina]
  misc_feature (4)..(920): NCBI GI: 39970215 Blast Desc: conserved [Magnaporthe grisea 70-15] gi|149209613|ref|XP_001522181.1| MGCH7_ch7g289 [Magnaporthe grisea 70-15] gi|86196244|gb|EAQ70882.1| MGCH7_ch7g289 grisea
  misc_feature (4)..(920): NCBI GI: 116194047 Blast Desc: conserved [Chaetomium globosum CBS 148.51] gi|88182654|gb|EAQ90122.1| conserved [Chaetomium globosum CBS 148.51]
  misc_feature (96)..(920): NCBI GI: 85090203 Blast Desc: NCU09906 [Neurospora crassa OR74A] gi|28919654|gb|EAA29069.1| conserved [Neurospora crassa OR74A]
MSFLKSYFAPGKGKGKDESEKKGKGNKASQASQVVSETDMKTLRPDGRGVMRGPAATPNTLISGTATPMSFNGSRPASLYPGSTFPSGDFRNAESLVDIKADVMCSWLYQQQLERQYATGILPGEGVILKKGRSNYACCPPQLQDMKYGLFDMAMELNVRCAMTVNTRVINVILASRRTNYDYIPLPDGLRLQVLPSMRELPKCQKHHFAAFIQDLQIMVVWDDEPKKVLARADVLERQLMKMIWGTGDEEEEEDETEKGEKGQGVEVDVAPVDLESGSDAKDRRVKLTSPLGVALTLAFSISVIGIGYRKLAFEVATDHSYVRLALVAVSPIQLWVGFFFFQTIIMNLFQVFGPISAVNNNSKNYSGAPPKRLDREFHNLPHVTIQMPVYKEGLRGVIIPTVQSLKQCISTYELQGGSANIFVNDDGMQLISEEEGQARRDFYDENNIGWVSRPKHNPKPENGERAFQRRGKFKKASNMNYALMVSNRVEDKLVQTQRSSTWTQEDELAAYERCLTEILEEDEGRTWAEGNIRIGDYILLIDSDTRVPEDCLLDAVSEMEQSPSVAILQFSSGVMKVSESFFEGGVEWFTNLIYSAITFCVSIGDSVPFVGHNAVLRWSAVQEAASYTDEDGYEKFWSESHVSEDFDMSLRLQCAGYDCRFASYTGGGFKEGVSLTVYDELARWEKYAYGCNELLFHPLRYWPTRGPITPLFRKFIGSCIDLPKKITICSYIGTYYAIASAWILTLLNYFLTGWFYGLVDKYYLDSFAIFVSIVVVFTAFGNVSLAVLRYRLNEQSLLSAFWDNFKWIPLFTIFMGGLSLHVSQALLCHFFSIDMTWGATAKEVEEVNFVEEVPRLLKRFKGTFVFCFVVTGLIIAGYYGFPHEWRITYFASIWPLGMTAVLHFLLPVVLNPALMVFAW

SEQ ID NO: 18819 - DNA, 5447 bp, Muscodor strobelii
  misc_feature: SGI EST ID NO. CUFF.44535.0
  misc_feature: Variant of the nucleotide sequence at SEQ ID NO 18817
cgagaagaagcaaacaaacgcttctcttttcgtgcaagccaccgttcgcaccgttcaatatttaggtgaatacagcttatggacctggcctacggtagtggctgacggtccgggtttttcggcccagtcaagtcgagacgccagcatagtacctgcgctatctgttaccatctagattcctcggttcagccctcacaactgcatctcgtgcggctggattctggaatgtgtatgccgtgcgcctacaggcagtgtgcctgatatactcgtacagctctatcgttccaagacccatctatctaccttagcttggtccttctctacgataaactgatgctgggaacctgagagacctaagctcttgtaatcctcgaattccccgagcccgagccgacatttgctttgcactcttcctcattctgccctaagtatccatcattgtgaagctttgtgacagtcattcgtttcgtctatttgcttctcacggcttgctgtcatgagcttcctcaagtcctactttgcccctggcaaaggcaaaggcaaagatgagagcgagaaaaagggaaaagggaacaaagcttctcaagcgtctcaagtggtcagcgagactgatatgaagacgctccgacctgatggacgaggagtcatgagaggacctgcagcaacaccaaacactttaatttcaggtacagcgacaccgatgagttttaacggttcgcgacctgcctctttgtatcctggttccacattccctagcggtgactttcgaaatgccgagtccctagtcgatatcaaagccgatgtgatgtgcagttggctctatcaacagcaactggaaagacagtatgcaactggcatattaccgggagagggtgtcattctcaagaaggggcgtagcaattatgcctgctgtcctccgcagctgcaggacatgaagtatggcttgttcgacatggccatggagctcaatgtcagatgcgccatgaccgtcaataccagagtcataaacgttatcctagcttccaggcggacaaactacgattatattccacttcccgacggtttacggttacaagtcctgcctagcatgcgtgaacttcccaagtgtcagaaacatcacttcgcggcattcattcaggatctacagatcatggtggtttgggatgacgaacctaagaaggtgctcgctcgtgcagatgttctggaacgccaactcatgaagatgatatggggaaccggagatgaagaggaagaggaagacgaaacagagaaaggcgaaaagggccaaggggtcgaagttgacgtggcccccgtcgatctcgaatctggaagcgacgcaaaagacaggcgagtaaagctgacaagccctcttggtgttgctttgactctagcattctccatttctgttatcggcatcggatacaggaaactcgctttcgaggttgccactgaccattcatacgttcgattggccttagtagcagtcagtccaatccagctatgggtaggattcttcttcttccagacgatcatcatgaatttgttccaggttttcggtcccatctcagccgtcaacaataatagcaagaactactccggagctcctccgaaacgactcgaccgcgagtttcataacttgccgcacgtcacgattcaaatgccagtgtataaggaaggcttgagaggtgtcatcataccgaccgttcagtcgttgaagcagtgcatctctacctatgagcttcagggcggttccgctaacatcttcgtcaacgatgacggaatgcaactcatctccgaggaagaaggccaagcccgccgggacttctatgacgagaataacatcggctgggtttcccgtcccaaacataaccccaagcctgagaacggagagcgagcattccagcgtcgcggcaagttcaagaaggcatcgaacatgaactacgctctaatggtcagcaaccgggtcgaagacaaactggttcagacgcaaagatctagtacatggacacaggaagacgagctcgccgcttatgaacggtgtctcacagagattctcgaagaggatgagggtcgcacttgggctgagggaaatatccgcattggtgactacatactgcttattgactctgatacccgtgttcctgaagactgtctactcgacgctgttagtgagatggaacaatccccttcggttgccattttacaattttcctctggcgtcatgaaagtctcggagtcattcttcgaaggaggtgtcgagtggttcaccaacctgatctattccgctatcacattctgcgtatctatcggtgactccgtccctttcgtcggccacaacgccgtgctccgttggtctgctgtacaagaagccgcttcctacaccgatgaggacggctacgagaaattctggtccgagtcccacgtgtctgaggatttcgatatgtctctccgtctccaatgtgcaggctacgactgccggttcgcctcatacacgggcggtggctttaaagagggtgtctccctaactgtatatgatgagctcgcacgttgggagaaatacgcctacggctgtaacgaattgctgttccaccctctgcgatactggccaactcgcggccccatcacgcctctcttccgcaaattcatcggctcgtgcattgatctgcccaagaagatcacgatctgcagttatatcggtacctactacgccatcgcttcggcctggatcctcaccctcctcaactacttcttgactggttggttctacggtctagtcgacaagtactacctcgactctttcgccatcttcgtctccatcgtcgtcgttttcaccgcattcggaaatgtctcgcttgctgtcctgcggtatagactcaacgaacagagtctcctctcagccttctgggacaacttcaagtggatccccctcttcaccatcttcatgggtggtctctccctccacgtttcacaagctcttctatgccatttcttcagcatcgacatgacatggggtgccacggcaaaggaagtcgaagaagtcaacttcgtcgaagaggtaccccgtctcctgaagcgtttcaagggtacattcgtcttctgcttcgtcgtcactggtctgattatcgccggatactacggcttccctcacgagtggcgcatcacgtacttcgcgtctatttggcctctcggaatgacggctgttctgcacttcctcttgcctgtcgtgcttaaccccgctttgatggtgttcgcctggtaggcgatctggctagactggatgagaatttgggaggttcgtaatgataatggatatattggaaacgggtgataaagcaaggagttattatagaagaatgggatatatatatcggcccttatttcaaccatgtctacgctgggttcattggatgttcggattgcgctggtatataatgactacatacatctagactatataatactactatcacgatgattactctgcatcttaatttctatagttgtgatacattcaggggcgcaaagcatgactggagtgcaagctaattcaaagaacacaagaattgtatcttggtgggtttactgcgtacttcttttattcatgggccatgccatgactacgactctacagcaaacaaagtacactcgctctgctcaatgctatcatgtctccttctcccctatcccttccattgcctctcaatcccaccactctacaccaacccatcaaccttccaaatcttaatcgcggcatctcgtccagtagaaacgaccttcttcccaccatccacccaacaaacccccgtaacctcctccttatgcgcattcataactttgaccttccgattccctggctgcgctagactccaaacatacagattcgtatccaacgacccagaaacagcgtgcgtacccgcgtcattaaatgcgatgctagcgactctcgcagtatgtgccgaccatctgtcggtgataagttctaggtcggaggtcttgtacacatgaatcttccccgctgagttaccggatgcaagcatgctaccatctttcgagaatgtcaaggtggagatctgagcaagtgatctcgtggtttcgttcgcgagggtgagtttgttgctcccgtctactttatacacgcggactgcgttattcttcagcccgactgcgacgtaggagccactggcagcgatagccgttggttcagaatcagagatggcgagtgtcgttgacgcaccatccttggtgtagacctcgatgccgttaccagtagcaacatagaatcgcccatcagcagacgcaacagcttccggctgagactgaagcttcacaggtgagcctgtgaatttgtttgtagacccgtcgatcgatcgtagatggttgtcccaacccgcgctgaaagcttgtccgcctgcgcgcgcgaagccaataacggcttttccttcgtgagatgcaccgtcaatgactgtgccgactccagaagccaagtcccagctgcagactctgccatcaaatctactggctgttaacaaggtcttgctatcaccatcattatcaccgctcagcgatgtgactggtttgctgtgaccctgtacaactttgattggtttgtcgcttccaaccttcaagtagtttagatcgccacttgcactaagactgatgatcaagtcatcgcttcgcccctgaggccaaacaacaccaacctgctgatcatcaaaactggcaccaccagtagtgccaaaagtccaagtctgcaggaccttgccagattccacatcccataccttaacagtctggtccgcactagcagtaacgaatctcttcgagtcactagcccagctgacggcacatatacttcccttgtgctcgccctcaccaatcaacttgctgtgtctcatctccttcgcttcattgtcccactcatacaactggatacgctcgtccttcgcagcgcccacagtgatgagcttattgccgtccggcgagaatgcagctccgagaacagactgcttgtgcacatccgaagccttagacttgaagcgaaatggcggtccagctaagaaagacacagccgtatcctcacccacagtagccgcaaccatgggacgtgccggccgcatagcgacagcattgatagcttttgagtgtcccgacacttcaccaacagtgttgccgctatcaaccgttatgcatcgaccaaagttctcgattccatcaccaacagctatgattcgctggccatccatagtaaaggcaatgtcgttcactcgcttcgaagacatgatgtactcgcccaccgtcttagggccatcgggcaggtcctcccacactttgaggtttccattgacatcgccgcttacgatgcgcctcccgcccccagaaggaggtaatcggacgacggtggtgtcggccttgtgctcggtgtattgcttgctctcagaggggttgtc

SEQ ID NO: 18820 - DNA, 1869 bp, Muscodor strobelii
  misc_feature: SGI cDNA ID NO. 566317
  misc_feature: Elevated expression when VOC is produced
  misc_feature: Encodes the peptide sequence at SEQ ID NO 18821
atgtctattaccctcgagaagatcctcgcgccgtcgccagtgacagtgcgagctcgaccaacccagctctcttgcgacgcccaaggccagtggatagcctatgcttcagggaagtccatcttcttgcggtctgtcgacaacccctctgagagcaagcaatacaccgagcacaaggccgacaccaccgtcgtccgattacctccttctgggggcgggaggcgcatcgtaagcggcgatgtcaatggaaacctcaaagtgtgggaggacctgcccgatggccctaagacggtgggcgagtacatcatgtcttcgaagcgagtgaacgacattgcctttactatggatggccagcgaatcatagctgttggtgatggaatcgagaactttggtcgatgcataacggttgatagcggcaacactgttggtgaagtgtcgggacactcaaaagctatcaatgctgtcgctatgcggccggcacgtcccatggttgcggctactgtgggtgaggatacggctgtgtctttcttagctggaccgccatttcgcttcaagtctaaggcttcggatgtgcacaagcagtctgttctcggagctgcattctcgccggacggcaataagctcatcactgtgggcgctgcgaaggacgagcgtatccagttgtatgagtgggacaatgaagcgaaggagatgagacacagcaagttgattggtgagggcgagcacaagggaagtatatgtgccgtcagctgggctagtgactcgaagagattcgttactgctagtgcggaccagactgttaaggtatgggatgtggaatctggcaaggtcctgcagacttggacttttggcactactggtggtgccagttttgatgatcagcaggttggtgttgtttggcctcaggggcgaagcgatgacttgatcatcagtcttagtgcaagtggcgatctaaactacttgaaggttggaagcgacaaaccaatcaaagttgtacagggtcacagcaaaccagtcacatcgctgagcggtgataatgatggtgatagcaagaccttgttaacagccagtagatttgatggcagagtctgcagctgggacttggcttctggagtcggcacagtcattgacggtgcatctcacgaaggaaaagccgttattggcttcgcgcgcgcaggcggacaagctttcagcgcgggttgggacaaccatctacgatcgatcgacgggtctacaaacaaattcacaggctcacctgtgaagcttcagtctcagccggaagctgttgcgtctgctgatgggcgattctatgttgctactggtaacggcatcgaggtctacaccaaggatggtgcgtcaacgacactcgccatctctgattctgaaccaacggctatcgctgccagtggctcctacgtcgcagtcgggctgaagaataacgcagtccgcgtgtataaagtagacgggagcaacaaactcaccctcgcgaacgaaaccacgagatcacttgctcagatctccaccttgacattctcgaaagatggtagcatgcttgcatccggtaactcagcggggaagattcatgtgtacaagacctccgacctagaacttatcaccgacagatggtcggcacatactgcgagagtcgctagcatcgcatttaatgacgcgggtacgcacgctgtttctgggtcgttggatacgaatctgtatgtttggagtctagcgcagccagggaatcggaaggtcaaagttatgaatgcgcataaggaggaggttacgggggtttgttgggtggatggtgggaagaaggtcgtttctactggacgagatgccgcgattaagatttggaaggttgatgggttggtgtag

SEQ ID NO: 18821 - protein, 622 aa, Muscodor strobelii
  misc_feature: SGI Peptide ID NO. 566317
  misc_feature (231)..(270): Pfam Id: PF00400 Pfam Desc: WD domain, G-beta repeat
  misc_feature (579)..(617): Pfam Id: PF00400 Pfam Desc: WD domain, G-beta repeat
  misc_feature (535)..(573): Pfam Id: PF00400 Pfam Desc: WD domain, G-beta repeat
  misc_feature (1)..(620): NCBI GI: 154296323 Blast Desc: BC1G_12988 [Botryotinia fuckeliana B05.10] gi|150843446|gb|EDN18639.1| BC1G_12988 [Botryotinia fuckeliana B05.10]
  misc_feature (1)..(621): NCBI GI: 156055768 Blast Desc: SS1G_05236 [Sclerotinia sclerotiorum 1980] gi|154703020|gb|EDO02759.1| SS1G_05236 [Sclerotinia sclerotiorum 1980]
  misc_feature (1)..(621): NCBI GI: 145612643 Blast Desc: MGG_07273 [Magnaporthe grisea 70-15] gi|145019777|gb|EDK04005.1| MGG_07273 [Magnaporthe grisea 70-15]
  misc_feature (1)..(621): NCBI GI: 116201539 Blast Desc: conserved [Chaetomium globosum CBS 148.51] gi|88177172|gb|EAQ84640.1| conserved [Chaetomium globosum CBS 148.51]
  misc_feature (2)..(621): NCBI GI: 46136881 Blast Desc: FG09956.1 [Gibberella zeae PH-1]
  misc_feature (1)..(621): NCBI GI: 171677931 Blast Desc: protein product [Podospora anserina] gi|170937034|emb|CAP61693.1| protein product [Podospora anserina]
  misc_feature (2)..(621): NCBI GI: 27311839 Blast Desc: [Arabidopsis thaliana]
  misc_feature (1)..(621): NCBI GI: 85085839 Blast Desc: NCU03944 [Neurospora crassa OR74A] gi|11359678|pir||T49741 related to stress protein p66 [imported] - Neurospora crassa gi|28918676|gb|EAA28347.1| NCU03944 crassa to
  misc_feature (2)..(621): NCBI GI: 256731724 Blast Desc: [Nectria haematococca mpVI 77-13-4]
  misc_feature (8)..(621): NCBI GI: 239610733 Blast Desc: actin cortical patch component [Ajellomyces dermatitidis ER-3]
  misc_feature: Useful for introducing or modulating the production of volatile compounds
MSITLEKILAPSPVTVRARPTQLSCDAQGQWIAYASGKSIFLRSVDNPSESKQYTEHKADTTVVRLPPSGGGRRIVSGDVNGNLKVWEDLPDGPKTVGEYIMSSKRVNDIAFTMDGQRIIAVGDGIENFGRCITVDSGNTVGEVSGHSKAINAVAMRPARPMVAATVGEDTAVSFLAGPPFRFKSKASDVHKQSVLGAAFSPDGNKLITVGAAKDERIQLYEWDNEAKEMRHSKLIGEGEHKGSICAVSWASDSKRFVTASADQTVKVWDVESGKVLQTWTFGTTGGASFDDQQVGVVWPQGRSDDLIISLSASGDLNYLKVGSDKPIKVVQGHSKPVTSLSGDNDGDSKTLLTASRFDGRVCSWDLASGVGTVIDGASHEGKAVIGFARAGGQAFSAGWDNHLRSIDGSTNKFTGSPVKLQSQPEAVASADGRFYVATGNGIEVYTKDGASTTLAISDSEPTAIAASGSYVAVGLKNNAVRVYKVDGSNKLTLANETTRSLAQISTLTFSKDGSMLASGNSAGKIHVYKTSDLELITDRWSAHTARVASIAFNDAGTHAVSGSLDTNLYVWSLAQPGNRKVKVMNAHKEEVTGVCWVDGGKKVVSTGRDAAIKIWKVDGLV

SEQ ID NO: 18822 - DNA, 5909 bp, Muscodor strobelii
  misc_feature: SGI EST ID NO. CUFF.44536.1
  misc_feature: Variant of the nucleotide sequence at SEQ ID NO 18820
ccttgggtttggcgcgtcgacgattgacgacgaacaaaatgatcgatactttgcattattcaacttaaccacgagaggtgctgttgacttctgaaaaaaaaccaggaggtagtccctcgtccatcttgatcctctctctcataccgccatcatgtctattaccctcgagaagatcctcgcgccgtcgccagtgacagtgcgagctcgaccaacccagctctcttgcgacgcccaaggccagtggatagcctatgcttcagggaagtccatcttcttgcggtctgtcgacaacccctctgagagcaagcaatacaccgagcacaaggccgacaccaccgtcgtccgattacctccttctgggggcgggaggcgcatcgtaagcggcgatgtcaatggaaacctcaaagtgtgggaggacctgcccgatggccctaagacggtgggcgagtacatcatgtcttcgaagcgagtgaacgacattgcctttactatggatggccagcgaatcatagctgttggtgatggaatcgagaactttggtcgatgcataacggttgatagcggcaacactgttggtgaagtgtcgggacactcaaaagctatcaatgctgtcgctatgcggccggcacgtcccatggttgcggctactgtgggtgaggatacggctgtgtctttcttagctggaccgccatttcgcttcaagtctaaggcttcggatgtgcacaagcagtctgttctcggagctgcattctcgccggacggcaataagctcatcactgtgggcgctgcgaaggacgagcgtatccagttgtatgagtgggacaatgaagcgaaggagatgagacacagcaagttgattggtgagggcgagcacaagggaagtatatgtgccgtcagctgggctagtgactcgaagagattcgttactgctagtgcggaccagactgttaaggtatgggatgtggaatctggcaaggtcctgcagacttggacttttggcactactggtggtgccagttttgatgatcagcaggttggtgttgtttggcctcaggggcgaagcgatgacttgatcatcagtcttagtgcaagtggcgatctaaactacttgaaggttggaagcgacaaaccaatcaaagttgtacagggtcacagcaaaccagtcacatcgctgagcggtgataatgatggtgatagcaagaccttgttaacagccagtagatttgatggcagagtctgcagctgggacttggcttctggagtcggcacagtcattgacggtgcatctcacgaaggaaaagccgttattggcttcgcgcgcgcaggcggacaagctttcagcgcgggttgggacaaccatctacgatcgatcgacgggtctacaaacaaattcacaggctcacctgtgaagcttcagtctcagccggaagctgttgcgtctgctgatgggcgattctatgttgctactggtaacggcatcgaggtctacaccaaggatggtgcgtcaacgacactcgccatctctgattctgaaccaacggctatcgctgccagtggctcctacgtcgcagtcgggctgaagaataacgcagtccgcgtgtataaagtagacgggagcaacaaactcaccctcgcgaacgaaaccacgagatcacttgctcagatctccaccttgacattctcgaaagatggtagcatgcttgcatccggtaactcagcggggaagattcatgtgtacaagacctccgacctagaacttatcaccgacagatggtcggcacatactgcgagagtcgctagcatcgcatttaatgacgcgggtacgcacgctgtttctgggtcgttggatacgaatctgtatgtttggagtctagcgcagccagggaatcggaaggtcaaagttatgaatgcgcataaggaggaggttacgggggtttgttgggtggatggtgggaagaaggtcgtttctactggacgagatgccgcgattaagatttggaaggttgatgggttggtgtagagtggtgggattgagaggcaatggaagggataggggagaaggagacatgatagcattgagcagagcgagtgtactttgtttgctgtagagtcgtagtcatggcatggcccatgaataaaagaagtacgcagtaaacccaccaagatacaattcttgtgttctttgaattagcttgcactccagtcatgctttgcgcccctgaatgtatcacaactatagaaattaagatgcagagtaatcatcgtgatagtagtattatatagtctagatgtatgtagtcattatataccagcgcaatccgaacatccaatgaacccagcgtagacatggttgaaataagggccgatatatatatcccattcttctataataactccttgctttatcacccgtttccaatatatccattatcattacgaacctcccaaattctcatccagtctagccagatcgcctaccaggcgaacaccatcaaagcggggttaagcacgacaggcaagaggaagtgcagaacagccgtcattccgagaggccaaatagacgcgaagtacgtgatgcgccactcgtgagggaagccgtagtatccggcgataatcagaccagtgacgacgaagcagaagacgaatgtacccttgaaacgcttcaggagacggggtacctcttcgacgaagttgacttcttcgacttcctttgccgtggcaccccatgtcatgtcgatgctgaagaaatggcatagaagagcttgtgaaacgtggagggagagaccacccatgaagatggtgaagagggggatccacttgaagttgtcccagactagaagtatcaagttagttaacgttatgacttaaatggggaatgtatagagcttacaggctgagaggagactctgttcgttgagtctataccgcaggacagcaagcgagacatttccgaatgcggtgaaaacgacgacgatggagacgaagatggcgaaagagtcgaggtagtacttgtcgactagaccgtagaaccaaccagtcaagaagtagttgaggagggtgaggatccaggccgaagcgatggcgtagtaggtaccgatataactgcagatcgtgatcttcttgggcagatcaatgcacgagccgatgaatttgcggaagagaggcgtgatggggccgcgagttggccagtatcgcagagggtggaacagcaattcgttacagccgtaggcgtatttctcccaacgtgcgagctcatcatatacagttagggagacaccctctttaaagccaccgcccgtgtatgaggcgaaccggcagtcgtagcctgcacattggagacggagagacatatcgaaatcctcagacacgtgggactcggaccagaatttctcgtagccgtcctcatcggtgtaggaagcggcttcttgtacagcagaccaacggagcacggcgttgtggccgacgaaagggacggagtcaccgatagatacgcagaatgtgatagcggaatagatcaggttggtgaaccactcgacactgtgaaattttgttagtatacttgatggtctggattattaaaaggtcgttcgttacttaccctccttcgaagaatgactccgagactttcatgacgccagaggaaaattgtaaaatggcaaccgaaggggattgttccatctcactaacagcgtcgagtagacagtcttcaggaacacgggtatcagagtcaataagcagtatgtagtcaccaatgcggatatttccctcagcccaagtgcgaccctcatcctcttcgagaatctctgtgagacaccgttcataagcggcgagctcgtcttcctgtgtccatgtactagatctttgcgtctgaaccagtttgtcttcgacccggttgctgaccattagagcgtagttcatgttcgatgccttcttgaacttgccgcgacgctggaatgctcgctctccgttctcaggcttggggttatgtttgggacgggaaacccagccgatgttattctcgtcatagaagtcccggcgggcttggccttcttcctcggagatgagttgcattccgtcatcgttgacgaagatgttagcggaaccgccctgaagctcataggtagagatgcactgcttcaacgactgaacggtcggtatgatgacacctctcaagccttccttatacactggcatttgaatcgtgacgtgcggcaagttatgaaactcgcggtcgagtcgtttcggaggagctccggagtagttcttgctattattgttgacggctgagatgggaccgaaaacctggaacaaattcatgatgatcgtctggaagaagaagaatcctacccatagctggattggactgactgctactaaggccaatcgaacgtatgaatggtcagtggcaacctcgaaagcgagtttcctgtatccgatgccgataacagaaatggagaatgctagagtcaaagcaacaccaagagggcttgtcagctttactcgcctgtcttttgcgtcgcttccagattcgagatcgacgggggccacgtcaacttcgaccccttggcccttttcgcctttctctgtttcgtcttcctcttcctcttcatctccggttccccatatcatcttcatgagttggcgttccagaacatctgcacgagcgagcaccttcttaggttcgtcatcccaaaccaccatgatctgtagatcctgaatgaatgccgcgaagtgatgtttctgacacttgggaagttcacgcatgctaggcaggacttgtaaccgtaaaccgtcgggaagtggaatataatcgtagtttgtccgcctggaagctaggataacgtttatgactctggtattgacggtcatggcgcactacctcaaagattagcatttcctatagaaatcttgtaagggaagtggagatacctactctgacattgagctccatggccatgtcgaacaagccatacttcatgtcctgcagctgcggaggacagcaggcataattgctacgccccttcttgagaatgacaccctctcccggtaatatgccagttgcatactgtctttccagttgctgttgatagagccaactgcacatcacatcggctttgatatcgactagggactcggcatttcgaaagtcaccgctagggaatgtggaaccaggatacaaagaggcaggtcgcgaaccgttaaaactcatcggtgtcgctgtacctgaaattaaagtgtttggtgttgctgcaggtcctctcatgactcctcgtccatcaggtcggagcgtcttcatatcagtctcgctgaccacttgagacgcttgagaagctttgttcccttttccctttttctcgctctcatctttgcctttgcctttgccaggggcaaagtaggacttgaggaagctcatgacagcaagccgtgagaagcaaatagacgaaacgaatgactgtcacaaagcttcacaatgatggatacttagggcagaatgaggaagagtgcaaagcaaatgtcggctcgggctcggggaattcgaggattacaagagcttaggtctctcaggttcccagcatcagtttatcgtagagaaggaccaagctaaggtagatagatgggtcttggaacgatagagctgtacgagtatatcaggcacactgcctgtaggcgcacggcatacacattccagaatccagccgcacgagatgcagttgtgagggctgaaccgaggaatctagatggtaacagatagcgcaggtactatgctggcgtctcgacttgactgggccgaaaaacccggaccgtcagccactaccgtaggccaggtccataagctgtattcacctaaatattgaacggtgcgaacggtggcttgcacgaaaagagaagcgtttgtttgcttcttctcg

SEQ ID NO: 18823 - DNA, 1647 bp, Muscodor strobelii
  misc_feature: SGI cDNA ID NO. 566318
  misc_feature: Encodes the peptide sequence at SEQ ID NO 18824
atgagcgactggggtaccggcgcctcagctgattggggtaacccttctggagccaaaagagcttccaacgacgacttcggcaccgacaatttcggcaccgacaacactggctttgaccatggtggcggccagagcggattcactgcccccgaagacttcagcgtcccgaccaacttggatggcgccgatgacggcttcggtggtgctaccaatggctttgacgagtctgccggagagggccgaggtggcggcggaggctgcttcaattgtggcgaggaaggccacaacaaggctgattgccctaatccccgcgtcatgaagtgtcgtcactgcaatgaggagggccacatggttcgcgactgcccgactgctccccctcaggagttcacgggcgagtgtcgcatctgcaaccagcagggccacatggccaaggactgtcccgagaagcccgcccaggtgtgcttcaactgcaaggaggagggacacactactatcgagtgcaagaacccacgcaaggtagaccgttctcacttggaggagatcaacgcggatgtcgcctgggacaggctcactcttgcggccaaggagagagacatggacgacgtgaaggaggccgtacagctctacgttaaagcagtccctgagtctacttacgtcgatcttgaggaggccttccgtatccaggatatgggtgtctacctgatcgccattgagaagccggctatgcttccgggcttcaccaacatggacctccagggcaatctggagaagaagttctctgtcacttaccgcttcagtgacaagccgacccgccctcgcgagcgagagctctggccctcttcatccaaggagaatctcgagcgcctgaaagatgctggcgaagttgtcgagcgtggcctcaaaaagtgcagcaattgcagcgagctgggccatgtttccaagaactgtccccaggagaagaatgaggtcgagcgtgtcgtcgttacctgctacaattgcggagaggtcggccatcgtgttcgcgagtgtcctctccctcgtatcgacaagttcgcttgcaagaactgcggccagggtggacacaaggctgccgactgcaccgagcctcgccccgagcgagatgctgctgatgtcgagtgccgcaaatgtggcgagatgggccatttctctcgagactgccctcagggaggcggcggcggcggagcccgcggatgtttcaactgtggccaagagggtcactctgcccgcgactgtacggaggaaaagaagatcatctgccgcaactgtgatcaggaaggtcacacctcgcgcgagtgcaccgagccgaagaacatggacaaggttcaatgccgaaactgcgatgagtacggccacgagagccgaggatgccccaagcctcgagactacagccgcgtcacttgccagaactgtggcgagaaaggtcacaccaagacccgttgcaagcagcccactgttccgcctgaggactttcccgagggtgacggaggctccgctgctttcaacgatggagctgctgacccgatgtcttctggtcccgccgattgggagaccaaggctgccggtggtggtggcgacgattgggagaccaatgttcccagtggaggccgtaacgattccgcctggtga

SEQ ID NO: 18824 - protein, 548 aa, Muscodor strobelii
  misc_feature: SGI Peptide ID NO. 566318
  misc_feature (403)..(420): Pfam Id: PF00098 Pfam Desc: Zinc knuckle
  misc_feature (378)..(395): Pfam Id: PF00098 Pfam Desc: Zinc knuckle
  misc_feature (328)..(345): Pfam Id: PF00098 Pfam Desc: Zinc knuckle
  misc_feature (85)..(102): Pfam Id: PF00098 Pfam Desc: Zinc knuckle
  misc_feature (106)..(123): Pfam Id: PF00098 Pfam Desc: Zinc knuckle
  misc_feature (424)..(441): Pfam Id: PF00098 Pfam Desc: Zinc knuckle
  misc_feature (131)..(148): Pfam Id: PF00098 Pfam Desc: Zinc knuckle
  misc_feature (301)..(318): Pfam Id: PF00098 Pfam Desc: Zinc knuckle
  misc_feature (351)..(368): Pfam Id: PF00098 Pfam Desc: Zinc knuckle
  misc_feature (152)..(169): Pfam Id: PF00098 Pfam Desc: Zinc knuckle
  misc_feature (472)..(489): Pfam Id: PF00098 Pfam Desc: Zinc knuckle
  misc_feature (86)..(466): NCBI GI: 156065797 Blast Desc: SS1G_00909 [Sclerotinia sclerotiorum 1980] gi|154691768|gb|EDN91506.1| SS1G_00909 [Sclerotinia sclerotiorum 1980]
  misc_feature (108)..(532): NCBI GI: 85099515 Blast Desc: NCU08933 [Neurospora crassa OR74A] gi|28922325|gb|EAA31564.1| [Neurospora crassa OR74A] gi|28950135|emb|CAD70993.1| conserved [Neurospora crassa]
  misc_feature (108)..(534): NCBI GI: 261351744 Blast Desc: cellular nucleic acid-binding protein [Verticillium albo-atrum VaMs.102]
  misc_feature (4)..(466): NCBI GI: 171694395 Blast Desc: protein product [Podospora anserina] gi|170947146|emb|CAP73951.1| protein product [Podospora anserina]
  misc_feature (82)..(466): NCBI GI: 154301789 Blast Desc: BC1G_10046 [Botryotinia fuckeliana B05.10] gi|150855708|gb|EDN30900.1| BC1G_10046 [Botryotinia fuckeliana B05.10]
  misc_feature (37)..(492): NCBI GI: 46137255 Blast Desc: FG10143.1 [Gibberella zeae PH-1]
  misc_feature (10)..(466): NCBI GI: 46137255 Blast Desc: FG10143.1 [Gibberella zeae PH-1]
  misc_feature (28)..(520): NCBI GI: 116197647 Blast Desc: CHGG_06979 [Chaetomium globosum CBS 148.51] gi|88178258|gb|EAQ85726.1| CHGG_06979 [Chaetomium globosum CBS 148.51]
  misc_feature (26)..(466): NCBI GI: 39975827 Blast Desc: MGG_06160 [Magnaporthe grisea 70-15] gi|145011531|gb|EDJ96187.1| MGG_06160 [Magnaporthe grisea 70-15]
  misc_feature (61)..(492): NCBI GI: 242791199 Blast Desc: zinc knuckle transcription factor (CnjB), [Talaromyces stipitatus ATCC 10500] gi|218718298|gb|EED17718.1| zinc knuckle transcription factor (CnjB), [Talaromyces stipitatus ATCC 10500]
MSDWGTGASADWGNPSGAKRASNDDFGTDNFGTDNTGFDHGGGQSGFTAPEDFSVPTNLDGADDGFGGATNGFDESAGEGRGGGGGCFNCGEEGHNKADCPNPRVMKCRHCNEEGHMVRDCPTAPPQEFTGECRICNQQGHMAKDCPEKPAQVCFNCKEEGHTTIECKNPRKVDRSHLEEINADVAWDRLTLAAKERDMDDVKEAVQLYVKAVPESTYVDLEEAFRIQDMGVYLIAIEKPAMLPGFTNMDLQGNLEKKFSVTYRFSDKPTRPRERELWPSSSKENLERLKDAGEVVERGLKKCSNCSELGHVSKNCPQEKNEVERVVVTCYNCGEVGHRVRECPLPRIDKFACKNCGQGGHKAADCTEPRPERDAADVECRKCGEMGHFSRDCPQGGGGGGARGCFNCGQEGHSARDCTEEKKIICRNCDQEGHTSRECTEPKNMDKVQCRNCDEYGHESRGCPKPRDYSRVTCQNCGEKGHTKTRCKQPTVPPEDFPEGDGGSAAFNDGAADPMSSGPADWETKAAGGGGDDWETNVPSGGRNDSAW

SEQ ID NO: 18825 - DNA, 3011 bp, Muscodor strobelii
  misc_feature: SGI EST ID NO. CUFF.44256.0
  misc_feature: Variant of the nucleotide sequence at SEQ ID NO 18823
ctcaaccgccatcgaattccatctttgtttactccgctccactgccttcccaagttcactggtatctcctcttctcgcgtgggatcaccaatctttatcccactatctgacttcatgttcacatcgctcacagcctattgtgttgtcgactcccaaacccaaatacgtgagcagcatcgcctaattccttctaatctttgtttactcctctttcttcatgagacactcatcgcaaaggactcccatccacaagagattgttactcaattttgagtgagcagaagcggtacatctcttccacccttcaacccttccaccttgcctcgcgccttccaatgacataagttgtctagaaagttaaaagtgcgattcatttccatggtcctctaccctacctatctcacacaaagtcatctaactctctaatctcacacatctcactgcccacagacttgttgtatttcgacatctgccctccgattcctgtcaaccctgcctatttcattccaccctgtctcttctgttccaagggttgttgatgtacttcaatcaccaaccagactattctctaatgcttcccatagagcaacgtcagtcaagatgagcgactggggtaccggcgcctcagctgattggggtaacccttctggagccaaaagagcttccaacgacgacttcggcaccgacaatttcggcaccgacaacactggctttgaccatggtggcggccagagcggattcactgcccccgaagacttcagcgtcccgaccaacttggatggcgccgatgacggcttcggtggtgctaccaatggctttgacgagtctgccggagagggccgaggtggcggcggaggctgcttcaattgtggcgaggaaggccacaacaaggctgattgccctaatccccgcgtcatgaagtgtcgtcactgcaatgaggagggccacatggttcgcgactgcccgactgctccccctcaggagttcacgggcgagtgtcgcatctgcaaccagcagggccacatggccaaggactgtcccgagaagcccgcccaggtgtgcttcaactgcaaggaggagggtaagtcttttcttcttgaatatttattcttgttccctgaatttagctaacattgatatttacaaggacacactactatcgagtgcaagaacccacgcaaggtagaccgttctcacttggaggagatcaacgcggatgtcgcctgggacaggctcactcttgcggccaaggagagagacatggacgacgtgaaggaggccgtacagctctacgttaaagcagtccctgagtctacttacgtcgatcttgaggaggccttccgtatccaggatatgggtgtctacctgatcgccattgagaagccggctatgcttccgggcttcaccaacatggacctccagggcaatctggagaagaagttctctgtcacttaccgcttcagtgacaagccgacccgccctcgcgagcgagagctctggccctcttcatccaaggagaatctcgagcgcctgaaagatgctggcgaagttgtcgagcgtggcctcaaaaagtgcagcaattgcagcgagctgggccatgtttccaagaactgtccccaggagaagaatgaggtcgagcgtgtcgtcgttacctgctacaattgcggagaggtcggccatcgtgttcgcgagtgtcctctccctcgtatcgacaagttcgcttgcaagaactgcggccagggtggacacaaggctgccgactgtgagtagatatgagttcacgctggtaggcatcaggttggattaacatgtcaataggcaccgagcctcgccccgagcgagatgctgctgatgtcgagtgccgcaaatgtggcgagagtaagtcatctcccacggttcatcaaagagtatttctcattatatttctcagtgggccatttctctcgagactgccctcagggaggcggcggcggcggagcccgcggatgtttcaactgtggccaagagggtcactctgcccgcgactgtacggaggaaaagaagatcatctgccgcaactgtgatcaggaaggtcacacctcgcgcgagtgcaccgagccgaagaacatggacaaggttcaatgccgaaactgcgatgagtacggccacgagagccgaggatgccccaagcctcgagactacagccgcgtcacttgccagaactgtggcgagaaaggtcacaccaagacccgttgcaagcagcccactgttccgcctgaggactttcccgagggtgacggaggctccgctgctttcaacgatggagctgctgacccgatgtcttctggtcccgccgattgggagaccaaggctgccggtggtggtggcgacgattgggagaccaatgttcccagtggaggccgtaacgattccgcctggtgaagaagactgcaagcccgccttttgtcaagccttctacgatgcgagttgatattggacgcaaaaagggagtctttctgaaggtctttcagaaggaggctatgatgtttgcttttgagagttggtctgcgcacgtacaaggcactgaggaacaccgccttgtctctatttgatttcgagggtcatatgtgttgatgaccagctgacgtcttgacatggtgctagatagaggctgagattcatgtggtgaacattgcatgcaaagttctaccagatgatgctaggctactctagttcaggaagatagctgctgtccccaaaagtgattgtaagggactgtttacgcagtaaatacacgcaatgcattatatataaagacttcttgatgtatcgtgaacattagggcggcaacatggcgacgaatgaagccgcgtgaatgcacatgttcattgctgaacttctgtggtatattccagcttctaattgtctgataccaggagtccccgattacaccgatgtctaccccctcctgttggcttgcttgagacggcctaggggccaggtttgaggggcatcaatagccccgcagtccc

SEQ ID NO: 18826 - DNA, 405 bp, Muscodor strobelii
  misc_feature: SGI cDNA ID NO. 566319
  misc_feature: Elevated expression when VOC is produced
  misc_feature: Encodes the peptide sequence at SEQ ID NO 18827
atgggtctctcaggacactgtctctgcggtcaggtgaagtacaccgttgactctgatcccctcaacgtcgcctacgatcattgcgacgactgccagcgccaaactggatcgacatactctcttgtcgttgttgtccctgagagcaaagtctctgttaccggcccaaccaagacctacatcggaactggcggttctggccagcccgtccaccgtgtcttctgtggcgagtgcggttctcccatctaccacgaccccaaggtcgctcccatcattgccctcaaggctggcaccctctccaccgaggacaagaaggctctcaagcccactaccgagatcttcgccaaggacaagcttcctttcatgaccgagaagctcgagaacgtcttcgacaccatgcctcactaa

SEQ ID NO: 18827 - protein, 134 aa, Muscodor strobelii
  misc_feature: SGI Peptide ID NO. 566319
  misc_feature (24)..(123): Pfam Id: PF04828 Pfam Desc: Glutathione-dependent formaldehyde-activating enzyme
  misc_feature (27)..(123): Pfam Id: PF04828 Pfam Desc: Glutathione-dependent formaldehyde-activating enzyme
  misc_feature (1)..(134): NCBI GI: 115401828 Blast Desc: conserved [Aspergillus terreus NIH2624] gi|114190443|gb|EAU32143.1| conserved [Aspergillus terreus NIH2624]
  misc_feature (1)..(133): NCBI GI: 242812285 Blast Desc: DUF636 domain protein [Talaromyces stipitatus ATCC 10500] gi|218714265|gb|EED13688.1| DUF636 domain protein [Talaromyces stipitatus ATCC 10500]
  misc_feature (1)..(133): NCBI GI: 255930821 Blast Desc: Pc12g00650 [Penicillium chrysogenum Wisconsin 54-1255] gi|211581586|emb|CAP79692.1| Pc12g00650 [Penicillium chrysogenum Wisconsin 54-1255]
  misc_feature (1)..(133): NCBI GI: 145242054 Blast Desc: An09g03560 [Aspergillus niger] gi|134078218|emb|CAK96799.1| protein product [Aspergillus niger]
  misc_feature (1)..(133): NCBI GI: 212544372 Blast Desc: DUF636 domain protein [Penicillium marneffei ATCC 18224] gi|210065309|gb|EEA19403.1| DUF636 domain protein [Penicillium marneffei ATCC 18224]
  misc_feature (1)..(133): NCBI GI: 238488725 Blast Desc: DUF636 domain protein [Aspergillus flavus NRRL3357] gi|220697988|gb|EED54328.1| DUF636 domain protein [Aspergillus flavus NRRL3357]
  misc_feature (1)..(134): NCBI GI: 67901214 Blast Desc: AN7594.2 [Aspergillus nidulans FGSC A4] gi|40742984|gb|EAA62174.1| AN7594.2 [Aspergillus nidulans FGSC A4] gi|259483921|tpe|CBF79705.1| TPA: DUF636 domain protein FGSC
  misc_feature (1)..(134): NCBI GI: 121716458 Blast Desc: DUF636 domain protein [Aspergillus clavatus NRRL 1] gi|119403971|gb|EAW14388.1| DUF636 domain protein [Aspergillus clavatus NRRL 1]
  misc_feature (1)..(133): NCBI GI: 46137323 Blast Desc: FG10177.1 [Gibberella zeae PH-1]
  misc_feature (1)..(133): NCBI GI: 145612267 Blast Desc: MGG_08201 [Magnaporthe grisea 70-15] gi|145019461|gb|EDK03689.1| MGG_08201 [Magnaporthe grisea 70-15]
  misc_feature: Useful for introducing or modulating the production of volatile compounds
MGLSGHCLCGQVKYTVDSDPLNVAYDHCDDCQRQTGSTYSLVVVVPESKVSVTGPTKTYIGTGGSGQPVHRVFCGECGSPIYHDPKVAPIIALKAGTLSTEDKKALKPTTEIFAKDKLPFMTEKLENVFDTMPH

SEQ ID NO: 18828 - DNA, 966 bp, Muscodor strobelii
  misc_feature: SGI EST ID NO. CUFF.44356.0
  misc_feature: Variant of the nucleotide sequence at SEQ ID NO 18826
ccccactcctcctcctcctcgcggtattgaagaagtatgaggatggagcagggctattcgcttgtttatgtcggaaagtattcaccggtatccgcaaacatggtgcttagctgtttacgtctatggctaccatgagagaagatcattctgatatgtgatatgcattaggttgtacgccaggatgacatccttatcccaacccatctctaccatagaccaatggtgtatataaagtgttagaagcctcttattttgccgtgctattcctcctctcttgaccattcccacatccttaacgcaaaaattacctcattgaacaccaatcttcttcgcatcattcaaaatgggtctctcaggacactgtctctgcggtcaggtgaagtacaccgttgactctgatcccctcaacgtcgcctacgatcattgcgacgactgccagcgccaaactggatcgacatactctcttgtcgttgttgtccctgagagcaaagtctctgttaccggcccaaccaagacctacatcggaactggcggttctggccagcccgtccaccgtgtcttctgtggcgagtgcggttctcccatctaccacgaccccaaggtcgctcccatcattgccctcaaggctggcaccctctccaccgaggacaagaaggctctcaagcccactaccgagatcttcgccaaggacaagcttcctttcatgaccgagaagctcgagaacgtcttcgacaccatgcctcactaaatgtgatatctcggatactgaactgattagaaatcgggacgattgaggacgaaaacgaaaagaacaaagtaaaatataccaaatgggagaataaatagaatttctgccccttttgatagacggagtgttgatagttgaatacgaaaacttatccactcctacatttgtgtcatctaccttgccttataattgttagtgccttatcgtgacttatccaa

SEQ ID NO: 18829 - DNA, 1755 bp, Muscodor strobelii
  misc_feature: SGI cDNA ID NO. 566320
  misc_feature: Encodes the peptide sequence at SEQ ID NO 18830
atggcctcgctatggcttctacgatcagctggtctgatctactatctgcgctatgggaacttcagcgatgttgtaattcttgtggctctgtcagcctggaagatagggcttgaccgcctcagtcagttggtggtagtcaatgcctggatggctacacaagcggctgcagttacagcattgttcttcactctgctacatttagcgcgtcggcgtagctcaacagcgatgacgctgaaacggacaggtattggccggcctttactatttccatgtgaaactacacatacgaggctttccccaaagaagcactcctttgcttattcatacttaatggttggcgtgccggttggttggactggcactgcgggtggtatgatatctgtagatgaactcgatcagaacggcaaaggttggtatactatcaatgctgctgattatcttgcacggggaaacggacatttgggattgagaggcaaactcgaccaattcctcaaaactcaaggggccgatccatcagagtttccatttgcttatttggtcactgctgctaagtttcttggttatcactttaatcctgtgtcgttttggtatctctactccgtagaaaagcggctcgcagccgccattctcgaagtcaataacacatttggcgagaggcgaatgtatttcctgacacgtggtgaaagtcaacttgaaactgtcaattcggagcccacgccaatgaagcaaacatggcccaaagacttccacgtatctccttttaattcgcgaagaggaacatactcgttggtcgcacaagatccgctggcgttgggtgtcgagtccatcaacaatacaataaacctgttatcttcgaaagatcaggcgaagctggttgcccgaatattttcagtaggacagtccatcgaccctacggaggtatcatccttgcgaagagtcacgtttctgatgaaatggtggtgggttggttttgtgacgtttcctcggatcgtcaaagaggctgccgttctgtacttcaaacggcgattgcatgtctggtatcggcctgagccgttgaaggagagcattagcaggcaagcgacgacgacagaatgcgagctcgagctcgccttcaggagatacctcagatatttggttgctcaatctccagcctcattgaatgtgcaatattgtccagcgggtattcctgatggcgtcgatgagcagatcttatcagccgcggctcaagcaaattctcaaaatgccgaacatctcgaaatcaaagttttgaccccggcattttacacaagattcgtttactatgcccacgactttgaggcaatgttctgtgaattcaaggaaaactgtacaatctcgatatcgaatccacaagttctaccaaagctcgtcatcaagaagccttcaccaccgctcaacacggccagttattctgactactgctacttcacagccatcaagaacatgcgtcatcgtccggggagaattcagcacccgcttacttcaaacgaaaccgcagcggtccaaagcccgcaagatatccgcgtgttccgtctttcgtcgatggacggatatgcattggcagacgaaaatgacgagttgcgccaacagtacaggcatctggtactgaaactcttcatcgctgattacatcgcagggggcagtatggaggttttgtggtttgaaatatttcttttccgtatcatgttatcttggacttttgtcatattgtgccagcctcatagaatatacccctga

SEQ ID NO: 18830 - protein, 584 aa, Muscodor strobelii
  misc_feature: SGI Peptide ID NO. 566320
  misc_feature (186)..(255): Pfam Id: PF07103 Pfam Desc: Domain of function (DUF1365)
  misc_feature (84)..(582): NCBI GI: 39946164 Blast Desc: MGG_08202 [Magnaporthe grisea 70-15] gi|145019462|gb|EDK03690.1| MGG_08202 [Magnaporthe grisea 70-15]
  misc_feature (79)..(571): NCBI GI: 28949987 Blast Desc: conserved [Neurospora crassa]
  misc_feature (45)..(571): NCBI GI: 169605207 Blast Desc: SNOG_05625 [Phaeosphaeria nodorum SN15] gi|111065569|gb|EAT86689.1| SNOG_05625 [Phaeosphaeria nodorum SN15]
  misc_feature (55)..(571): NCBI GI: 154304367 Blast Desc: BC1G_09059 [Botryotinia fuckeliana B05.10] gi|150854039|gb|EDN29231.1| BC1G_09059 [Botryotinia fuckeliana B05.10]
  misc_feature (212)..(578): NCBI GI: 256731759 Blast Desc: NECHADRAFT_41595 [Nectria haematococca mpVI 77-13-4]
  misc_feature (53)..(463): NCBI GI: 116179916 Blast Desc: CHGG_00586 [Chaetomium globosum CBS 148.51] gi|88184883|gb|EAQ92351.1| CHGG_00586 [Chaetomium globosum CBS 148.51]
  misc_feature (135)..(575): NCBI GI: 189193033 Blast Desc: conserved [Pyrenophora tritici-repentis Pt-1C-BFP] gi|187978419|gb|EDU45045.1| conserved [Pyrenophora tritici-repentis Pt-1C-BFP]
  misc_feature (212)..(576): NCBI GI: 46137325 Blast Desc: FG10178.1 [Gibberella zeae PH-1]
  misc_feature (175)..(571): NCBI GI: 164426251 Blast Desc: NCU01423 [Neurospora crassa OR74A] gi|157071261|gb|EAA31455.2| conserved [Neurospora crassa OR74A]
  misc_feature (59)..(323): NCBI GI: 156054964 Blast Desc: SS1G_04833 [Sclerotinia sclerotiorum 1980] gi|154702618|gb|EDO02357.1| SS1G_04833 [Sclerotinia sclerotiorum 1980]
MASLWLLRSAGLIYYLRYGNFSDVVILVALSAWKIGLDRLSQLVVVNAWMATQAAAVTALFFTLLHLARRRSSTAMTLKRTGIGRPLLFPCETTHTRLSPKKHSFAYSYLMVGVPVGWTGTAGGMISVDELDQNGKGWYTINAADYLARGNGHLGLRGKLDQFLKTQGADPSEFPFAYLVTAAKFLGYHFNPVSFWYLYSVEKRLAAAILEVNNTFGERRMYFLTRGESQLETVNSEPTPMKQTWPKDFHVSPFNSRRGTYSLVAQDPLALGVESINNTINLLSSKDQAKLVARIFSVGQSIDPTEVSSLRRVTFLMKWWWVGFVTFPRIVKEAAVLYFKRRLHVWYRPEPLKESISRQATTTECELELAFRRYLRYLVAQSPASLNVQYCPAGIPDGVDEQILSAAAQANSQNAEHLEIKVLTPAFYTRFVYYAHDFEAMFCEFKENCTISISNPQVLPKLVIKKPSPPLNTASYSDYCYFTAIKNMRHRPGRIQHPLTSNETAAVQSPQDIRVFRLSSMDGYALADENDELRQQYRHLVLKLFIADYIAGGSMEVLWFEIFLFRIMLSWTFVILCQPHRIYP

SEQ ID NO: 18831 - DNA, 465 bp, Muscodor strobelii
  misc_feature: SGI cDNA ID NO. 566321
  misc_feature: Reduced expression when VOC is produced
  misc_feature: Encodes the peptide sequence at SEQ ID NO 18832
atggatgactggaactccaccaccaagatcggaagcaagacccgaggcggcggtctgtctgagagagaaacagtcctccgcggcaactcggccatcaacgccgccaagcgctccggcggcgccatcaacacagagaagaagtactctacaggcaaccagatcggcaaaggccccgaaggccaacgcctaaccaaagtcgaccgcagcgacgacatcgtgaagcccaacaccatcggcaaggtagtaggcgacgccatctccgccgcccggcaaaagatggaacccaagatgacgcagaaggatctcgccaccaagtgcaataccacgcccaccgtcgtcggcgactttgagaggggcaccgctaccccagaccagaaggtgctctcagccatggagcgcgtgctcaacgtcaagctgcgtggccagggcatcggcgagcctaagttcaagcccaagggcaagtaa

SEQ ID NO: 18832 - protein, 154 aa, Muscodor strobelii
  misc_feature: SGI Peptide ID NO. 566321
  misc_feature (86)..(142): Pfam Id: PF01381 Pfam Desc: Helix-turn-helix
  misc_feature (2)..(78): Pfam Id: PF08523 Pfam Desc: Multiprotein bridging factor 1
  misc_feature (1)..(154): NCBI GI: 73621193 Blast Desc: MBF1_GIBFU RecName: Full=Multiprotein-bridging factor 1 gi|62953154|emb|CAG28684.1| multiprotein bridging factor [Gibberella fujikuroi]
  misc_feature (2)..(154): NCBI GI: 256732149 Blast Desc: [Nectria haematococca mpVI 77-13-4]
  misc_feature (2)..(154): NCBI GI: 189193359 Blast Desc: multiprotein-bridging factor 1 [Pyrenophora tritici-repentis Pt-1C-BFP] gi|187978582|gb|EDU45208.1| multiprotein-bridging factor 1 [Pyrenophora tritici-repentis
  misc_feature (1)..(154): NCBI GI: 169767726 Blast Desc: [Aspergillus oryzae RIB40] gi|238484637|ref|XP_002373557.1| coactivator bridging factor 1 (Mbf1), [Aspergillus flavus NRRL3357] gi|83766189|dbj|BAE56332.1|
  misc_feature (1)..(154): NCBI GI: 255944283 Blast Desc: Pc20g03580 [Penicillium chrysogenum Wisconsin 54-1255] gi|211587644|emb|CAP85687.1| Pc20g03580 [Penicillium chrysogenum Wisconsin 54-1255]
  misc_feature (3)..(154): NCBI GI: 242823112 Blast Desc: coactivator bridging factor 1 (Mbf1), [Talaromyces stipitatus ATCC 10500] gi|218712947|gb|EED12372.1| coactivator bridging factor 1 (Mbf1), [Talaromyces stipitatus ATCC 10500]
  misc_feature (1)..(154): NCBI GI: 212274985 Blast Desc: LOC100191971 [Zea mays] gi|194690308|gb|ACF79238.1| [Zea mays]
  misc_feature (1)..(154): NCBI GI: 145233989 Blast Desc: An02g12390 [Aspergillus niger] gi|134057307|emb|CAK44506.1| protein product [Aspergillus niger]
  misc_feature (1)..(154): NCBI GI: 71000070 Blast Desc: coactivator bridging factor 1 (Mbf1) [Aspergillus fumigatus Af293] gi|73621187|sp|Q4WX89.1|MBF1_ASPFU RecName: Full=Multiprotein-bridging factor 1 gi|66852389|gb|EAL92714.1| 1
  misc_feature (3)..(154): NCBI GI: 212546515 Blast Desc: coactivator bridging factor 1 (Mbf1), [Penicillium marneffei ATCC 18224] gi|210064931|gb|EEA19026.1| coactivator bridging factor 1 (Mbf1), [Penicillium marneffei ATCC 18224]
  misc_feature: Useful for introducing or modulating the production of volatile compounds
MDDWNSTTKIGSKTRGGGLSERETVLRGNSAINAAKRSGGAINTEKKYSTGNQIGKGPEGQRLTKVDRSDDIVKPNTIGKVVGDAISAARQKMEPKMTQKDLATKCNTTPTVVGDFERGTATPDQKVLSAMERVLNVKLRGQGIGEPKFKPKGK

SEQ ID NO: 18833 - DNA, 1172 bp, Muscodor strobelii
  misc_feature: SGI EST ID NO. CUFF.44474.0
  misc_feature: Variant of the nucleotide sequence at SEQ ID NO 18831
cacacctacgccatcccgattccttgaccttccaccgcctgacacaaccaccgtaatagacttcttgctactttgacagcagcctcaaaatcttcaactcatcatatccatcgcaacaccaagaaccaacccgttcttctaccaaacgaaccaccgcgaacaccgtcaatcgacgcctacagaactgcgcattccaaattccaccccgccaccgcaacccaaccacacctcacaaccgtcaagatggatgactggaactccaccaccaagatcggaagcaagacccgaggcggcggtctgtctgagagagaaacagtcctccgcggcaactcggccatcaacgccgccaagcgctccggcggcgccatcaacacagagaagaagtactctacaggcaaccagatcggcaaaggccccgaaggccaacgcctaaccaaagtcgaccgcagcgacgacatcgtgaagcccaacaccatcggcaaggtagtaggcgacgccatctccgccgcccggcaaaagatggaacccaagatgacgcagaaggatctcgccaccaagtgcaataccacgcccaccgtcgtcggcgactttgagaggggcaccgctaccccagaccagaaggtgctctcagccatggagcgcgtgctcaacgtcaagctgcgtggccagggcatcggcgagcctaagttcaagcccaagggcaagtaagctcgtagtggtgggtagcgatgatcaaaaggtgaacacgagtccctttctctttgacgtctggtagagagatggatgagagatggacacgtgactatgtatgatgagtatgaggatgggcaaaggagcgaaaaaaatcattcgaggggctccggatacaggaataacttgctacattaccggcttcttctaacaagatgctgggctcgtgttgcattcagtctcttcggtgcggagcataggggttttcctgcgttctctatagatcaagaatagacaaaattcatcatgacacagctgcacatttcaatgttgtcgtgagtctattgtcccccatcacagattgtgtgcgatttgtttttcaatcacctggaccatcgctggttcgaactgtatcccctcacctgtgtcttaaccactgccctattctataaacacctattgtatacgagagaagggtcgga

SEQ ID NO: 18834 - DNA, 1497 bp, Muscodor strobelii
  misc_feature: SGI cDNA ID NO. 566322
  misc_feature: Encodes the peptide sequence at SEQ ID NO 18835
atgcctgccgctaagcagtaccggaaggcatcgaccgtctccaaggtcaagacttctcaacctaaaacctcgtctatcagcagcttcgcccgcgtctccaagactgtcaccaacaccagtgtcaagaaggaactcgcctcgacacccaaaaaggatatccagatcgaggctctcacgcccgcttcccggaaacgcaaggtcgtcacgtccatcgaggacgactcgcctgccgaagagagaccccgcaagatcgccaccccttccaacagaccggctctctcttcaattaccaacgaagccacacctcaatcaacgaaacgcggccgtggtcgccctactaagaagtctcgggccgagccagcgcctcgaaagcgaatccgaagtcccagcgtctccgactctgaagaatctgcggttgacacccatgcactattcaagagacttcgtctcgagtcatcaccatctagatactcgtctcctctcaccgcggacacctcagtcgccggctcagatactgaggtcgacaccaagcctaccaggtctagcgaactccccaaagaaattctcgatctcatcgatctattcattgcgttcttgaagacattgtcacttcattacgcacacaatggctccaatgtccctgtcgatttacgcgtcctcggacctaatatcgcacgagcctggggcaagaagagagtcaccattgccgacatcagaatctgcatcggtgttctcgaaagctcctcttcagacgacagtcccttgaagctcatgaactacggccgtgggaaagtctgcatcgaaatggaacaatctcgcaccttcagcccactggacgagatgaaactaaacacaatcttccgcgcaaacatcacatctctctggtcaaaggccagcctagctccagactcaccggcatccgaattcatgacgactcttcctaaatctctcatcgtcctctgcgaatctgttgccaaggcctcatccatcctcctcaaaggccagcaacgcctcgaggacttaaagcacggtatctccatcaaaaagcaagacaaagctgcaccgaaatcctcggcagatacacccatgaccaacgccgacgggtcgaaaatgagccttctcgaccgcatccgcatgaaatcacttcagaagtccgccgcccaactcaccgggctctcggcagccgaactcgagcgtcgtgcagcactccagcgtgtcgaagaagtctcgtctctcatcgggatgctgagtcgtgcctcgggcgagtctcgcatcagctttcccatggcggtcatgattgagaaactcaaggattcgttccgcatggggatctcaaaggacgagggtgctgtctgcatcagattgctaggcgctgaagttgcgcctgagtgggtcagagtgctcacgcttggtgggagggagatggtcgttgttgatgttgctgcgcaggttagtaaggtggagatcgctcgacgggtacagcggatgctgggataa

SEQ ID NO: 18835 - protein, 498 aa, Muscodor strobelii
  misc_feature: SGI Peptide ID NO. 566322
  misc_feature (18)..(497): NCBI GI: 39946170 Blast Desc: MGG_08205 [Magnaporthe grisea 70-15] gi|145019466|gb|EDK03694.1| MGG_08205 [Magnaporthe grisea 70-15]
  misc_feature (138)..(498): NCBI GI: 85098929 Blast Desc: NCU01421 [Neurospora crassa OR74A] gi|28922205|gb|EAA31453.1| [Neurospora crassa OR74A] gi|28949989|emb|CAD70874.1| conserved [Neurospora crassa]
  misc_feature (9)..(498): NCBI GI: 171691801 Blast Desc: protein product [Podospora anserina] gi|170945849|emb|CAP72650.1| protein product [Podospora anserina]
  misc_feature (23)..(498): NCBI GI: 256731705 Blast Desc: NECHADRAFT_40649 [Nectria haematococca mpVI 77-13-4]
  misc_feature (23)..(498): NCBI GI: 46136793 Blast Desc: FG09912.1 [Gibberella zeae PH-1]
  misc_feature (29)..(498): NCBI GI: 116179912 Blast Desc: CHGG_00584 [Chaetomium globosum CBS 148.51] gi|88184881|gb|EAQ92349.1| CHGG_00584 [Chaetomium globosum CBS 148.51]
  misc_feature (184)..(498): NCBI GI: 156054968 Blast Desc: SS1G_04835 [Sclerotinia sclerotiorum 1980] gi|154702620|gb|EDO02359.1| SS1G_04835 [Sclerotinia sclerotiorum 1980]
  misc_feature (178)..(488): NCBI GI: 169617303 Blast Desc: SNOG_11829 [Phaeosphaeria nodorum SN15] gi|111059753|gb|EAT80873.1| SNOG_11829 [Phaeosphaeria nodorum SN15]
  misc_feature (178)..(479): NCBI GI: 189188498 Blast Desc: conserved [Pyrenophora tritici-repentis Pt-1C-BFP] gi|187972194|gb|EDU39693.1| conserved [Pyrenophora tritici-repentis Pt-1C-BFP]
  misc_feature (267)..(496): NCBI GI: 261351838 Blast Desc: conserved [Verticillium albo-atrum VaMs.102]
MPAAKQYRKASTVSKVKTSQPKTSSISSFARVSKTVTNTSVKKELASTPKKDIQIEALTPASRKRKVVTSIEDDSPAEERPRKIATPSNRPALSSITNEATPQSTKRGRGRPTKKSRAEPAPRKRIRSPSVSDSEESAVDTHALFKRLRLESSPSRYSSPLTADTSVAGSDTEVDTKPTRSSELPKEILDLIDLFIAFLKTLSLHYAHNGSNVPVDLRVLGPNIARAWGKKRVTIADIRICIGVLESSSSDDSPLKLMNYGRGKVCIEMEQSRTFSPLDEMKLNTIFRANITSLWSKASLAPDSPASEFMTTLPKSLIVLCESVAKASSILLKGQQRLEDLKHGISIKKQDKAAPKSSADTPMTNADGSKMSLLDRIRMKSLQKSAAQLTGLSAAELERRAALQRVEEVSSLIGMLSRASGESRISFPMAVMIEKLKDSFRMGISKDEGAVCIRLLGAEVAPEWVRVLTLGGREMVVVDVAAQVSKVEIARRVQRMLG

SEQ ID NO: 18836 - DNA, 1960 bp, Muscodor strobelii
  misc_feature: SGI EST ID NO. CUFF.44271.0
  misc_feature: Variant of the nucleotide sequence at SEQ ID NO 18834
acttcgtacctctctgaattgtctttccatcatcaattgttttgcgaatcttgggttattgaagcctctatttgacgttcttgtctctgtataactcgattggtgcaattgcagtacatacaacttcccaataacccatctcaaaaaccttttctccttcggcgcagtcacgatgcctgccgctaagcagtaccggaaggcatcgaccgtctccaaggtcaagacttctcaacctaaaacctcgtctatcagcagcttcgcccgcgtctccaagactgtcaccaacaccagtgtcaagaaggaactcgcctcgacacccaaaaaggatatccagatcgaggctctcacgcccgcttcccggaaacgcaaggtcgtcacgtccatcgaggacgactcgcctgccgaagagagaccccgcaagatcgccaccccttccaacagaccggctctctcttcaattaccaacgaagccacacctcaatcaacgaaacgcggccgtggtcgccctactaagaagtctcgggccgagccagcgcctcgaaagcgaatccgaagtcccagcgtctccgactctgaagaatctgcggttgacacccatgcactattcaagagacttcgtctcgagtcatcaccatctagatactcgtctcctctcaccgcggacacctcagtcgccggctcagatactgaggtcgacaccaagcctaccaggtctagcgaactccccaaagaaattctcgatctcatcgatctattcattgcgttcttgaagacattgtcacttcattacgcacacaatggctccaatgtccctgtcgatttacgcgtcctcggacctaatatcgcacgagcctggggcaagaagagagtcaccattgccgacatcagaatctgcatcggtgttctcgaaagctcctcttcagacgacagtcccttgaagctcatgaactacggccgtgggaaagtctgcatcgaaatggaacaatctcgcaccttcagcccactggacgagatgaaactaaacacaatcttccgcgcaaacatcacatctctctggtcaaaggccagcctagctccagactcaccggcatccgaattcatgacgactcttcctaaatctctcatcgtcctctgcgaatctgttgccaaggcctcatccatcctcctcaaaggccagcaacgcctcgaggacttaaagcacggtatctccatcaaaaagcaagacaaagctgcaccgaaatcctcggcagatacacccatgaccaacgccgacgggtcgaaaatgagccttctcgaccgcatccgcatgaaatcacttcagaagtccgccgcccaactcaccgggctctcggcagccgaactcgagcgtcgtgcagcactccagcgtgtcgaagaagtctcgtctctcatcgggatgctgagtcgtgcctcgggcgagtctcgcatcagctttcccatggcggtcatgattgagaaactcaaggattcgttccgcatggggatctcaaaggacgagggtgctgtctgcatcagattgctaggcgctgaagttgcgcctgagtgggtcagagtgctcacgcttggtgggagggagatggtcgttgttgatgttgctgcgcaggttagtaaggtggagatcgctcgacgggtacagcggatgctgggataatgtaatggctgggtggaaaggagatgggtatgagaaaagaggcatctgtttggcgtttgtggtcatgggttggttggcattctgggttggagttttgttgcatggcgtcttgttcggcatggcgaagcattgtcttgactaggaggttctgagttgggtctgctgtttgctggatacctaccaatgagtgctttgtttataagcagatggatgctgtatataccagtcttgacagagtttagactgaagaccactgggatgagttgtggtagtaatgatgagtcgagtcaa

SEQ ID NO: 18837 - DNA, 570 bp, Muscodor strobelii
  misc_feature: SGI cDNA ID NO. 566323
  misc_feature: Encodes the peptide sequence at SEQ ID NO 18838
atgacgactcttcctaaatctctcatcgtcctctgcgaatctgttgccaaggcctcatccatcctcctcaaaggccagcaacgcctcgaggacttaaagcacggtatctccatcaaaaagcaagacaaagctgcaccgaaatcctcggcagatacacccatgaccaacgccgacgggtcgaaaatgagccttctcgaccgcatccgcatgaaatcacttcagaagtccgccgcccaactcaccgggctctcggcagccgaactcgagcgtcgtgcagcactccagcgtgtcgaagaagtctcgtctctcatcgggatgctgagtcgtgcctcgggcgagtctcgcatcagctttcccatggcggtcatgattgagaaactcaaggattcgttccgcatggggatctcaaaggacgagggtgctgtctgcatcagattgctaggcgctgaagttgcgcctgagtgggtcagagtgctcacgcttggtgggagggagatggtcgttgttgatgttgctgcgcaggttagtaaggtggagatcgctcgacgggtacagcggatgctgggataa

SEQ ID NO: 18838 - protein, 189 aa, Muscodor strobelii
  misc_feature: SGI Peptide ID NO. 566323
  misc_feature (1)..(189): NCBI GI: 256731705 Blast Desc: NECHADRAFT_40649 [Nectria haematococca mpVI 77-13-4]
  misc_feature (1)..(189): NCBI GI: 85098929 Blast Desc: NCU01421 [Neurospora crassa OR74A] gi|28922205|gb|EAA31453.1| [Neurospora crassa OR74A] gi|28949989|emb|CAD70874.1| conserved [Neurospora crassa]
  misc_feature (17)..(189): NCBI GI: 46136793 Blast Desc: FG09912.1 [Gibberella zeae PH-1]
  misc_feature (1)..(187): NCBI GI: 261351838 Blast Desc: conserved [Verticillium albo-atrum VaMs.102]
  misc_feature (4)..(188): NCBI GI: 39946170 Blast Desc: MGG_08205 [Magnaporthe grisea 70-15] gi|145019466|gb|EDK03694.1| MGG_08205 [Magnaporthe grisea 70-15]
  misc_feature (3)..(189): NCBI GI: 171691801 Blast Desc: protein product [Podospora anserina] gi|170945849|emb|CAP72650.1| protein product [Podospora anserina]
  misc_feature (3)..(189): NCBI GI: 116179912 Blast Desc: CHGG_00584 [Chaetomium globosum CBS 148.51] gi|88184881|gb|EAQ92349.1| CHGG_00584 [Chaetomium globosum CBS 148.51]
  misc_feature (1)..(189): NCBI GI: 156054968 Blast Desc: SS1G_04835 [Sclerotinia sclerotiorum 1980] gi|154702620|gb|EDO02359.1| SS1G_04835 [Sclerotinia sclerotiorum 1980]
  misc_feature (4)..(186): NCBI GI: 154304371 Blast Desc: BC1G_09061 [Botryotinia fuckeliana B05.10] gi|150854041|gb|EDN29233.1| BC1G_09061 [Botryotinia fuckeliana B05.10]
  misc_feature (1)..(179): NCBI GI: 169617303 Blast Desc: SNOG_11829 [Phaeosphaeria nodorum SN15] gi|111059753|gb|EAT80873.1| SNOG_11829 [Phaeosphaeria nodorum SN15]
MTTLPKSLIVLCESVAKASSILLKGQQRLEDLKHGISIKKQDKAAPKSSADTPMTNADGSKMSLLDRIRMKSLQKSAAQLTGLSAAELERRAALQRVEEVSSLIGMLSRASGESRISFPMAVMIEKLKDSFRMGISKDEGAVCIRLLGAEVAPEWVRVLTLGGREMVVVDVAAQVSKVEIARRVQRMLG

SEQ ID NO: 18839 - DNA, 1960 bp, Muscodor strobelii; identical to SEQ ID NO: 18836
  misc_feature: SGI EST ID NO. CUFF.44271.0
  misc_feature: Variant of the nucleotide sequence at SEQ ID NO 18837

SEQ ID NO: 18840 - DNA, 726 bp, Muscodor strobelii
  misc_feature: SGI cDNA ID NO. 566324
  misc_feature: Encodes the peptide sequence at SEQ ID NO 18841
atgaactacggccgtgggaaagtctgcatcgaaatggaacaatctcgcaccttcagcccactggacgagatgaaactaaacacaatcttccgcgcaaacatcacatctctctggtcaaaggccagcctagctccagactcaccggcatccgaattcatgacgactcttcctaaatctctcatcgtcctctgcgaatctgttgccaaggcctcatccatcctcctcaaaggccagcaacgcctcgaggacttaaagcacggtatctccatcaaaaagcaagacaaagctgcaccgaaatcctcggcagatacacccatgaccaacgccgacgggtcgaaaatgagccttctcgaccgcatccgcatgaaatcacttcagaagtccgccgcccaactcaccgggctctcggcagccgaactcgagcgtcgtgcagcactccagcgtgtcgaagaagtctcgtctctcatcgggatgctgagtcgtgcctcgggcgagtctcgcatcagctttcccatggcggtcatgattgagaaactcaaggattcgttccgcatggggatctcaaaggacgagggtgctgtctgcatcagattgctaggcgctgaagttgcgcctgagtgggtcagagtgctcacgcttggtgggagggagatggtcgttgttgatgttgctgcgcaggttagtaaggtggagatcgctcgacgggtacagcggatgctgggataa

SEQ ID NO: 18841 - protein, 241 aa, Muscodor strobelii
  misc_feature: SGI Peptide ID NO. 566324
  misc_feature (2)..(241): NCBI GI: 85098929 Blast Desc: NCU01421 [Neurospora crassa OR74A] gi|28922205|gb|EAA31453.1| [Neurospora crassa OR74A] gi|28949989|emb|CAD70874.1| conserved [Neurospora crassa]
  misc_feature (2)..(241): NCBI GI: 256731705 Blast Desc: NECHADRAFT_40649 [Nectria haematococca mpVI 77-13-4]
  misc_feature (2)..(240): NCBI GI: 39946170 Blast Desc: MGG_08205 [Magnaporthe grisea 70-15] gi|145019466|gb|EDK03694.1| MGG_08205 [Magnaporthe grisea 70-15]
  misc_feature (2)..(241): NCBI GI: 116179912 Blast Desc: CHGG_00584 [Chaetomium globosum CBS 148.51] gi|88184881|gb|EAQ92349.1| CHGG_00584 [Chaetomium globosum CBS 148.51]
  misc_feature (2)..(241): NCBI GI: 46136793 Blast Desc: FG09912.1 [Gibberella zeae PH-1]
  misc_feature (2)..(241): NCBI GI: 171691801 Blast Desc: protein product [Podospora anserina] gi|170945849|emb|CAP72650.1| protein product [Podospora anserina]
  misc_feature (10)..(239): NCBI GI: 261351838 Blast Desc: conserved [Verticillium albo-atrum VaMs.102]
  misc_feature (2)..(241): NCBI GI: 156054968 Blast Desc: SS1G_04835 [Sclerotinia sclerotiorum 1980] gi|154702620|gb|EDO02359.1| SS1G_04835 [Sclerotinia sclerotiorum 1980]
  misc_feature (2)..(238): NCBI GI: 154304371 Blast Desc: BC1G_09061 [Botryotinia fuckeliana B05.10] gi|150854041|gb|EDN29233.1| BC1G_09061 [Botryotinia fuckeliana B05.10]
  misc_feature (2)..(231): NCBI GI: 169617303 Blast Desc: SNOG_11829 [Phaeosphaeria nodorum SN15] gi|111059753|gb|EAT80873.1| SNOG_11829 [Phaeosphaeria nodorum SN15]
MNYGRGKVCIEMEQSRTFSPLDEMKLNTIFRANITSLWSKASLAPDSPASEFMTTLPKSLIVLCESVAKASSILLKGQQRLEDLKHGISIKKQDKAAPKSSADTPMTNADGSKMSLLDRIRMKSLQKSAAQLTGLSAAELERRAALQRVEEVSSLIGMLSRASGESRISFPMAVMIEKLKDSFRMGISKDEGAVCIRLLGAEVAPEWVRVLTLGGREMVVVDVAAQVSKVEIARRVQRMLG

SEQ ID NO: 18842 - DNA, 1960 bp, Muscodor strobelii; identical to SEQ ID NO: 18836
  misc_feature: SGI EST ID NO. CUFF.44271.0
  misc_feature: Variant of the nucleotide sequence at SEQ ID NO 18840

SEQ ID NO: 18843 - DNA, 270 bp, Muscodor strobelii
  misc_feature: SGI cDNA ID NO. 566325
  misc_feature: Encodes the peptide sequence at SEQ ID NO 18844
atgcctggacaactctacgcccctgttgccctctcgccggcccgcaagaacaactcgagcagttcgtcggatctctttgccaatctgaacgctaccctcgaatccaagggtaccaagctcgccacgcctgttcgcaacatccaagagcgtgactggaccgtcccggctcccccaccgccgagtcccgtctccttccatcctgaccattggcagtatgggggaaacaaggacatcgggtctacacaaaagctgacgggagcgcgagcatga

SEQ ID NO: 18844 - protein, 89 aa, Muscodor strobelii
  misc_feature: SGI Peptide ID NO. 566325
MPGQLYAPVALSPARKNNSSSSSDLFANLNATLESKGTKLATPVRNIQERDWTVPAPPPPSPVSFHPDHWQYGGNKDIGSTQKLTGARA

SEQ ID NO: 18845 - DNA, 765 bp, Muscodor strobelii
  misc_feature: SGI cDNA ID NO. 566327
  misc_feature: Reduced expression when VOC is produced
  misc_feature: Encodes the peptide sequence at SEQ ID NO 18846
atgacaccgcagctcgccacagcaccattgcggtgtctacgcactcaggtgccctccgccacacgctgcctcagcaccacagcgccccagttccgccagacaccctcccatctcaccgtgccgaaagaccagctgcccgactacccctacggccgcttccacgcctacaagcaagccaacgagggcctgttcggcggcgccaggatacgcttcggcaacaccgtagccaagaagtacaagaacaagtcccgcaccacctggctgcccaacaagcaccgcaagcgcctctggtcccccgccctcggcgccttcatccgcacccgcatgaccgcccacgtcctccacaccatcgaccgtctcggcggcatcgacgagtatctcctcggctccaagtctcgccgcatcagggagttgggccccgcgggctgggcgctgaggtggaagatcatgcagacgcccgccgtgcaggctcgcttcgccgctgagcgcgccgctctcggcttaccgcccaaggaagacgctgctgctgctgttgccgagctggagctacccgaggaattggccgccgacgggttgacctctgagggcgtgttagatgccgtcgatggcatgatacagcgtgacgaggagttcgatctcggccagcctgagacggaacaagaagccgttgccgctgctgcccccgaggagacgcctttcatggccgaggagcccgcgccgaacccgaagaatatcaagattaagaggagttggaagactgagtag

SEQ ID NO: 18846 - protein, 254 aa, Muscodor strobelii
  misc_feature: SGI Peptide ID NO. 566327
  misc_feature (60)..(121): Pfam Id: PF00830 Pfam Desc: Ribosomal L28 family
  misc_feature (38)..(237): NCBI GI: 116205609 Blast Desc: CHGG_10688 [Chaetomium globosum CBS 148.51] gi|88176816|gb|EAQ84284.1| CHGG_10688 [Chaetomium globosum CBS 148.51]
  misc_feature (35)..(241): NCBI GI: 85110139 Blast Desc: NCU08410 [Neurospora crassa OR74A] gi|164423992|ref|XP_001728109.1| NCU10866 [Neurospora crassa OR74A] gi|28924956|gb|EAA34046.1| conserved [Neurospora crassa
  misc_feature (10)..(237): NCBI GI: 46138459 Blast Desc: FG10744.1 [Gibberella zeae PH-1]
  misc_feature (32)..(237): NCBI GI: 154295457 Blast Desc: BC1G_13207 [Botryotinia fuckeliana B05.10] gi|150844075|gb|EDN19268.1| BC1G_13207 [Botryotinia fuckeliana B05.10]
  misc_feature (8)..(172): NCBI GI: 256728974 Blast Desc: [Nectria haematococca mpVI 77-13-4]
  misc_feature (19)..(245): NCBI GI: 156048865 Blast Desc: SS1G_08139 [Sclerotinia sclerotiorum 1980] gi|154692538|gb|EDN92276.1| SS1G_08139 [Sclerotinia sclerotiorum 1980]
  misc_feature (22)..(168): NCBI GI: 171677089 Blast Desc: protein product [Podospora anserina] gi|170936612|emb|CAP61271.1| protein product [Podospora anserina]
  misc_feature (3)..(169): NCBI GI: 70993812 Blast Desc: 50S ribosomal protein L24 [Aspergillus fumigatus Af293] gi|66849387|gb|EAL89715.1| 50S ribosomal protein L24 [Aspergillus fumigatus Af293] gi|159125327|gb|EDP50444.1| 50S L24
  misc_feature (17)..(169): NCBI GI: 121707801 Blast Desc: 50S ribosomal protein L24 [Aspergillus clavatus NRRL 1] gi|119400093|gb|EAW10519.1| 50S ribosomal protein L24 [Aspergillus clavatus NRRL 1]
  misc_feature (3)..(169): NCBI GI: 119500374 Blast Desc: 50S ribosomal protein L24 [Neosartorya fischeri NRRL 181] gi|119415109|gb|EAW25047.1| 50S ribosomal protein L24 [Neosartorya fischeri NRRL 181]
  misc_feature: Useful for introducing or modulating the production of volatile compounds
MTPQLATAPLRCLRTQVPSATRCLSTTAPQFRQTPSHLTVPKDQLPDYPYGRFHAYKQANEGLFGGARIRFGNTVAKKYKNKSRTTWLPNKHRKRLWSPALGAFIRTRMTAHVLHTIDRLGGIDEYLLGSKSRRIRELGPAGWALRWKIMQTPAVQARFAAERAALGLPPKEDAAAAVAELELPEELAADGLTSEGVLDAVDGMIQRDEEFDLGQPETEQEAVAAAAPEETPFMAEEPAPNPKNIKIKRSWKTE

SEQ ID NO: 18847 - DNA, 2142 bp, Muscodor strobelii
  misc_feature: SGI cDNA ID NO. 566328
  misc_feature: Reduced expression when VOC is produced
  misc_feature: Encodes the peptide sequence at SEQ ID NO 18848
atggaccatctgaagcagaccttcaagaaatgcaaggccgaagaccgggctgccctagtgacctacgtcaccgccggctaccccaagcctgaggccatgcccgatgtgctgctgggcatgcagaacggcggcgccgacgtcatcgagctgggcatccccttcaccgaccctattgccgacggccccgtcatccagacctccaacagcatcgccctggccaacggcgtcaccatccagtccaccctgcagatggtcaaggatgcccgcgcccgcggcctgcacgtccccatcctgctgatgggctactacaacccactgctcagctacggagaggaggccctgctgcgcgactgcaaggcagccggtgtcaacggtttcataatatgcgacttgccacccgaggaggccatctccttccgcaagttctgcagccgcggtggtctgtcctatgttcccctcatcgctcccgccacctccgaggtccgcatgaagctgctgtgccagctcgccgactccttcatctacgtcgtctcgcgccagggtgtcaccggtgctctcggcaccctcaacgccagcctgcccgaccttgtctcgcgcgtcaagaaatacagcggaggcaagcctgctgcagttggattcggaatttccacgcgcgaacacttccagtccgttgcctccatcgccgacggcgtcgtcatcggctcgcagatcgtcactaccctgcagaaggccgaagccgggaaggaggctcagaccgtcgaggaatactgcgcctacgtgtcaggccggtcgggagatgtacagaccacacgcgaagtgggcgtcatagaagctatcgccggggctaaggagcccgacggagacaatgttacggtcaacgggaccattactgaagaggaggacgctgccctggtcgcacagcttgccgctctccatggcaagattcccgatcgatttggcgagtttggcggcgcatacgtacccgaggctctcatggactgtttgcacgagttggagaatggtttcaacaccctcaaagacgatcctaagttctgggaggagtatagatcctactatccttggatggggaggccaggccagttacacttggcggagagactcacggagcatgctggaggcgccaacatctggttgaagagagaggatttgaaccacacgggctcgcacaaaatcaacaacgccctgggtcagctactgctggccaggaggctgggcaagaccaagatcattgctgagacgggtgccggccagcacggtgtagctaccgcgactgtctgcgccaagtttggtatggagtgtaccgtcttcatgggtgctgaagatgtcaggcgacaagcactcaacgtattccggatgaggttactgggcgccaaggtcatcgccgtcgaagcgggaagcaagacacttcgagatgccgtcaacgaggctatgagatcgtgggtggtacgtctagaagacacgcactacatcattggctctgccatcggccctcaccctttccccaccattgtgcgcacgttccagtccgtcatcggcaacgaaacaaaggcgcagatgcaggagaagcgcggcaagcttccagacgctgttgtggcttgtgttggtggcggtagcaacgctgtgggcatgttctaccccttctccaacgacccgagcgtgaagctcttgggtgtagaagccggtggcgatggtgtcgacacggaccgtcactctgccactctgaccggaggtaccaagggtgttctgcacggcgtccgcacctacatcttgcagaatgagcacggccagatcaacgacacgcactcggtctcggcgggacttgactacccgggcgtgggaccggagctctcgcagtggaaggacagcgagcgtgccaagttcgtggcggcaagcgacgcgcaggcgtttgagggcttccggctcatcagccagctcgaaggcatcatccccgcgcttgagtcggcgcacgccatctacggtgcagtcgagctagccaagacgatgaagaaggacgaggacttagtgatctgcctcagcggccgcggcgacaaggacgtgcagagcgtagcggaggagctgccaaagctgggacctcagatcggctgggatctgcgcttctga

SEQ ID NO: 18848 - protein, 713 aa, Muscodor strobelii
  misc_feature: SGI Peptide ID NO. 566328
  misc_feature (363)..(687): Pfam Id: PF00291 Pfam Desc: Pyridoxal-phosphate dependent enzyme
  misc_feature (8)..(265): Pfam Id: PF00290 Pfam Desc: Tryptophan synthase alpha chain
  misc_feature (368)..(687): Pfam Id: PF00291 Pfam Desc: Pyridoxal-phosphate dependent enzyme
  misc_feature (1)..(713): NCBI GI: 28800025 Blast Desc: tryptophan synthetase [Nodulisporium sp. ATCC74245]
  misc_feature (1)..(713): NCBI GI: 46138457 Blast Desc: TRP_NEUCR Tryptophan synthase [Gibberella zeae PH-1]
  misc_feature (1)..(713): NCBI GI: 256729178 Blast Desc: [Nectria haematococca mpVI 77-13-4]
  misc_feature (1)..(713): NCBI GI: 85110137 Blast Desc: tryptophan synthase [Neurospora crassa OR74A] gi|164423990|ref|XP_001728108.1| tryptophan synthase [Neurospora crassa OR74A] gi|136372|sp|P13228.1|TRP_NEUCR RecName: synthase
  misc_feature (17)..(713): NCBI GI: 116205607 Blast Desc: tryptophan synthase [Chaetomium globosum CBS 148.51] gi|88176815|gb|EAQ84283.1| tryptophan synthase [Chaetomium globosum CBS 148.51]
  misc_feature (1)..(713): NCBI GI: 171677085 Blast Desc: protein product [Podospora anserina] gi|170936610|emb|CAP61269.1| protein product [Podospora anserina]
  misc_feature (1)..(713): NCBI GI: 156048815 Blast Desc: SS1G_08114 [Sclerotinia sclerotiorum 1980] gi|154692513|gb|EDN92251.1| SS1G_08114 [Sclerotinia sclerotiorum 1980]
  misc_feature (1)..(713): NCBI GI: 145608566 Blast Desc: MGG_12805 [Magnaporthe grisea 70-15] gi|145016030|gb|EDK00520.1| MGG_12805 [Magnaporthe grisea 70-15]
  misc_feature (1)..(712): NCBI GI: 189200414 Blast Desc: tryptophan synthase beta chain [Pyrenophora tritici-repentis Pt-1C-BFP] gi|187983643|gb|EDU49131.1| tryptophan synthase beta chain [Pyrenophora tritici-repentis
  misc_feature (1)..(713): NCBI GI: 169608554 Blast Desc: SNOG_07359 [Phaeosphaeria nodorum SN15] gi|160701671|gb|EAT84825.2| SNOG_07359 [Phaeosphaeria nodorum SN15]
  misc_feature (1)..(713): SWISSPROT Homolog: EC 4.2.1.20 Tryptophan synthase
  misc_feature: Useful for introducing or modulating the production of volatile compounds
MDHLKQTFKKCKAEDRAALVTYVTAGYPKPEAMPDVLLGMQNGGADVIELGIPFTDPIADGPVIQTSNSIALANGVTIQSTLQMVKDARARGLHVPILLMGYYNPLLSYGEEALLRDCKAAGVNGFIICDLPPEEAISFRKFCSRGGLSYVPLIAPATSEVRMKLLCQLADSFIYVVSRQGVTGALGTLNASLPDLVSRVKKYSGGKPAAVGFGISTREHFQSVASIADGVVIGSQIVTTLQKAEAGKEAQTVEEYCAYVSGRSGDVQTTREVGVIEAIAGAKEPDGDNVTVNGTITEEEDAALVAQLAALHGKIPDRFGEFGGAYVPEALMDCLHELENGFNTLKDDPKFWEEYRSYYPWMGRPGQLHLAERLTEHAGGANIWLKREDLNHTGSHKINNALGQLLLARRLGKTKIIAETGAGQHGVATATVCAKFGMECTVFMGAEDVRRQALNVFRMRLLGAKVIAVEAGSKTLRDAVNEAMRSWVVRLEDTHYIIGSAIGPHPFPTIVRTFQSVIGNETKAQMQEKRGKLPDAVVACVGGGSNAVGMFYPFSNDPSVKLLGVEAGGDGVDTDRHSATLTGGTKGVLHGVRTYILQNEHGQINDTHSVSAGLDYPGVGPELSQWKDSERAKFVAASDAQAFEGFRLISQLEGIIPALESAHAIYGAVELAKTMKKDEDLVICLSGRGDKDVQSVAEELPKLGPQIGWDLRF

SEQ ID NO: 18849 - DNA, 4338 bp, Muscodor strobelii
  misc_feature: SGI EST ID NO. CUFF.44541.0
  misc_feature: Variant of the nucleotide sequence at SEQ ID NO 18847
ttgatgccaaaggcgcgatgcgtagtcagagtcacagactttgaaacccaggtcaacctcatccttcgggcgcacagtgactcaacaactcgcacgactcggctcacataagaacaggagaagctctccgaggaaggcacctcaccaatctcccgctttcgagtctcgcccctcgtccctcgccccttgcccctcgccgcgctgcccctcgccatcccatctcctcaattggtttttatttaacttttttcttgttgtcctcatcagcgctcaaccaattgacattccgtcgagtcaccatggaccatctgaagcagaccttcaagaaatgcaaggccgaagaccgggtacgactgccatcccagaaagcactcgagcgagaattctcgagccctcgagcccttgagcccttcagcccttcagccctcgaacacgcgctgacatgataattctattctacaggctgccctagtgacctacgtcaccgccggctaccccaagcctgaggccatgcccgatgtgctgctgggcatgcagaacggcggcgccgacgtcatcgagctgggcatccccttcaccgaccctattgccgacggccccgtcatccagacctccaacagcatcgccctggccaacggcgtcaccatccagtccaccctgcagatggtcaaggatgcccgcgcccgcggcctgcacgtccccatcctgctgatgggctactacaacccactgctcagctacggagaggaggccctgctgcgcgactgcaaggcagccggtgtcaacggtttcataatatgcgacttgccacccgaggaggccatctccttccgcaagttctgcagccgcggtggtctgtcctatgttcccctcatcgctcccgccacctccgaggtccgcatgaagctgctgtgccagctcgccgactccttcatctacgtcgtctcgcgccagggtgtcaccggtgctctcggcaccctcaacgccagcctgcccgaccttgtctcgcgcgtcaagaaatacagcggaggcaagcctgctgcagttggattcggaatttccacgcgcgaacacttccagtccgttgcctccatcgccgacggcgtcgtcatcggctcgcagatcgtcactaccctgcagaaggccgaagccgggaaggaggctcagaccgtcgaggaatactgcgcctacgtgtcaggccggtcgggagatgtacagaccacacgcgaagtgggcgtcatagaagctatcgccggggctaaggagcccgacggagacaatgttacggtcaacgggaccattactgaagaggaggacgctgccctggtcgcacagcttgccgctctccatggcaagattcccgatcgatttggcgagtttggcggcgcatacgtacccgaggctctcatggactgtttgcacgagttggagaatggtttcaacaccctcaaagacgatcctaagttctgggaggagtatagatcctactatccttggatggggaggccaggccagttacacttggcggagagactcacggagcatgctggaggcgccaacatctggttgaagagagaggatttgaaccacacgggctcgcacaaaatcaacaacgccctgggtcagctactgctggccaggaggctgggcaagaccaagatcattgctgagacgggtgccggccagcacggtgtagctaccgcgactgtctgcgccaagtttggtatggagtgtaccgtcttcatgggtgctgaagatgtcaggcgacaagcactcaacgtattccggatgaggttactgggcgccaaggtcatcgccgtcgaagcgggaagcaagacacttcgagatgccgtcaacgaggctatgagatcgtgggtggtacgtctagaagacacgcactacatcattggctctgccatcggccctcaccctttccccaccattgtgcgcacgttccagtccgtcatcggcaacgaaacaaaggcgcagatgcaggagaagcgcggcaagcttccagacgctgttgtggcttgtgttggtggcggtagcaacgctgtgggcatgttctaccccttctccaacgacccgagcgtgaagctcttgggtgtagaagccggtggcgatggtgtcgacacggaccgtcactctgccactctgaccggaggtaccaagggtgttctgcacggcgtccgcacctacatcttgcagaatgagcacggccagatcaacgacacgcactcggtctcggcgggacttgactacccgggcgtgggaccggagctctcgcagtggaaggacagcgagcgtgccaagttcgtggcggcaagcgacgcgcaggcgtttgagggcttccggctcatcagccagctcgaaggcatcatccccgcgcttgagtcggcgcacgccatctacggtgcagtcgagctagccaagacgatgaagaaggacgaggacttagtgatctgcctcagcggccgcggcgacaaggacgtgcagagcgtagcggaggagctgccaaagctgggacctcagatcggctgggatctgcgcttctgaggcgatctacaggagagacacatatggtgtcatacatgaatatcacgggtttaccatacggatgagctccgtggcggcatagacggtccattggacgggcttggcttacatgggattccatcttggactacatatcgacaagggcgtaactgggtgtcatttatgaaggggaaaaacatgactggaggagtcggtgtatggcggctcagatatttacaggaaaacatatacacgcttgttcactacttattcatgtaaaacaaacgcatccagagccacatgccgagcaaagacaaataaagatgactgagcacgactgttttggcggcgttgatgttgacgtgcatacgacttccagctccagccgtgtctaggtaggcagtttcaaatacattgattgtacagttggctccagataatatagtacacatattgacgattcgccgcagcttgttttcgcaagaccctgcatcgtcttgatcaccggatcattatcatggcagtaatccgaattgacttgggccatactattcgaatagcattcaagccgaccgacggctaggccgaattctctctcgtccctaagccttctcttgcatacccaactcatacacccagcctactcagtcttccaactcctcttaatcttgatattcttcgggttcggcgcgggctcctcggccatgaaaggcgtctcctcgggggcagcagcggcaacggcttcttgttccgtctcaggctggccgagatcgaactcctcgtcacgctgtatcatgccatcgacggcatctaacacgccctcagaggtcaacccgtcggcggccaattcctcgggtagctccagctcggcaacagcagcagcagcgtcttccttgggcggtaagccgagagcggcgcgctcagcggcgaagcgagcctgcacggcgggcgtctgcatgatcttccacctcagcgcccagcccgcggggcccaactccctgatgcggcgagacttggagccgaggagatactcgtcgatgccgccgagacggtcgatggtgtggaggacgtgggcggtcatgcgggtgcggatgaaggcgccgagggcgggggaccagaggcgcttgcggtgcttgttgggcagccaggtggtgcgggacttgttcttgtacttcttggctacggtgttgccgaagcgtatcctggcgccgccgaacaggccctcgttggcttgcttgtaggcgtggaagcggccgtaggggtagtcgggcagctggtctttcggcacggtgagatgggagggtgtctggcggaactggggcgctgtggtgctgaggcagcgtgtggcggagggcacctgagtgcgtagacaccgcaatggtgctgtggcgagctgcggtgtcattttggtgtcgtgcggtctgatgtctgcagatgctctgagtcgtgacgatgttgcgtaactcagggtaactcagcaagggcgagaaaactgcatcagtcccgccagcagctacttgggcgggcggtaccaggtcgatcgatgacgcccgagatggctggtatcgttggcgtggttagtcgagcgcagccgtcgcgtcgtcagagctgcgaatcgtcgttggcgatggttcgatgtcgctgcgtttgcatgtcggcgagaattgaagatttcccgaagtccaatatgtatcaaaagagatttatgcactaagcggatctctctggcggagctccagccgtctcgataacagaaggaatgacagaatgacacggcgtgcaattgtctaatcgtaggtcgga

SEQ ID NO: 18850 - DNA, 1143 bp, Muscodor strobelii
  misc_feature: SGI cDNA ID NO. 566329
  misc_feature: Encodes the peptide sequence at SEQ ID NO 18851
atggcttccggacagaaaagccaaatcaatccaggcttgataccttacattgcaaccttactccctgaccacagccgcctcaatcttgctttgaccagccagtcgaacttcaaagaccatccgaatatacttcagcagaattttgaagtcaagtcgcatgatattctaggcaaagttgcagactttgaagcaaacgacggtaccagtgcgttgtggcatgcaatcgattattcagacgtaacactcttcggcaaaatcctcaaggctgtttcattcttcaatgacaacaatgagcacgcagaagaccctatcctgttcacacttatagttcgatgtgtttttgccggaagtctcggttgtcttgaatatatgtatagtaacagcgaattggccagggattgtgtgcacgagtactggtatcttctgcgagaaagcgcattacatcgtcggcattctcatatgatgagctttttcaagaagcagtacaagcctctaaaccaggaaatgaggacaattcttgaaagagcgcttacgacacagatggaagaagaagaactccacagacaaatagatttagaccccgactcggaatggtatatctttttgcacaggatgagagacttcatcagtgatggcattgatcataggcatggcagaattttgctgcgatacacaacagatacagaagacaagaaacacacgcatgtcatgcttcaggatccgttctcgactagcgcgccgacggctcctgacacagtattctccttacacgacattgagagtgctggagcattccaatgggcttttggcaatgctgtagagaagctagagcaggaagctctgcaaaatgaagtccgagatagcttcattgcgcattgtgggcgccttcgcacttcaggtgccttgatcgaaaagattgtcgagttgggctgcatagctgtgaatcatgttgctgagtttcatgagtttcaagatcagagttttgccaaacacagacccaaaaatcttcgcaaaaggaaggctgttgatctcctcacccccatagatcatgcagtgtcctatctcaatatccgggctgtacaggctttgcgaaatctaggtgctaatatcaatggtgctcgaggcattgtgcaagagggctag

SEQ ID NO: 18851 - protein, 380 aa, Muscodor strobelii
  misc_feature: SGI Peptide ID NO. 566329
MASGQKSQINPGLIPYIATLLPDHSRLNLALTSQSNFKDHPNILQQNFEVKSHDILGKVADFEANDGTSALWHAIDYSDVTLFGKILKAVSFFNDNNEHAEDPILFTLIVRCVFAGSLGCLEYMYSNSELARDCVHEYWYLLRESALHRRHSHMMSFFKKQYKPLNQEMRTILERALTTQMEEEELHRQIDLDPDSEWYIFLHRMRDFISDGIDHRHGRILLRYTTDTEDKKHTHVMLQDPFSTSAPTAPDTVFSLHDIESAGAFQWAFGNAVEKLEQEALQNEVRDSFIAHCGRLRTSGALIEKIVELGCIAVNHVAEFHEFQDQSFAKHRPKNLRKRKAVDLLTPIDHAVSYLNIRAVQALRNLGANINGARGIVQEG

SEQ ID NO: 18852 - DNA, 2382 bp, Muscodor strobelii
  misc_feature: SGI cDNA ID NO. 566330
  misc_feature: Encodes the peptide sequence at SEQ ID NO 18853
atgtccggaaaccaaacaaaacacgaagtcccatcacaagtctatcccgtgcctgattcggggattcaacccgcagcagatctccatgagcagcaagaagcgtactaccagcaggctacgggacagcattggaatggaacagaccaacaagcattccaaccccaatggcacgatcaggttcacccaagtttctattatcagtgggatcagcctgttggtcagcaaccctttcaggcacagcagttcgcgaagaaggacgatctggcgcggtacttccctatgattaacgacaaagatagtctgcgagcctggaaatccaagcacaaccgtacacttgttctgcagatcggtcttgttattgcagttctactcgcaaacattgccttgacggcctatgccgttgggagttattcgagcgttaatggcattggtctactctacgatgatgattgtacaacggtcgaggacttggatcggtatctccatttattgatcaatatattgagcactggactactatctgcttcaaactactgcatgcagctacaagcagcacctactcgagccgaaatcaatcgggcacatcatgaggggaaatggctagatattggtgttcccagcctgcgaaatcttgctttcatcagtaactggcgacgcttctcttgggcattattggcgctcagctctgtgcctgtacatctaatatataattcggctgtctttcaaacactagcttccaacgagtacaccgtcgcagtagtgaaggactctttcatccaaggcgcatcttggtctcttgcgagcgccgagcagaaccaacagagtgctgtagcatggaacgaagcgtacacccatcccatcaacccgcagatcggcaatcaaacaaatatgataacagagatacagcaggctgttgccagaggagaatacgagcaagtgaacatgtccgcatgtttcgatttgtacaatgacttcttcgctgctcaaggcaacgtggtggtcctggtcaacaatgagtccgtgcaggcaattccagatgatagcctactgatgtatcagaatatcattccagggccgaacaattaccccaagaacatgtggatgtcttccaatggaagtcttgattgggtagcgcttgagcctccgacgcctgtaacgcagttattcctcggacccccgaaatacgagatgaaggcttgcttggttcagtcgccgaatctcgaggctaagagatgctttctgcaatactcgccaccaattctctacatcattattacgcttaacattctcaagacgctaatacttctttgtgtctggggcttgaaacagtggcaagaaaatgcattgctgaaacaagaggcacagaatgacgacgtcgctgaaccgagagcaccacagaaccaggttatctacacgctgggagatgccattgcatccttcctgagggaacctgcactagagacagctcagcgatgtctcgcgacaagggaagattttctaacaaggcgccgcttcaagaatcgctggatcaaggaacgccctgaccttacacataatgatggccctgtttcgttcaagcgagacgatagatactggatgaccgcagcgagtccccgacgttggctcgtattgattgctttgtgtctgggagtcatcatattgaccggtatcctgcttggacttgggatcatatcgctccaatcgcgccatttaaaaactgacctgggcggcctccacgatctaggttttggcactctaggccagtacacgtttttgaacaatggtttggccgggggcggtacttccggattcattaggagcgtattggttgccaatttaccgcagctcatcatttcatttctttatcttttctacaactcgatgatttccacattcctagtacagcgggagttcagtcgcatgcacgatgaaaagaaccgcaagacgctccgagtttcggagcccgttggtattcagcggtcgagctatttcattagccttcctctgaagtacggcataccactctatgcatcttccgcacttctgcattggcttgcttcgcagagcttatttctcgctcgtattacggcacaaatgccagacggaacggccgatgacgagaactcgttctctgacccggctacaagccccttggctattttcgttactataattgttggtttcttgttcctgttggtcatcattggtctagcgatcagtgctgcctgtcatgcgctgaagggcgatcgagccaatgcataccagctacctattcgatttggagttgtggaagttaatgaagagggcgttggtcactgcgcttttactacagcgccggactcagatattcgagcccctgaagaaggccatttgtatcaatag

SEQ ID NO: 18853 - protein, 793 aa, Muscodor strobelii
  misc_feature: SGI Peptide ID NO. 566330
  misc_feature (120)..(793): NCBI GI: 255938668 Blast Desc: Pc14g01100 [Penicillium chrysogenum Wisconsin 54-1255] gi|211584725|emb|CAP74251.1| Pc14g01100 [Penicillium chrysogenum Wisconsin 54-1255]
  misc_feature (99)..(785): NCBI GI: 255943715 Blast Desc: Pc20g00630 [Penicillium chrysogenum Wisconsin 54-1255] gi|211587360|emb|CAP85392.1| Pc20g00630 [Penicillium chrysogenum Wisconsin 54-1255]
  misc_feature (98)..(793): NCBI GI: 169766904 Blast Desc: [Aspergillus oryzae RIB40] gi|83765778|dbj|BAE55921.1| protein product [Aspergillus oryzae]
  misc_feature (98)..(793): NCBI GI: 169784740 Blast Desc: [Aspergillus oryzae RIB40] gi|83775578|dbj|BAE65698.1| protein product [Aspergillus oryzae]
  misc_feature (88)..(793): NCBI GI: 238839355 Blast Desc: conserved [Microsporum canis CBS 113480]
  misc_feature (101)..(793): NCBI GI: 259485829 Blast Desc: TPA: [Aspergillus nidulans FGSC A4]
  misc_feature (48)..(793): NCBI GI: 169767150 Blast Desc: [Aspergillus oryzae RIB40] gi|83765901|dbj|BAE56044.1| protein product [Aspergillus oryzae]
  misc_feature (142)..(792): NCBI GI: 256731595 Blast Desc: NECHADRAFT_49000 [Nectria haematococca mpVI 77-13-4]
  misc_feature (101)..(793): NCBI GI: 255949210 Blast Desc: Pc22g14510 [Penicillium chrysogenum Wisconsin 54-1255] gi|211592389|emb|CAP98739.1| Pc22g14510 [Penicillium chrysogenum Wisconsin 54-1255]
  misc_feature (113)..(739): NCBI GI: 169774921 Blast Desc: [Aspergillus oryzae RIB40] gi|83769791|dbj|BAE59926.1| protein product [Aspergillus oryzae]
MSGNQTKHEVPSQVYPVPDSGIQPAADLHEQQEAYYQQATGQHWNGTDQQAFQPQWHDQVHPSFYYQWDQPVGQQPFQAQQFAKKDDLARYFPMINDKDSLRAWKSKHNRTLVLQIGLVIAVLLANIALTAYAVGSYSSVNGIGLLYDDDCTTVEDLDRYLHLLINILSTGLLSASNYCMQLQAAPTRAEINRAHHEGKWLDIGVPSLRNLAFISNWRRFSWALLALSSVPVHLIYNSAVFQTLASNEYTVAVVKDSFIQGASWSLASAEQNQQSAVAWNEAYTHPINPQIGNQTNMITEIQQAVARGEYEQVNMSACFDLYNDFFAAQGNVVVLVNNESVQAIPDDSLLMYQNIIPGPNNYPKNMWMSSNGSLDWVALEPPTPVTQLFLGPPKYEMKACLVQSPNLEAKRCFLQYSPPILYIIITLNILKTLILLCVWGLKQWQENALLKQEAQNDDVAEPRAPQNQVIYTLGDAIASFLREPALETAQRCLATREDFLTRRRFKNRWIKERPDLTHNDGPVSFKRDDRYWMTAASPRRWLVLIALCLGVIILTGILLGLGIISLQSRHLKTDLGGLHDLGFGTLGQYTFLNNGLAGGGTSGFIRSVLVANLPQLIISFLYLFYNSMISTFLVQREFSRMHDEKNRKTLRVSEPVGIQRSSYFISLPLKYGIPLYASSALLHWLASQSLFLARITAQMPDGTADDENSFSDPATSPLAIFVTIIVGFLFLLVIIGLAISAACHALKGDRANAYQLPIRFGVVEVNEEGVGHCAFTTAPDSDIRAPEEGHLYQ

SEQ ID NO: 18854 - DNA, 3986 bp, Muscodor strobelii
  misc_feature: SGI EST ID NO. CUFF.44295.0
  misc_feature: Variant of the nucleotide sequence at SEQ ID NO 18852
gtaaaatgctcataaatgctatctcctagttttgtttatgtttccaatgaatgtataccttagtgatagcctatagcctagtgaactgcttgacgatcacttaaaaagcgcaacacccatttcattctggcgtcaaaagctggtccactaccaggttggctacctaagtggtgacgggacagggctgctagtttgccactaaggtatgcccggccactagtggtctgggggccaaagccggggtccatttgatacacaagcgcacagagcacacgatctgttccaccggtatctgtcacatttgatcgcattatcggccttgtcctatcttgttcagatgcgcggtgcttcttagagagtgtattagtatctttgcgttcctttttcttccaaactctgaaggcgagcactgccactagtatgccgagatatagccaagatgattcatcttaatgtcgaccttcggtatggtggcaacatggtgttgacatctgcatgcaaactcgcatgggttatccagagacgtgagccgccggtggcattcgaccctaaaccaaatatgtctacagctgaatccttcaggacttgacttgcggctctgtgattccagacctgtatgttcattggtgtggaggatatgcttctcagcgccggccataggtcgaggtggcgcggcggtgtcctttgataaggccatacccctccgcgagtacatgcgtccgcatcgggctctgaagggattggcccgatttcttcatcgttgttgagggcattcgcctgttcatgttcgagtcgaaaaggtcttaggtctcgcttgtgccagttcaacgttctaacaactttcagtctgcacggaggccaagaacaacatgtccggaaaccaaacaaaacacgaagtcccatcacaagtctatcccgtgcctgattcggggattcaacccgcagcagatctccatgagcagcaagaagcgtactaccagcaggctacgggacagcattggaatggaacagaccaacaagcattccaaccccaatggcacgatcaggttcacccaagtttctattatcagtgggatcagcctgttggtcagcaaccctttcaggcacagcagttcgcgaagaaggacgatctggcgcggtacttccctatgattaacgacaaagatagtctgcgagcctggaaatccaagcacaaccgtacacttgttctgcagatcggtcttgttattgcagttctactcgcaaacattgccttgacggcctatgccgttgggagttattcgagcgttaatggcattggtctactctacgatgatgattgtacaacggtcgaggacttggatcggtatctccatttattgatcaatatattgagcactggactactatctgcttcaaactactgcatgcagctacaagcagcacctactcgagccgaaatcaatcgggcacatcatgaggggaaatggctagatattggtgttcccagcctgcgaaatcttgctttcatcagtaactggcgacgcttctcttgggcattattggcgctcagctctgtgcctgtacatctaatatataattcggctgtctttcaaacactagcttccaacgagtacaccgtcgcagtagtgaaggactctttcatccaaggcgcatcttggtctcttgcgagcgccgagcagaaccaacagagtgctgtagcatggaacgaagcgtacacccatcccatcaacccgcagatcggcaatcaaacaaatatgataacagagatacagcaggctgttgccagaggagaatacgagcaagtgaacatgtccgcatgtttcgatttgtacaatgacttcttcgctgctcaaggcaacgtggtggtcctggtcaacaatgagtccgtgcaggcaattccagatgatagcctactgatgtatcagaatatcattccagggccgaacaattaccccaagaacatgtggatgtcttccaatggaagtcttgattgggtagcgcttgagcctccgacgcctgtaacgcagttattcctcggacccccgaaatacgagatgaaggcttgcttggttcagtcgccgaatctcgaggctaagagatgctttctgcaatactcgccaccaattctctacatcattattacgcttaacattctcaagacgctaatacttctttgtgtctggggcttgaaacagtggcaagaaaatgcattgctgaaacaagaggcacagaatgacgacgtcgctgaaccgagagcaccacagaaccaggttatctacacgctgggagatgccattgcatccttcctgagggaacctgcactagagacagctcagcgatgtctcgcgacaagggaagattttctaacaaggcgccgcttcaagaatcgctggatcaaggaacgccctgaccttacacataatgatggccctgtttcgttcaagcgagacgatagatactggatgaccgcagcgagtccccgacgttggctcgtattgattgctttgtgtctgggagtcatcatattgaccggtatcctgcttggacttgggatcatatcgctccaatcgcgccatttaaaaactgacctgggcggcctccacgatctaggttttggcactctaggccagtacacgtttttgaacaatggtttggccgggggcggtacttccggattcattaggagcgtattggttgccaatttaccgcagctcatcatttcatttctttatcttttctacaactcgatgatttccacattcctagtacagcgggagttcagtcgcatgcacgatgaaaagaaccgcaagacgctccgagtttcggagcccgttggtattcagcggtcgagctatttcattagccttcctctgaagtacggcataccactctatgcatcttccgcacttctgcattggcttgcttcgcagagcttatttctcgctcgtattacggcacaaatgccagacggaacggccgatgacgagaactcgttctctgacccggctacaagccccttggctattttcgttactataattgttggtttcttgttcctgttggtcatcattggtctaggtatgagaaaatatgatggcactatgagaatggttgctagcaacagcttagcgatcagtgctgcctgtcatgcgctgaagggcgatcgagccaatgcataccagctacctattcgatttggagttgtggaagttaatgaagagggcgttggtcactgcgcttttactacagcgccggactcagatattcgagcccctgaagaaggccatttgtatcaatagcttactcgaagcagagtaggcgaggttgtatatggaatgacccagattgaggtctcacaggaataagtgtgttgccttcgagctatttggatactacttatcactatcataattctacgtaattagctactcattgcagcagtgcattggactggagcgctcagcacacaatcaagcagtttctcggcggaaccattgaacgtgtctactcacatctagatgatacgccaagttcgatgcacagaacccagatcatcagttcacgaagtcatcgatctgagcgtgaagaactctccgctcaggttgattcattcataggacacattcattgtatcatttgagcaaacgatgcatacctgggctaccttttcaataaaaatggtctatttctgctgttttcccaatgagccatctgaagtttactgccaacccaagagttagaacacctgagttaacttcggcatgcagctcaattcattgttcatgtccgattaccatcatggcaatattcctcttgcggtggaaactccgtaacataactaagagaggtcatcaaacaaagacagcatgggagaagttaaagcgaggcgacttcatcggagcattcttcttgtcgatcgtcctactctgcacattattagttccggattttggcggaataaatactgcctggaattcgtcagc

SEQ ID NO: 18855 - DNA, 1653 bp, Muscodor strobelii
  misc_feature: SGI cDNA ID NO. 566331
  misc_feature: Reduced expression when VOC is produced
  misc_feature: Encodes the peptide sequence at SEQ ID NO 18856
atggccttcatactccagcggcggtccattgtcaaacaagtcgaggatcaagtagcacaaatcaaagacttgcacaagaacggcctcttcagcggaagtaccacggctagcaattcaatactcaatggagaaaagggcccgttcggacacaacacggggatgcgaaatagcctggaagatgcctaccttggtatcccgggtatcacatacgacgtcgacaatcaaggcaatggatacttcaatgtcggttggacgggtacggatgatcatttcaatcccaaacgttggtcatcgacacgtcgtgttggctctacaatcctcgtctgtatcgtagctctggtcgggaccattgcgagttcaattgacagtataattatcgaaaaagccgccgccgagtttggtgtagcttctatcgttgaatcgctgtcaacttcattattcctcgtcggatttggtggcggagcactgcttgctagtccactctcggagcttgttggacgctttccagtctatattttctcccttgtcgttctggcgggatggacagtgggctctgctctttcgcctaatatcacatcacagcttatatttcgatttctcatgggactttctgcttctccgcctctcaccgttgcgggaggctcgatatcagacatgtggtcccctctcgaacggacgtttgcttttccaatctacgcagtgcccggatttggtggcgctgtgcttggccctgtaataggaacatggatcggcaatcgagaagatgtcagctggagatgggttgaatggacagttctgatactcgtctgtttctcacttttgttactgctgctcttgaagcgagagacatttcctccccgcatccttcacctgaaagcggcagctttccggagtagcacaagagactctcgattcaaaacgagtactgaagcagctgacgcgagctcagttcaagtaattctaaagcggaacttcatgcgacctttcctgctctgcttggaacccattgtggtctgctttactctttatctgtcgattgcgtacatcgttttgtttacatttcttgacggctatacagacatcttcgccaacgtttacgacattgataaaaatttgtcaaataccatctttgtcggcatcgttgtagggatattcattagtgctccgttgataccatgggtatactatcgaactgcagcacagttagaaagtgatggcgatgatggatccggtgccaaactggatcgggagtcgcgcttgatttttgctgtgatcggcgcgccatttctcccagtcggattattctggatgggttggacagactttgcgtggatatcgatctggtcgcctatcgctgcttctgctttgatcggtttcagcattatatgcatcttcatgtcagcaaatctgtatatcatagattcgtacgagatgtatgccgcatcggctttgacattcaacgcattaatccggtatttcgccgcaggcggtttcactgtggttggcataccgctgtatgaaaatttaggaacgcattatactctgactttcttaggtgtcctcagtagtttagctgttcccataccgtatgctttgtataaatggggaccggcgatcagattgcgaagcagttgggcattttcagcaaattga

SEQ ID NO: 18856 - protein, 550 aa, Muscodor strobelii
  misc_feature: SGI Peptide ID NO. 566331
  misc_feature (108)..(499): Pfam Id: PF07690 Pfam Desc: Major Facilitator Superfamily
  misc_feature (1)..(546): NCBI GI: 145246220 Blast Desc: An12g02800 [Aspergillus niger] gi|134080073|emb|CAK41119.1| protein product [Aspergillus niger]
  misc_feature (71)..(540): NCBI GI: 154297213 Blast Desc: BC1G_12442 [Botryotinia fuckeliana B05.10] gi|150842969|gb|EDN18162.1| BC1G_12442 [Botryotinia fuckeliana B05.10]
  misc_feature (50)..(546): NCBI GI: 256723630 Blast Desc: [Nectria haematococca mpVI 77-13-4]
  misc_feature (80)..(545): NCBI GI: 242777821 Blast Desc: conserved [Talaromyces stipitatus ATCC 10500] gi|218722730|gb|EED22148.1| conserved [Talaromyces stipitatus ATCC 10500]
  misc_feature (47)..(543): NCBI GI: 212533337 Blast Desc: C6 transcription factor, [Penicillium marneffei ATCC 18224] gi|210072189|gb|EEA26278.1| C6 transcription factor, [Penicillium marneffei ATCC 18224]
  misc_feature (1)..(549): NCBI GI: 238507858 Blast Desc: conserved [Aspergillus flavus NRRL3357] gi|220688649|gb|EED45001.1| conserved [Aspergillus flavus NRRL3357]
  misc_feature (7)..(546): NCBI GI: 169785517 Blast Desc: [Aspergillus oryzae RIB40] gi|83775967|dbj|BAE66086.1| protein product [Aspergillus oryzae]
  misc_feature (1)..(548): NCBI GI: 169784914 Blast Desc: [Aspergillus oryzae RIB40] gi|83775665|dbj|BAE65785.1| protein product [Aspergillus oryzae]
  misc_feature (1)..(546): NCBI GI: 238506531 Blast Desc: conserved [Aspergillus flavus NRRL3357] gi|220689180|gb|EED45531.1| conserved [Aspergillus flavus NRRL3357]
  misc_feature (71)..(549): NCBI GI: 259489642 Blast Desc: TPA: conserved [Aspergillus nidulans FGSC A4]
  misc_feature: Useful for introducing or modulating the production of volatile compounds
MAFILQRRSIVKQVEDQVAQIKDLHKNGLFSGSTTASNSILNGEKGPFGHNTGMRNSLEDAYLGIPGITYDVDNQGNGYFNVGWTGTDDHFNPKRWSSTRRVGSTILVCIVALVGTIASSIDSIIIEKAAAEFGVASIVESLSTSLFLVGFGGGALLASPLSELVGRFPVYIFSLVVLAGWTVGSALSPNITSQLIFRFLMGLSASPPLTVAGGSISDMWSPLERTFAFPIYAVPGFGGAVLGPVIGTWIGNREDVSWRWVEWTVLILVCFSLLLLLLLKRETFPPRILHLKAAAFRSSTRDSRFKTSTEAADASSVQVILKRNFMRPFLLCLEPIVVCFTLYLSIAYIVLFTFLDGYTDIFANVYDIDKNLSNTIFVGIVVGIFISAPLIPWVYYRTAAQLESDGDDGSGAKLDRESRLIFAVIGAPFLPVGLFWMGWTDFAWISIWSPIAASALIGFSIICIFMSANLYIIDSYEMYAASALTFNALIRYFAAGGFTVVGIPLYENLGTHYTLTFLGVLSSLAVPIPYALYKWGPAIRLRSSWAFSAN

SEQ ID NO: 18857 - DNA, 4757 bp, Muscodor strobelii
  misc_feature: SGI EST ID NO. CUFF.44305.0
  misc_feature: Variant of the nucleotide sequence at SEQ ID NO 18855
ctaattccgacgctaggcaattgggcgtcctttcgctgaacggcccaccagcagaaatttacgtcctctccgaccaagcctaaaattcccctaacctctgaaagctacaggaggcttgcactaatggatcactacagtttgcatcgctcggcagcaatcaaccaacgctaatgagccaatactctgtgtctaccgtagaacaaccccgcgaagaactcttgcagaatgcaggaatttagcaataacatctttccagagcttagttatagtcgaatgggggcggattgagagactatcagtatgccggcaaactatacaactccgacgacttcgccccggccggatcccagctcggcaacggtgagatctcataggcgtcgcttacgaaaaccgatcagctgtgaaccgtgtcgtcactccaaattgagatgcgaccgcaggaaaccttgcagttcctgtgagcgccggagctgtagtcatgtatgtgtgtatgagaataatgtgcaagacatcaatgaggttgctcagcgtcgggccagctcagcccgtgggtcaggtcatgcatcttctcgatcacaggatgaacgcaatggtgttgctgccacccaatcgcagtctttgactccttataccacgtcgactggatcggaagagtacggctctgcaggagccttcattcatgaacgttgggaagaggtcctgcgacgccctatggtttataacgactcggagccatcagcattcaatacacgaagtgtcgacccctctcgtccgctattttcctccttcctcttctcgcagagtgaccaagtcccaataaatgacttcctggcaatgatgccgccgccagactgctgcgaatttcttgtgtcgagattctttctgatacattcgccatttttccacattttacacggtccgatatttcaaagagagtacaatgcattcgttgacaaccgtgaggctgttgatctctcatggctagcgctgttatttgtaataatatttatcggtctgaaatcacttcaatatgatcattctactctcgatgacatgtggcctgggcggtcccgatcccaagattggaacgcaatagcagcacaattcttggagggagcaatgtcatgcctatcgaaaacccaattcatgacaaactatcgactcagctccctgcaagcccttttgctgatagcttatgcgataggccacagcgagggcgtcgaaagagcttggacacttctgggcatttctttgaacattgctattgctttgcagtgcaattctgagtcggccccctctggtctaagtcgtatcgaaatcgaacgccgacggcgctgttgggcagggctgctttcactgtacacgtaccaagctgtctcatttcccggtctcgacatgatatttttgaatgacgacaaaatggccctgcccgctgacgtaaacgataccgatatacacgagagcggcgtattagagcggtcgagtcagcctacacagatgtcggtcatgatggaaaagattcgcttgtttcaactctcgactaagatctgtcgatatctcagaggaaacgatcaatatgatgaagccactcgagatcggtttgattttgagatagcagaagagcagcacaagtgggatgttgcttatttgattgatcggcgacccagctttctcgacttcaccagctacaccttctgggcattcttgcaaatgcacgcacaccatcttcgtcttctaattcaccaaccgttttgtcgcaatcggtcgcagttggcgggcttttgtcaagagtcgagatcgaaatgtattgagtcgggcgcgatactcgtcgacctacatcgacagctttgggaatgcccccgtctgcgtccttttcgctggacattggatggtctcatgagtttttacgcccttcacggcgctgttgcgatggcatcttgtttactaggagatgattcgaatacagctgagttgagactgaaataccgagatgcgttcacatcagtcgttcatcgcatcgaaatcttacagacacgaagcgctatctgccaaaaagcgtatcctattctgaatcacttacagactctactatatcccacgcatacacccaacccagtgaacacactccttatggacactttcgacacatgggtagacaatcagcaatggctcaattcaggcagtattgattggacaatcttcgacggaatactgggtgcagcagatgcgccgtgagtttattctttttacgacagtttggatacgggttctctgaacttctgtttggacggtcttactttctggtcatcaacggcgacgactagagagaaactgtcctatgcagtggaaattcatcatcgctgaatagaaaacccggcggaacccttcgtggcctctggtacctgtcgtgcggctcttggtcaatatatccaccaagatgtgttcgataacggagacagcaatatccgcgtctagtgttgaactagtccacatcggagctgatatcagcggaacaaatctacggtacaccgggttaacattcgccagtcttgtactccacacgccctctcttcggagatgtaagctcgggtttatatgaagcttcgacataatcaaatagagcttgactcatctccgatcaccgctgatggaatgagaaacggtctactattcgccggcaggtagacgattgaaatacaataaaaaacctttgttaggcacaatacattccattatggttttccagtagctgtctctcatatctttgcgcgtgataggtcctcgatattggcactactcgttgcaaaattctagtattgcagaatggccttcatactccagcggcggtccattgtcaaacaagtcgaggatcaagtagcacaaatcaaagacttgcacaagaacggcctcttcagcggaagtaccacggctagcaattcaatactcaatggagaaaagggcccgttcggacacaacacggggatgcgaaatagcctggaagatgcctaccttggtatcccgggtatcacatacgacgtcgacaatcaaggcaatggatacttcaatgtcggttggacgggtacggatgatcatttcaatcccaaacgttggtcatcgacacgtcgtgttggctctacaatcctcgtctgtatcgtagctctggtcgggaccattgcgagttcaattgacagtataattatcgaaaaagccgccgccgagtttggtgtagcttctatcgttgaatcgctgtcaacttcattattcctcgtcggatttggtggcggagcactgcttgctagtccactctcggagcttgttggacgctttccagtctatattttctcccttgtcgttctggcgggatggacagtgggctctgctctttcgcctaatatcacatcacagcttatatttcgatttctcatgggactttctgcttctccgcctctcaccgttgcgggaggctcgatatcagacatgtggtcccctctcgaacggacgtttgcttttccaatctacgcagtgcccggatttggtggcgctgtgcttggccctgtaataggaacatggatcggcaatcgagaagatgtcagctggagatgggttgaatggacagttctgatactcgtctgtttctcacttttgttactgctgctcttgaagcgagagacatttcctccccgcatccttcacctgaaagcggcagctttccggagtagcacaagagactctcgattcaaaacgagtactgaagcagctgacgcgagctcagttcaagtaattctaaagcggaacttcatgcgacctttcctgctctgcttggaacccattgtggtctgctttactctttatctgtcgattgcgtacatcgttttgtttacatttcttgacggctatacagacatcttcgccaacgtttacgacattgataaaaatttgtcaaataccatctttgtcggcatcgttgtagggatattcattagtgctccgttgataccatgggtatactatcgaactgcagcacagttagaaagtgatggcgatgatggatccggtgccaaactggatcgggagtcgcgcttgatttttgctgtgatcggcgcgccatttctcccagtcggattattctggatgggttggacagactttgcgtggatatcgatctggtcgcctatcgctgcttctgctttgatcggtttcagcattatatgcatcttcatgtcagcaaatctgtatatcatagattcgtacgagatgtatgccgcatcggctttgacattcaacgcattaatccggtatttcgccgcaggcggtttcactgtggttggcataccgctgtatgaaaatttaggaacgcattatactctgactttcttaggtgtcctcagtagtttagctgttcccataccgtatgctttgtataaatggggaccggcgatcagattgcgaagcagttgggcattttcagcaaattgaccaacgtaatttcatagacatagacctagacctagacgttggatgaggtacccgggacaaaggcaagcatacaatctctgacaaaaattttttatggtctacagcaacttctttctgttagcttgctatgatacgagttgttgtgtatctggaaggtaaggatactataggcaggttaaggcgaaggtcttgtcttgtagaaaaaggatgaacatatttagatctttcaccacacataactgttgttaggtaatgccacacacccgggctcatgcttgctg

SEQ ID NO: 18858 - DNA, 1179 bp, Muscodor strobelii
  misc_feature: SGI cDNA ID NO. 566332
  misc_feature: Encodes the peptide sequence at SEQ ID NO 18859
atgaattacacaatgacaacagtctacggcagatgtgagactaagtttcaggaggtccgtctgctccttgaacaagcaattgcttcaggggacgagctcggagcctccatagctgtgaacctgaatggagaagaggttgttgatatctggggaggatttctcgacgaggagcggacacaaccgtggaatgaaaacactattgttaatgtctggtcgagtactaaatgtgtaacgagtttagccgttctcaaacttattgaccagggtatcctaagtgttgaagataaagtgtcaaaatactggcctgaatttgccgccaacggcaagcaagatgttctcatccgacacgttctttcacacgcatctggagtttctggttgggaaaagccaatcactgcagaagagatttgtgatttcgaactatcggccaatatgcttgcagagcaggctccttggtgggaacccggaactagtacaggctatcattcagttacctttggtcaccttctaagcatgattatacgcaaagcaacgggcggcaagaaaacgctgaggcaaattgttgccgaagaccttgcacgtccactagaggctgattttcagattggcgcgcgtgaaaaagactggcccagagtgtcacggatatacccaggcgcagatttcaccgcgcccgtaatagagccagggtcaataacagagaagacattattaaaccccaaatctgacgcgaagatggccgattttgccaatactacaactttcaagttggccgagattggtggatctaacgggcactcgaacgctcgtggaatgaatcgaatcatgtcacccgtttcaatgggcgggacagcaggaggggtccaaattttgaagccagagacagttgaactcatattcaacgaacagtaccaaggacgcgaccacgttgtccctgcgccagtacgctttggaattggcttcggactgagaggagaaggacctgaaattgagtcgagcatagacaaaagcactccgaaagggaagatttgtttctggggcggttggggaggatcaatcatcatcatggatctcacaaggaggctcacgattacttatgctatgaacaagatgggaggaactggtgggaataagaacacctccaagtatattcaggctgtgtaccgagcacttgatgcttaa

SEQ ID NO: 18859 - protein, 392 aa, Muscodor strobelii
  misc_feature: SGI Peptide ID NO. 566332
  misc_feature (19)..(388): Pfam Id: PF00144 Pfam Desc: Beta-lactamase
  misc_feature (5)..(390): NCBI GI: 46102640 Blast Desc: FG00024.1 [Gibberella zeae PH-1]
  misc_feature (5)..(392): NCBI GI: 119479365 Blast Desc: beta-lactamase [Neosartorya fischeri NRRL 181] gi|119407865|gb|EAW17814.1| beta-lactamase [Neosartorya fischeri NRRL 181]
  misc_feature (16)..(390): NCBI GI: 256724612 Blast Desc: NECHADRAFT_95921 [Nectria haematococca mpVI 77-13-4]
  misc_feature (7)..(390): NCBI GI: 261204870 Blast Desc: beta-lactamase [Ajellomyces dermatitidis SLH14081] gi|239592231|gb|EEQ74812.1| beta-lactamase [Ajellomyces dermatitidis SLH14081] gi|239611611|gb|EEQ88598.1| beta-lactamase
  misc_feature (5)..(392): NCBI GI: 70997858 Blast Desc: beta-lactamase [Aspergillus fumigatus Af293] gi|66851297|gb|EAL91623.1| beta-lactamase [Aspergillus fumigatus Af293] gi|159126606|gb|EDP51722.1| beta-lactamase [Aspergillus
  misc_feature (7)..(390): NCBI GI: 16209565 Blast Desc: lactone hydrolase [Rhodococcus ruber]
  misc_feature (1)..(370): NCBI GI: 120406331 Blast Desc: beta-lactamase [Mycobacterium vanbaalenii PYR-1] gi|119959149|gb|ABM16154.1| beta-lactamase [Mycobacterium vanbaalenii PYR-1]
  misc_feature (5)..(390): NCBI GI: 212540786 Blast Desc: beta-lactamase [Penicillium marneffei ATCC 18224] gi|210067847|gb|EEA21939.1| beta-lactamase [Penicillium marneffei ATCC 18224]
  misc_feature (8)..(390): NCBI GI: 262200091 Blast Desc: beta-lactamase [Gordonia bronchialis DSM 43247] gi|262083438|gb|ACY19406.1| beta-lactamase [Gordonia bronchialis DSM 43247]
  misc_feature (7)..(390): NCBI GI: 225562374 Blast Desc: lactone hydrolase [Ajellomyces capsulatus G186AR]
MNYTMTTVYGRCETKFQEVRLLLEQAIASGDELGASIAVNLNGEEVVDIWGGFLDEERTQPWNENTIVNVWSSTKCVTSLAVLKLIDQGILSVEDKVSKYWPEFAANGKQDVLIRHVLSHASGVSGWEKPITAEEICDFELSANMLAEQAPWWEPGTSTGYHSVTFGHLLSMIIRKATGGKKTLRQIVAEDLARPLEADFQIGAREKDWPRVSRIYPGADFTAPVIEPGSITEKTLLNPKSDAKMADFANTTTFKLAEIGGSNGHSNARGMNRIMSPVSMGGTAGGVQILKPETVELIFNEQYQGRDHVVPAPVRFGIGFGLRGEGPEIESSIDKSTPKGKICFWGGWGGSIIIMDLTRRLTITYAMNKMGGTGGNKNTSKYIQAVYRALDA

SEQ ID NO: 18860 - DNA, 801 bp, Muscodor strobelii
  misc_feature: SGI EST ID NO. CUFF.44307.0
  misc_feature: Variant of the nucleotide sequence at SEQ ID NO 18858
cgcgcgtgaaaaagactggcccagagtgtcacggatatacccaggcgcagatttcaccgcgcccgtaatagagccagggtcaataacagagaagacattattaaaccccaaatctgacgcgaagatggccgattttgccaatactacaactttcaagttggccgagattggtggatctaacgggcactcgaacgctcgtggaatgaatcgaatcatgtcacccgtttcaatgggcgggacagcaggaggggtccaaattttgaagccagagacagttgaactcatattcaacgaacagtaccaaggacgcgaccacgttgtccctgcgccagtacgctttggaattggcttcggactgagaggagaaggacctgaaattgagtcgagcatagacaaaagcactccgaaagggaagatttgtttctggggcggttggggaggatcaatcatcatcatggatctcacaaggaggctcacgattacttatgctatgaacaagatgggaggaactggtgggaataagaacacctccaagtatattcaggctgtgtaccgagcacttgatgcttaagaacaggtatcgagatgtatcaagagatgcacaggttacaagaaatgagcttcattcaagcaaatacggtatcgcaattcagtctccatcaaatgtacactcattcttcgacgactctccgaagcagaaaattgactggcaattgttctaaaggtatagatttctatgtgcacttatctgaactcttcatccgacgcttttcaagacaacattttcgggcgtcatcccaa

SEQ ID NO: 18861 - DNA, 912 bp, Muscodor strobelii
  misc_feature: SGI cDNA ID NO. 566333
  misc_feature: Encodes the peptide sequence at SEQ ID NO 18862
atgaacgagcaagaaactagacatggcttaggaaaacatgcatgggatcttcaagtcccagatgagatcattgcctacatgaaaaacttctacgtcagcattgctttgtataataccgggctgttgctggttaaattgacattcttgacgcaatactatcgcatattggctttgaagcgataccggttcatctgtcttgtggccatgatcttgattggatcttggagcttgtctcaagctctcataggcatattcatgtgtcgaccaattgctggcttttggaattctgctctagaagcaaagtgcataccgacacctttacaatggtacatcaatgctgccggcaacatagtcaccgacgtgatcattttcattattccaatgcccgtgttcaagaatcttcagatccccaaagcccaaaaagtttccctcattggaattttcagtcttggattcttcaccgtggccatttctttcattcgtatcaagtttctacatcagggacgtgatttctcatacgaaaacatcgaaggttcaagttggtcgattgcagaactttgctcgggtgtgatatgcgtctgcttgccgactttgcgaccaattgcttcaaaatttgtaccagcccttgcaagcaaaatacagagagcatcgtctcggtctcacaagcgaagaagcaatggtagaaatactgccgacatagaaagcggacgtgacgcaagttcacccgtgaaagaattgcatgggacagatatcggtagcgaagttgaactatttgggcacgaacagagacctaatctgtaccctcattccagcgaggaaacatcaggtagtattatgggcctccaatgtacaaaagaagcattaagccagaccaaagccgatttttcacgctcgctctcgctgacaatgtag

SEQ ID NO: 18862 - protein, 303 aa, Muscodor strobelii
  misc_feature: SGI Peptide ID NO. 566333
  misc_feature (5)..(217): NCBI GI: 256723043 Blast Desc: NECHADRAFT_6182 [Nectria haematococca mpVI 77-13-4]
  misc_feature (1)..(287): NCBI GI: 85113520 Blast Desc: NCU00700 [Neurospora crassa OR74A] gi|28926320|gb|EAA35298.1| [Neurospora crassa OR74A]
  misc_feature (5)..(209): NCBI GI: 145604585 Blast Desc: MGG_07806 [Magnaporthe grisea 70-15] gi|145012582|gb|EDJ97236.1| MGG_07806 [Magnaporthe grisea 70-15]
  misc_feature (7)..(216): NCBI GI: 145616086 Blast Desc: MGG_03584 [Magnaporthe grisea 70-15] gi|145009847|gb|EDJ94503.1| MGG_03584 [Magnaporthe grisea 70-15]
  misc_feature (5)..(222): NCBI GI: 46126571 Blast Desc: FG07663.1 [Gibberella zeae PH-1]
  misc_feature (5)..(224): NCBI GI: 261353889 Blast Desc: conserved [Verticillium albo-atrum VaMs.102]
  misc_feature (62)..(244): NCBI GI: 171695500 Blast Desc: protein product [Podospora anserina] gi|170947992|emb|CAP60156.1| protein product [Podospora anserina]
  misc_feature (5)..(220): NCBI GI: 116198753 Blast Desc: CHGG_07532 [Chaetomium globosum CBS 148.51] gi|88178811|gb|EAQ86279.1| CHGG_07532 [Chaetomium globosum CBS 148.51]
  misc_feature (5)..(228): NCBI GI: 238503281 Blast Desc: integral membrane protein, [Aspergillus flavus NRRL3357] gi|220691684|gb|EED48032.1| integral membrane protein, [Aspergillus flavus NRRL3357]
  misc_feature (6)..(263): NCBI GI: 256725006 Blast Desc: NECHADRAFT_34678 [Nectria haematococca mpVI 77-13-4]
MNEQETRHGLGKHAWDLQVPDEIIAYMKNFYVSIALYNTGLLLVKLTFLTQYYRILALKRYRFICLVAMILIGSWSLSQALIGIFMCRPIAGFWNSALEAKCIPTPLQWYINAAGNIVTDVIIFIIPMPVFKNLQIPKAQKVSLIGIFSLGFFTVAISFIRIKFLHQGRDFSYENIEGSSWSIAELCSGVICVCLPTLRPIASKFVPALASKIQRASSRSHKRRSNGRNTADIESGRDASSPVKELHGTDIGSEVELFGHEQRPNLYPHSSEETSGSIMGLQCTKEALSQTKADFSRSLSLTM

SEQ ID NO: 18863 - DNA, 2241 bp, Muscodor strobelii
  misc_feature: SGI EST ID NO. CUFF.44323.0
  misc_feature: Variant of the nucleotide sequence at SEQ ID NO 18861
caaggatgcaaaagctgttcaacagtaggaatctaacttgaacagtagctctgagctacaatctacaggagtaattttctctatattatgtggatggtgtagatagtagattccaaatacattagaaccagttcacgaatacaaacacccggctcggcttgtctgcttgcactgtacctcctctaatcctgttcgctttgaacgctcgaatatgaatacgcctgttgatcaaaccactttgccacatgatgatcgtgctcatgtcatattcgctgttgttattccactactcagtgttaccacggtggtcgttggcttgcgcatatacactcgaaagatactgttgaatgctttgttgggtccggatgatttcctttctgttttggcacttgtatgcgaaccgaactggcccccggtgttacttagtatgccaactcttgcttttagctattcgctattgcaacaggaacatcgcaatgttaccaaactagacatggcttaggaaaacatgcatgggatcttcaagtcccagatgagatcattgcctacatgaaaaacttctacgtcagcattgctttgtataataccgggctgttgctggttaaattgacattcttgacgcaatactatcgcatattggctttgaagcgataccggttcatctgtcttgtggccatgatcttgattggatcttggagcttgtctcaagctctcataggcatattcatgtgtcgaccaattgctggcttttggaattctgctctagaagcaaagtgcataccgacacctttacaatggtacatcaatgctgccggcaacatagtcaccgacgtgatcattttcattattccaatgcccgtgttcaagaatcttcagatccccaaagcccaaaaagtttccctcattggaattttcagtcttggattcttcaccgtggccatttctttcattcgtatcaagtttctacatcagggacgtgatttctcatacgaaaacatcgaaggttcaagttggtcgattgcagaactttgctcgggtgtgatatgcgtctgcttgccgactttgcgaccaattgcttcaaaatttgtaccagcccttgcaagcaaaatacagagagcatcgtctcggtctcacaagcgaagaagcaatggtagaaatactgccgacatagaaagcggacgtgacgcaagttcacccgtgaaagaattgcatgggacagatatcggtagcgaagttgaactatttgggcacgaacagagacctaatctgtaccctcattccagcgaggaaacatcaggtagtattatgggcctccaatgtacaaaagaagcattaagccagaccaaagccgatttttcacgctcgctctcgctgacaatgtaggtagtggtccgcactgaaccagaagcgaaagtctcgctgcataacaccgttctatcaacggtttgcatggaggttcgcattgggagaaatccggaaggcggcgtattggaaagcaggtcgcaaatcgggatggggattttaatttgtaatagaaatcgatggtatcctggcctgtattcccgtttctgcctcgctttatccccagtctctggggtgagcttttttggcaacgcagaatgaaactgcctgctttctgccggagccgggcgttcgggtcgatggatgatgttttcgtacatgtgtctcatcctatcagatttgtcaaaaagacacgagtcggtcgactatcataattcagacgctctgctgaatctggtcataagccacataccatgtcatggacctttgcaaactttactggccgcagtatgatgcattttctcagataaaggcaattgtatctggccacatgcatggtagatacgtacagttcattcaatcaaaacagtgataaaagcagcggcaatggtttctcggtgcgtgcagaattgaaaaaccttgtgcgaatgcggaaatgcagcccatggattccaagtccttggtttcacccctgctcttcttcaattttttttggcgattacttgagtaatcggcagttgaacacatcagactagttgagcgagtcaatacctacatctgtgaagcttttataaagcgatctgactagtaatgatgaatctcgatcgtgatgcagaatagaagttctgcaatggccgaaaacagaccctcgagcgaagctcattgttcgtcttgtcttccgctttgtgtttacatgtattatataccttaatgtacatg

SEQ ID NO: 18864 - DNA, 1095 bp, Muscodor strobelii
  misc_feature: SGI cDNA ID NO. 566334
  misc_feature: Encodes the peptide sequence at SEQ ID NO 18865
atgaagcgttcgccagatgccagcaacggtgttccggttctcatcacttcttcagctacacagctgattgggccaattaccgcattctacatcgtggaccttatcgttattgctttgcgcatttgggccagacgaattaagagagctgactggcggttgtccgactatgccattatcgcagcttcagttttcgcttcgggatatatcgcgctttgctggctggctatcgtacatggcggacttggccatccggtcaaccaagtcacaacttttcaacaaaccattgtcttgaaggcattcttcgtagcctggctattacagtcctttgccaactcgcttgttcgcctgtcgattcttgacttcatcttgcaggttttctatcctgtgaaaaagttccgctatgcagtatacgtttttgaggcggccacagttgcatatctggtcgccttcacgatcgcaggacttgctagctgtcggcccttcaagtataactggatactcggtccagatgttccagaacattgtggcaatcaggcactgagattccttctgagctctgtgttcaatctggtgctcgacgcgggcatcttgttgctgccaatgccaatgctttggacgctgcaattgagcatcaccagaaaagttgcgatctgcttcgtcttcggattgggtgtttttgtcgttttcgcaaccgcttggaggacatacaacgtggtccaattctctattcccgcaaatcaagaaaactttactgttactatcattccagatgcgctctggtctggactggaaattactctaggcatactcaacgcatgtcttccagttattcagccagcaatccaacgccttcttggtacacgctttctccgacttggaacccgtccacgaagcagcgatgcaccggaaagctcaaggacatggacaggctacagagtttcacaaagcaagcagggctttagatcttgggtgcgtctcggcaacaaaatggacaaagacgaagccaacggcgagttcaaggctgggattcgacgggatatggaattctcagtcgacattgaagcagctccgcaactctacttagaaaaatattaa

SEQ ID NO: 18865 - protein, 364 aa, Muscodor strobelii
  misc_feature: SGI Peptide ID NO. 566334
  misc_feature (27)..(352): NCBI GI: 238840245 Blast Desc: integral membrane protein [Microsporum canis CBS 113480]
  misc_feature (26)..(282): NCBI GI: 154313039 Blast Desc: BC1G_05521 [Botryotinia fuckeliana B05.10] gi|150849606|gb|EDN24799.1| BC1G_05521 [Botryotinia fuckeliana B05.10]
  misc_feature (29)..(345): NCBI GI: 145257262 Blast Desc: An04g02990 [Aspergillus niger] gi|134058578|emb|CAK96465.1| protein product [Aspergillus niger]
  misc_feature (14)..(333): NCBI GI: 115387012 Blast Desc: conserved [Aspergillus terreus NIH2624] gi|114191045|gb|EAU32745.1| conserved [Aspergillus terreus NIH2624]
  misc_feature (29)..(307): NCBI GI: 121720146 Blast Desc: ACLA_060120 [Aspergillus clavatus NRRL 1] gi|119404983|gb|EAW15345.1| ACLA_060120 [Aspergillus clavatus NRRL 1]
  misc_feature (29)..(299): NCBI GI: 67541837 Blast Desc: AN7082.2 [Aspergillus nidulans FGSC A4] gi|40742021|gb|EAA61211.1| AN7082.2 [Aspergillus nidulans FGSC A4]
  misc_feature (29)..(320): NCBI GI: 259483599 Blast Desc: TPA: conserved [Aspergillus nidulans FGSC A4]
  misc_feature (29)..(332): NCBI GI: 119495696 Blast Desc: integral membrane protein, [Neosartorya fischeri NRRL 181] gi|119412789|gb|EAW22730.1| integral membrane protein, [Neosartorya fischeri NRRL 181]
  misc_feature (29)..(312): NCBI GI: 169614972 Blast Desc: SNOG_10638 [Phaeosphaeria nodorum SN15] gi|111060912|gb|EAT82032.1| SNOG_10638 [Phaeosphaeria nodorum SN15]
  misc_feature (14)..(362): NCBI GI: 256724727 Blast Desc: NECHADRAFT_84327 [Nectria haematococca mpVI 77-13-4]
MKRSPDASNGVPVLITSSATQLIGPITAFYIVDLIVIALRIWARRIKRADWRLSDYAIIAASVFASGYIALCWLAIVHGGLGHPVNQVTTFQQTIVLKAFFVAWLLQSFANSLVRLSILDFILQVFYPVKKFRYAVYVFEAATVAYLVAFTIAGLASCRPFKYNWILGPDVPEHCGNQALRFLLSSVFNLVLDAGILLLPMPMLWTLQLSITRKVAICFVFGLGVFVVFATAWRTYNVVQFSIPANQENFTVTIIPDALWSGLEITLGILNACLPVIQPAIQRLLGTRFLRLGTRPRSSDAPESSRTWTGYRVSQSKQGFRSWVRLGNKMDKDEANGEFKAGIRRDMEFSVDIEAAPQLYLEKY

SEQ ID NO: 18866 - DNA, 3072 bp, Muscodor strobelii
  misc_feature: SGI cDNA ID NO. 566335
  misc_feature: Reduced expression when VOC is produced
  misc_feature: Encodes the peptide sequence at SEQ ID NO 18867
gcaccggcggcagcatgtccatatcccacctgctcggaggtcctccggccagctccccgcgagccgacacctggtggccacggccctcccccgtatcctgctcccgtcaccagcgccgctgcctcgagtgcggcctatgccccctcgatcgctgcctccccacgcatgcgcaacgccgacgagtacagcccctaccaccaccgcagaccacatacgcccgaagcaggcagaccgccctttgacagccgcgatccccgaggcagcgcggcaggatctccgccccagggcgtctaccctggtggcacgccagagatgtcgagatatgccacgccacagacctaccaacacagacccccgcccatggcagccggcgacgatggtagaaaggagcctccgggccgcgtaggcacgtcgagtgtaccgccacgcaccgtaagcccgcgataccacggcatggctccaaggtcggtcgacatgggccgtggtccgccgccgccgcatcccgaccacatgcatgccagacgcgaagaaccaccgcgaggtccacccgagtaccactccgatttcgtgcagcgacagctgtcatacgaggagcaacagcaacatcgtctggctatcgagcgtgagcgtgactatcgagagcagcagcaccgagccgccgagttccacgagagccagcgacgggagcaagagcgcatgtactacgaggatcgccgacctcccatgtccgagcacgaacgcctagaccgcgaacgattcgagctggagcgggagagggaacgcgagtacgagaggcagagggtgcagcgtgaaagaacgacgtcagatcctagccgtccgcacggccagcaccccggcgaacccgggcctcaaggaccacctcgacagccacctcattatggccctccagaccctcgcgatcttccacgagatccccgagatccacgcgacccacgcgacccacgcgaccaccgtgatccaagagatcagagagatcctagagatcagagagacccaagagatccacgtgaacctccaggctggcgacctggctacgatcagccgccgagggacgtgtacggacagccatatccaccacaccggccaggcgagtatccagtcaccactggtccgccaccctacggcaatcctgcctatgcgcctcaaccacccgaacgcttcccgccgacgagccagccacctcacccgcacgctgcgggccagccgggccctccgccaggccacccctatgattcgccggagcgtcttcgctacgcacccttgcctcatcaaccaccccagcaccgtgggcctccgccccctggagcccgaccgggcgaggaaggaccaccgcctccatccgttgcctacgctggtggaccagggccggctgcgtttgaaccaggccggcctcgtcccatagatgatggcctgccccacggcggaccgcaaagggggcttctcgcggtgaacgagatcaaccggaagggaagactgtcgccactgccacaggccgtgcagggtgcgcagccgatgctgcagggaccggcgggggagcctgggattaagagcgaatttggccgtatgttctctggcataggaagcggagtgcgcggcattggcgtctctagtccaggcccctcgggtgcccagatccccttctcgaaccccaaccttcggcgcgacgaccacgagcctcctcatcccgaagctgttgccgagccgcccgccaaggccccgaagaagcgcgccagaaagcccaaggacgaagacacgaaaggggacgacgagaacaacggcagagccacgcctgttgctcggggggcgaagcgagcaaagacccacggccatcatcaccatcaccatcatcaccaccaccaccatcatgcttccgaccgagcggcatcccctctgcaaggtctgggtggcccgctcaagggtctcaaatcgaccacgcctatcccctcgccttcgagtaaagagtacgccttcacccaccaccaccagccaccacgctccaaccccaatacctccagcaagacccagtcggggcccatcacaatcccgagaaagaagacaaaagtgttctcgcagctggttctggacagcgttgccgatcgtccccggaagcatctgggcgacgtggtgtacaacgtgacgctcaagccggccaagctgggatcatctcgctctggctatgcttcgacgcctaaaccgttgcccatggaaatgatcaaagacaacgaaaactcaacactcacggtaaaagtcccccgagtccacttaacgtcatcggcacgcgaagaaatcacggcgcgcaaagctgtctggggcacggatatctacacggatgactccgacgttgtcgctgcctgcatacacgccggatggatccgaggcgagtggccggacgaagtggacgcagagctgctcgatctgcagaagcctccgtccaaatcgaagcagcgtatcttaccagccgagcaacacctcgatgtgctcaccactgtgccagtatcggggcccgtgcccgtcccagaggatcgtgacctacacgtcaccattctcatcctgccggctctcgagaagtactcgacgacgactcggtacggcatccagagccgcgaattcggcgcaacatacaacggtcgcagatcgttccacgacggccttagcttcatgatccagagcgtgcgatgggtggatggtgctgcgccgcagagtcggctgaggggaaaggctcgaagagagcgcattcgcaaggccatgagcgaggttaatcgcagccaaatcgtggatattccggagaaggagacactcagcaaatccactcccagagatcagggaacggccaagaacggagacatggacaaagagaaccgtcccatcgagggcccagcttcgaaatcgacatcgccgccggcacctgctgtagccgaagagccggcaacggtcgatgccgtggctgatacaaaggaggaggagacgccgccggatagtaagacggagagcaagacggaggaatctgagaaagaggcagccgaagagcaacatacgaaagagtcaagttag

SEQ ID NO: 18867 - protein, 1023 aa, Muscodor strobelii
  misc_feature: SGI Peptide ID NO. 566335
  misc_feature (753)..(878): Pfam Id: PF08642 Pfam Desc: Histone deacetylation protein Rxt3
  misc_feature (37)..(1021): NCBI GI: 256720908 Blast Desc: NECHADRAFT_96695 [Nectria haematococca mpVI 77-13-4]
  misc_feature (45)..(942): NCBI GI: 46137773 Blast Desc: FG10402.1 [Gibberella zeae PH-1]
  misc_feature (408)..(1017): NCBI GI: 261354433 Blast Desc: conserved [Verticillium albo-atrum VaMs.102]
  misc_feature (324)..(929): NCBI GI: 116205465 Blast Desc: CHGG_10616 [Chaetomium globosum CBS 148.51] gi|88176744|gb|EAQ84212.1| CHGG_10616 [Chaetomium globosum CBS 148.51]
  misc_feature (311)..(962): NCBI GI: 171677243 Blast Desc: protein product [Podospora anserina] gi|170936689|emb|CAP61348.1| protein product [Podospora anserina]
  misc_feature (390)..(931): NCBI GI: 145606582 Blast Desc: MGG_02240 [Magnaporthe grisea 70-15] gi|145014201|gb|EDJ98842.1| MGG_02240 [Magnaporthe grisea 70-15]
  misc_feature (341)..(904): NCBI GI: 156043319 Blast Desc: SS1G_10663 [Sclerotinia sclerotiorum 1980] gi|154695050|gb|EDN94788.1| SS1G_10663 [Sclerotinia sclerotiorum 1980]
  misc_feature (470)..(939): NCBI GI: 259479508 Blast Desc: TPA: conserved [Aspergillus nidulans FGSC A4]
  misc_feature (470)..(939): NCBI GI: 67540220 Blast Desc: AN6280.2 [Aspergillus nidulans FGSC A4] gi|40739474|gb|EAA58664.1| AN6280.2 [Aspergillus nidulans FGSC A4]
  misc_feature (485)..(923): NCBI GI: 261195312 Blast Desc: conserved [Ajellomyces dermatitidis SLH14081] gi|239587932|gb|EEQ70575.1| conserved [Ajellomyces dermatitidis SLH14081]
  misc_feature: Useful for introducing or modulating the production of volatile compounds
APAAACPYPTCSEVLRPAPREPTPGGHGPPPYPAPVTSAAASSAAYAPSIAASPRMRNADEYSPYHHRRPHTPEAGRPPFDSRDPRGSAAGSPPQGVYPGGTPEMSRYATPQTYQHRPPPMAAGDDGRKEPPGRVGTSSVPPRTVSPRYHGMAPRSVDMGRGPPPPHPDHMHARREEPPRGPPEYHSDFVQRQLSYEEQQQHRLAIERERDYREQQHRAAEFHESQRREQERMYYEDRRPPMSEHERLDRERFELEREREREYERQRVQRERTTSDPSRPHGQHPGEPGPQGPPRQPPHYGPPDPRDLPRDPRDPRDPRDPRDHRDPRDQRDPRDQRDPRDPREPPGWRPGYDQPPRDVYGQPYPPHRPGEYPVTTGPPPYGNPAYAPQPPERFPPTSQPPHPHAAGQPGPPPGHPYDSPERLRYAPLPHQPPQHRGPPPPGARPGEEGPPPPSVAYAGGPGPAAFEPGRPRPIDDGLPHGGPQRGLLAVNEINRKGRLSPLPQAVQGAQPMLQGPAGEPGIKSEFGRMFSGIGSGVRGIGVSSPGPSGAQIPFSNPNLRRDDHEPPHPEAVAEPPAKAPKKRARKPKDEDTKGDDENNGRATPVARGAKRAKTHGHHHHHHHHHHHHHASDRAASPLQGLGGPLKGLKSTTPIPSPSSKEYAFTHHHQPPRSNPNTSSKTQSGPITIPRKKTKVFSQLVLDSVADRPRKHLGDVVYNVTLKPAKLGSSRSGYASTPKPLPMEMIKDNENSTLTVKVPRVHLTSSAREEITARKAVWGTDIYTDDSDVVAACIHAGWIRGEWPDEVDAELLDLQKPPSKSKQRILPAEQHLDVLTTVPVSGPVPVPEDRDLHVTILILPALEKYSTTTRYGIQSREFGATYNGRRSFHDGLSFMIQSVRWVDGAAPQSRLRGKARRERIRKAMSEVNRSQIVDIPEKETLSKSTPRDQGTAKNGDMDKENRPIEGPASKSTSPPAPAVAEEPATVDAVADTKEEETPPDSKTESKTEESEKEAAEEQHTKESS

SEQ ID NO: 18868 - DNA, 3449 bp, Muscodor strobelii
  misc_feature: SGI EST ID NO. CUFF.44434.1
  misc_feature: Variant of the nucleotide sequence at SEQ ID NO 18866
ctccacccgtgaacctgggcccgcctagcgcttttccctcctcgcgcgagctgcccgccctcaactccatcccgcgcaccgccaggcaccggcggcagcatgtccatatcccacctgctcggaggtcctccggccagctccccgcgagccgacacctggtggccacggccctcccccgtatcctgctcccgtcaccagcgccgctgcctcgagtgcggcctatgccccctcgatcgctgcctccccacgcatgcgcaacgccgacgagtacagcccctaccaccaccgcagaccacatacgcccgaagcaggcagaccgccctttgacagccgcgatccccgaggcagcgcggcaggatctccgccccagggcgtctaccctggtggcacgccagagatgtcgagatatgccacgccacagacctaccaacacagacccccgcccatggcagccggcgacgatggtagaaaggagcctccgggccgcgtaggcacgtcgagtgtaccgccacgcaccgtaagcccgcgataccacggcatggctccaaggtcggtcgacatgggccgtggtccgccgccgccgcatcccgaccacatgcatgccagacgcgaagaaccaccgcgaggtccacccgagtaccactccgatttcgtgcagcgacagctgtcatacgaggagcaacagcaacatcgtctggctatcgagcgtgagcgtgactatcgagagcagcagcaccgagccgccgagttccacgagagccagcgacgggagcaagagcgcatgtactacgaggatcgccgacctcccatgtccgagcacgaacgcctagaccgcgaacgattcgagctggagcgggagagggaacgcgagtacgagaggcagagggtgcagcgtgaaagaacgacgtcagatcctagccgtccgcacggccagcaccccggcgaacccgggcctcaaggaccacctcgacagccacctcattatggccctccagaccctcgcgatcttccacgagatccccgagatccacgcgacccacgcgacccacgcgaccaccgtgatccaagagatcagagagatcctagagatcagagagacccaagagatccacgtgaacctccaggctggcgacctggctacgatcagccgccgagggacgtgtacggacagccatatccaccacaccggccaggcgagtatccagtcaccactggtccgccaccctacggcaatcctgcctatgcgcctcaaccacccgaacgcttcccgccgacgagccagccacctcacccgcacgctgcgggccagccgggccctccgccaggccacccctatgattcgccggagcgtcttcgctacgcacccttgcctcatcaaccaccccagcaccgtgggcctccgccccctggagcccgaccgggcgaggaaggaccaccgcctccatccgttgcctacgctggtggaccagggccggctgcgtttgaaccaggccggcctcgtcccatagatgatggcctgccccacggcggaccgcaaagggggcttctcgcggtgaacgagatcaaccggaagggaagactgtcgccactgccacaggccgtgcagggtgcgcagccgatgctgcagggaccggcgggggagcctgggattaagagcgaatttggccgtatgttctctggcataggaagcggagtgcgcggcattggcgtctctagtccaggcccctcgggtgcccagatccccttctcgaaccccaaccttcggcgcgacgaccacgagcctcctcatcccgaagctgttgccgagccgcccgccaaggccccgaagaagcgcgccagaaagcccaaggacgaagacacgaaaggggacgacgagaacaacggcagagccacgcctgttgctcggggggcgaagcgagcaaagacccacggccatcatcaccatcaccatcatcaccaccaccaccatcatgcttccgaccgagcggcatcccctctgcaaggtctgggtggcccgctcaagggtctcaaatcgaccacgcctatcccctcgccttcgagtaaagagtacgccttcacccaccaccaccagccaccacgctccaaccccaatacctccagcaagacccagtcggggcccatcacaatcccgagaaagaagacaaaagtgttctcgcagctggttctggacagcgttgccgatcgtccccggaagcatctgggcgacgtggtgtacaacgtgacgctcaagccggccaagctgggatcatctcgctctggctatgcttcgacgcctaaaccgttgcccatggaaatgatcaaagacaacgaaaactcaacactcacggtaaaagtcccccgagtccacttaacgtcatcggcacgcgaagaaatcacggcgcgcaaagctgtctggggcacggatatctacacggatgactccgacgttgtcgctgcctgcatacacgccggatggatccgaggcgagtggccggacgaagtggacgcagagctgctcgatctgcagaagcctccgtccaaatcgaagcagcgtatcttaccagccgagcaacacctcgatgtgctcaccactgtgccagtatcggggcccgtgcccgtcccagaggatcgtgacctacacgtcaccattctcatcctgccggctctcgagaagtactcgacgacgactcggtacggcatccagagccgcgaattcggcgcaacatacaacggtcgcagatcgttccacgacggccttagcttcatgatccagagcgtgcgatgggtggatggtgctgcgccgcagagtcggctgaggggaaaggctcgaagagagcgcattcgcaaggccatgagcgaggttaatcgcagccaaatcgtggatattccggagaaggagacactcagcaaatccactcccagagatcagggaacggccaagaacggagacatggacaaagagaaccgtcccatcgagggcccagcttcgaaatcgacatcgccgccggcacctgctgtagccgaagagccggcaacggtcgatgccgtggctgatacaaaggaggaggagacgccgccggatagtaagacggagagcaagacggaggaatctgagaaagaggcagccgaagagcaacatacgaaagagtcaagttaggagagtcaatttcttcgcgtacccgctactgtcgagacgattgtcgccgcgggaggcgtatggatgtctgaaaatacacgtgtcggaacagcatatgcctgcaaaggccgagttggagttcaggtcttactattatcaccgcgactactatagagagagtctggttcaaagccaccgtcggtggttgtgttctgtttgattttttgttgcttcggaaagatacctctgtacgtagcttattatgagagcatagcatggaattacacgatgcgattgattttgttcacgtcga

SEQ ID NO: 18869 - DNA, 1671 bp, Muscodor strobelii
  misc_feature: SGI cDNA ID NO. 566336
  misc_feature: Encodes the peptide sequence at SEQ ID NO 18870
atggcgtggttggagaagctggaagttacgaggaccagccgcctcagccggtggattaactacgatatccgaccgattgagcctgagagaaggacttggggctatgtgtcttttcataactactggctgttgatcagcatgaacatctcgacatacctcacagggagtgctctcattcctcttggcttgacttggtggcaagctattatatcgatcgtaatcgggcatctttttgcaacgctgtttgtcattcttaattctttgcctggcgcttactataatctgggatttcctgttgtcaatcgcatgacatggggtctatggggtgcgcaatttgtaatatggaataggatattcctgtctcttggcaatctagtctggtatggctttacggcatgggtcggcggagagtgcgtgtatgtcattttgcaatcttgggatccgaatctcgaaaagcacatcccaaatcacatgcccgcggacacgggcatgacgacggcacaattcgtcgcatacatcgtcttctccgttgtgagcttgcccatcatctacatccgaccgcacaagctccagaaattcttctatgctgctagttcagtaaccatagtctttttcttggtgctgttgatctgggctctcgctactatgggccctgctggattcggcaatacgattcaagacgcgacaacccttccacaaactggtggcccgaatagtgttgcatggttgatggtttatggcattgtctcgaccatcggctccctcagtgcaggtatcctgaaccagaatgattatgctcgttttgcaacgacaccaaagcacgctattctcggccaagctatcccgtctcctccatatggaattctatgctcagttatcggcattcttgtcacagcagcgacacaaaaccgattggggggcgaaccagtttggaacccgccaacactcttttcgaaactcatcgagcaggaccctagtccgggaactcgagctggagctttcttcgctgggttggccctcgttatctcgcaaattggggtcaacgtaccgggcaatgcgcttggaggtggattcgatcttgcggcaacgtttcccaagtatatcaacatccgacgaggcgcttatatcactgcggtcttgagtgtcattgtgaatccctggaagttggtcaacacggctacgatattcctcactgtgttgtcttcttactcaatcttcttgggaccaatgacgggaatgatggtcgccagctatcttgttgtctacaaaaagaagattaacatcgatgatctttaccgcggtggcccgtccagtatatactggttcactgctggcatcaattggcgtgctggcgttgcttggattataggatttgcaccattactaccgggattcatcgcggcggtgaatacttccgtaaatgtttctgacggtgcaaggaatctctatcagctgagctacttctacggatttctcgccagcggcacagtattcgtagtattacacaaggtctttcccgctcgcaaacttgatgcttttgtcaacaatggcgtttctcccgagcaaacgaggtttctctatcaggacaagtgggacagtgttggatacgaagatgaagatgccgctcttagtatagaaaaagaagaaggtgttatgaccgagaaggtgtag

SEQ ID NO: 18870 - protein, 556 aa, Muscodor strobelii
  misc_feature: SGI Peptide ID NO. 566336
  misc_feature (25)..(490): Pfam Id: PF02133 Pfam Desc: Permease for cytosine/purines, uracil, thiamine, allantoin
  misc_feature (16)..(555): NCBI GI: 121717112 Blast Desc: NCS1 nucleoside transporter family protein [Aspergillus clavatus NRRL 1] gi|119404169|gb|EAW14586.1| NCS1 nucleoside transporter family protein [Aspergillus clavatus NRRL
  misc_feature (4)..(539): NCBI GI: 46109700 Blast Desc: FG01732.1 [Gibberella zeae PH-1]
  misc_feature (2)..(550): NCBI GI: 256730472 Blast Desc: NECHADRAFT_30409 [Nectria haematococca mpVI 77-13-4]
  misc_feature (53)..(540): NCBI GI: 261354528 Blast Desc: thiamine transporter [Verticillium albo-atrum VaMs.102]
  misc_feature (2)..(546): NCBI GI: 240107281 Blast Desc: NCS1 nucleoside transporter family protein [Coccidioides posadasii C735 delta SOWgp]
  misc_feature (2)..(546): NCBI GI: 119190707 Blast Desc: CIMG_05401 [Coccidioides immitis RS]
  misc_feature (71)..(548): NCBI GI: 67527750 Blast Desc: AN4152.2 [Aspergillus nidulans FGSC A4] gi|40740223|gb|EAA59413.1| AN4152.2 [Aspergillus nidulans FGSC A4] gi|259481252|tpe|CBF74599.1| TPA: conserved [Aspergillus FGSC
  misc_feature (4)..(538): NCBI GI: 242794056 Blast Desc: allantoin permease, [Talaromyces stipitatus ATCC 10500] gi|218718881|gb|EED18301.1| allantoin permease, [Talaromyces stipitatus ATCC 10500]
  misc_feature (18)..(549): NCBI GI: 212540706 Blast Desc: allantoin permease, [Penicillium marneffei ATCC 18224] gi|210067807|gb|EEA21899.1| allantoin permease, [Penicillium marneffei ATCC 18224]
  misc_feature (43)..(534): NCBI GI: 145236966 Blast Desc: An07g00370 [Aspergillus niger] gi|134075595|emb|CAK39261.1| protein product [Aspergillus niger]
MAWLEKLEVTRTSRLSRWINYDIRPIEPERRTWGYVSFHNYWLLISMNISTYLTGSALIPLGLTWWQAIISIVIGHLFATLFVILNSLPGAYYNLGFPVVNRMTWGLWGAQFVIWNRIFLSLGNLVWYGFTAWVGGECVYVILQSWDPNLEKHIPNHMPADTGMTTAQFVAYIVFSVVSLPIIYIRPHKLQKFFYAASSVTIVFFLVLLIWALATMGPAGFGNTIQDATTLPQTGGPNSVAWLMVYGIVSTIGSLSAGILNQNDYARFATTPKHAILGQAIPSPPYGILCSVIGILVTAATQNRLGGEPVWNPPTLFSKLIEQDPSPGTRAGAFFAGLALVISQIGVNVPGNALGGGFDLAATFPKYINIRRGAYITAVLSVIVNPWKLVNTATIFLTVLSSYSIFLGPMTGMMVASYLVVYKKKINIDDLYRGGPSSIYWFTAGINWRAGVAWIIGFAPLLPGFIAAVNTSVNVSDGARNLYQLSYFYGFLASGTVFVVLHKVFPARKLDAFVNNGVSPEQTRFLYQDKWDSVGYEDEDAALSIEKEEGVMTEKV

SEQ ID NO: 18871 - DNA, 1693 bp, Muscodor strobelii
  misc_feature: SGI EST ID NO. CUFF.44385.0
  misc_feature: Variant of the nucleotide sequence at SEQ ID NO 18869
caggtatggctttacggcatgggtcggcggagagtgcgtgtatgtcattttgcaatcttgggatccgaatctcgaaaagcacatcccaaatcacatgcccgcggacacgggcatgacgacggcacaattcgtcgcatacatcgtcttctccgttgtgagcttgcccatcatctacatccgaccgcacaagctccagaaattcttctatgctgctagttcagtaaccatagtctttttcttggtgctgttgatctgggctctcgctactatgggccctgctggattcggcaatacgattcaagacgcgacaacccttccacaaactggtggcccgaatagtgttgcatggttgatggtttatggcattgtctcgaccatcggctccctcagtgcaggtatcctgaaccagaatgattatgctcgttttgcaacgacaccaaagcacgctattctcggccaagctatcccgtctcctccatatggaattctatgctcagttatcggcattcttgtcacagcagcgacacaaaaccgattggggggcgaaccagtttggaacccgccaacactcttttcgaaactcatcgagcaggaccctagtccgggaactcgagctggagctttcttcgctgggttggccctcgttatctcgcaaattggggtcaacgtaccgggcaatgcgcttggaggtggattcgatcttgcggcaacgtttcccaagtatatcaacatccgacgaggcgcttatatcactgcggtcttgagtgtcattgtgaatccctggaagttggtcaacacggctacgatattcctcactgtgttgtcttcttactcaatcttcttgggaccaatgacgggaatgatggtcgccagctatcttgttgtctacaaaaagaagattaacatcgatgatctttaccgcggtggcccgtccagtatatactggttcactgctggcatcaattggcgtgctggcgttgctgatttgcaccattactaccgggattcatcgcggcggtgaatacttccgtaaatgtttctgacggtgcaaggaatctctatcagctgagctacttctacggatttctcgccagcggcacagtattcgtagtattacacaaggtctttcccgctcgcaaacttgatgcttttgtcaacaatggcgtttctcccgagcaaacgaggtttctctatcaggacaagtgggacagtgttggatacgaagatgaagatgccgctcttagtatagaaaaagaagaaggtgttatgaccgagaaggtgtagacttctggagagacacgcttggctgaaaggagattcgagtacagttcaacactcggattgaacgagaagtggtgttccacctagaggcagaggatgatgtctggacgaagagaccaacagatagaacccaagagcatatcatatgtcaaatgagtgaagatcgcctcaaagcagcatggaacgattggcatcacagagtgtcaaaaccacatgggcattgagcctagatttttggaatcgcccaaagtagaaatctctacgtatatatgagtgcttatctcgcttgtcaaacaacatgataggcaacgtgggggtattcgcaaccctgcaagaagccgaagatcaattcgtcccccatcataatacgtttgtgatcaaccccaacccagacacgagacgcccaacccag

SEQ ID NO: 18872 - DNA, 378 bp, Muscodor strobelii
  misc_feature: SGI cDNA ID NO. 566337
  misc_feature: Encodes the peptide sequence at SEQ ID NO 18873
atgaactctgcggaagaactacgcgtggcagatggtgtggcccagcaatgccaagcaccagaaacagtaaacgatcagacaagaccgccagcaacttttacagcgagagaagtgagccagcataaagaaagaggaagtgcatggatgattatcgacaaaagagtctacgacgtgacgaattttctagattcgcaccccggaggtgcgaaaatactgctaggtgtggcagggaaagatgcaacaaagaagttcgacaaatatcatcgccggccgcttttggacaattatagggctacgctacagataggggtgttggagattggaggagatgccaatacacatagggggttcagagctaggcttgggttgggaaaatga

SEQ ID NO: 18873 - protein, 125 aa, Muscodor strobelii
  misc_feature: SGI Peptide ID NO. 566337
  misc_feature (32)..(106): Pfam Id: PF00173 Pfam Desc: Cytochrome b5-like Heme/Steroid binding domain
  misc_feature (32)..(105): NCBI GI: 85102456 Blast Desc: NCU03603 [Neurospora crassa OR74A] gi|30580355|sp|Q8X0J4.1|CYB5L_NEUCR RecName: Full= cytochrome b5 B11H24.095 gi|18376390|emb|CAD21279.1| cytochrome b5 [Neurospora
  misc_feature (32)..(106): NCBI GI: 119471713 Blast Desc: acyl-CoA dehydrogenase family protein [Neosartorya fischeri NRRL 181] gi|119406364|gb|EAW16315.1| acyl-CoA dehydrogenase family protein [Neosartorya fischeri NRRL 181]
  misc_feature (32)..(106): NCBI GI: 159124543 Blast Desc: acyl-CoA dehydrogenase family protein [Aspergillus fumigatus A1163]
  misc_feature (32)..(105): NCBI GI: 115449711 Blast Desc: ATEG_10328 [Aspergillus terreus NIH2624] gi|114187625|gb|EAU29325.1| ATEG_10328 [Aspergillus terreus NIH2624]
  misc_feature (29)..(106): NCBI GI: 255956611 Blast Desc: Pc21g20710 [Penicillium chrysogenum Wisconsin 54-1255] gi|211590769|emb|CAP96968.1| Pc21g20710 [Penicillium chrysogenum Wisconsin 54-1255]
  misc_feature (32)..(106): NCBI GI: 121699852 Blast Desc: acyl-CoA dehydrogenase family protein [Aspergillus clavatus NRRL 1] gi|119396333|gb|EAW06765.1| acyl-CoA dehydrogenase family protein [Aspergillus clavatus NRRL 1]
  misc_feature (32)..(106): NCBI GI: 70992255 Blast Desc: acyl-CoA dehydrogenase family protein [Aspergillus fumigatus Af293] gi|66848609|gb|EAL88938.1| acyl-CoA dehydrogenase family protein [Aspergillus fumigatus Af293]
  misc_feature (32)..(106): NCBI GI: 238488427 Blast Desc: acyl-CoA dehydrogenase family protein [Aspergillus flavus NRRL3357] gi|220697839|gb|EED54179.1| acyl-CoA dehydrogenase family protein [Aspergillus flavus NRRL3357]
  misc_feature (32)..(106): NCBI GI: 169762618 Blast Desc: [Aspergillus oryzae RIB40] gi|83770237|dbj|BAE60370.1| protein product [Aspergillus oryzae]
  misc_feature (32)..(106): NCBI GI: 121707134 Blast Desc: acyl-CoA dehydrogenase, [Aspergillus clavatus NRRL 1] gi|119399890|gb|EAW10316.1| acyl-CoA dehydrogenase, [Aspergillus clavatus NRRL 1]
  misc_feature (31)..(110): SWISSPROT Homolog: EC 1.7.1.2 Nitrate reductase (NAD(P)H)
MNSAEELRVADGVAQQCQAPETVNDQTRPPATFTAREVSQHKERGSAWMIIDKRVYDVTNFLDSHPGGAKILLGVAGKDATKKFDKYHRRPLLDNYRATLQIGVLEIGGDANTHRGFRARLGLGK

SEQ ID NO: 18874 - DNA, 346 bp, Muscodor strobelii
  misc_feature: SGI EST ID NO. CUFF.44388.0
  misc_feature: Variant of the nucleotide sequence at SEQ ID NO 18872
atcgacaaaagagtctacgacgtgacgaattttctagattcgcaccccggaggtgcgaaaatactgctaggtgtggcagggaaagatgcaacaaagaagttcgacaaatatcatcgccggccgcttttggacaattatagggctacgctacagataggggtgttggagattggaggagatgccaatacacatagggggttcagagctaggcttgggttgggaaaatgacattgaggtatagcggaaactaattgaagaagaaacgatacagtgtttagtcagctgtttatgtgcttttgttactttgatccctaacacgcatcgtccacgaatagttagctcgatg

SEQ ID NO: 18875 - DNA, 738 bp, Muscodor strobelii
  misc_feature: SGI cDNA ID NO. 566338
  misc_feature: Encodes the peptide sequence at SEQ ID NO 18876
atgtcctcgctgccccatttccgagacatcgctccccgtgtgggattccggttcgagacgcagaggttcctcatgagcaaccaacaacagactcatattgtacaggcgatggtgcgaaccatgggaagccgcggcgctcgaggcgacgctgtcctactgattcaggaactgttccaggaggcaatcaagcgtgtggaggactgtggctccatggcaccggagcagttctggctcagcgtcggtaatggtgttcgctggatccaccgtgtactgaagagcaacaagcccatcgatggcaccaccctcatgctctttgccaaagacatcctgcaggctcgcctgttccccactgtcgaagccgcctggatggaccaggccggcatccgctacgtcacggtcaacgatgagtacatggcagccctcgaatggcaacccgtcttgggcactgtcgtcgatgacttccgccacaagatcttcgctacctacgggctcaactcccagatctcgcaaacctatgtccccccgacctacttcgtcgcacgcctgcggccacgcccgaacactgataaggcacctaccgagaaggccgaagagccaaagggcaagggcgccgacaagatggacgtcgactctgagggaggctttgtcaagccggccaagcccgtcaagaacaaggctgacgaggagctcgagaaagcacgcatcggcattgagaaggttgatcttcacaagaagtga

SEQ ID NO: 18876 - protein, 245 aa, Muscodor strobelii
  misc_feature: SGI Peptide ID NO. 566338
MSSLPHFRDIAPRVGFRFETQRFLMSNQQQTHIVQAMVRTMGSRGARGDAVLLIQELFQEAIKRVEDCGSMAPEQFWLSVGNGVRWIHRVLKSNKPIDGTTLMLFAKDILQARLFPTVEAAWMDQAGIRYVTVNDEYMAALEWQPVLGTVVDDFRHKIFATYGLNSQISQTYVPPTYFVARLRPRPNTDKAPTEKAEEPKGKGADKMDVDSEGGFVKPAKPVKNKADEELEKARIGIEKVDLHKK

SEQ ID NO: 18877 - DNA, 608 bp, Muscodor strobelii
  misc_feature: SGI cDNA ID NO. 566339
  misc_feature: Reduced expression when VOC is produced
  misc_feature: Encodes the peptide sequence at SEQ ID NO 18878
atgctgtccgcattcacagctcgccccatcatcgagctgaggcagcgcgacaagtccaagatcgagaccatcctggcctacggcgaccgcgtgctggtcggcctgaacaccggcgctctgcgcgtctaccgcgtcaacgagatccccgtccctgccgcgaaacagcaacagcaacagaaacactctgccaacagcaccagcaccagcaatggcacatcctctgtgcccaacagcctgcccaaggatgacacagccgaggcagaagcagaagcagaagcagaagggacagcagaagggacagcagcggtagcagccacctcggcgaatacgacaacgacaaccacaaaacccaccgacctcctgcgcgaagtggaaaagttctcgacgcgggccatcgagcagctggccatcatcaaggaggccaacctgctggtgtcgctgtccaactaccacatctcgctgcacgactaccacacctacgacctgatcgagaccatcccccgcaccaagaacgcctcgtgcttcgccgtcaccaccaacatcgtcaaggaccccgccaccgccatccccgagatcatcagccgcctcgccgtcgccgtcaagcgccg

SEQ ID NO: 18878 - protein, 202 aa, Muscodor strobelii
  misc_feature: SGI Peptide ID NO. 566339
  misc_feature (1)..(202): NCBI GI: 256729226 Blast Desc: NECHADRAFT_101381 [Nectria haematococca mpVI 77-13-4]
  misc_feature (1)..(202): NCBI GI: 261354513 Blast Desc: AvaB protein [Verticillium albo-atrum VaMs.102]
  misc_feature (1)..(202): NCBI GI: 46116990 Blast Desc: FG04337.1 [Gibberella zeae PH-1]
  misc_feature (1)..(202): NCBI GI: 116199667 Blast Desc: CHGG_07989 [Chaetomium globosum CBS 148.51] gi|88179268|gb|EAQ86736.1| CHGG_07989 [Chaetomium globosum CBS 148.51]
  misc_feature (1)..(202): NCBI GI: 164427997 Blast Desc: NCU01539 [Neurospora crassa OR74A] gi|18376150|emb|CAD21225.1| conserved [Neurospora crassa] gi|157071967|gb|EAA27006.2| conserved [Neurospora crassa OR74A]
  misc_feature (1)..(202): NCBI GI: 239610422 Blast Desc: AvaB protein [Ajellomyces dermatitidis ER-3]
  misc_feature (1)..(202): NCBI GI: 261195622 Blast Desc: AvaB protein [Ajellomyces dermatitidis SLH14081] gi|239588087|gb|EEQ70730.1| AvaB protein [Ajellomyces dermatitidis SLH14081]
  misc_feature (1)..(202): NCBI GI: 171688748 Blast Desc: protein product [Podospora anserina] gi|170944336|emb|CAP70446.1| protein product [Podospora anserina]
  misc_feature (1)..(202): NCBI GI: 225563422 Blast Desc: conserved [Ajellomyces capsulatus G186AR]
  misc_feature (1)..(202): NCBI GI: 154282085 Blast Desc: conserved [Ajellomyces capsulatus NAm1] gi|150412034|gb|EDN07422.1| conserved [Ajellomyces capsulatus NAm1]
  misc_feature: Useful for introducing or modulating the production of volatile compounds
MLSAFTARPIIELRQRDKSKIETILAYGDRVLVGLNTGALRVYRVNEIPVPAAKQQQQQKHSANSTSTSNGTSSVPNSLPKDDTAEAEAEAEAEGTAEGTAAVAATSANTTTTTTKPTDLLREVEKFSTRAIEQLAIIKEANLLVSLSNYHISLHDYHTYDLIETIPRTKNASCFAVTTNIVKDPATAIPEIISRLAVAVKR

SEQ ID NO: 18879 - DNA, 916 bp, Muscodor strobelii
  misc_feature: SGI EST ID NO. CUFF.44400.0
  misc_feature: Variant of the nucleotide sequence at SEQ ID NO 18877
gtgccgagatatgaagctagcgagttctcaggtagccgcgttcaaatgctatgggggtaatttcgtcatcggcgccagggtgcattgctcgacagctgccggctgcgggctacatggtgtgggtggtgtctgcactgatgctcgacagcttcctcgattacagcagcccatactcgacgacccagacgacatacgcgacaaaggctctacacccgacaagctacaggagctgatgcttggatcgtgaaaagaagagacggaacttgaaggcagcagctggggcgggcgatgcgacgaccacgacgacgatgctgtccgcattcacagctcgccccatcatcgagctgaggcagcgcgacaagtccaagatcgagaccatcctggcctacggcgaccgcgtgctggtcggcctgaacaccggcgctctgcgcgtctaccgcgtcaacgagatccccgtccctgccgcgaaacagcaacagcaacagaaacactctgccaacagcaccagcaccagcaatggcacatcctctgtgcccaacagcctgcccaaggatgacacagccgaggcagaagcagaagcagaagcagaagggacagcagaagggacagcagcggtagcagccacctcggcgaatacgacaacgacaaccacaaaacccaccgacctcctgcgcgaagtggaaaagttctcgacgcgggccatcgagcagctggccatcatcaaggaggccaacctgctggtgtcgctgtccaactaccacatctcgctgcacgactaccacacctacgacctgatcgagaccatcccccgcaccaagaacgcctcgtgcttcgccgtcaccaccaacatcgtcaaggaccccgccaccgccatccccgagatcatcagccgcctcgccgtcgccgtcaagcgccg

SEQ ID NO: 18880 - DNA, 1695 bp, Muscodor strobelii
  misc_feature: SGI cDNA ID NO. 566340
  misc_feature: Encodes the peptide sequence at SEQ ID NO 18881
atgcctgataagcggaagcgtgtcgctgcagacgacgcagtccgcccgaccgctctcaaacgacgtcgccacaccgaagcacctgatctcttgtcacctttgtccgacgaactgctcgtgcgcattctcacctatctcccaatatccgacctcctcaaccttgcgcccgtgtcgaatcgcttctaccacctatccggcgactctcaagtgtggaagaaactctattactcgagatttgtgctaccccgcgccctccgaataccgggctttcgcgatggctcggcgcgtgccggcaagctgcactattcctctcgacgcacgatatgggccgacgggcggagaggcggctgggtggacatgcatacagacaaagagacgcgcaactgggagagacagtacaaactacgccataactgggcgagagggaaatgcgccgtcgaggagctgcaagtaggcgaagagcctcccgagacaagagattcgcccaagatgctagtcaaggttgttgatggtgtcgccataacggcggactttgcgactggtcttcgagtctgggatcttaaaacgaaactgttgttaactcatatgcgtctggatgatgcagagtccgatgcgataccaagctgtatggatattgacgatcagcatgcatcgacaaagaatcttgatattgctattggattcacagatggaagtttcggcatatggcgactgtttacagaccagagacgtattgttcgaagttacaggcatgagagttccagcaatgggaaattagtcggtgccgcgtattcctatccctacttgctgacggcaacaaaatctgtactcgtctcactgtatacctttcgaatcccgccaaactcggaaagggccgctgacgaagatagtgaaactgagaaaggctccgagagcgagaccgctgtagaatcggatgttgactttgggccgacaagctcaaagcttaggaatcgagcaacagaccaaaaggctaacccggaaataaggctacccgctccgtatctacttacctcactaaaatcccacacatcaaggtcgcctctcgcattatcattgaggaggatcagcgagagtacagtcgcttctatcgcgtacacattctccacacttcgaggatggtcactgggcattcaagagctacacataacacccacgaaaagacaaaaatcggggcctgaagttacaacaacacaactagcctataccattccattccaccacactcaaggacctaatcgagatgactggccaattagcttatcatacacacatccctatcttctcgcaactttaccagacaacacgttgatcctctacttatgtagatccagtgcctcagcgttatcaatatcaccgggaattcgactctggggccacacatctggtataagtgacgcagagattacggcaaggggtaaagccgttagtgtgagttctcggggtgaggagattagggtgtgggaattggaaggcaggacaaatggaagaagtgtcgaggtcagacccacggtgaagaacctagaggacgaggatgaggacgggagaattgagttgatgaagggagaccagtgggatgagaaacggaactgggtgggatttgatgatgagatggtcattgttctgaaggagtctctagaaggcagagagagtctgttggtttatgattttacgtga

SEQ ID NO: 18881 - protein, 564 aa, Muscodor strobelii
  misc_feature: SGI Peptide ID NO. 566340
  misc_feature (29)..(76): Pfam Id: PF00646 Pfam Desc: F-box domain
  misc_feature (1)..(564): NCBI GI: 261353370 Blast Desc: F-box domain-containing protein [Verticillium albo-atrum VaMs.102]
  misc_feature (40)..(564): NCBI GI: 38636428 Blast Desc: [Neurospora crassa]
  misc_feature (12)..(564): NCBI GI: 46111817 Blast Desc: FG02790.1 [Gibberella zeae PH-1]
  misc_feature (29)..(564): NCBI GI: 256721892 Blast Desc: NECHADRAFT_36970 [Nectria haematococca mpVI 77-13-4]
  misc_feature (40)..(564): NCBI GI: 164429514 Blast Desc: NCU01865 [Neurospora crassa OR74A] gi|157073508|gb|EAA36260.2| conserved [Neurospora crassa OR74A]
  misc_feature (1)..(564): NCBI GI: 149209399 Blast Desc: MGCH7_ch7g191 [Magnaporthe grisea 70-15] gi|86196146|gb|EAQ70784.1| MGCH7_ch7g191 [Magnaporthe grisea 70-15]
  misc_feature (164)..(564): NCBI GI: 116193973 Blast Desc: CHGG_06704 [Chaetomium globosum CBS 148.51] gi|88182617|gb|EAQ90085.1| CHGG_06704 [Chaetomium globosum CBS 148.51]
  misc_feature (6)..(564): NCBI GI: 189195332 Blast Desc: F-box domain containing protein [Pyrenophora tritici-repentis Pt-1C-BFP] gi|187979883|gb|EDU46509.1| F-box domain containing protein [Pyrenophora tritici-repentis
  misc_feature (126)..(564): NCBI GI: 171683177 Blast Desc: protein product [Podospora anserina] gi|170941548|emb|CAP67200.1| protein product [Podospora anserina]
  misc_feature (1)..(481): NCBI GI: 154303204 Blast Desc: BC1G_09622 [Botryotinia fuckeliana B05.10] gi|150855085|gb|EDN30277.1| BC1G_09622 [Botryotinia fuckeliana B05.10]
MPDKRKRVAADDAVRPTALKRRRHTEAPDLLSPLSDELLVRILTYLPISDLLNLAPVSNRFYHLSGDSQVWKKLYYSRFVLPRALRIPGFRDGSARAGKLHYSSRRTIWADGRRGGWVDMHTDKETRNWERQYKLRHNWARGKCAVEELQVGEEPPETRDSPKMLVKVVDGVAITADFATGLRVWDLKTKLLLTHMRLDDAESDAIPSCMDIDDQHASTKNLDIAIGFTDGSFGIWRLFTDQRRIVRSYRHESSSNGKLVGAAYSYPYLLTATKSVLVSLYTFRIPPNSERAADEDSETEKGSESETAVESDVDFGPTSSKLRNRATDQKANPEIRLPAPYLLTSLKSHTSRSPLALSLRRISESTVASIAYTFSTLRGWSLGIQELHITPTKRQKSGPEVTTTQLAYTIPFHHTQGPNRDDWPISLSYTHPYLLATLPDNTLILYLCRSSASALSISPGIRLWGHTSGISDAEITARGKAVSVSSRGEEIRVWELEGRTNGRSVEVRPTVKNLEDEDEDGRIELMKGDQWDEKRNWVGFDDEMVIVLKESLEGRESLLVYDFT

SEQ ID NO: 18882 - DNA, 3112 bp, Muscodor strobelii
  misc_feature: SGI EST ID NO. CUFF.44461.1
  misc_feature: Variant of the nucleotide sequence at SEQ ID NO 18880
cgtcagttgtatttgaaatgggccactgagatgcgccttcaggcttagtgatatatgcgtctacctacctgttgctcgttgacggtgttggctatccccgatatcaccgacatggtgtcatgaacaaccctccgatcgtcaatcaatgccacaagtccaaataccatatccagctcttcacatgtagtctgatcatcaaaatgagtgtctgacatctgggacaatcgctcggattatacacatctcgtaaaatgcctgataagcggaagcgtgtcgctgcagacgacgcagtccgcccgaccgctctcaaacgacgtcgccacaccgaagcacctgatctcttgtcacctttgtccgacgaactgctcgtgcgcattctcacctatctcccaatatccgacctcctcaaccttgcgcccgtgtcgaatcgcttctaccacctatccggcgactctcaagtgtggaagaaactctattactcgagatttgtgctaccccgcgccctccgaataccgggctttcgcgatggctcggcgcgtgccggcaagctgcactattcctctcgacgcacgatatgggccgacgggcggagaggcggctgggtggacatgcatacagacaaagagacgcgcaactgggagagacagtacaaactacgccataactgggcgagagggaaatgcgccgtcgaggagctgcaagtaggcgaagagcctcccgagacaagagattcgcccaagatgctagtcaaggttgttgatggtgtcgccataacggcggactttgcgactggtcttcgagtctgggatcttaaaacgaaactgttgttaactcatatgcgtctggatgatgcagagtccgatgcgataccaagctgtatggatattgacgatcagcatgcatcgacaaagaatcttgatattgctattggattcacagatggaagtttcggcatatggcgactgtttacagaccagagacgtattgttcgaagttacaggcatgagagttccagcaatgggaaattagtcggtgccgcgtattcctatccctacttgctgacggcaacaaaatctgtactcgtctcactgtatacctttcgaatcccgccaaactcggaaagggccgctgacgaagatagtgaaactgagaaaggctccgagagcgagaccgctgtagaatcggatgttgactttgggccgacaagctcaaagcttaggaatcgagcaacagaccaaaaggctaacccggaaataaggctacccgctccgtatctacttacctcactaaaatcccacacatcaaggtcgcctctcgcattatcattgaggaggatcagcgagagtacagtcgcttctatcgcgtacacattctccacacttcgaggatggtcactgggcattcaagagctacacataacacccacgaaaagacaaaaatcggggcctgaagttacaacaacacaactagcctataccattccattccaccacactcaaggacctaatcgagatgactggccaattagcttatcatacacacatccctatcttctcgcaactttaccagacaacacgttgatcctctacttatgtagatccagtgcctcagcgttatcaatatcaccgggaattcgactctggggccacacatctggtataagtgacgcagagattacggcaaggggtaaagccgttagtgtgagttctcggggtgaggagattagggtgtgggaattggaaggcaggacaaatggaagaagtgtcgaggtcagacccacggtgaagaacctagaggacgaggatgaggacgggagaattgagttgatgaagggagaccagtgggatgagaaacggaactgggtgggatttgatgatgagatggtcattgttctgaaggagtctctagaaggcagagagagtctgttggtttatgattttacgtgatgatacccctttgagatgaaatgaaatgaaaagatattgagaataagaaccttagagtttcgtctgccaattgaccttacaaaagtgatctctccttggccgatcctccctgcatatgcatgtcgaagctgggaattccttggcgcctattgccgatctgactaccattgtattttcgagccttcagtctccaacctaaggacgaattacaagaaacttaagacatcataaattcacctcatacctcgcatacttctcaacaatatctgaaacaatccttttcgatcttttgcaattctctaactacctcaacttgtgagagccgggacagcatcttaaaagggagcctaaaatcacgggacccgcgggctccgctttggacttcatcaacgccgttcccgccgctcggggtgtcgaaactgtctgaacagcgattgagttatacgatgaattgaatactaattgaagggccaaatcaacgttttttataatctctcactcgttgctcggtcactgtacgcaccaatcatggaggccgacatggccgagatcgatggatcgggatctcctccgtctttgaccaagcgagcttgtgatcaatgtcgcctgagaaaggttgtactctgaagtgtcccgcttaaacagaccggacactagtctgagtactcatgtagactaatggcatgttgatcggtagattcgctgcgacaaagaaaccccttgttccaactgccggagtgccagacgctcatgcagctctacgggggcgggccaaaagccgaaggaagtacggcagagggtcttgatatctagtcagtacgagcgtaaaatagaccaaatagaggaccgtcttggaggtatcgaggcccttcttcaacaacttctctctaacaacagcaacgccataagcactcctagtacagagccattgataccacagagagctgagactgcaaggagtcacacgcaatcggcgactccgagttcttcggcccaggacaaaggctcgaggacgggaagggcgagtagtaatgcggagaagacgatctttgacccagagggaagcgatacgtttgaggggaattcgagtctggctgctcatacggcctttgcttcggagttttgtaggtgcctttttcagttggagcgagttttaccagttgtcg

SEQ ID NO: 18883 - DNA, 2172 bp, Muscodor strobelii
  misc_feature: SGI cDNA ID NO. 566341
  misc_feature: Encodes the peptide sequence at SEQ ID NO 18884
atggaggccgacatggccgagatcgatggatcgggatctcctccgtctttgaccaagcgagcttgtgatcaatattcgctgcgacaaagaaaccccttgttccaactgccggagtgccagacgctcatgcagctctacgggggcgggccaaaagccgaaggaagtacggcagagggtcttgatatctacgagcgtaaaatagaccaaatagaggaccgtcttggaggtatcgaggcccttcttcaacaacttctctctaacaacagcaacgccataagcactcctagtacagagccattgataccacagagagctgagactgcaaggagtcacacgcaatcggcgactccgagttcttcggcccaggacaaaggctcgaggacgggaagggcgagtagtaatgcggagaagacgatctttgacccagagggaagcgatacgtttgaggggaattcgagtctggctgctcatacggcctttgcttcggagtttttggcagatgcagtccgcaaaaccacgcttcgcgatggcggagccgtgaaccccaaattcgaggcggctctcaattcacttcgccagatcgttgacatgcaaaataaaccctcgagagccggagtttggaatttcggggattcgccacaagataatgaatctgagcatgagagcgagcttggatggggcccgacacagaaaccaattggcaagacaaacttacaagacttgcctttgccgccgatgtctcttgtgagggagcagttgagtcagatgcagcatggccctgtcccagctatgctggcaatcttgtatcagttcatcgactttgagagctttgcagaccgctgtcgacgtctatatttcaagaccgaagacccatctgatggaagatttatacttgtcaacgcaggtttgatctacgtcttctttgaagcgtcgctatctgcctcggaccctgtgaagaaggcatcatatgatgactgccggatcatgtgtcaacacaacgtcgagattgcactggcgcaattaccgctgttcttgcctgctacagccgagaacattgaggcattacttatgggtgcaagtttctgcatcgacatctcacgagcctcactagcatggatcctcgtatcacgcgcagcacacatgtgcagaaccctaggctaccaccaaatgctaaccatgaaagacgacccaaccgagacgaaagcatccaaatcgctcttattctggtgttgctacatgctcgacaaagcgctctccctccgtctaggccgtgcctcagtcctccaagactacgacatatccctcccccacataaccccagattccaaagccgactacccaggaaaagaagtaatgacactctggatccaacacgcgcagatcctcggtcgtatctacgagcgtctctactcccccggagccctccggcaacccgaaacaacgcgcaccgaacaagtcgccctcctagccgcggagcaaacaagactaatgaacgaaactctcaccctattccacgaattcgaacaccacccggacggcgaaggccgcatgttcgcgctcacgctaaaaagcgacgtggtatcattcctcgcctcgctagcgctgacgtatagagcgctcccaccaaacgggaataggagtcgtacattcgcagacgaatgtatagacatggctcgcgcatcaatgcgttgtcatcacgaagccataagtcttatgggcgataaatcattacaaatcgtgtacatccactggacgatcctctacgcccctttcataccattcatcgtcattttctgtctcgtaatcgaaacgtccgataccgaagacttaaatcgtctgagggatttcgtgaggagtcttgagccggctacggacgttagttcgagtgtgaggaaattacatcagctttgtcaagtgttgtgtaatgttgcggagttgtatgttgaggcgaagggaacgggggaacagggcgggagtgagtttgatttgtatttgagtcagttgggctttatgcctgatgttgggatggggggtatgggtgttgatgggttgggagagatgggtgcgcagggggggaatacgctggaggattggtttagtgggaagaattatatgatgggtttgcttgaggaggatttgagtgggattaatcctaatggatggccttcgtga

SEQ ID NO: 18884 - protein, 723 aa, Muscodor strobelii
  misc_feature: SGI Peptide ID NO. 566341
  misc_feature (348)..(442): Pfam Id: PF04082 Pfam Desc: Fungal specific transcription factor domain
  misc_feature (1)..(722): NCBI GI: 121718950 Blast Desc: fungal specific transcription factor domain protein [Aspergillus clavatus NRRL 1] gi|119404441|gb|EAW14817.1| fungal specific transcription factor domain protein [Aspergillus NRRL 1]
  misc_feature (7)..(721): NCBI GI: 261353371 Blast Desc: fungal specific transcription factor domain-containing protein [Verticillium albo-atrum VaMs.102]
  misc_feature (47)..(722): NCBI GI: 70985098 Blast Desc: C6 transcription factor [Aspergillus fumigatus Af293] gi|66845683|gb|EAL86017.1| C6 transcription factor, [Aspergillus fumigatus Af293]
  misc_feature (47)..(722): NCBI GI: 159126022 Blast Desc: C6 transcription factor, [Aspergillus fumigatus A1163]
  misc_feature (63)..(723): NCBI GI: 85089750 Blast Desc: NCU09974 [Neurospora crassa OR74A] gi|28919413|gb|EAA28856.1| [Neurospora crassa OR74A]
  misc_feature (66)..(721): NCBI GI: 149209405 Blast Desc: MGCH7_ch7g194 [Magnaporthe grisea 70-15] gi|86196149|gb|EAQ70787.1| MGCH7_ch7g194 [Magnaporthe grisea 70-15]
  misc_feature (64)..(722): NCBI GI: 256721890 Blast Desc: NECHADRAFT_36964 [Nectria haematococca mpVI 77-13-4]
  misc_feature (63)..(721): NCBI GI: 145242366 Blast Desc: An09g04860 [Aspergillus niger] gi|134078348|emb|CAK40340.1| protein product [Aspergillus niger]
  misc_feature (63)..(722): NCBI GI: 255955827 Blast Desc: Pc21g16600 [Penicillium chrysogenum Wisconsin 54-1255] gi|211590377|emb|CAP96557.1| Pc21g16600 [Penicillium chrysogenum Wisconsin 54-1255]
  misc_feature (64)..(722): NCBI GI: 46111811 Blast Desc: FG02787.1 [Gibberella zeae PH-1]
MEADMAEIDGSGSPPSLTKRACDQYSLRQRNPLFQLPECQTLMQLYGGGPKAEGSTAEGLDIYERKIDQIEDRLGGIEALLQQLLSNNSNAISTPSTEPLIPQRAETARSHTQSATPSSSAQDKGSRTGRASSNAEKTIFDPEGSDTFEGNSSLAAHTAFASEFLADAVRKTTLRDGGAVNPKFEAALNSLRQIVDMQNKPSRAGVWNFGDSPQDNESEHESELGWGPTQKPIGKTNLQDLPLPPMSLVREQLSQMQHGPVPAMLAILYQFIDFESFADRCRRLYFKTEDPSDGRFILVNAGLIYVFFEASLSASDPVKKASYDDCRIMCQHNVEIALAQLPLFLPATAENIEALLMGASFCIDISRASLAWILVSRAAHMCRTLGYHQMLTMKDDPTETKASKSLLFWCCYMLDKALSLRLGRASVLQDYDISLPHITPDSKADYPGKEVMTLWIQHAQILGRIYERLYSPGALRQPETTRTEQVALLAAEQTRLMNETLTLFHEFEHHPDGEGRMFALTLKSDVVSFLASLALTYRALPPNGNRSRTFADECIDMARASMRCHHEAISLMGDKSLQIVYIHWTILYAPFIPFIVIFCLVIETSDTEDLNRLRDFVRSLEPATDVSSSVRKLHQLCQVLCNVAELYVEAKGTGEQGGSEFDLYLSQLGFMPDVGMGGMGVDGLGEMGAQGGNTLEDWFSGKNYMMGLLEEDLSGINPNGWPS

SEQ ID NO: 18885 - DNA, 5783 bp, Muscodor strobelii
  misc_feature: SGI EST ID NO. CUFF.44461.2
  misc_feature: Variant of the nucleotide sequence at SEQ ID NO 18883
cgtcagttgtatttgaaatgggccactgagatgcgccttcaggcttagtgatatatgcgtctacctacctgttgctcgttgacggtgttggctatccccgatatcaccgacatggtgtcatgaacaaccctccgatcgtcaatcaatgccacaagtccaaataccatatccagctcttcacatgtagtctgatcatcaaaatgagtgtctgacatctgggacaatcgctcggattatacacatctcgtaaaatgcctgataagcggaagcgtgtcgctgcagacgacgcagtccgcccgaccgctctcaaacgacgtcgccacaccgaagcacctgatctcttgtcacctttgtccgacgaactgctcgtgcgcattctcacctatctcccaatatccgacctcctcaaccttgcgcccgtgtcgaatcgcttctaccacctatccggcgactctcaagtgtggaagaaactctattactcgagatttgtgctaccccgcgccctccgaataccgggctttcgcgatggctcggcgcgtgccggcaagctgcactattcctctcgacgcacgatatgggccgacgggcggagaggcggctgggtggacatgcatacagacaaagagacgcgcaactgggagagacagtacaaactacgccataactgggcgagagggaaatgcgccgtcgaggagctgcaagtaggcgaagagcctcccgagacaagagattcgcccaagatgctagtcaaggttgttgatggtgtcgccataacggcggactttgcgactggtcttcgagtctgggatcttaaaacgaaactgttgttaactcatatgcgtctggatgatgcagagtccgatgcgataccaagctgtatggatattgacgatcagcatgcatcgacaaagaatcttgatattgctattggattcacagatggaagtttcggcatatggcgactgtttacagaccagagacgtattgttcgaagttacaggcatgagagttccagcaatgggaaattagtcggtgccgcgtattcctatccctacttgctgacggcaacaaaatctgtactcgtctcactgtatacctttcgaatcccgccaaactcggaaagggccgctgacgaagatagtgaaactgagaaaggctccgagagcgagaccgctgtagaatcggatgttgactttgggccgacaagctcaaagcttaggaatcgagcaacagaccaaaaggctaacccggaaataaggctacccgctccgtatctacttacctcactaaaatcccacacatcaaggtcgcctctcgcattatcattgaggaggatcagcgagagtacagtcgcttctatcgcgtacacattctccacacttcgaggatggtcactgggcattcaagagctacacataacacccacgaaaagacaaaaatcggggcctgaagttacaacaacacaactagcctataccattccattccaccacactcaaggacctaatcgagatgactggccaattagcttatcatacacacatccctatcttctcgcaactttaccagacaacacgttgatcctctacttatgtagatccagtgcctcagcgttatcaatatcaccgggaattcgactctggggccacacatctggtataagtgacgcagagattacggcaaggggtaaagccgttagtgtgagttctcggggtgaggagattagggtgtgggaattggaaggcaggacaaatggaagaagtgtcgaggtcagacccacggtgaagaacctagaggacgaggatgaggacgggagaattgagttgatgaagggagaccagtgggatgagaaacggaactgggtgggatttgatgatgagatggtcattgttctgaaggagtctctagaaggcagagagagtctgttggtttatgattttacgtgatgatacccctttgagatgaaatgaaatgaaaagatattgagaataagaaccttagagtttcgtctgccaattgaccttacaaaagtgatctctccttggccgatcctccctgcatatgcatgtcgaagctgggaattccttggcgcctattgccgatctgactaccattgtattttcgagccttcagtctccaacctaaggacgaattacaagaaacttaagacatcataaattcacctcatacctcgcatacttctcaacaatatctgaaacaatccttttcgatcttttgcaattctctaactacctcaacttgtgagagccgggacagcatcttaaaagggagcctaaaatcacgggacccgcgggctccgctttggacttcatcaacgccgttcccgccgctcggggtgtcgaaactgtctgaacagcgattgagttatacgatgaattgaatactaattgaagggccaaatcaacgttttttataatctctcactcgttgctcggtcactgtacgcaccaatcatggaggccgacatggccgagatcgatggatcgggatctcctccgtctttgaccaagcgagcttgtgatcaatgtcgcctgagaaaggttgtactctgaagtgtcccgcttaaacagaccggacactagtctgagtactcatgtagactaatggcatgttgatcggtagattcgctgcgacaaagaaaccccttgttccaactgccggagtgccagacgctcatgcagctctacgggggcgggccaaaagccgaaggaagtacggcagagggtcttgatatctagtcagtacgagcgtaaaatagaccaaatagaggaccgtcttggaggtatcgaggcccttcttcaacaacttctctctaacaacagcaacgccataagcactcctagtacagagccattgataccacagagagctgagactgcaaggagtcacacgcaatcggcgactccgagttcttcggcccaggacaaaggctcgaggacgggaagggcgagtagtaatgcggagaagacgatctttgacccagagggaagcgatacgtttgaggggaattcgagtctggctgctcatacggcctttgcttcggagtttttggcagatgcagtccgcaaaaccacgcttcgcgatggcggagccgtgaaccccaaattcgaggcggctctcaattcacttcgccagatcgttgacatgcaaaataaaccctcgagagccggagtttggaatttcggggattcgccacaagataatgaatctgagcatgagagcgagcttggatggggcccgacacagaaaccaattggcaagacaaacttacaagacttgcctttgccgccgatgtctcttgtgagggagcagttgagtcagatgcagcatggccctgtcccagctatgctggcaatcttgtatcagttcatcgactttgagagctttgcagaccgctgtcgacgtctatatttcaagaccgaagacccatctgatggaagatttatacttgtcaacgcaggtttgatctacgtcttctttgaagcgtcgctatctgcctcggaccctgtgaagaaggcatcatatgatgactgccggatcatgtgtcaacacaacgtcgagattgcactggcgcaattaccgctgttcttgcctgctacagccgagaacattgaggcattacttatgggtgcaagtttctgcatcgacatctcacgagcctcactagcatggatcctcgtatcacgcgcagcacacatgtgcagaaccctaggctaccaccaaatgctaaccatgaaagacgacccaaccgagacgaaagcatccaaatcgctcttattctggtgttgctacatgctcgacaaagcgctctccctccgtctaggccgtgcctcagtcctccaagactacgacatatccctcccccacataaccccagattccaaagccgactacccaggaaaagaagtaatgacactctggatccaacacgcgcagatcctcggtcgtatctacgagcgtctctactcccccggagccctccggcaacccgaaacaacgcgcaccgaacaagtcgccctcctagccgcggagcaaacaagactaatgaacgaaactctcaccctattccacgaattcgaacaccacccggacggcgaaggccgcatgttcgcgctcacgctaaaaagcgacgtggtatcattcctcgcctcgctagcgctgacgtatagagcgctcccaccaaacgggaataggagtcgtacattcgcagacgaatgtatagacatggctcgcgcatcaatgcgttgtcatcacgaagccataagtcttatgggcgataaatcattacaaatcgtgtacatccactggacgatcctctacgcccctttcataccattcatcgtcattttctgtctcgtaatcgaaacgtccgataccgaagacttaaatcgtctgagggatttcgtgaggagtcttgagccggctacggacgttagttcgagtgtgaggaaattacatcagctttgtcaagtgttgtgtaatgttgcggagttgtatgttgaggcgaagggaacgggggaacagggcgggagtgagtttgatttgtatttgagtcagttgggctttatgcctgatgttgggatggggggtatgggtgttgatgggttgggagagatgggtgcgcagggggggaatacgctggaggattggtttagtgggaagaattatatgatgggtttgcttgaggaggatttgagtgggattaatcctaatggatggccttcgtgagtggtcgataggcgggttatggtaggagtcgtggatgggctttggtgcaagcgttgctcatgctggagaggcgattgcggtagaggcgctcctgcagggtatagagaagtgctggaacatcacaagcggatatgggttgtgtacgattacagaccaatcgccactacgggttgataggcagctgctcgtcgataatactcatacaccaaatcatgaattttgaggttcctgtatgagctgacgaggtattgtgacaaacggtgttacaattgctaccaacaaaggaaaccagatcctctagaatctcagcagggacagtacttttgcccatcctattcccgcagctctctccctctaaattggtatatacagcgtagctcaccctccacgcgtccctagtttccctctccctctcaccctcactccatccctccttttcacttcgacttgccctcagcctccagttcccgctcagcagcctggtaatacttggcggtgtcgacaccatgctgattgtggttgacaaagttgaaccagggcaggacggaggtgaagagggcggagtatctagactggcgggcagcgacgccctgcatgtggggggtgagtttgctctcgccgtagaggggctcgccggccttgaccttggctaccatctccttcatgtccatctctacttcgcgggcgttttcggacatgccgtagaatcgcactgttttggcgttcggtcagtataattatatctgaatacaagatgtgttgaaggggtgatgggattaggatcagtggtagtgttgaggtatgtaaggtgtcagtcggacgtacgggtggagcgctggtagaagtataagaagccaccaaagaaccctatggcaccagcgagtcgcatggcctgggcgaaccctcccttgccgacgcgcgagggcgagattcgctccattgcgtacaggaggcccggggcggagacggcggcgacggtgccgtggatatagtccgatgtgcgggcatagcctacgactctcttgaaatgtcta

SEQ ID NO: 18886 - DNA, 558 bp, Muscodor strobelii
  misc_feature: SGI cDNA ID NO. 566342
  misc_feature: Encodes the peptide sequence at SEQ ID NO 18887
atgtcttcgccgacgcaacagacctacatcccctccaaggtcctcaagaccgattacccactcatcgacaatgatccacatttcaagagagtcgtaggctatgcccgcacatcggactatatccacggcaccgtcgccgccgtctccgccccgggcctcctgtacgcaatggagcgaatctcgccctcgcgcgtcggcaagggagggttcgcccaggccatgcgactcgctggtgccatagggttctttggtggcttcttatacttctaccagcgctccaccctgcgattctacggcatgtccgaaaacgcccgcgaagtagagatggacatgaaggagatggtagccaaggtcaaggccggcgagcccctctacggcgagagcaaactcaccccccacatgcagggcgtcgctgcccgccagtctagatactccgccctcttcacctccgtcctgccctggttcaactttgtcaaccacaatcagcatggtgtcgacaccgccaagtattaccaggctgctgagcgggaactggaggctgagggcaagtcgaagtga

SEQ ID NO: 18887 - protein, 185 aa, Muscodor strobelii
  misc_feature: SGI Peptide ID NO. 566342
  misc_feature (1)..(185): NCBI GI: 116193967 Blast Desc: CHGG_06701 [Chaetomium globosum CBS 148.51] gi|88182614|gb|EAQ90082.1| CHGG_06701 [Chaetomium globosum CBS 148.51]
  misc_feature (1)..(181): NCBI GI: 464287 Blast Desc: NUXM_NEUCR RecName: Full=NADH-ubiquinone oxidoreductase 21 kDa subunit; AltName: Full=Complex I-21kD; Short=CI-21kD gi|3030|emb|CAA43221.1| NADH dehydrogenase, 21 kDa
  misc_feature (1)..(181): NCBI GI: 171683155 Blast Desc: protein product [Podospora anserina] gi|170941537|emb|CAP67189.1| protein product [Podospora anserina]
  misc_feature (1)..(184): NCBI GI: 39955435 Blast Desc: MGG_09006 [Magnaporthe grisea 70-15] gi|149209355|ref|XP_001522052.1| MGCH7_ch7g169 [Magnaporthe grisea 70-15] gi|86196124|gb|EAQ70762.1| MGCH7_ch7g169 grisea
  misc_feature (12)..(181): NCBI GI: 256721920 Blast Desc: [Nectria haematococca mpVI 77-13-4]
  misc_feature (12)..(181): NCBI GI: 46140209 Blast Desc: FG11619.1 [Gibberella zeae PH-1]
  misc_feature (27)..(181): NCBI GI: 164429508 Blast Desc: NADH:ubiquinone oxidoreductase 20.9kD subunit [Neurospora crassa OR74A] gi|157073505|gb|EAA36254.2| NADH:ubiquinone oxidoreductase 20.9kD subunit [Neurospora crassa
  misc_feature (1)..(181): NCBI GI: 226288487 Blast Desc: NADH-ubiquinone oxidoreductase 21 kDa subunit [Paracoccidioides brasiliensis Pb18]
  misc_feature (1)..(184): NCBI GI: 156040952 Blast Desc: SS1G_11454 [Sclerotinia sclerotiorum 1980] gi|154695838|gb|EDN95576.1| SS1G_11454 [Sclerotinia sclerotiorum 1980]
  misc_feature (1)..(181): NCBI GI: 261188111 Blast Desc: NADH-ubiquinone oxidoreductase 21 kDa subunit [Ajellomyces dermatitidis SLH14081] gi|239593347|gb|EEQ75928.1| NADH-ubiquinone oxidoreductase 21 kDa subunit [Ajellomyces 21 kDa
  misc_feature (1)..(181): SWISSPROT Homolog: EC 1.6.5.3 NADH dehydrogenase (ubiquinone)
  misc_feature (1)..(181): SWISSPROT Homolog: EC 1.6.99.3 NADH dehydrogenase
MSSPTQQTYIPSKVLKTDYPLIDNDPHFKRVVGYARTSDYIHGTVAAVSAPGLLYAMERISPSRVGKGGFAQAMRLAGAIGFFGGFLYFYQRSTLRFYGMSENAREVEMDMKEMVAKVKAGEPLYGESKLTPHMQGVAARQSRYSALFTSVLPWFNFVNHNQHGVDTAKYYQAAERELEAEGKSK

SEQ ID NO: 18888 - DNA, 2096 bp, Muscodor strobelii
  misc_feature: SGI EST ID NO. CUFF.44462.3
  misc_feature: Variant of the nucleotide sequence at SEQ ID NO 18886
gacctagctgcgtggctcaagtgattgaagctctcatcgaagctcttggacagcccaattgactcgacacaccatgtcttcgccgacgcaacagacctacatcccctccaaggtcctcaagaccgattacccactcatcgacaatgatccacatttcaagagagtcgtaggctatgcccgcacatcggactatatccacggcaccgtcgccgccgtctccgccccgggcctcctgtacgcaatggagcgaatctcgccctcgcgcgtcggcaagggagggttcgcccaggccatgcgactcgctggtgccatagggttctttggtggcttcttatacttctaccagcgctccaccctgcgattctacggcatgtccgaaaacgcccgcgaagtagagatggacatgaaggagatggtagccaaggtcaaggccggcgagcccctctacggcgagagcaaactcaccccccacatgcagggcgtcgctgcccgccagtctagatactccgccctcttcacctccgtcctgccctggttcaactttgtcaaccacaatcagcatggtgtcgacaccgccaagtattaccaggctgctgagcgggaactggaggctgagggcaagtcgaagtgaaaaggagggatggagtgagggtgagagggagagggaaactagggacgcgtggagggtgagctacgctgtatataccaatttagagggagagagctgcgggaataggatgggcaaaagtactgtccctgctgagattctagaggatctggtttcctttgttggtagcaattgtaacaccgtttgtcacaatacctcgtcagctcatacaggaacctcaaaattcatgatttggtgtatgagtattatcgacgagcagctgcctatcaacccgtagtggcgattggtctgtaatcgtacacaacccatatccgcttgtgatgttccagcacttctctataccctgcaggagcgcctctaccgcaatcgcctctccagcatgagcaacgcttgcaccaaagcccatccacgactcctaccataacccgcctatcgaccactcacgaaggccatccattaggattaatcccactcaaatcctcctcaagcaaacccatcatataattcttcccactaaaccaatcctccagcgtattccccccctgcgcacccatctctcccaacccatcaacacccataccccccatcccaacatcaggcataaagcccaactgactcaaatacaaatcaaactcactcccgccctgttcccccgttcccttcgcctcaacatacaactccgcaacattacacaacacttgacaaagctgatgtaatttcctcacactcgaactaacgtccgtagccggctcaagactcctcacgaaatccctcagacgatttaagtcttcggtatcggacgtttcgattacgagacagaaaatgacgatgaatggtatgaaaggggcgtagaggatcgtccagtggatgtacacgatttgtaatgatttatcgcccataagacttatggcttcgtgatgacaacgcattgatgcgcgagccatgtctatacattcgtctgcgaatgtacgactcctattcccgtttggtgggagcgctctatacgtcagcgctagcgaggcgaggaatgataccacgtcgctttttagcgtgagcgcgaacatgcggccttcgccgtccgggtggtgttcgaattcgtggaatagggtgagagtttcgttcattagtcttgtttgctccgcggctaggagggcgacttgttcggtgcgcgttgtttcgggttgccggagggctccgggggagtagagacgctcgtagatacgaccgaggatctgcgcgtgttggatccagagtgtcattacttcttttcctgggtagtcggctttggaatctggggttatgtgggggagggatatgtcgtagtcttggaggactgaggcacggcctagacggagggagagcgctttgtcgagcatgtagcaacaccagaataagagcgatttggatgctttcgtctcggttgggtcgtctttcatggttagcatttggtggtagcctagggttctgc

SEQ ID NO: 18889 - DNA, 1224 bp, Muscodor strobelii
  misc_feature: SGI cDNA ID NO. 566343
  misc_feature: Encodes the peptide sequence at SEQ ID NO 18890
atggcgtcaagacttgctgcaagacagccagagacttccaaacggccccctgctggcatagacaactacgatatcgacgatgacccgttcgcttcagatggagatgataccactaagaataacagcaccgcagataccaatgcaaagaagagaaaagacgcttcggggctgggaatcaacgaggaggtctccgtaagcaagaaagccagagttccgagagtgaagctcgacgaaaccagattactatcagaaaatggcatacccaaactacgaaccaaagcaaagaatctcaagttcaaggggaagggacatgagtggtcagacaccgcccgcctcctctccttctaccagctttggctcgacgacctctttcccaaagccaaattcctcgacgccctcagcatggtcgagaaagcaggccacaagaaatacctacgtctcaagcgactagagtggatcaacgaaggaagaccgggctcaaccaccatagacgacttcgacgatctatttggcgccgacgtccaacccgaggaggaacgcgatccagctgtattccccgccagagtcgcccccatcttcgaagcctctatgcgcccgaagacacctgccagagacgtaccagatgatgacgaagatctttacgacgcgacgccgaagccgaagaattggcctccgaagactacgtcggtgtataagaatcatggagagccggacgaggatgatttagatgcgttgatggcggaagctgaagcgcagcagtcaagttcgacttcattgtttggaaacggaaaaaccagcacgaatacgaatcggccacgcgatgagcctgatgaagatgatctagacgccctgatggcagaggtcgaggcacagcaatcaaacccaacgtcattatttgggaacggagaatcgagtacgagtacgagtcttcctcgaaacgatcccattcaagataatcgggacgcgtctagggcaaaagctgaggcagacgcttttttaagtaaacaggcgaaaatctttcaaaattccacgaaacgacctgcggtgctggatgacatagatgatgatctggatgcgcttatggcagaggcagaggctttcaattcggtttctgcaaataaagagcctgctgagggtgtcacggcggacagtaatgcgagtaatgcgttggatgaggataaggaggctgaggctgcgatggcggagatggatgggttgtggtga

SEQ ID NO: 18890 - protein, 407 aa, Muscodor strobelii
  misc_feature: SGI Peptide ID NO. 566343
  misc_feature (75)..(158): Pfam Id: PF07962 Pfam Desc: Replication Fork Protection Component Swi3
  misc_feature (26)..(406): NCBI GI: 85118706 Blast Desc: NCU01858 [Neurospora crassa OR74A] gi|74618907|sp|Q7SHE8.1|CSM3_NEUCR RecName: Full=Chromosome segregation in meiosis protein 3 gi|28927299|gb|EAA36253.1|
  misc_feature (7)..(407): NCBI GI: 39955425 Blast Desc: MGG_09005 [Magnaporthe grisea 70-15] gi|149209353|ref|XP_001522051.1| MGCH7_ch7g168 [Magnaporthe grisea 70-15] gi|158514089|sp|A4RCW0.1|CSM3_MAGGR RecName: in 3
  misc_feature (19)..(407): NCBI GI: 171683153 Blast Desc: protein product [Podospora anserina] gi|170941536|emb|CAP67188.1| protein product [Podospora anserina]
  misc_feature (38)..(231): NCBI GI: 154305225 Blast Desc: BC1G_08907 [Botryotinia fuckeliana B05.10] gi|150853649|gb|EDN28841.1| BC1G_08907 [Botryotinia fuckeliana B05.10]
  misc_feature (13)..(331): NCBI GI: 156040954 Blast Desc: SS1G_11455 [Sclerotinia sclerotiorum 1980] gi|154695839|gb|EDN95577.1| SS1G_11455 [Sclerotinia sclerotiorum 1980]
  misc_feature (16)..(258): NCBI GI: 256721886 Blast Desc: NECHADRAFT_36875 [Nectria haematococca mpVI 77-13-4]
  misc_feature (16)..(254): NCBI GI: 46140215 Blast Desc: FG11622.1 [Gibberella zeae PH-1]
  misc_feature (29)..(310): NCBI GI: 116193963 Blast Desc: CHGG_06699 [Chaetomium globosum CBS 148.51] gi|121784916|sp|Q2H3R6.1|CSM3_CHAGB RecName: Full=Chromosome segregation in meiosis protein 3 gi|88182612|gb|EAQ90080.1| CBS
  misc_feature (40)..(292): NCBI GI: 259483717 Blast Desc: TPA: replication fork protection component Swi3, (AFU_orthologue; AFUA_4G04745) [Aspergillus nidulans FGSC A4]
  misc_feature (18)..(289): NCBI GI: 240110145 Blast Desc: CPC735_061770 [Coccidioides posadasii C735 delta SOWgp]
MASRLAARQPETSKRPPAGIDNYDIDDDPFASDGDDTTKNNSTADTNAKKRKDASGLGINEEVSVSKKARVPRVKLDETRLLSENGIPKLRTKAKNLKFKGKGHEWSDTARLLSFYQLWLDDLFPKAKFLDALSMVEKAGHKKYLRLKRLEWINEGRPGSTTIDDFDDLFGADVQPEEERDPAVFPARVAPIFEASMRPKTPARDVPDDDEDLYDATPKPKNWPPKTTSVYKNHGEPDEDDLDALMAEAEAQQSSSTSLFGNGKTSTNTNRPRDEPDEDDLDALMAEVEAQQSNPTSLFGNGESSTSTSLPRNDPIQDNRDASRAKAEADAFLSKQAKIFQNSTKRPAVLDDIDDDLDALMAEAEAFNSVSANKEPAEGVTADSNASNALDEDKEAEAAMAEMDGLW

SEQ ID NO: 18891 - DNA, 1625 bp, Muscodor strobelii
  misc_feature: SGI EST ID NO. CUFF.44465.0
  misc_feature: Variant of the nucleotide sequence at SEQ ID NO 18889
cttcagacgcgtcaagctgtacatgcatctgatttacagagtaaggcacaagctcaattgatatacacgcatacaacaacttcgcaacccgcaaaagacactattctcaccatggcgtcaagacttgctgcaagacagccagagacttccaaacggccccctgctggcatagacaactacgatatcgacgatgacccgttcgcttcagatggagatgataccactaagaataacagcaccgcagataccaatgcaaagaagagaaaagacgcttcggggctgggaatcaacgaggaggtctccgtaagcaagaaagccagagttccgagagtgaagctcgacgaaaccagattactatcagaaaatggcatacccaaactacgaaccaaagcaaagaatctcaagttcaaggggaagggacatgagtggtcagacaccgcccgcctcctctccttctaccagctttggctcgacgacctctttcccaaagccaaattcctcgacgccctcagcatggtcgagaaagcaggccacaagaaatacctacgtctcaagcgactagagtggatcaacgaaggaagaccgggctcaaccaccatagacgacttcgacgatctatttggcgccgacgtccaacccgaggaggaacgcgatccagctgtattccccgccagagtcgcccccatcttcgaagcctctatgcgcccgaagacacctgccagagacgtaccagatgatgacgaagatctttacgacgcgacgccgaagccgaagaattggcctccgaagactacgtcggtgtataagaatcatggagagccggacgaggatgatttagatgcgttgatggcggaagctgaagcgcagcagtcaagttcgacttcattgtttggaaacggaaaaaccagcacgaatacgaatcggccacgcgatgagcctgatgaagatgatctagacgccctgatggcagaggtcgaggcacagcaatcaaacccaacgtcattatttgggaacggagaatcgagtacgagtacgagtcttcctcgaaacgatcccattcaagataatcgggacgcgtctagggcaaaagctgaggcagacgcttttttaagtaaacaggcgaaaatctttcaaaattccacgaaacgacctgcggtgctggatgacatagatgatgatctggatgcgcttatggcagaggcagaggctttcaattcggtttctgcaaataaagagcctgctgagggtgtcacggcggacagtaatgcgagtaatgcgttggatgaggataaggaggctgaggctgcgatggcggagatggatgggttgtggtgagcgtgatggtttcttccatcagtcagagtgccatcgcgttcagagatccggtgtgccgatatgactagatgactacgaacgtaatggcctgaacacttattgtgacgcactcgatgatattttgtggcatagcttggcgtttaggaggagttgtgccttttcttgctagcattctaagaataccatgagcagcgaacatataatcacgaataccattactttcattctaataagcaacggcgagatggccgagttggttatggcgtgaggttaaggtcaccttagcacag

SEQ ID NO: 18892 - DNA, 771 bp, Muscodor strobelii
  misc_feature: SGI cDNA ID NO. 566344
  misc_feature: Encodes the peptide sequence at SEQ ID NO 18893
atggcccaaatcacagatctcccctgcgaattaatcctcgaaatcctaggaaaactagacataagctccctccctcccgtcattgccgccagccctctcttcctgcacacatacaactcaaaccgctccctagccatctcaatcctcaagcgccaagtcggcttcgaaaccctcatctgggcaacgctctaccaagaagcccaaaacgccccaaccccatcaccaaccctctggaccgagagactcctctcaacctggaaaaagccagccaatcccaaagtgcttaagcgtctcctcacatacccactccagagactcataaacatagtgcgcatccacgaaatcgtcgacgaatgcgccagcagactacgcactaataccctgcgatggccgaatgccatcccatctggtatccagacacgctacgaaaacgaatggattgcattcattaagttggactatcagctgggcaaggtagaactttctatcaatgacctaaagtacagcttcgagtcggacgagcggaaactcgagatacttcaagattcccagagacgtctgagggaaatcaggcgggaaatggacaagttgataaagatgctatatttcaaggacatctacggatacctcatcacacgacggacttacaacgctcgtggtgagagagaagagggtctttcgcttcgttgttccgtcttgaatggtgcacagttgcatcgtatcgtggcatacgagatgcttttagagaggaaggtgcttaatgtgtattaa

SEQ ID NO: 18893 - protein, 256 aa, Muscodor strobelii
  misc_feature: SGI Peptide ID NO. 566344
MAQITDLPCELILEILGKLDISSLPPVIAASPLFLHTYNSNRSLAISILKRQVGFETLIWATLYQEAQNAPTPSPTLWTERLLSTWKKPANPKVLKRLLTYPLQRLINIVRIHEIVDECASRLRTNTLRWPNAIPSGIQTRYENEWIAFIKLDYQLGKVELSINDLKYSFESDERKLEILQDSQRRLREIRREMDKLIKMLYFKDIYGYLITRRTYNARGEREEGLSLRCSVLNGAQLHRIVAYEMLLERKVLNVY

SEQ ID NO: 18894 - DNA, 235 bp, Muscodor strobelii
  misc_feature: SGI EST ID NO. CUFF.44410.0
  misc_feature: Variant of the nucleotide sequence at SEQ ID NO 18892
ctcggatcacaacaccatcgcggacatggcccaaatcacagatctcccctgcgaattaatcctcgaaatcctaggaaaactagacataagctccctccctcccgtcattgccgccagccctctcttcctgcacacatacaactcaaaccgctccctagccatctcaatcctcaagcgccaagtcggcttcgaaaccctcatctgggcaacgctctaccaagaagcccaaaacgcc

SEQ ID NO: 18895 - DNA, 1692 bp, Muscodor strobelii
  misc_feature: SGI cDNA ID NO. 566345
  misc_feature: Elevated expression when VOC is produced
  misc_feature: Encodes the peptide sequence at SEQ ID NO 18896
atgccaatcttcaaaagcaaacaccctgatattactgtcccaaaagatgtcacactctgggagtggttattcggagaacagtccaaacactcccctttaaacaaacatcccgaggacaagctcgcaggatacacagatgccatcacgaaagaacgcgtgtcatggaaagacgtcaaagaagccgcgacatatatctcaacaacactcgtcaaagactacggcctgaaagaaggagacacagtctctctattcagtcgaaacacaatatggtatccagtgacgttgttcgcagctatgagagcgggaggcgtcgtctccggcgcatcacctgcgtataatgtcgaggaaatgacatatgcgctcaaaacagcaaatgcgaagttcatcgctacacatccaacgtcaatcgatatcgctgctgaagcagcgaaaaacgctgggatagataagaaacatatcttcttactagagggcgaactcgaaggctataccacagtcaaggagctcatcaaacgtggcaaagcgtacggagaatccggtcaagtaccacacgccaaactcccgcctggaaagacaaatcgggaggtatgcgcgttgttgagtttctcatcaggtacgacaggattgccaaaggccgtcatgatcgcgcaccacaatgtcatcggacaatctctccaaatggaacctctgacgcccgaagatcataagaaagtcctcggtgttctgcccatgtttcatatcacgggcatagtgcatagtatgcatttccccctgatcatcaacgcagaagtcataatgttgcctgcatttagcatggagtcgatgctacagacgatatccgaataccaaattcctgagcttctcctcgtcccgccgattttgatccgtcttgttcgggatccgatcgtggatcagtacgacctccgttgcgtgaagcggatctctagcggcgctgcaccggtttctgaggagattctgcaattactgagtaagaaatttccgggttctggatttaagcaaggctatggaatgacggagagttgctcttgtatcactgcacatccaccttgggcttatgactataaatacggacacacagtcggcacgatagtcgcgagtactgaggtgaaattgatcaaagaagatggcacggaagcgaatatcggcgaacccggggagattcttgcgagggggccgcaggtcgtcatggggtatttgaataacgagactgcgacacgcgaaacgttcgacaaagatggattcttacatacgggagatcagggcgttatcaataccgagggattcatcaccatcactgaccggattaaggagttgatcaaagtcaagggaataggcgttgcgcctgcggagctggaagacctcttgctgggtcatgaggcggtcgaggactgcgctgtgaccgctatttcggatgattgggctggagagcggccaaaagcgtttattgtgttgaagggagggaataaggctagtgaggtgatgggattggatattatcacgtatgtggagaagaacaaggtaaggcataagtggatcaaggagattgagtttacggatgagattccgaagagtgctagtggaaagattttgaggagagtgctgagagatagggcgaaaaagggtgttaagggtgttgttgtgactgcgaaggagagtagggctaagttgtag

SEQ ID NO: 18896 - protein, 563 aa, Muscodor strobelii
  misc_feature: SGI Peptide ID NO. 566345
  misc_feature (54)..(473): Pfam Id: PF00501 Pfam Desc: AMP-binding enzyme
  misc_feature (1)..(563): NCBI GI: 189191980 Blast Desc: 4-coumarate-CoA ligase 2 [Pyrenophora tritici-repentis Pt-1C-BFP] gi|187973935|gb|EDU41434.1| 4-coumarate-CoA ligase 2 [Pyrenophora tritici-repentis Pt-1C-BFP]
  misc_feature (11)..(562): NCBI GI: 240108509 Blast Desc: AMP-binding enzyme, [Coccidioides posadasii C735 delta SOWgp]
  misc_feature (13)..(562): NCBI GI: 119186605 Blast Desc: CIMG_03350 [Coccidioides immitis RS]
  misc_feature (13)..(563): NCBI GI: 225685161 Blast Desc: 4-coumarate-CoA ligase [Paracoccidioides brasiliensis Pb03]
  misc_feature (4)..(563): NCBI GI: 261193881 Blast Desc: phenylacetyl-CoA ligase [Ajellomyces dermatitidis SLH14081] gi|239588951|gb|EEQ71594.1| phenylacetyl-CoA ligase [Ajellomyces dermatitidis SLH14081]
  misc_feature (3)..(563): NCBI GI: 115443144 Blast Desc: ATEG_09757 [Aspergillus terreus NIH2624] gi|114188248|gb|EAU29948.1| ATEG_09757 [Aspergillus terreus NIH2624]
  misc_feature (3)..(563): NCBI GI: 226294485 Blast Desc: 4-coumarate-CoA ligase [Paracoccidioides brasiliensis Pb18]
  misc_feature (3)..(563): NCBI GI: 259480840 Blast Desc: TPA: conserved [Aspergillus nidulans FGSC A4]
  misc_feature (4)..(563): NCBI GI: 239613732 Blast Desc: 4-coumarate:coenzyme A ligase [Ajellomyces dermatitidis ER-3]
  misc_feature (41)..(548): NCBI GI: 119192310 Blast Desc: CIMG_00532 [Coccidioides immitis RS]
  misc_feature (3)..(544): SWISSPROT Homolog: EC 6.2.1.12 4-coumarate--CoA ligase
  misc_feature: Useful for introducing or modulating the production of volatile compounds
MPIFKSKHPDITVPKDVTLWEWLFGEQSKHSPLNKHPEDKLAGYTDAITKERVSWKDVKEAATYISTTLVKDYGLKEGDTVSLFSRNTIWYPVTLFAAMRAGGVVSGASPAYNVEEMTYALKTANAKFIATHPTSIDIAAEAAKNAGIDKKHIFLLEGELEGYTTVKELIKRGKAYGESGQVPHAKLPPGKTNREVCALLSFSSGTTGLPKAVMIAHHNVIGQSLQMEPLTPEDHKKVLGVLPMFHITGIVHSMHFPLIINAEVIMLPAFSMESMLQTISEYQIPELLLVPPILIRLVRDPIVDQYDLRCVKRISSGAAPVSEEILQLLSKKFPGSGFKQGYGMTESCSCITAHPPWAYDYKYGHTVGTIVASTEVKLIKEDGTEANIGEPGEILARGPQVVMGYLNNETATRETFDKDGFLHTGDQGVINTEGFITITDRIKELIKVKGIGVAPAELEDLLLGHEAVEDCAVTAISDDWAGERPKAFIVLKGGNKASEVMGLDIITYVEKNKVRHKWIKEIEFTDEIPKSASGKILRRVLRDRAKKGVKGVVVTAKESRAKL

SEQ ID NO: 18897 - DNA, 1911 bp, Muscodor strobelii
  misc_feature: SGI EST ID NO. CUFF.44422.0
  misc_feature: Variant of the nucleotide sequence at SEQ ID NO 18895
gattgcttcaaaatggccgaggtaatgtgttttagtagattggtggatttcgttgttctactattttttctcttttgctttctgttgtctatttcacattatttttagcgatcgagacgattaaggcccatcaagatgccaatcttcaaaagcaaacaccctgatattactgtcccaaaagatgtcacactctgggagtggttattcggagaacagtccaaacactcccctttaaacaaacatcccgaggacaagctcgcaggatacacagatgccatcacgaaagaacgcgtgtcatggaaagacgtcaaagaagccgcgacatatatctcaacaacactcgtcaaagactacggcctgaaagaaggagacacagtctctctattcagtcgaaacacaatatggtatccagtgacgttgttcgcagctatgagagcgggaggcgtcgtctccggcgcatcacctgcgtataatgtcgaggaaatgacatatgcgctcaaaacagcaaatgcgaagttcatcgctacacatccaacgtcaatcgatatcgctgctgaagcagcgaaaaacgctgggatagataagaaacatatcttcttactagagggcgaactcgaaggctataccacagtcaaggagctcatcaaacgtggcaaagcgtacggagaatccggtcaagtaccacacgccaaactcccgcctggaaagacaaatcgggaggtatgcgcgttgttgagtttctcatcaggtacgacaggattgccaaaggccgtcatgatcgcgcaccacaatgtcatcggacaatctctccaaatggaacctctgacgcccgaagatcataagaaagtcctcggtgttctgcccatgtttcatatcacgggcatagtgcatagtatgcatttccccctgatcatcaacgcagaagtcataatgttgcctgcatttagcatggagtcgatgctacagacgatatccgaataccaaattcctgagcttctcctcgtcccgccgattttgatccgtcttgttcgggatccgatcgtggatcagtacgacctccgttgcgtgaagcggatctctagcggcgctgcaccggtttctgaggagattctgcaattactgagtaagaaatttccgggttctggatttaagcaaggctatggaatgacggagagttgctcttgtatcactgcacatccaccttgggcttatgactataaatacggacacacagtcggcacgatagtcgcgagtactgaggtgaaattgatcaaagaagatggcacggaagcgaatatcggcgaacccggggagattcttgcgagggggccgcaggtcgtcatggggtatttgaataacgagactgcgacacgcgaaacgttcgacaaagatggattcttacatacgggagatcagggcgttatcaataccgagggattcatcaccatcactgaccggattaaggagttgatcaaagtcaagggaataggcgttgcgcctgcggagctggaagacctcttgctgggtcatgaggcggtcgaggactgcgctgtgaccgctatttcggatgattgggctggagagcggccaaaagcgtttattgtgttgaagggagggaataaggctagtgaggtgatgggattggatattatcacgtatgtggagaagaacaaggtaaggcataagtggatcaaggagattgagtttacggatgagattccgaagagtgctagtggaaagattttgaggagagtgctgagagatagggcgaaaaagggtgttaagggtgttgttgtgactgcgaaggagagtagggctaagttgtaggcagttcttttgatatactccatatctgagatgagcatcgaacgtctggactcgaaagcgtttacatatcttcctcaatgtact

SEQ ID NO: 18898 - DNA, 1932 bp, Muscodor strobelii
  misc_feature: SGI cDNA ID NO. 566346
  misc_feature: Encodes the peptide sequence at SEQ ID NO 18899
atgctatctgccagtcttgcgaatctagccctctgggcttgtctcttcgtcggatttatagatgccttgaaactgccagtaccgccacgctctttacacgccaagtatgcagccaagtatccaaagagagctcttcctttaaaatcctcctacgattacatcatcgtcggagccggaacatcaggtctcacagttgcagaccgcctgtccgccgatggaaaatgcgagttccaacattccaaaactatccacaagacaacagaatctaacatccactctagcaacctcgactccccaagaatctcccaagtatcaggcggcaccgcagcaatgggcggtcaattctcctacgaaataaactccgtaccccagatcaacctacagaaccgtacaaccgccgtagtagtgggcaatctcgtaggtggcagctcagcgataaacgctatgatgaccgttcgcgcgacatccgatgattatgatcgatggggcagtttcttcgggaatggttcgacgtggaattgggagggaatgttgccttatttcaagaaagctgtcaatttcgcaccgcctggtgcggaggtcgcaaagtctgtgaatatgacttgggatgagaagttttgggggaatagctcgacggttcatacttcttggccgagctatcagtggcccgctctagctgcgcagatcgaggccttcagagatatacccggtgttgagttcccgcctgatagcggttcggggcgggctggtgtctattggtttccaacgttcatggatccagtcctcgtcgagcgatcgtatgcacgaacaggtcacttcaataacataaatcgcacgaacttcgaagtcataaccgagtccaaagtgacgaaaatattgcttgataacggcgtggcaacaggtgtttctttccagcagaagacgagcaatagtacgacaacgatgacggtcaaggcaaataaagaagtcatcatcgcagctggtgccatccattctcctcaaatactgcaattaagcggtataggaccaaaaccactgttgcaatctgctggcatcgacacaattgtcgagctgcccggcgttggacagaatttccaggatcacccgattcattttagcagtatcgttctacaaaacttcacaacccatccgaacccaacagacatgttcgcagaccgtaacttctcggcatgggcccaagaactctggcgaaccaacaagaccggcccttactcgctcggcgtcggaaatgcagcagcctggctaggcatgcccgtgatcgcaccagatactttcgagactatcgcctcgaagctcgagggactagaccacgctgccctgctagcagctgacacagatccgactgtcattgcaggctataaagcgcaaatgaaagacatggcgaccgcgatccgctcacccaatacagcattttacaatcatgtcttaacaggtggtagttcatcggggacaatcgtcgacttgcatcccctcagccgcggaacagtgacaatcaacccagcgaatcccaacagtgaaccactcgtagattatcgtgcattgagtaatccagtggatctcgacatcatggtagagatcctgcgcttcacgaagcgatactatttcgagacgcgacttagctcgatgtcgcctcgtcaggttcaaccgccggattatgttaacgaagcagaggatctgaagggctttctgaaggataacatcagtccctcgtatttccaccctgttgggacttgcgcaatgatgccgagggaactgggcggggtcgttgatgagaatctgaaggtttacggtgtgaaggggctgagagtcgtagatgcgagtatcgagcctgtgcttgttggcgcaaatacgtgccagacgacctatgctgttgctgagaaagctgcggatctcattaaggccgatagctag

SEQ ID NO: 18899 - protein, 643 aa, Muscodor strobelii
  misc_feature: SGI Peptide ID NO. 566346
  misc_feature (490)..(635): Pfam Id: PF05199 Pfam Desc: GMC oxidoreductase
  misc_feature (51)..(383): Pfam Id: PF00732 Pfam Desc: GMC oxidoreductase
  misc_feature (577)..(635): Pfam Id: PF05199 Pfam Desc: GMC oxidoreductase
  misc_feature (492)..(539): Pfam Id: PF05199 Pfam Desc: GMC oxidoreductase
  misc_feature (277)..(370): Pfam Id: PF00732 Pfam Desc: GMC oxidoreductase
  misc_feature (120)..(184): Pfam Id: PF00732 Pfam Desc: GMC oxidoreductase
  misc_feature (51)..(73): Pfam Id: PF00732 Pfam Desc: GMC oxidoreductase
  misc_feature (33)..(640): NCBI GI: 116203225 Blast Desc: CHGG_09497 [Chaetomium globosum CBS 148.51] gi|88178015|gb|EAQ85483.1| CHGG_09497 [Chaetomium globosum CBS 148.51]
  misc_feature (19)..(634): NCBI GI: 171682804 Blast Desc: protein product [Podospora anserina] gi|170941361|emb|CAP67011.1| protein product [Podospora anserina]
  misc_feature (47)..(641): NCBI GI: 145603984 Blast Desc: MGG_10479 [Magnaporthe grisea 70-15] gi|145012095|gb|EDJ96751.1| MGG_10479 [Magnaporthe grisea 70-15]
  misc_feature (9)..(641): NCBI GI: 261359377 Blast Desc: conserved [Verticillium albo-atrum VaMs.102]
  misc_feature (43)..(602): NCBI GI: 116197310 Blast Desc: CHGG_05253 [Chaetomium globosum CBS 148.51] gi|88181166|gb|EAQ88634.1| CHGG_05253 [Chaetomium globosum CBS 148.51]
  misc_feature (43)..(640): NCBI GI: 261357964 Blast Desc: glucose oxidase [Verticillium albo-atrum VaMs.102]
  misc_feature (36)..(634): NCBI GI: 171694606 Blast Desc: protein product [Podospora anserina] gi|170947545|emb|CAP59706.1| protein product [Podospora anserina]
  misc_feature (8)..(639): NCBI GI: 171685286 Blast Desc: protein product [Podospora anserina] gi|170942604|emb|CAP68256.1| protein product [Podospora anserina]
  misc_feature (117)..(640): NCBI GI: 189190228 Blast Desc: choline dehydrogenase [Pyrenophora tritici-repentis Pt-1C-BFP] gi|187973059|gb|EDU40558.1| choline dehydrogenase [Pyrenophora tritici-repentis Pt-1C-BFP]
  misc_feature (47)..(642): NCBI GI: 116200602 Blast Desc: CHGG_10846 [Chaetomium globosum CBS 148.51] gi|88175560|gb|EAQ83028.1| CHGG_10846 [Chaetomium globosum CBS 148.51]
  misc_feature (52)..(639): SWISSPROT Homolog: EC 1.1.99.1 Choline dehydrogenase
MLSASLANLALWACLFVGFIDALKLPVPPRSLHAKYAAKYPKRALPLKSSYDYIIVGAGTSGLTVADRLSADGKCEFQHSKTIHKTTESNIHSSNLDSPRISQVSGGTAAMGGQFSYEINSVPQINLQNRTTAVVVGNLVGGSSAINAMMTVRATSDDYDRWGSFFGNGSTWNWEGMLPYFKKAVNFAPPGAEVAKSVNMTWDEKFWGNSSTVHTSWPSYQWPALAAQIEAFRDIPGVEFPPDSGSGRAGVYWFPTFMDPVLVERSYARTGHFNNINRTNFEVITESKVTKILLDNGVATGVSFQQKTSNSTTTMTVKANKEVIIAAGAIHSPQILQLSGIGPKPLLQSAGIDTIVELPGVGQNFQDHPIHFSSIVLQNFTTHPNPTDMFADRNFSAWAQELWRTNKTGPYSLGVGNAAAWLGMPVIAPDTFETIASKLEGLDHAALLAADTDPTVIAGYKAQMKDMATAIRSPNTAFYNHVLTGGSSSGTIVDLHPLSRGTVTINPANPNSEPLVDYRALSNPVDLDIMVEILRFTKRYYFETRLSSMSPRQVQPPDYVNEAEDLKGFLKDNISPSYFHPVGTCAMMPRELGGVVDENLKVYGVKGLRVVDASIEPVLVGANTCQTTYAVAEKAADLIKADS

SEQ ID NO: 18900 - DNA, 852 bp, Muscodor strobelii
  misc_feature: SGI cDNA ID NO. 566347
  misc_feature: Encodes the peptide sequence at SEQ ID NO 18901
atggcgacgcgctccccagaagccatcctcgcagatctccgcgccctagtcgctaaccaagaagtcacaatcctcaagctcagcgagccaatatccgcagaaatagccaatgcgcaacaagcaggacagcgaacatcagatatatccaactcctccctcgacgccaccacacccgcctcactgaacgcagatctcacccactaccgggagttatttgcaaagttacgcttcagctatgtcgagcaagtcaccaaagagaaattcatccgcgccatcgtcggcgacccacctctcatcgtctctccacaggagaacgcggatctcgagaaacagaacatcgttgctaaggcagaactcaaagccctcaagaccgaggtcgctgatatggtcgcggagctcgagaaaatggctgtggagcttagtcagaagtacgagcgtgtcaagacggagactattcaacttgaggaattacccgcaaaagtcgaagagctggagagtgcagtggcgatgctgaaggagagtcatgctgcggggctgagcgcggatcccaatatgaatctgccgcttgcgaagacacaggagctcgttgataagaggaggagggaggaggcggatctggatcggcagctggagcagctgcagagccaggtacctagaaaacagaaggaacttgagagattgcataatgagttgcagccccttgagacaaagagaacgaatagtatggcggccgcgaaggaggcaagacgtaggaaagaggctgcgcttggaggcgtggaggacgaacttgaggagaggggacgatggtatagggctgcagaggcgggtttgaagcagatgatggagacctga

SEQ ID NO: 18901 - protein, 283 aa, Muscodor strobelii
  misc_feature: SGI Peptide ID NO. 566347
  misc_feature (1)..(282): NCBI GI: 261353503 Blast Desc: conserved [Verticillium albo-atrum VaMs.102]
  misc_feature (9)..(282): NCBI GI: 256733484 Blast Desc: NECHADRAFT_35309 [Nectria haematococca mpVI 77-13-4]
  misc_feature (9)..(282): NCBI GI: 39970967 Blast Desc: MGG_02950 [Magnaporthe grisea 70-15] gi|149210497|ref|XP_001522623.1| MGCH7_ch7g723 [Magnaporthe grisea 70-15] gi|86196678|gb|EAQ71316.1| MGCH7_ch7g723 grisea
  misc_feature (1)..(276): NCBI GI: 46128247 Blast Desc: FG08501.1 [Gibberella zeae PH-1]
  misc_feature (63)..(281): NCBI GI: 171676101 Blast Desc: protein product [Podospora anserina] gi|170936116|emb|CAP60776.1| protein product [Podospora anserina]
  misc_feature (21)..(281): NCBI GI: 38567083 Blast Desc: [Neurospora crassa]
  misc_feature (21)..(281): NCBI GI: 164429593 Blast Desc: NCU01971 [Neurospora crassa OR74A] gi|157073541|gb|EAA35099.2| conserved [Neurospora crassa OR74A]
  misc_feature (5)..(281): NCBI GI: 156035669 Blast Desc: SS1G_13038 [Sclerotinia sclerotiorum 1980] gi|154698443|gb|EDN98181.1| SS1G_13038 [Sclerotinia sclerotiorum 1980]
  misc_feature (1)..(281): NCBI GI: 261204667 Blast Desc: conserved [Ajellomyces dermatitidis SLH14081] gi|239587332|gb|EEQ69975.1| conserved [Ajellomyces dermatitidis SLH14081]
  misc_feature (1)..(281): NCBI GI: 226291801 Blast Desc: conserved [Paracoccidioides brasiliensis Pb18]
MATRSPEAILADLRALVANQEVTILKLSEPISAEIANAQQAGQRTSDISNSSLDATTPASLNADLTHYRELFAKLRFSYVEQVTKEKFIRAIVGDPPLIVSPQENADLEKQNIVAKAELKALKTEVADMVAELEKMAVELSQKYERVKTETIQLEELPAKVEELESAVAMLKESHAAGLSADPNMNLPLAKTQELVDKRRREEADLDRQLEQLQSQVPRKQKELERLHNELQPLETKRTNSMAAAKEARRRKEAALGGVEDELEERGRWYRAAEAGLKQMMET

SEQ ID NO: 18902 - DNA, 1266 bp, Muscodor strobelii
  misc_feature: SGI cDNA ID NO. 566348
  misc_feature: Encodes the peptide sequence at SEQ ID NO 18903
atgtcagccaaatccaatcacgacatcctcacggacgactatgtcgccgagctcctggccaaagaggctagcgactgctctctaaagtactcggcaatgggccttgatgccttcaacaccaacaagcgcccaaccaaccaacccaagcccaacaccagattcctcaacaatatcatccgcgataccaacaaccacaaccgagccctcttggcgaaagaggaagccgagtccagtgcccgactgcgccagctcgaccatgccgaatccaagaagcgagacgaagaggagcgtcgcgagcgcagagccagacccgggccaggcgacacgcgcaagaggatgttaggcgacattgcagcgattctgggcggaccgaacaagaaacggaaacccgatcacgatagcgatgagagaccagaccgcacacgtggccgggaccgtgatcgggacaaggacgagagatcttctcgcaaagaataccacgacgacagaaacggcaggaataactcaccccaaagatccgagcgccgaagtaaggagaatagggtttcagatgcttcggccttgcgagaactcgctgttaagaatggtgaaagtcgcaaggagacgaagctaaggagtgcacctgacgcagacttaatttgtgaaaaagtcgaccgttcacgttggcgatccgttaggaatcgcgatgagccgcggcagccacgagagggaccgcgtgatacaaacagtgcccggaatagataccaatccaccgaccggcgccgtgataagagcgacgaggcacgcgatagcgaccgaccaacagccaataacgactccgattcagaccctctcgaggatatcattggtccgatgcccccatcgcagaccactgttcgtcgccgtggacgtggcgttaattccgccagctctggcatcgacaggcgatttgcgactgattacgaccccataaacgacgcaaatcccgacccagacgaggcccaaggcggagattgggacaatgcagttgaagtcttccgcgatcgacaaaagatgaagctgcaaggcgccgcccgcctccgcgctgccggattcaccgaggagcaagtccgcaagtgggaaaagggcgacaagaaggacgagtctgacgtcaagtgggataaggccggtaccagcagagcatgggatcgcggcaaagtgcttgacggcgaccgatactcatcgcctgaccctgatcttggaacctctgaggacatcattgagtacggccgcttgaagggtacctag

SEQ ID NO: 18903 - protein, 421 aa, Muscodor strobelii
  misc_feature: SGI Peptide ID NO. 566348
  misc_feature (6)..(392): NCBI GI: 46128245 Blast Desc: FG08500.1 [Gibberella zeae PH-1]
  misc_feature (5)..(406): NCBI GI: 171676095 Blast Desc: protein product [Podospora anserina] gi|170936113|emb|CAP60773.1| protein product [Podospora anserina]
  misc_feature (6)..(392): NCBI GI: 261353504 Blast Desc: conserved [Verticillium albo-atrum VaMs.102]
  misc_feature (264)..(419): NCBI GI: 169595806 Blast Desc: SNOG_00646 [Phaeosphaeria nodorum SN15] gi|111071021|gb|EAT92141.1| SNOG_00646 [Phaeosphaeria nodorum SN15]
  misc_feature (5)..(163): NCBI GI: 256733982 Blast Desc: NECHADRAFT_35614 [Nectria haematococca mpVI 77-13-4]
  misc_feature (246)..(388): NCBI GI: 116193709 Blast Desc: CHGG_06572 [Chaetomium globosum CBS 148.51] gi|88182485|gb|EAQ89953.1| CHGG_06572 [Chaetomium globosum CBS 148.51]
  misc_feature (12)..(401): NCBI GI: 238845557 Blast Desc: pre-mRNA-splicing factor 38B [Microsporum canis CBS 113480]
  misc_feature (12)..(395): NCBI GI: 119191996 Blast Desc: CIMG_00375 [Coccidioides immitis RS]
  misc_feature (64)..(408): NCBI GI: 39970969 Blast Desc: MGG_02951 [Magnaporthe grisea 70-15] gi|149210499|ref|XP_001522624.1| MGCH7_ch7g724 [Magnaporthe grisea 70-15] gi|86196679|gb|EAQ71317.1| MGCH7_ch7g724 grisea
  misc_feature (273)..(419): NCBI GI: 189201962 Blast Desc: conserved [Pyrenophora tritici-repentis Pt-1C-BFP] gi|187984416|gb|EDU49904.1| conserved [Pyrenophora tritici-repentis Pt-1C-BFP]
MSAKSNHDILTDDYVAELLAKEASDCSLKYSAMGLDAFNTNKRPTNQPKPNTRFLNNIIRDTNNHNRALLAKEEAESSARLRQLDHAESKKRDEEERRERRARPGPGDTRKRMLGDIAAILGGPNKKRKPDHDSDERPDRTRGRDRDRDKDERSSRKEYHDDRNGRNNSPQRSERRSKENRVSDASALRELAVKNGESRKETKLRSAPDADLICEKVDRSRWRSVRNRDEPRQPREGPRDTNSARNRYQSTDRRRDKSDEARDSDRPTANNDSDSDPLEDIIGPMPPSQTTVRRRGRGVNSASSGIDRRFATDYDPINDANPDPDEAQGGDWDNAVEVFRDRQKMKLQGAARLRAAGFTEEQVRKWEKGDKKDESDVKWDKAGTSRAWDRGKVLDGDRYSSPDPDLGTSEDIIEYGRLKGT

SEQ ID NO: 18904 - DNA, 5648 bp, Muscodor strobelii
  misc_feature: SGI EST ID NO. CUFF.44428.0
  misc_feature: Variant of the nucleotide sequence at SEQ ID NO 18902
gaaatatataagatgaagtctctgaagatgtgaaattaaggtattcggaacaagggtttggcgaatttgcgcttagaatcgacttcacgatgctatctgccagtcttgcgaatctagccctctgggcttgtctcttcgtcggatttatagatgccttgaaactgccagtaccgccacgctctttacacgccaagtatgcagccaagtatccaaagagagctcttcctttaaaatcctcctacgattacatcatcgtcggagccggaacatcaggtctcacagttgcagaccgcctgtccgccgatggaaaatgcgagttccaacattccaaaactatccacaagacaacagaatctaacatccactctagcaaccgtcctagtaatagaaaatggcaaactcggtatttcccccatccctccatcccctgagcccttataccaccccaggctaacatacctcccagtcgactccccaagaatctcccaagtatcaggcggcaccgcagcaatgggcggtcaattctcctacgaaataaactccgtaccccagatcaacctacagaaccgtacaaccgccgtagtagtgggcaatctcgtaggtggcagctcagcgataaacgctatgatgaccgttcgcgcgacatccgatgattatgatcgatggggcagtttcttcgggaatggttcgacgtggaattgggagggaatgttgccttatttcaagaaagtgagttcatcacatggttatgatgggggaagggggttgaagtgtgagttgctgatatgaagtgaaggctgtcaatttcgcaccgcctggtgcggaggtcgcaaagtctgtgaatatgacttgggatgagaagttttgggggaatagctcgacggttcatacttcttggccgagctatcagtggcccgctctaggttcgtgagattttcttgaaaaggggggacgacatgtgctgacttggatgtaagctgcgcagatcgaggccttcagagatatacccggtgttgagttcccgcctgatagcggttcggggcgggctggtgtctatgtaagtcttgttacgctcgaccttggcaaaagaagtttgtcggtagatctgaccatgagtgctatagtggtttccaacgttcatggatccagtcctcgtcgagcgatcgtatgcacgaacaggtcacttcaataacataaatcgcacgaacttcgaagtcataaccgagtccaaagtgacgaaaatattgcttgataacggcgtggcaacaggtgtttctttccagcagaagacgagcaatagtacgacaacgatgacggtcaaggcaaataaagaagtcatcatcgcagctggtgccatccattctcctcaaatactgcaattaagcggtataggaccaaaaccactgttgcaatctgctggcatcgacacaattgtcgagctgcccggcgttggacagaatttccaggatcacccgattcattttagcagtatcgttcgtatgtatcccagcatatcacccctcacggttgttgtactaacaagcgaaaccagtacaaaacttcacaacccatccgaacccaacagacatgttcgcagaccgtaacttctcggcatgggcccaagaactctggcgaaccaacaagaccggcccttactcgctcggcgtcggaaatgcagcagcctggctaggcatgcccgtgatcgcaccagatactttcgagactatcgcctcgaagctcgagggactagaccacgctgccctgctagcagctgacacagatccgactgtcattgcaggctataaagcgcaaatgaaagacatggcgaccgcgatccgctcacccaatacagcattttacaatcatgtcttaacaggtggtagttcatcggggacaatcgtcgacttgcatcccctcagccgcggaacagtgacaatcaacccagcgaatcccaacagtgaaccactcgtagattatcgtgcattgagtaatccagtggatctcgacatcatggtagagatcctgcgcttcacgaagcgatactatttcgagacgcgacttagctcgatgtcgcctcgtcaggttcaaccgccggattatgttaacgaagcagaggatctgaagggctttctgaaggataacatcagtccctcgtatttccaccctgttgggacttgcgcaatgatgccgagggaactgggcggggtcgttgatgagaatctgaaggtttacggtgtgaaggggctgagagtcgtagatgcgagtatcgagcctgtgcttgttggcgcaaatacgtgccagacgacctatgctgttgctgagaaagctgcggatctcattaaggccgatagctagaaggtcctagtgattcggatatttgaagagaatctctcagaaattgaacgtcttcgtcatgaaaatggtgtacggcacaaaattgtgactttcatacaacccccatgatactgcccacccagtccaattccgaagcgcagtggacaactgaagcagacactcaggtctccatcatctgcttcaaacccgcctctgcagccctataccatcgtcccctctcctcaagttcgtcctccacgcctccaagcgcagcctctttcctacgtcttgcctccttcgcggccgccatactattcgttctctttgtctcaaggggctgcaactcattatgcaatctctcaagttccttctgttttctaggtacctggctctgcagctgctccagctgccgatccagatccgcctcctccctcctcctcttatcaacgagctcctgtgtcttcgcaagcggcagattcatattgggatccgcgctcagccccgcagcatgactctccttcagcatcgccactgcactctccagctcttcgacttttgcgggtaattcctcaagttgaatagtctccgtcttgacacgctcgtacttctgactaagctccacagccattttctcgagctccgcgaccatatcagcgacctcggtcttgagggctttgagttctgccttagcaacgatgttctgtttctcgagatccgcgttctcctgtggagagacgatgagaggtgggtcgccgacgatggcgcggatgaatttctctttggtgacttgctcgacatagctgaagcgtaactttgcaaataactcccggtagtgggtgagatctgcgttcagtgaggcgggtgtggtggcgtcgagggaggagttggatatatctgatgttcgctgtcctgcttgttgcgcattggctatttctgcggatattggctcgctgagcttgaggattgtgacttcttggttagcgactagggcgcggagatctgcgaggatggcttctggggagcgcgtcgccatggtggatgtgagttcggcgttgagcagtaagtcaaagtcgagttcaattatagtgatatttgcttcggatgaagccttgtgagtcgcaatctgctctacggcgtgttctcggcgtcaaaggtgatggacgattgatgtacaaggagcaaatcagtatgaaataccttaatgacgcgaatctcactatatcaattgcatgtggcattcaagtgaggcaatgtttatattgaaccgaaaagggtaagtgggggttgaccagtcagctccttatcgacctatcgtgtctccacccgcaggctatccattcaggtctccaaatcgtcatcccaccatgcgtcggtctctgcgactggcctttctccgacttccagtcctcattcccactaccacaaccatccccatcacctgcttcacatcggccactgttttcgcctctctttcgacatacacgtactgaaagcaacagcccttagattcacatagcgtcttaggggcacctgcgccgcattgtctccctccagacagcgttgcgcttcgccatctctctgcattaagctgcaaacggcccatccatctccatccgtcacatcctctccaccatgtcagccaaatccaatcacgacatcctcacggacgactatgtcgccgagctcctggccaaagaggctagcgactgctctctaaagtactcggcaatgggccttgatgccttcaacaccaacaagcgcccaaccaaccaacccaagcccaacaccagattcctcaacaatatcatccgcgataccaacaaccacaaccgagccctcttggcgaaagaggaagccgagtccagtgcccgactgcgccagctcgaccatgccgaatccaagaagcgagacgaagaggagcgtcgcgagcgcagagccagacccgggccaggcgacacgcgcaagaggatgttaggcgacattgcagcgattctgggcggaccgaacaagaaacggaaacccgatcacgatagcgatgagagaccagaccgcacacgtggccgggaccgtgatcgggacaaggacgagagatcttctcgcaaagaataccacgacgacagaaacggcaggaataactcaccccaaagatccgagcgccgaagtaaggagaatagggtttcagatgcttcggccttgcgagaactcgctgttaagaatggtgaaagtcgcaaggagacgaagctaaggagtgcacctgacgcagacttaatttgtgaaaaagtcgaccgttcacgttggcgatccgttaggaatcgcgatgagccgcggcagccacgagagggaccgcgtgatacaaacagtgcccggaatagataccaatccaccgaccggcgccgtgataagagcgacgaggcacgcgatagcgaccgaccaacagccaataacgactccgattcagaccctctcgaggatatcattggtccgatgcccccatcgcagaccactgttcgtcgccgtggacgtggcgttaattccgccagctctggcatcgacaggcgatttgcgactgattacgaccccataaacgacgcaaatcccgacccagacgaggcccaaggcggagattgggacaatgcagttgaagtcttccgcgatcgacaaaagatgaagctgcaaggcgccgcccgcctccgcgctgccggattcaccgaggagcaagtccgcaagtgggaaaagggcgacaagaaggacgagtctgacgtcaagtgggataaggccggtaccagcagagcatgggatcgcggcaaagtgcttgacggcgaccgatactcatcgcctgaccctgatcttggaacctctgaggacatcattgagtacggccgcttgaagggtacctagaaagtgcctccttggcgtacttatccagagaacatagctcgcatgcaagcaaggtcgcaagcaagctcgtgagctatgcaacactggataaaaaccttttcttcttccaaggcgcccttgaaatcctgggacctatggaatcgatactccgcccagggttgtcaatgaagcgcagttctgttttgctattgggcgagaaattaagcattgcgttatgtacatgaagaaatcaatataattgacaagcatgagtatggcgttatggaaggatcagcattgaattgcgagagcaacaggatccgattgacatttgcgttggcgttctgaggacctgggaggcgggtgttctggctgtcgtgtatatagttgatgaggcgatgcgtgaccgaatatgataagtaatgattctaacctct

SEQ ID NO: 18905 - DNA, 396 bp, Muscodor strobelii
  misc_feature: SGI cDNA ID NO. 566349
  misc_feature: Encodes the peptide sequence at SEQ ID NO 18906
atgcagtccacactcctcctcgccctcctcggagcaacagcccaagcctacacattcgtcggctacgagaacgcctgcggcgaacccggtgaaatggacacattcttcgacgcgcagttcgacgtctgctacgtgtctgtcgccgccggatcctggtccgcctacaaggtgaaagacaccttcatgcccattacttgcagtttctggaccggggactgcaaggggacgcgttctgttgcgttgcttagtcaggaggaatgtcgcgattctggaaagactagcatcgctagttggtcttgtactcgtgatcctgtcgttgttgagagtcagggagaggatgagggagagcatgtgggtgttatggttccggcggaggagttgttggctgggtattag

SEQ ID NO: 18906 - protein, 131 aa, Muscodor strobelii
  misc_feature: SGI Peptide ID NO. 566349
MQSTLLLALLGATAQAYTFVGYENACGEPGEMDTFFDAQFDVCYVSVAAGSWSAYKVKDTFMPITCSFWTGDCKGTRSVALLSQEECRDSGKTSIASWSCTRDPVVVESQGEDEGEHVGVMVPAEELLAGY

SEQ ID NO: 18907 - DNA, 1115 bp, Muscodor strobelii
  misc_feature: SGI EST ID NO. CUFF.44431.0
  misc_feature: Variant of the nucleotide sequence at SEQ ID NO 18905
cgggggacgacagaattcactacatcaacaatcccaacaaatctcacgtgctgctaccatcccacagctatcaacatcgtcgaatcttgacaggttccacgtattcaacacgtactcagaccagcgccagcgaaaccttgatactgccgtcgctcgtgatgacctgtcgggatgtactcaattgtcgccttgtcaattctataaaagggcgcttcgggtggagggctgaccccttttcttcttccccttcatccatccatcttgctccgtggctctcacacaacaaacttcacaacttcctcagtcacaaatcttaagctccatctaagcttcaccacacaatcccttcaacaaccacaaaccccaccaaaccaacccccaaaaatgcagtccacactcctcctcgccctcctcggagcaacagcccaagcctacacattcgtcggctacgagaacgcctgcggcgaacccggtgaaatggacacattcttcgacgcgcagttcgacgtctgctacgtgtctgtcgccgccggatcctggtccgcctacaaggtgaaagacaccttcatgcccattacttgcagtttctggaccggggactgcaaggggacgcgttctgttgcgttgcttagtcaggaggaatgtcgcgattctggaaagactagcatcgctagttggtcttgtactcgtgatcctgtcgttgttgagagtcagggagaggatgagggagagcatgtgggtgttatggttccggcggaggagttgttggctgggtattagggtatggttttggatggctcctgaagggaatgatgggaaggggtggtatggttcacggcgtacgctctatggttggtgtagaaaggggttaaaagctcgaaattggaaaagaagcagggaggaaagtgagggtgacctttacattcgtttctggatcactacaataagggtagtccgttttctcagggcttttgttgctgttgtaaggtgtcctacgtcgcatttccagttttccaatacggcgatatacaagctcatcatggttagctatgtcgcccacggccggccgaacggcttccaccaggattcctcgagcaactatcgatgtgcagtcg

SEQ ID NO: 18908 - DNA, 933 bp, Muscodor strobelii
  misc_feature: SGI cDNA ID NO. 566350
  misc_feature: Encodes the peptide sequence at SEQ ID NO 18909
atgaagaccgcaagtctagaggagcaacacatcactgacagcaactgggacgatccatatccgttgtggtactcgaccgtggttgagtacgccgatcgtcggctcaccgatgtcggtgacaggcttcccgctctctcgagtctcgcgaatctattccatcaagttacgggcgatgaatattgtgcggggctatggaagaacgacatccttcgtggattgctctgggaattcgtagacagcccaatggacagggccaaatcatacgacatacctgaatctacgtccggtaagctggaaatctctgctcatgaacaatatcaaaatgataatctcaaggagactcaaaatggcccgtcgtggagctgggctagcctagaaggctggcttcgattcgcaggcgaggaatacaaaagacacgatgtggtcaaatcgttaccacgggttgtagatattcagatggatgtcgactctgagtatgatcggtttggcaaggttaatggcggtcgcctcaccatcgaggctccttgtcaaacatggacgcaatccatcaagcttcagcaatcgaacatccagctatgtgttgccgaaacacttcacgaggaccattggggttcggagaattttgttgctgagcaccgactaagacataatccctacgaaggacagcttacggtacttatactcatcgactgcacatcgatagttgctcgaggaatcctggtggaagccgttcggccggccgtgggcgacatagctaaccatgatgagcttgtatatcgccgtattggaaaactggaaatgcgacgtaggacaccttacaacagcaacaaaagccctgagaaaacggactacccttattgtagtgatctagaaaatcttgcatatttagaatgtgtcaagggacttcctacgagagtattgactcttgtgtaa

SEQ ID NO: 18909 - protein, 310 aa, Muscodor strobelii
  misc_feature: SGI Peptide ID NO. 566350
  misc_feature (18)..(191): NCBI GI: 256726009 Blast Desc: NECHADRAFT_81484 [Nectria haematococca mpVI 77-13-4]
  misc_feature (20)..(267): NCBI GI: 238494670 Blast Desc: conserved [Aspergillus flavus NRRL3357] gi|220695221|gb|EED51564.1| conserved [Aspergillus flavus NRRL3357]
  misc_feature (8)..(175): NCBI GI: 145252262 Blast Desc: An16g03310 [Aspergillus niger] gi|134083190|emb|CAK42830.1| protein product [Aspergillus niger]
  misc_feature (20)..(175): NCBI GI: 169777515 Blast Desc: [Aspergillus oryzae RIB40] gi|83771960|dbj|BAE62090.1| protein product [Aspergillus oryzae]
  misc_feature (23)..(177): NCBI GI: 256722409 Blast Desc: NECHADRAFT_62329 [Nectria haematococca mpVI 77-13-4]
  misc_feature (23)..(168): NCBI GI: 115398187 Blast Desc: [Aspergillus terreus NIH2624] gi|114192876|gb|EAU34576.1| [Aspergillus terreus NIH2624]
  misc_feature (22)..(172): NCBI GI: 171685458 Blast Desc: protein product [Podospora anserina] gi|170942690|emb|CAP68343.1| protein product [Podospora anserina]
  misc_feature (23)..(183): NCBI GI: 256722781 Blast Desc: NECHADRAFT_5039 [Nectria haematococca mpVI 77-13-4]
  misc_feature (20)..(269): NCBI GI: 169609601 Blast Desc: SNOG_07893 [Phaeosphaeria nodorum SN15] gi|160701876|gb|EAT84169.2| SNOG_07893 [Phaeosphaeria nodorum SN15]
  misc_feature (6)..(178): NCBI GI: 238487926 Blast Desc: ankyrin repeat-containing protein, [Aspergillus flavus NRRL3357] gi|220700080|gb|EED56419.1| ankyrin repeat-containing protein, [Aspergillus flavus NRRL3357]
MKTASLEEQHITDSNWDDPYPLWYSTVVEYADRRLTDVGDRLPALSSLANLFHQVTGDEYCAGLWKNDILRGLLWEFVDSPMDRAKSYDIPESTSGKLEISAHEQYQNDNLKETQNGPSWSWASLEGWLRFAGEEYKRHDVVKSLPRVVDIQMDVDSEYDRFGKVNGGRLTIEAPCQTWTQSIKLQQSNIQLCVAETLHEDHWGSENFVAEHRLRHNPYEGQLTVLILIDCTSIVARGILVEAVRPAVGDIANHDELVYRRIGKLEMRRRTPYNSNKSPEKTDYPYCSDLENLAYLECVKGLPTRVLTLV

SEQ ID NO: 18910 - DNA, 1320 bp, Muscodor strobelii
  misc_feature: SGI cDNA ID NO. 566351
  misc_feature: Encodes the peptide sequence at SEQ ID NO 18911
tcgaccgcccagtcctacaagatgaaggccatgtccgagttcctgcgcaagaagcacgacgccaagaccaagctgtacgacgactgcctgtatactgtctaccacaccccgctgctgtccggcgtcgacggctaccgcgtccgcagccggcccatcctcaagtcccccggcaccggcaagaccgtcctggacctcgagatcgagcggagcgagctgcgggacgagcacatgggctactacgacgagtacggcacgagccccgacaacgacaacgacagagacagagaccaccgacggagttcagggggttcagggggttcagacgagaggccagacacgcacagggcaagcaacagcaacaacaaccaacaccaacaccatcgcgacagacacagcagccccgtcaaccggttcgtgcccgacgccaagcagttcgccgagatcttcatcttctcctacggcgtcgtcgtcttctggaacttcaccgagcagcaggagaaggccatcctcgccgacatcaccttcgccgagagcgagatcggcacctcgctcgtcacccggcccctcgagcagagcgactacgagacggaagagttccacttcgagtacaacaccgacgtcaagcgcccgcgtatcttcaacgacatgatcaccctgctgccgaggtctgaccacatggtgcgcttgaccatcagccacgccatcgcccagagcaccaagctctgcttcttcgaggagcgcatgtcggacactctgacggacgcccagcacgtacccaaaaccctggcgttgactggacagctgaacatgacgaggacggagattgtcaagattctagggcggttgttcaagagtcgggttgagatcaatctatcatccaatattctcgatgtccccaacttcttctgggactctgaacccacactgcatccgctctacgtcgccatccgcgactatctggagatcgacccgcgcaccaaggtcctcaacgagcggtgccgcgtgtttctagacctcgccgagatcctatcggactctgtcgccgactccaagatgagctacataacctggatcatcatcgtcctcatcatcatcagcatcctcgtcaccgtcaccgaggtcgccctgcgcttcggtatactgtccaaggagaagggcaaggggaataacagtggaggggtcacgttgttgccgtcgctcgaggaacggtccaatctcacggcagaggactggagggcttgggggaggggtctgagcgaggcggagcgggcagcggtgtgtggtgccgagtatatcggtgtgacgtatgctgggatctga

SEQ ID NO: 18911 - protein, 439 aa, Muscodor strobelii
  misc_feature: SGI Peptide ID NO. 566351
  misc_feature (97)..(331): Pfam Id: PF02582 Pfam Desc: Uncharacterised ACR, YagE family COG1723
  misc_feature (145)..(331): Pfam Id: PF02582 Pfam Desc: Uncharacterised ACR, YagE family COG1723
  misc_feature (2)..(439): NCBI GI: 171695380 Blast Desc: protein product [Podospora anserina] gi|170947932|emb|CAP60096.1| protein product [Podospora anserina]
  misc_feature (2)..(438): NCBI GI: 39943310 Blast Desc: MGG_03735 [Magnaporthe grisea 70-15] gi|145009666|gb|EDJ94322.1| MGG_03735 [Magnaporthe grisea 70-15]
  misc_feature (2)..(439): NCBI GI: 85117500 Blast Desc: NCU08370 [Neurospora crassa OR74A] gi|28927079|gb|EAA36037.1| conserved [Neurospora crassa OR74A]
  misc_feature (2)..(439): NCBI GI: 116182262 Blast Desc: CHGG_01759 [Chaetomium globosum CBS 148.51] gi|88186056|gb|EAQ93524.1| CHGG_01759 [Chaetomium globosum CBS 148.51]
  misc_feature (2)..(392): NCBI GI: 256730588 Blast Desc: [Nectria haematococca mpVI 77-13-4]
  misc_feature (2)..(390): NCBI GI: 46109232 Blast Desc: FG01498.1 [Gibberella zeae PH-1]
  misc_feature (2)..(428): NCBI GI: 154299885 Blast Desc: BC1G_10833 [Botryotinia fuckeliana B05.10] gi|150857113|gb|EDN32305.1| BC1G_10833 [Botryotinia fuckeliana B05.10]
  misc_feature (2)..(396): NCBI GI: 169622107 Blast Desc: SNOG_14268 [Phaeosphaeria nodorum SN15] gi|160704696|gb|EAT78505.2| SNOG_14268 [Phaeosphaeria nodorum SN15]
  misc_feature (2)..(389): NCBI GI: 189197415 Blast Desc: sporulation protein RMD8 [Pyrenophora tritici-repentis Pt-1C-BFP] gi|187980993|gb|EDU47619.1| sporulation protein RMD8 [Pyrenophora tritici-repentis Pt-1C-BFP]
  misc_feature (2)..(433): NCBI GI: 156053620 Blast Desc: SS1G_05657 [Sclerotinia sclerotiorum 1980] gi|154703438|gb|EDO03177.1| SS1G_05657 [Sclerotinia sclerotiorum 1980]
STAQSYKMKAMSEFLRKKHDAKTKLYDDCLYTVYHTPLLSGVDGYRVRSRPILKSPGTGKTVLDLEIERSELRDEHMGYYDEYGTSPDNDNDRDRDHRRSSGGSGGSDERPDTHRASNSNNNQHQHHRDRHSSPVNRFVPDAKQFAEIFIFSYGVVVFWNFTEQQEKAILADITFAESEIGTSLVTRPLEQSDYETEEFHFEYNTDVKRPRIFNDMITLLPRSDHMVRLTISHAIAQSTKLCFFEERMSDTLTDAQHVPKTLALTGQLNMTRTEIVKILGRLFKSRVEINLSSNILDVPNFFWDSEPTLHPLYVAIRDYLEIDPRTKVLNERCRVFLDLAEILSDSVADSKMSYITWIIIVLIIISILVTVTEVALRFGILSKEKGKGNNSGGVTLLPSLEERSNLTAEDWRAWGRGLSEAERAAVCGAEYIGVTYAGI

SEQ ID NO: 18912 - DNA, 1749 bp, Muscodor strobelii
  misc_feature: SGI EST ID NO. CUFF.44495.0
  misc_feature: Variant of the nucleotide sequence at SEQ ID NO 18910
ctcgaccgcccagtcctacaagatgaaggccatgtccgagttcctgcgcaagaagcacgacgccaagaccaagctgtacgacgactgcctgtatactgtctaccacaccccgctgctgtccggcgtcgacggctaccgcgtccgcagccggcccatcctcaagtcccccggcaccggcaagaccgtcctggacctcgagatcgagcggagcgagctgcgggacgagcacatgggctactacgacgagtacggcacgagccccgacaacgacaacgacagagacagagaccaccgacggagttcagggggttcagggggttcagacgagaggccagacacgcacagggcaagcaacagcaacaacaaccaacaccaacaccatcgcgacagacacagcagccccgtcaaccggttcgtgcccgacgccaagcagttcgccgagatcttcatcttctcctacggcgtcgtcgtcttctggaacttcaccgagcagcaggagaaggccatcctcgccgacatcaccttcgccgagagcgagatcggcacctcgctcgtcacccggcccctcgagcagagcgactacgagacggaagagttccacttcgagtacaacaccgacgtcaagcgcccgcgtatcttcaacgacatgatcaccctgctgccgaggtctgaccacatggtgcgcttgaccatcagccacgccatcgcccagagcaccaagctctgcttcttcgaggagcgcatgtcggacactctgacggacgcccagcacgtacccaaaaccctggcgttgactggacagctgaacatgacgaggacggagattgtcaagattctagggcggttgttcaagagtcgggttgagatcaatctatcatccaatattctcgatgtccccaacttcttctgggactctgaacccacactgcatccgctctacgtcgccatccgcgactatctggagatcgacccgcgcaccaaggtcctcaacgagcggtgccgcgtgtttctagacctcgccgagatcctatcggactctgtcgccgactccaagatgagctacataacctggatcatcatcgtcctcatcatcatcagcatcctcgtcaccgtcaccgaggtcgccctgcgcttcggtatactgtccaaggagaagggcaaggggaataacagtggaggggtcacgttgttgccgtcgctcgaggaacggtccaatctcacggcagaggactggagggcttgggggaggggtctgagcgaggcggagcgggcagcggtgtgtggtgccgagtatatcggtgtgacgtatgctgggatctgattgatttggggcgtgtaatagttgtaatggggagttcttcatggcatgcaacagattagggatggactcggcgttgtcaggcgtattatacccccttttcgggacttttcggcgctggacgaggcaagaaaaaggcggcggtaccgtgacggattatctttatcttgtgtttatcactgtaatagaatcataattatgctaaagtttaggcactcacatctaatagctcttttcgtcttcattacctaccttatgtatacctgacgagattgggttccaagacgaagtggcatatgtgaccagaatcgtgaggagtgacgtcatctcttccaccccacgacaagtcgaagtttgtatctactgatgcacgaggggtctctctgaagagaacacacgataaggtgtattcgagacttgtgtctcttgag

SEQ ID NO: 18913 - DNA, 957 bp, Muscodor strobelii
  misc_feature: SGI cDNA ID NO. 566352
  misc_feature: Elevated expression when VOC is produced
  misc_feature: Encodes the peptide sequence at SEQ ID NO 18914
atggaccgccccaacaagcccggcaagctcgccacgaccccgggccttcctccccagcccaccgtcaacacctcggacgacaacgcgcgcgtcacggccgtcctccccacgggcgagagcgtcgagatcctgctcttcggcgccaccgtcatcagctggaaggaccgcgccggccacgagaagctctgggtgtcggacgcggccaagctcgacggctccaaggcggtgcggggcggcatccctctcgtcttccccgtcttcggcacggcccccgaccacgcggcgacctcgaggctgccgcagcacgggttcgcgcgcaactccaagtgggagttcctcggcaagtccagctccgagtcggcccccttcgccggcgctagcgacgcctccgtcaagctcgacttcggcctgtcgtccgccacgctcgacgacgacaagaggcagctctggccctacaccttctccgccatctacagcgtcaccctctcgcccgagggcctcggcaccggcctcgtcattacgaacgacgggacccagtccttcgagtgccaggccctgctgcacacctacctgcgcgtcaacgacatcgcccaggtcgacgtcaccggcctcgagggctcccagtacgtcgacaaggtggacggcgccaagaccaagatccagtccggccccctcaccttcgccggcgagaccgacagcgtctacacgcccgccaagggccccgcccaccccgtcgtcgtccgcgaggctggctccgccgtcttcagcatcgtgcgcgacaaccttaaggacgttgtggtgtggaacccctggaccgacaaggcggccggcatgggcgacttcgagcccaaggacggcttcaaccagatgatctgcgtcgaggccggctccgtccgcgagtgggtcaccctcgagcccggcgatgtcttggacggagctcagaccatctcctactag

SEQ ID NO: 18914 - protein, 318 aa, Muscodor strobelii
  misc_feature: SGI Peptide ID NO. 566352
  misc_feature (29)..(317): Pfam Id: PF01263 Pfam Desc: Aldose 1-epimerase
  misc_feature (1)..(316): NCBI GI: 39946606 Blast Desc: MGG_08597 [Magnaporthe grisea 70-15] gi|145012459|gb|EDJ97115.1| MGG_08597 [Magnaporthe grisea 70-15]
  misc_feature (1)..(317): NCBI GI: 256730791 Blast Desc: [Nectria haematococca mpVI 77-13-4]
  misc_feature (1)..(317): NCBI GI: 171695246 Blast Desc: protein product [Podospora anserina] gi|170947865|emb|CAP60029.1| protein product [Podospora anserina]
  misc_feature (1)..(317): NCBI GI: 46109206 Blast Desc: FG01485.1 [Gibberella zeae PH-1]
  misc_feature (1)..(316): NCBI GI: 85111450 Blast Desc: NCU02786 [Neurospora crassa OR74A] gi|28925694|gb|EAA34706.1| conserved [Neurospora crassa OR74A]
  misc_feature (1)..(317): NCBI GI: 154323734 Blast Desc: BC1G_00266 [Botryotinia fuckeliana B05.10] gi|150842495|gb|EDN17688.1| BC1G_00266 [Botryotinia fuckeliana B05.10]
  misc_feature (1)..(317): NCBI GI: 156056899 Blast Desc: SS1G_04180 [Sclerotinia sclerotiorum 1980] gi|154701966|gb|EDO01705.1| SS1G_04180 [Sclerotinia sclerotiorum 1980]
  misc_feature (1)..(316): NCBI GI: 240104750 Blast Desc: Aldose 1-epimerase family protein [Coccidioides posadasii C735 delta SOWgp]
  misc_feature (1)..(316): NCBI GI: 259486996 Blast Desc: TPA: apospory-associated protein c (AFU_orthologue; AFUA_4G08880) [Aspergillus nidulans FGSC A4]
  misc_feature (1)..(316): NCBI GI: 226286114 Blast Desc: conserved [Paracoccidioides brasiliensis Pb01]
  misc_feature: Useful for introducing or modulating the production of volatile compounds
MDRPNKPGKLATTPGLPPQPTVNTSDDNARVTAVLPTGESVEILLFGATVISWKDRAGHEKLWVSDAAKLDGSKAVRGGIPLVFPVFGTAPDHAATSRLPQHGFARNSKWEFLGKSSSESAPFAGASDASVKLDFGLSSATLDDDKRQLWPYTFSAIYSVTLSPEGLGTGLVITNDGTQSFECQALLHTYLRVNDIAQVDVTGLEGSQYVDKVDGAKTKIQSGPLTFAGETDSVYTPAKGPAHPVVVREAGSAVFSIVRDNLKDVVVWNPWTDKAAGMGDFEPKDGFNQMICVEAGSVREWVTLEPGDVLDGAQTISY

SEQ ID NO: 18915 - DNA, 5715 bp, Muscodor strobelii
  misc_feature: SGI EST ID NO. CUFF.44768.0
  misc_feature: Variant of the nucleotide sequence at SEQ ID NO 18913
tctagacctgcaagagcaccctccaacctggcacagagcatttcaggttcagaatgtttcatggtaggaccccaccgactactatgtgtgccacccccacagcgggtgttttagatgttagcggcccctccagtcgtgatactaaatccagagttaccccgccatttgctgtcaccaacaagagcagctgcagctttcccatcttcccgtccatcccacctcgaaccctcaccctcaccctcaccatcacccttatccttatccttatcacatcgcagctcgtcctgccttccgtcttgtctctctagcttttttgtcatttacgcagagcagacacgtcagatatcttgcatccttcgtcccctcctccatacagacagacgtctgcaccatcgacaccgggatcttcaacctcgtcgtcgcaataatagcaacaacaataacagcaacaaacagacccgccacgaagctccaggtctctcgtaactccgtcaatctatcgtccccatcgcccaccatggaccgccccaacaagcccggcaagctcgccacgaccccgggccttcctccccagcccaccgtcaacacctcggacgacaacgcgcgcgtcacggccgtcctccccacgggcgagagcgtcgagatcctgctcttcggcgccaccgtcatcagctggaaggaccgcgccggccacgagaagctctgggtgtcggacgcggccaagctcgacggctccaaggcggtgcggggcggcatccctctcgtcttccccgtcttcggcacggcccccgaccacgcggcgacctcgaggctgccgcagcacgggttcgcgcgcaactccaagtgggagttcctcggcaagtccagctccgagtcggcccccttcgccggcgctagcgacgcctccgtcaagctcgacttcggcctgtcgtccgccacgctcgacgacgacaagaggcagctctggccctacaccttctccgccatctacagcgtcaccctctcgcccgagggcctcggcaccggcctcgtcattacgaacgacgggacccagtccttcgagtgccaggccctgctgcacacctacctgcgcgtcaacgacatcgcccaggtcgacgtcaccggcctcgagggctcccagtacgtcgacaaggtggacggcgccaagaccaagatccagtccggccccctcaccttcgccggcgagaccgacagcgtctacacgcccgccaagggccccgcccaccccgtcgtcgtccgcgaggctggctccgccgtcttcagcatcgtgcgcgacaaccttaaggacgttgtggtgtggaacccctggaccgacaaggcggccggcatgggcgacttcgagcccaaggacggcttcaaccagatgatctgcgtcgaggccggctccgtccgcgagtgggtcaccctcgagcccggcgatgtcttggacggagctcagaccatctcctactagctacacggtctcgagagtcgcgtgccgagtatgctatgacgacgagaggaggaaggatggacgaggggaaatgtataatgaacgctatggggctcttctttggcgtatttgctttctagagctgctgcagatattatgagaaggcgttccttttgtgactgcgtcgttcagactgcgtcgttcagactgcgccgtctatgttgaccgttgacgcagggcttacgcagggcttagaggagttgctcgtatgcgaaaaggaagcaggcaagtcagccagtgcgtcggtacctacctactttacagtttacgaatgaatgaatttgatttgtgccccccctgaatgatgcctcaatgatgccgtgtgtgtttctgattgtaacgtgaaagccaattgaatcgaatagtcctgtattagtatctagcgggggagtccatgtggttggttggacgcaatcatgatgccaagtcgccgcagttatgcgcgagtagcccagctgaatgcctaactcgaggcacacttcccatcgtggcgaccgtaggcatggaatcagctctaacctcactaacctctttaaatcaccgagcatcgagtgtctcattacttatattgtcgtgctgctcacactccatgcctgcgacgggtgtgatggactcgaaataacatctgacgagctggttggtgtcggatctgttcacggaatacgggactgccagctacatcgcgcatgacgccaacgcgtgcacaatctcatagatacggcatcattctcacttcaatctcatttcttcgagtgttgccaccttttccaaacacactacgatgaatttcatgcgatcgcgggcgcgggggatgagagcgaactccagcaacaacacatcgacccctgacagcacgacgacaccaacaaacacgatgaatagccctccgacatacgaacaaagccaacacgtctcactgcgcgaggtaatcgaaggcgcaaaacacatggcgcctcaactatggccctcgtcctcatcctacccttctccctcccctacgacatctgcttctccgcctcgctcctcattatcatcacttctcgccagactccgggatctcaggatcagacaacagcaccatcaagagccccaggaagccatagtccagattctcgagcagctagcagcatccatgggtggagatagaccgtttctagaccgcgtgcgcgagttctcagagttctattttagtccctacaccataagtgacaatctcggttctcgggactcgaaaagtgggctgctaggtgatatacgtgataaggcacaccaaaacgaagatgaaggactgtcgagggaagtgaatgtcgcgataccactgcaacagcaacaaaaggccctcgtctcgtcgctccccgtgccccgggaaagcgtagccctcatactctgtgctcgggtcctagaggagtactatgcgggactgaaacaccgggatccgatactcattccatcaagagacggtagtggtgatgatcccgaaaagggagacaatgacgtcaatctcggcgcaacatctctaaaaacccacctctgccaggtcgcagcatgtagcgtctcaggatgttcctgcatggactacgacgacgcctctaccgccctctcacctcaaccacattatctctgtcactgcgcgcatgatcgatcctcacatgcaaacccaggcatctcccgtctcctcacgcactacacaaactggtgccaatccagctatcgctccctccgtcaccgaggcaccaacggcgcagcgaagagcagacacgccaatatcgaggcctgtacggcgcagggctgtgcatgtccagatctagataaggggaggcgtacggggcggtgcgcgaggtgtggtcattattgcgaggtgcattgtctcttggtgggtgcctctggctcagctgataacggtagaagtggtggagggaaggagacaggagtggcgagtagagcgaggcagagacggaagggaaagggacagtgggagttgagttggatactgattgagaatggatatcttctcctcaagccttgattggtgcatacactgcgctctgtactacctaaatagctgcagacgaggaagaagaggagtacgagattaagcaaggtacatttgattcattactcgttatctcatctcacttagcagacatgtactttactcagccagaaaagctatggctctagtaggtcgggtatgtggccaatttcatgtacaaccagactcggtaggcagattcccaagtccttttgttcccactcactcgaaatgcaatacgacatggaattctacaacttgatggacagatcccaggcatccagtgcgacggcgacacctgtgacaagggcggaatacacgaccaagatggccatactgactgtggggctgacgtcgagggtggggacagtcatgttgacgagaccagtcacaaggttggcgacaaggaaaatggccaacccgtttctgttgtaggcacgaaggatgcgactcgtggctgtctcgtaggcctcctgttccgtcttggcgtcgggggccgtgtggaatgacgggaaaaagatggtttcaacgagacagcaggctaggagttgcgtagagttgaaggcagcaacccacaggatataaggtaggttggccaagcgacgagacacatccaatccagctccgtaagagaaactggtcacagaaaggtagagggcagtccagacgatagaccatatacccatcgtcttcaggagggtcacacgctgactgctctgcaaatggctgttggaatcgatgcttcgaggcaagactatcattcccatgtgttgaccagtcaggaaaatggccagatatcccacgaagctacagatcccctctctgttcatggaaaagagatctgtgcggggggcagtgagtatgaaggccttgagggatgtgctctccaagacaacctgatacgagacacccaatatgatggccaaagctgcgaacgagggaacaaacttgagggtcagaagggactgaaacagggcgatgaagggaggcaggaatcccaaggtgaagaagaagttccagtgcacgccatactctgtgacatgctcggcgtaatcgagccccttgacgctgatgagacggatgacgcccaggaccaaaagcggcagcgagtggcgcatggaatagacgagtcgctgcaggaggggagtggtgtggccgtcagcccgctctttcagccatggtctcgccgccaccacaccggccgagtagacaaaggagcctacaccgaggtccatcagggaggtgccccacgtctcgaccttggcgaagcgacgggggaagatgcggaagtcgacggcgaggatggccagacatgtcgagaccatcagcatggatcgataggtggtcaagaagggcttggtcgagagggggctcaatgctatcgacgaccgcctctgggcctggacagtcgggggcagcttctgcttcttcttggatgcagtcggcacggggggcagggcgtagacgaagatggcggggacgaggacaaagccgcagaggagaagtggcgtgccggagtagagggtgatggcgaggaggggcacgaggatgttgaggaggaagtcggcgaccaggctcaggggcgtgtagggcttgaagaaggactggcgcgactggaggacggaccacaggacgaaggcgatctggaatggatgagtcacccgaaagacgcagagcagagcagagcagagcagagcagagcagaggacagtggacacatacaggcgcaacggcagtcacatagttgatctccagccccgaaccccccgagagattggacacaaagttctccttcagctgcttgtagctcgtcgggttcgaagaggccgccattgcgagtcgcgcgataggaaaaccggtgacaaagagacgagacgagacgggcggagagatctagagcggtcgaaacatggcagaaagaaacgaaaaagagaagtgggaacgacagacgataagtgatacgtggtatgtcgagatggcggcgacggcgacgtatatcaactaactgaggactgaggtcatgtcgccgtagggtgtcgttgtcgttgtcgatgtcgtcgtgtgtgtcacgttccgattgtggaaagaggcaaccgttgcagaagcggtacctccctccccctggccatggccgatgacgatgcgacgttagccgggtccacccttccgc

SEQ ID NO: 18916 - DNA, 1152 bp, Muscodor strobelii
  misc_feature: SGI cDNA ID NO. 566353
  misc_feature: Elevated expression when VOC is produced
  misc_feature: Encodes the peptide sequence at SEQ ID NO 18917
atgaatagccctccgacatacgaacaaagccaacacgtctcactgcgcgaggtaatcgaaggcgcaaaacacatggcgcctcaactatggccctcgtcctcatcctacccttctccctcccctacgacatctgcttctccgcctcgctcctcattatcatcacttctcgccagactccgggatctcaggatcagacaacagcaccatcaagagccccaggaagccatagtccagattctcgagcagctagcagcatccatgggtggagatagaccgtttctagaccgcgtgcgcgagttctcagagttctattttagtccctacaccataagtgacaatctcggttctcgggactcgaaaagtgggctgctaggtgatatacgtgataaggcacaccaaaacgaagatgaaggactgtcgagggaagtgaatgtcgcgataccactgcaacagcaacaaaaggccctcgtctcgtcgctccccgtgccccgggaaagcgtagccctcatactctgtgctcgggtcctagaggagtactatgcgggactgaaacaccgggatccgatactcattccatcaagagacggtagtggtgatgatcccgaaaagggagacaatgacgtcaatctcggcgcaacatctctaaaaacccacctctgccaggtcgcagcatgtagcgtctcaggatgttcctgcatggactacgacgacgcctctaccgccctctcacctcaaccacattatctctgtcactgcgcgcatgatcgatcctcacatgcaaacccaggcatctcccgtctcctcacgcactacacaaactggtgccaatccagctatcgctccctccgtcaccgaggcaccaacggcgcagcgaagagcagacacgccaatatcgaggcctgtacggcgcagggctgtgcatgtccagatctagataaggggaggcgtacggggcggtgcgcgaggtgtggtcattattgcgaggtgcattgtctcttggtgggtgcctctggctcagctgataacggtagaagtggtggagggaaggagacaggagtggcgagtagagcgaggcagagacggaagggaaagggacagtgggagttgagttggatactgattgagaatggatatcttctcctcaagccttga

SEQ ID NO: 18917 - protein, 383 aa, Muscodor strobelii
  misc_feature: SGI Peptide ID NO. 566353
  misc_feature: Useful for introducing or modulating the production of volatile compounds
MNSPPTYEQSQHVSLREVIEGAKHMAPQLWPSSSSYPSPSPTTSASPPRSSLSSLLARLRDLRIRQQHHQEPQEAIVQILEQLAASMGGDRPFLDRVREFSEFYFSPYTISDNLGSRDSKSGLLGDIRDKAHQNEDEGLSREVNVAIPLQQQQKALVSSLPVPRESVALILCARVLEEYYAGLKHRDPILIPSRDGSGDDPEKGDNDVNLGATSLKTHLCQVAACSVSGCSCMDYDDASTALSPQPHYLCHCAHDRSSHANPGISRLLTHYTNWCQSSYRSLRHRGTNGAAKSRHANIEACTAQGCACPDLDKGRRTGRCARCGHYCEVHCLLVGASGSADNGRSGGGKETGVASRARQRRKGKGQWELSWILIENGYLLLKP

SEQ ID NO: 18918 - DNA, 5715 bp, Muscodor strobelii; identical to SEQ ID NO: 18915
  misc_feature: SGI EST ID NO. CUFF.44768.0
  misc_feature: Variant of the nucleotide sequence at SEQ ID NO 18916

SEQ ID NO: 18919 - DNA, 1503 bp, Muscodor strobelii
  misc_feature: SGI cDNA ID NO. 566354
  misc_feature: Encodes the peptide sequence at SEQ ID NO 18920
atggcggcctcttcgaacccgacgagctacaagcagctgaaggagaactttgtgtccaatctctcggggggttcggggctggagatcaactatgtgactgccgttgcgcctatcgccttcgtcctgtggtccgtcctccagtcgcgccagtccttcttcaagccctacacgcccctgagcctggtcgccgacttcctcctcaacatcctcgtgcccctcctcgccatcaccctctactccggcacgccacttctcctctgcggctttgtcctcgtccccgccatcttcgtctacgccctgccccccgtgccgactgcatccaagaagaagcagaagctgcccccgactgtccaggcccagaggcggtcgtcgatagcattgagccccctctcgaccaagcccttcttgaccacctatcgatccatgctgatggtctcgacatgtctggccatcctcgccgtcgacttccgcatcttcccccgtcgcttcgccaaggtcgagacgtggggcacctccctgatggacctcggtgtaggctcctttgtctactcggccggtgtggtggcggcgagaccatggctgaaagagcgggctgacggccacaccactcccctcctgcagcgactcgtctattccatgcgccactcgctgccgcttttggtcctgggcgtcatccgtctcatcagcgtcaaggggctcgattacgccgagcatgtcacagagtatggcgtgcactggaacttcttcttcaccttgggattcctgcctcccttcatcgccctgtttcagtcccttctgaccctcaagtttgttccctcgttcgcagctttggccatcatattgggtgtctcgtatcaggttgtcttggagagcacatccctcaaggccttcatactcactgccccccgcacagatctcttttccatgaacagagaggggatctgtagcttcgtgggatatctggccattttcctgactggtcaacacatgggaatgatagtcttgcctcgaagcatcgattccaacagccatttgcagagcagtcagcgtgtgaccctcctgaagacgatgggtatatggtctatcgtctggactgccctctacctttctgtgaccagtttctcttacggagctggattggatgtgtctcgtcgcttggccaacctaccttatatcctgtgggttgctgccttcaactctacgcaactcctagcctgctgtctcgttgaaaccatctttttcccgtcattccacacggcccccgacgccaagacggaacaggaggcctacgagacagccacgagtcgcatccttcgtgcctacaacagaaacgggttggccattttccttgtcgccaaccttgtgactggtctcgtcaacatgactgtccccaccctcgacgtcagccccacagtcagtatggccatcttggtcgtgtattccgcccttgtcacaggtgtcgccgtcgcactggatgcctgggatctgtccatcaagttgtag

SEQ ID NO: 18920 - protein, 500 aa, Muscodor strobelii
  misc_feature: SGI Peptide ID NO. 566354
  misc_feature (309)..(460): Pfam Id: PF06423 Pfam Desc: GWT1
  misc_feature (382)..(460): Pfam Id: PF06423 Pfam Desc: GWT1
  misc_feature (309)..(335): Pfam Id: PF06423 Pfam Desc: GWT1
  misc_feature (6)..(500): NCBI GI: 46107634 Blast Desc: FG00700.1 [Gibberella zeae PH-1] gi|110808535|sp|Q4IQ08.1|GWT1_GIBZE RecName: Full=GPI-anchored wall transfer protein 1
  misc_feature (9)..(500): NCBI GI: 116182616 Blast Desc: CHGG_01936 [Chaetomium globosum CBS 148.51] gi|110808534|sp|Q2HCW8.1|GWT1_CHAGB RecName: Full=GPI-anchored wall transfer protein 1 gi|88186233|gb|EAQ93701.1| CHGG_01936 CBS
  misc_feature (3)..(500): NCBI GI: 171694908 Blast Desc: protein product [Podospora anserina] gi|170947696|emb|CAP59858.1| protein product [Podospora anserina]
  misc_feature (4)..(500): NCBI GI: 85110982 Blast Desc: NCU00913 [Neurospora crassa OR74A] gi|74617715|sp|Q7SCL1.1|GWT1_NEUCR RecName: Full=GPI-anchored wall transfer protein 1 gi|28925439|gb|EAA34484.1| conserved
  misc_feature (9)..(500): NCBI GI: 154295298 Blast Desc: BC1G_13230 [Botryotinia fuckeliana B05.10] gi|150844097|gb|EDN19290.1| BC1G_13230 [Botryotinia fuckeliana B05.10]
  misc_feature (9)..(500): NCBI GI: 156040627 Blast Desc: SS1G_12330 [Sclerotinia sclerotiorum 1980] gi|154696386|gb|EDN96124.1| SS1G_12330 [Sclerotinia sclerotiorum 1980]
  misc_feature (4)..(500): NCBI GI: 225561554 Blast Desc: GPI-anchored wall transfer protein [Ajellomyces capsulatus G186AR]
  misc_feature (4)..(500): NCBI GI: 240274661 Blast Desc: GPI-anchored wall transfer protein [Ajellomyces capsulatus H143]
  misc_feature (7)..(500): NCBI GI: 261189937 Blast Desc: GPI-anchored wall transfer protein 1 [Ajellomyces dermatitidis SLH14081] gi|239591615|gb|EEQ74196.1| GPI-anchored wall transfer protein 1 [Ajellomyces dermatitidis SLH14081]
  misc_feature (7)..(500): NCBI GI: 239612855 Blast Desc: GPI-anchored wall transfer protein 1 [Ajellomyces dermatitidis ER-3]
MAASSNPTSYKQLKENFVSNLSGGSGLEINYVTAVAPIAFVLWSVLQSRQSFFKPYTPLSLVADFLLNILVPLLAITLYSGTPLLLCGFVLVPAIFVYALPPVPTASKKKQKLPPTVQAQRRSSIALSPLSTKPFLTTYRSMLMVSTCLAILAVDFRIFPRRFAKVETWGTSLMDLGVGSFVYSAGVVAARPWLKERADGHTTPLLQRLVYSMRHSLPLLVLGVIRLISVKGLDYAEHVTEYGVHWNFFFTLGFLPPFIALFQSLLTLKFVPSFAALAIILGVSYQVVLESTSLKAFILTAPRTDLFSMNREGICSFVGYLAIFLTGQHMGMIVLPRSIDSNSHLQSSQRVTLLKTMGIWSIVWTALYLSVTSFSYGAGLDVSRRLANLPYILWVAAFNSTQLLACCLVETIFFPSFHTAPDAKTEQEAYETATSRILRAYNRNGLAIFLVANLVTGLVNMTVPTLDVSPTVSMAILVVYSALVTGVAVALDAWDLSIKL

SEQ ID NO: 18921 - DNA, 5636 bp, Muscodor strobelii
  misc_feature: SGI EST ID NO. CUFF.44769.1
  misc_feature: Variant of the nucleotide sequence at SEQ ID NO 18919
gcggaagggtggacccggctaacgtcgcatcgtcatcggccatggccagggggagggaggtaccgcttctgcaacggttgcctctttccacaatcggaacgtgacacacacgacgacatcgacaacgacaacgacaccctacggcgacatgacctcagtcctcagttagttgatatacgtcgccgtcgccgccatctcgacataccacgtatcacttatcgtctgtcgttcccacttctctttttcgtttctttctgccatgtttcgaccgctctagatctctccgcccgtctcgtctcgtctctttgtcaccggttttcctatcgcgcgactcgcaatggcggcctcttcgaacccgacgagctacaagcagctgaaggagaactttgtgtccaatctctcggggggttcggggctggagatcaactatgtgactgccgttgcgcctatcgccttcgtcctgtggtccgtcctccagtcgcgccagtccttcttcaagccctacacgcccctgagcctggtcgccgacttcctcctcaacatcctcgtgcccctcctcgccatcaccctctactccggcacgccacttctcctctgcggctttgtcctcgtccccgccatcttcgtctacgccctgccccccgtgccgactgcatccaagaagaagcagaagctgcccccgactgtccaggcccagaggcggtcgtcgatagcattgagccccctctcgaccaagcccttcttgaccacctatcgatccatgctgatggtctcgacatgtctggccatcctcgccgtcgacttccgcatcttcccccgtcgcttcgccaaggtcgagacgtggggcacctccctgatggacctcggtgtaggctcctttgtctactcggccggtgtggtggcggcgagaccatggctgaaagagcgggctgacggccacaccactcccctcctgcagcgactcgtctattccatgcgccactcgctgccgcttttggtcctgggcgtcatccgtctcatcagcgtcaaggggctcgattacgccgagcatgtcacagagtatggcgtgcactggaacttcttcttcaccttgggattcctgcctcccttcatcgccctgtttcagtcccttctgaccctcaagtttgttccctcgttcgcagctttggccatcatattgggtgtctcgtatcaggttgtcttggagagcacatccctcaaggccttcatactcactgccccccgcacagatctcttttccatgaacagagaggggatctgtagcttcgtgggatatctggccattttcctgactggtcaacacatgggaatgatagtcttgcctcgaagcatcgattccaacagccatttgcagagcagtcagcgtgtgaccctcctgaagacgatgggtatatggtctatcgtctggactgccctctacctttctgtgaccagtttctcttacggagctggattggatgtgtctcgtcgcttggccaacctaccttatatcctgtgggttgctgccttcaactctacgcaactcctagcctgctgtctcgttgaaaccatctttttcccgtcattccacacggcccccgacgccaagacggaacaggaggcctacgagacagccacgagtcgcatccttcgtgcctacaacagaaacgggttggccattttccttgtcgccaaccttgtgactggtctcgtcaacatgactgtccccaccctcgacgtcagccccacagtcagtatggccatcttggtcgtgtattccgcccttgtcacaggtgtcgccgtcgcactggatgcctgggatctgtccatcaagttgtagaattccatgtcgtattgcatttcgagtgagtgggaacaaaaggacttgggaatctgcctaccgagtctggttgtacatgaaattggccacatacccgacctactagagccatagcttttctggctgagtaaagtacatgtctgctaagtgagatgagataacgagtaatgaatcaaatgtaccttgcttaatctcgtactcctcttcttcctcgtctgcagctatttaggtagtacagagcgcagtgtatgcaccaatcaaggcttgaggagaagatatccattctcaatcagtatccaactcaactcccactgtccctttcccttccgtctctgcctcgctctactcgccactcctgtctccttccctccaccacttctaccgttatcagctgagccagaggcacccaccaagagacaatgcacctcgcaataatgaccacacctcgcgcaccgccccgtacgcctccccttatctagatctggacatgcacagccctgcgccgtacaggcctcgatattggcgtgtctgctcttcgctgcgccgttggtgcctcggtgacggagggagcgatagctggattggcaccagtttgtgtagtgcgtgaggagacgggagatgcctgggtttgcatgtgaggatcgatcatgcgcgcagtgacagagataatgtggttgaggtgagagggcggtagaggcgtcgtcgtagtccatgcaggaacatcctgagacgctacatgctgcgacctggcagaggtgggtttttagagatgttgcgccgagattgacgtcattgtctcccttttcgggatcatcaccactaccgtctcttgatggaatgagtatcggatcccggtgtttcagtcccgcatagtactcctctaggacccgagcacagagtatgagggctacgctttcccggggcacggggagcgacgagacgagggccttttgttgctgttgcagtggtatcgcgacattcacttccctcgacagtccttcatcttcgttttggtgtgccttatcacgtatatcacctagcagcccacttttcgagtcccgagaaccgagattgtcacttatggtgtagggactaaaatagaactctgagaactcgcgcacgcggtctagaaacggtctatctccacccatggatgctgctagctgctcgagaatctggactatggcttcctggggctcttgatggtgctgttgtctgatcctgagatcccggagtctggcgagaagtgatgataatgaggagcgaggcggagaagcagatgtcgtaggggagggagaagggtaggatgaggacgagggccatagttgaggcgccatgtgttttgcgccttcgattacctcgcgcagtgagacgtgttggctttgttcgtatgtcggagggctattcatcgtgtttgttggtgtcgtcgtgctgtcaggggtcgatgtgttgttgctggagttcgctctcatcccccgcgcccgcgatcgcatgaaattcatcgtagtgtgtttggaaaaggtggcaacactcgaagaaatgagattgaagtgagaatgatgccgtatctatgagattgtgcacgcgttggcgtcatgcgcgatgtagctggcagtcccgtattccgtgaacagatccgacaccaaccagctcgtcagatgttatttcgagtccatcacacccgtcgcaggcatggagtgtgagcagcacgacaatataagtaatgagacactcgatgctcggtgatttaaagaggttagtgaggttagagctgattccatgcctacggtcgccacgatgggaagtgtgcctcgagttaggcattcagctgggctactcgcgcataactgcggcgacttggcatcatgattgcgtccaaccaaccacatggactcccccgctagatactaatacaggactattcgattcaattggctttcacgttacaatcagaaacacacacggcatcattgaggcatcattcagggggggcacaaatcaaattcattcattcgtaaactgtaaagtaggtaggtaccgacgcactggctgacttgcctgcttccttttcgcatacgagcaactcctctaagccctgcgtaagccctgcgtcaacggtcaacatagacggcgcagtctgaacgacgcagtctgaacgacgcagtcacaaaaggaacgccttctcataatatctgcagcagctctagaaagcaaatacgccaaagaagagccccatagcgttcattatacatttcccctcgtccatccttcctcctctcgtcgtcatagcatactcggcacgcgactctcgagaccgtgtagctagtaggagatggtctgagctccgtccaagacatcgccgggctcgagggtgacccactcgcggacggagccggcctcgacgcagatcatctggttgaagccgtccttgggctcgaagtcgcccatgccggccgccttgtcggtccaggggttccacaccacaacgtccttaaggttgtcgcgcacgatgctgaagacggcggagccagcctcgcggacgacgacggggtgggcggggcccttggcgggcgtgtagacgctgtcggtctcgccggcgaaggtgagggggccggactggatcttggtcttggcgccgtccaccttgtcgacgtactgggagccctcgaggccggtgacgtcgacctgggcgatgtcgttgacgcgcaggtaggtgtgcagcagggcctggcactcgaaggactgggtcccgtcgttcgtaatgacgaggccggtgccgaggccctcgggcgagagggtgacgctgtagatggcggagaaggtgtagggccagagctgcctcttgtcgtcgtcgagcgtggcggacgacaggccgaagtcgagcttgacggaggcgtcgctagcgccggcgaagggggccgactcggagctggacttgccgaggaactcccacttggagttgcgcgcgaacccgtgctgcggcagcctcgaggtcgccgcgtggtcgggggccgtgccgaagacggggaagacgagagggatgccgccccgcaccgccttggagccgtcgagcttggccgcgtccgacacccagagcttctcgtggccggcgcggtccttccagctgatgacggtggcgccgaagagcaggatctcgacgctctcgcccgtggggaggacggccgtgacgcgcgcgttgtcgtccgaggtgttgacggtgggctggggaggaaggcccggggtcgtggcgagcttgccgggcttgttggggcggtccatggtgggcgatggggacgatagattgacggagttacgagagacctggagcttcgtggcgggtctgtttgttgctgttattgttgttgctattattgcgacgacgaggttgaagatcccggtgtcgatggtgcagacgtctgtctgtatggaggaggggacgaaggatgcaagatatctgacgtgtctgctctgcgtaaatgacaaaaaagctagagagacaagacggaaggcaggacgagctgcgatgtgataaggataaggataagggtgatggtgagggtgagggtgagggttcgaggtgggatggacgggaagatgggaaagctgcagctgctcttgttggtgacagcaaatggcggggtaactctggatttagtatcacgactggaggggccgctaacatctaaaacacccgctgtgggggtggcacacatagtagtcggtggggtcctaccatgaaacattctgaacctgaaatgctctgtgccaggttggagggtgctcttgcaggtctaga

SEQ ID NO: 18922 - DNA, 834 bp, Muscodor strobelii
  misc_feature: SGI cDNA ID NO. 566355
  misc_feature: Encodes the peptide sequence at SEQ ID NO 18923
atgctacgtgatctgaatataccgaaacgaccgagtctcgagcctctatggactcgtggtcactcaaccaaggcatcccgcaccaaatactccccatcagctcatccatctggctcgcccatctctcctggtcgtctgccaagtccactatatcctcaatttcaagatggcatcacaacgaaagagactgatcagtccttggttcgatctctcaaccaccatgcgcatctgagcatcgcaagtccaacctcacccaatgaacagtcctcgctggtatccaaactggagcaattcagcatcatgccccctatgaacactgctcggacagacagccctctctctcctgaattgcccgagctatcgtctcctggaagtaccagttcagagacttcagatacagacgatgctcatcacgacactgacaccagaggatataccattgtcaaatcctcaatcatgaaccgacgagccactctcccatctcccaatttcatctcccaatcaaccccagacgtctacatcatcgcccgttccctccgccgcccaagtatctcaccagcctcgtccccagtctccccctcacgccccaaccaagactacactccgcgccgtgatccgtccaaaagacccatcaaagcccatattcctcatccagcgcaccctcgatcttacctccttcaaagccactggtcgtcaaatcaccacctcgcccacatccccgacaaagcgccgccccttgcccgtgttaccgatacgaggaaagacaaagacagtccgtgccccgagatcagtgtctgtctcagcaactcctataatgtcaggggccgcggataa

SEQ ID NO: 18923 - protein, 277 aa, Muscodor strobelii
  misc_feature: SGI Peptide ID NO. 566355
MLRDLNIPKRPSLEPLWTRGHSTKASRTKYSPSAHPSGSPISPGRLPSPLYPQFQDGITTKETDQSLVRSLNHHAHLSIASPTSPNEQSSLVSKLEQFSIMPPMNTARTDSPLSPELPELSSPGSTSSETSDTDDAHHDTDTRGYTIVKSSIMNRRATLPSPNFISQSTPDVYIIARSLRRPSISPASSPVSPSRPNQDYTPRRDPSKRPIKAHIPHPAHPRSYLLQSHWSSNHHLAHIPDKAPPLARVTDTRKDKDSPCPEISVCLSNSYNVRGRG

SEQ ID NO: 18924 - DNA, 564 bp, Muscodor strobelii
  misc_feature: SGI EST ID NO. CUFF.44446.0
  misc_feature: Variant of the nucleotide sequence at SEQ ID NO 18922
ccaagactacactccgcgccgtgatccgtccaaaagacccatcaaagcccatattcctcatccagcgcaccctcgatcttacctccttcaaagccactggtcgtcaaatcaccacctcgcccacatccccgacaaagcgccgccccttgcccgtgttaccgatacgaggaaagacaaagacagtccgtgccccgagatcagtgtctgtctcagcaactcctataatgtcaggggccgcggataaagaatatcagagtctaattcgagatgccaaagccgttcccgtccgtaagtcaacactctaccttatcggagcaacccctttcctccatgcactcgccctgaccctaaccacacaccccaaccctaaccagaccacattcacgccctgatactagccctaaccccgatcctaaccgctaacccttatcctaaccacgaaccctacgcaatctgccatttcatctgcatcactcctgccccttttcctggttcccacaactgacgaaccctacagacctcccctccctgtcacccctcccggcactcgccactctgttatca

SEQ ID NO: 18925 - DNA, 5412 bp, Muscodor strobelii
  misc_feature: SGI cDNA ID NO. 566356
  misc_feature: Encodes the peptide sequence at SEQ ID NO 18926
atgacaaccgacgcagacgcggcaaccggaggcctggatgcgttgcccgcgagacccccgacgcccccgcgcgagagacaggcgcccgccgaccaagaccccaacaagctgacgctgtcgaggaaccccctggccacgcgcctcaccctccaaacgccgcccagccactcgcccggctcggccctctcgacgaacccgagctcgcggcggacgaggaagaaggtcgagttcaccgtcgacgccgagtaccgcgagcccccctcctacgccacgtccgtctctgctgccttcccgggcaaggagaatgcgaatgcccacaagcagtcgacgcccatctctgccccctcctcctccgccgccgccgtcggcctcgagagaccgctcaagtccatcctcaagccgacgtcgtcccccaacccgcccaacccgctcaacccgctcgacccctcctccggccaggacgaggcaagccgcactgcgtctgtggccgtcatgctcgagtccgccatcaagcagctggccggcaacgaccgcgacagcaagatcgacgcctacgagctgctcgtccgcgccctcaagacgtccaacaacctgcccgaccgcatcgccctgcaggacaagatgaccctcttcacccacttcatccagcgcgacatcgccaccaagcccgccagcggggcccccgactggtctgtcgtcaaccacgccgtcatcctgctcgccacattcctgcacttccaggccatcgcctcctccatctccccggacttcggagtcttcgtcgtcgaccactgcatccgatgcttcgaggacccggccacgcccaaggagcacgcgaggtatctcatgcagatcgtcgccgcccagaacttccctgccaaggtcatgtctgccgaccgcgtgggacgcctcgtcgccgcgctccaccacgtcgagaaccacctcaagggaaagagcatcgtcgtgggccgcattctcgtgtacaggaggctgctcaggcaatgcagggcccacatgatcacccattccgactggctgttggatctgttcaccgacatgttgagcagcatgaaggagacgcgggccaatgccatcgcgctcggcctcgaggccagcttcggcgtggccaaggagaagcagctgacgaagaaggttaccgacattcttcagatgaccgtcgacgagaccaggtacatcgagtactacgtcaagcagctcacggccatgacaagggacaaggaactcatgtcggcagtgccccaggtctggagtgtcgttgttctgctcctgcgaagtccgatcgacaggtgggagtttttcgaccagtggctggagatcatacagaagtgtttcaacagcgccgacaaagacaccaaagtcgaggccaacctagcttggaaccgcctggtctacgctctgcatctacatgagtcatcgttcaacaagacggtaaacatgctctgtcaacccttcacgagccagctcaagcgcagcagaaagctgttcccgccagatcttcgcaagattgtcgtcggtagtctctgcaatctctactattatgcatttgcacctacgtccaacccaaactacgtcgacttgtactgggatgcctgtgtcaagtccgtcatcaagacagtggtagttcccgagaacaccgacgggaaatctgaagacaagcaaaagacgccatctgccgacctcattgcacatgccatcaacatactgagtggactgttcaatcatacgtcgttgcgactatggaaagaggatcgcatctcggagaacgccttggccaaacctgaagacctccccgcattggatcccaaatggattcgacgcaatggacaccgagtcttttcagtcgtcgaccccctactaagcaggacgtttctcgacttggctgattcggcttcagacacgtccaaactctggaaatctctggtcgggtctgttgctgcagccgcgtccaaagaagtcaaggtttcagtagacaccgccgcctttttgggacatgcactcagcctgttcatgaggatatggtctggtggcttgggcgaagcggtggtcgccgtcgagcagcagcaaagattcttagccgcagctcagagctacctcacgactgtcatttcatctctaggccatcttccattcacggagaagcttctcaccatgaacaagcaacagaacactctggttccgttagcaacaccgtcacatcggtcaggcaaaagccatggcctcacacgatcaccactacatcacctcttttccatattaatgaccctgccccccggaatttctggcagcggagagctatcgaccttgatcaagaccgtattcgagccttttgtccccactcggtcagctcgtgccagacgggaattcgctcaagaattgatgcaaatctcgtcatctgagggaccaacaccttatggtatctgggcattcattgctgatactctatctacatcaatggaccacagccagtccagtacctcatcaacagactcgacataccatccccaaattggccatgaattccgtgagatggtcaaacatctcgaaaagggtatcagtaatacccctgaactgccatgggatctctggctgtcattcttcgaattcgtcgttgctcaagccaccgaattgtctggagaagcagggtgttcgcttgcagttgtcgaggcattgtccaaggctctcatcgataatttccctgccgaacaagctgccgatacagtctcagtgagcccgagactactccaatgcggtacttgtctggtgtcaacagcgaaacatccccgcgaccgtcctgcccttgacgcagctagaagacgtctgtgggggactgccattgctggtgccaaatctgcgtcgtttgatccatttgacaagttttatgagctggtgggccggtccctcaagatggcctattcgaatgtggacgcactcgatgatgtcgtcacctcgtctctcctagagcaggtcactcaattcttatcacgatgcaaccctctgctcgtcttcaaatcacttgtgcagctgcaacaagggttgggtccatggatacaggatgctgacggacgatacggcaataaacaacatccgtctgtagccgaagctgtcatgacattgtgggaccgcatctgtaccctgtttgccgatgctgccattgaagacttccagcttgacgttatcgagcatctcctctgctgtgccttcaggtccaaacacagacataccgtcaatagtgccgtgatgctgtggaaccgtggattcgaatacgcagagaagattgagtatccagaaaccctgaaggaggtgttgctgtctgtccgggcctatgctgatattgtcctccctggcctggatgtgtcgagtttcgactccaacagtgcagcaaagcccatgtttattgactcgcaagacgatatcgacatcgacatccctacgaacctgtcgagctatcgtgtgactcctcgcttcacccggcctccgtcgtccagagcctcggcatcgggtacgcctgcatcagacagatcatcgtcgtcatcgaatcgtcaaaggtcggagagtgcacgtcttcgatcgcagactaagtcgtccaagcgcaacaagacggccaagctacgtcatgacgactcacagatccagtttgccccgattgagcagccatctccgtcggaagatctggcaatggagtcacaagtcttgacggataggcagaaggaggttcgtgatcgacagcaagagaatgcggctttgttcccagctatccgatctagtcctgagaaggcaacgacccgctcaagtcacagttctcgtcagccatcgccactgcgacccaaggctgccgagcccactgtagacgacgaagctaccacgccgaaagtgaaccgcagttacgagtatgtatcatcgactccgacaccaaggcgtggtcaagccgccatcatcgatgaggatcacgagatgacggatgatgttccctcgtcgccacctgagccccgacgaaacttgttgccggagatgaaatcgcattctagaagcaatagcgtgttggcagagatacccatctcatcctcgcccatttctggatcacccgtcaccagatcttcacaacgtctacgtgaaatgaaggcctcgtctcagggaggcggtgttgatccagtgtcaccgtccaagttaagccaacaacatggtgtctcggcacctgaggctattccagactcgtcccaattgccaatgatcaccttgacgcatgaaccaagtcaggaacagcccctagagctcccaactatcgacgcgaccacgccgaccaagctgaaccctccaaagaatcaggagacacccaaatccgataacgatgtgtttgtggatgcattgacgagccctgcacgacgccagactcgttccactgtgtctataccttccagctatactaagggacgggaagaagacatccaccatcatggagatcgttcatttgagatgagcgatggtgaagagcgtatcatggctcgtctggtcattgagcttgattctaggaaatgtgaccctacaccaagctacgatagctcgccggagaaacatcagcagaagactgaagttgaggatgccttggactcgattacggtactgattgacgacgaggatgacggactgcccccaccttcagtcaaggaggattccccaccagtgattccatctacacaagcagagccgagcaattcacaatcttccgaggtgaacaaatcgaagaaaaaacgcaagcgaagctcggaaaagagatcaagcagtagcaagaagcggagacagcagcgggagcagcagcagagtgtcgtcgaggctgaggctgaggttgaggctgagcatgtcagtgcgattgaagacagccagccagccattgccgaagtacagtcgtcacaacctcaggacatcgaacccgcagcccattccatcccgtcacccgatcttgcacaccaagtagatgactcgttcgggcccctaaacatggattccccctcggaccagagcatcgacggcgataacgcggctgtccatcgtcaactcattactgaggcatcacagcagtcggaacacagcctcacagaggaggccattcccgagtctttcattatggatgatgaggaacctattaaactcgacgacgatcgagaaatggctgggacagacgaggcgatcccttcgagtgtgccggcgccactcaccgagccatcggccatagagaaaatcatgacatctctcagagacggcctttcagagcttcaaaccgctaccctgtcacgagaagaggtgtataagattgaggacatgtttatggacatcaagagggagttgtacgaggcggagagccgtagtcggcgattaaacttagatggatgcacataa

SEQ ID NO: 18926 - protein, 1803 aa, Muscodor strobelii
  misc_feature: SGI Peptide ID NO. 566356
  misc_feature (1)..(1795): NCBI GI: 46109256 Blast Desc: FG01510.1 [Gibberella zeae PH-1]
  misc_feature (1)..(1796): NCBI GI: 256730793 Blast Desc: NECHADRAFT_89745 [Nectria haematococca mpVI 77-13-4]
  misc_feature (44)..(1527): NCBI GI: 171695334 Blast Desc: protein product [Podospora anserina] gi|170947909|emb|CAP60073.1| protein product [Podospora anserina]
  misc_feature (17)..(1530): NCBI GI: 85111456 Blast Desc: NCU02789 [Neurospora crassa OR74A] gi|28925697|gb|EAA34709.1| [Neurospora crassa OR74A]
  misc_feature (165)..(1265): NCBI GI: 261358628 Blast Desc: conserved [Verticillium albo-atrum VaMs.102]
  misc_feature (12)..(1795): NCBI GI: 145604466 Blast Desc: MGG_08598 [Magnaporthe grisea 70-15] gi|145012460|gb|EDJ97116.1| MGG_08598 [Magnaporthe grisea 70-15]
  misc_feature (62)..(1341): NCBI GI: 154323738 Blast Desc: BC1G_00268 [Botryotinia fuckeliana B05.10] gi|150842497|gb|EDN17690.1| BC1G_00268 [Botryotinia fuckeliana B05.10]
  misc_feature (62)..(1259): NCBI GI: 156056897 Blast Desc: SS1G_04179 [Sclerotinia sclerotiorum 1980] gi|154701965|gb|EDO01704.1| SS1G_04179 [Sclerotinia sclerotiorum 1980]
  misc_feature (44)..(673): NCBI GI: 116182288 Blast Desc: CHGG_01772 [Chaetomium globosum CBS 148.51] gi|88186069|gb|EAQ93537.1| CHGG_01772 [Chaetomium globosum CBS 148.51]
  misc_feature (764)..(1795): NCBI GI: 116182288 Blast Desc: CHGG_01772 [Chaetomium globosum CBS 148.51] gi|88186069|gb|EAQ93537.1| CHGG_01772 [Chaetomium globosum CBS 148.51]
MTTDADAATGGLDALPARPPTPPRERQAPADQDPNKLTLSRNPLATRLTLQTPPSHSPGSALSTNPSSRRTRKKVEFTVDAEYREPPSYATSVSAAFPGKENANAHKQSTPISAPSSSAAAVGLERPLKSILKPTSSPNPPNPLNPLDPSSGQDEASRTASVAVMLESAIKQLAGNDRDSKIDAYELLVRALKTSNNLPDRIALQDKMTLFTHFIQRDIATKPASGAPDWSVVNHAVILLATFLHFQAIASSISPDFGVFVVDHCIRCFEDPATPKEHARYLMQIVAAQNFPAKVMSADRVGRLVAALHHVENHLKGKSIVVGRILVYRRLLRQCRAHMITHSDWLLDLFTDMLSSMKETRANAIALGLEASFGVAKEKQLTKKVTDILQMTVDETRYIEYYVKQLTAMTRDKELMSAVPQVWSVVVLLLRSPIDRWEFFDQWLEIIQKCFNSADKDTKVEANLAWNRLVYALHLHESSFNKTVNMLCQPFTSQLKRSRKLFPPDLRKIVVGSLCNLYYYAFAPTSNPNYVDLYWDACVKSVIKTVVVPENTDGKSEDKQKTPSADLIAHAINILSGLFNHTSLRLWKEDRISENALAKPEDLPALDPKWIRRNGHRVFSVVDPLLSRTFLDLADSASDTSKLWKSLVGSVAAAASKEVKVSVDTAAFLGHALSLFMRIWSGGLGEAVVAVEQQQRFLAAAQSYLTTVISSLGHLPFTEKLLTMNKQQNTLVPLATPSHRSGKSHGLTRSPLHHLFSILMTLPPGISGSGELSTLIKTVFEPFVPTRSARARREFAQELMQISSSEGPTPYGIWAFIADTLSTSMDHSQSSTSSTDSTYHPQIGHEFREMVKHLEKGISNTPELPWDLWLSFFEFVVAQATELSGEAGCSLAVVEALSKALIDNFPAEQAADTVSVSPRLLQCGTCLVSTAKHPRDRPALDAARRRLWGTAIAGAKSASFDPFDKFYELVGRSLKMAYSNVDALDDVVTSSLLEQVTQFLSRCNPLLVFKSLVQLQQGLGPWIQDADGRYGNKQHPSVAEAVMTLWDRICTLFADAAIEDFQLDVIEHLLCCAFRSKHRHTVNSAVMLWNRGFEYAEKIEYPETLKEVLLSVRAYADIVLPGLDVSSFDSNSAAKPMFIDSQDDIDIDIPTNLSSYRVTPRFTRPPSSRASASGTPASDRSSSSSNRQRSESARLRSQTKSSKRNKTAKLRHDDSQIQFAPIEQPSPSEDLAMESQVLTDRQKEVRDRQQENAALFPAIRSSPEKATTRSSHSSRQPSPLRPKAAEPTVDDEATTPKVNRSYEYVSSTPTPRRGQAAIIDEDHEMTDDVPSSPPEPRRNLLPEMKSHSRSNSVLAEIPISSSPISGSPVTRSSQRLREMKASSQGGGVDPVSPSKLSQQHGVSAPEAIPDSSQLPMITLTHEPSQEQPLELPTIDATTPTKLNPPKNQETPKSDNDVFVDALTSPARRQTRSTVSIPSSYTKGREEDIHHHGDRSFEMSDGEERIMARLVIELDSRKCDPTPSYDSSPEKHQQKTEVEDALDSITVLIDDEDDGLPPPSVKEDSPPVIPSTQAEPSNSQSSEVNKSKKKRKRSSEKRSSSSKKRRQQREQQQSVVEAEAEVEAEHVSAIEDSQPAIAEVQSSQPQDIEPAAHSIPSPDLAHQVDDSFGPLNMDSPSDQSIDGDNAAVHRQLITEASQQSEHSLTEEAIPESFIMDDEEPIKLDDDREMAGTDEAIPSSVPAPLTEPSAIEKIMTSLRDGLSELQTATLSREEVYKIEDMFMDIKRELYEAESRSRRLNLDGCT

SEQ ID NO: 18927 - DNA, 7185 bp, Muscodor strobelii
  misc_feature: SGI EST ID NO. CUFF.44502.0
  misc_feature: Variant of the nucleotide sequence at SEQ ID NO 18925
agcgtagcaacatagatcgaggcaatgaacgaacgaacatacgggatagctttattaaatcgaaagtcttaagatgagactactatattgaaaccaagcagccgggagtttaggtcactcacttaggtaccttacggataaagtgggattgtctatggaagatgagggcaaggcaatcaagcggatggagttatattgaactgcgccgcatgtcagactgagtgagaagtcgggtgtaaatagcgccgagacgtttgtacgtggtagggcaaaagaggctgtcaatgtaggacatgggagtcaaggccaggacacaagaaggacggggaagggatatccggtaggttcgacggccaagttgatgtgggatgagatgttgagaggaaccagataggatacgagagaagagatgagatgatgggacacaaagtcggatgtctattcgtgacggcgagcgggtggatgcaggtcgaagcgacgacaggtatggggatgcctctcttgtctcgcctgtgacggtgacgtgtgaggggctagtgggcgctgaacggttatcttaggtgtcgagcacgggccagtagcccaaagaagaaagcactttagcaggcgtggagtagtcaggtcatgtaggtagcagaggcgtcaggcgcgtcgcgggcgcgtcaactctagtgaccacttttaccgcgttttgggggaggcgggacagactaacgggggaaggcgaggcagggacaggcagggatctcgcgatcgtaggaattgcggatggacaaatgaaaacgactggggttggttgacatgcacttttgacttgactcccatcatcgtcgtcgtccacctgtcctgcccgactaccaagctgtttggtacggaatagatggcagagggaggtgcgaacgagtctttgccataatccgggcttcactttccgcacatgtatcatcggatgatccactccactccaccgtaaggtacatcagaacttcacccaatccatccatctgcgccatctgcgccaactcgtcaacctcatcctttctcctgcgtgacccgagtcgtcgttgcgagcgatcgtcttctactttgccgtcgttcttcttggattctcgcctctgatatcctctctgcgcctctgtcttgttcgcccacgccatcaaaactgccggctactcatcctccccctcccaactccatctctctcctcgcccaacccagtcatccacatcagccccggcctccgtaccctttggcgcagctccacggctacctctatgagtcggagagacacatgagacttgatctctgcgtctgctgtcgtctgtgtggtggcctggcaggttccggaggaggcgcaggcttgcagccatgacaaccgacgcagacgcggcaaccggaggcctggatgcgttgcccgcgagacccccgacgcccccgcgcgagagacaggcgcccgccgaccaagaccccaacaagctgacgctgtcgaggaaccccctggccacgcgcctcaccctccaaacgccgcccagccactcgcccggctcggccctctcgacgaacccgagctcgcggcggacgaggaagaaggtcgagttcaccgtcgacgccgagtaccgcgagcccccctcctacgccacgtccgtctctgctgccttcccgggcaaggagaatgcgaatgcccacaagcagtcgacgcccatctctgccccctcctcctccgccgccgccgtcggcctcgagagaccgctcaagtccatcctcaagccgacgtcgtcccccaacccgcccaacccgctcaacccgctcgacccctcctccggccaggacgaggcaagccgcactgcgtctgtggccgtcatgctcgagtccgccatcaagcagctggccggcaacgaccgcgacagcaagatcgacgcctacgagctgctcgtccgcgccctcaagacgtccaacaacctgcccgaccgcatcgccctgcaggacaagatgaccctcttcacccacttcatccagcgcgacatcgccaccaagcccgccagcggggcccccgactggtctgtcgtcaaccacgccgtcatcctgctcgccacattcctgcacttccaggccatcgcctcctccatctccccggacttcggagtcttcgtcgtcgaccactgcatccgatgcttcgaggacccggccacgcccaaggagcacgcgaggtatctcatgcagatcgtcgccgcccagaacttccctgccaaggtcatgtctgccgaccgcgtgggacgcctcgtcgccgcgctccaccacgtcgagaaccacctcaagggaaagagcatcgtcgtgggccgcattctcgtgtacaggaggctgctcaggcaatgcagggcccacatgatcacccattccgactggctgttggatctgttcaccgacatgttgagcagcatgaaggagacgcgggccaatgccatcgcgctcggcctcgaggccagcttcggcgtggccaaggagaagcagctgacgaagaaggttaccgacattcttcagatgaccgtcgacgagaccaggtacatcgagtactacgtcaagcagctcacggccatgacaagggacaaggaactcatgtcggcagtgccccaggtctggagtgtcgttgttctgctcctgcgaagtccgatcgacaggtgggagtttttcgaccagtggctggagatcatacagaagtgtttcaacagcgccgacaaagacaccaaagtcgaggccaacctagcttggaaccgcctggtctacgctctgcatctacatgagtcatcgttcaacaagacggtaaacatgctctgtcaacccttcacgagccagctcaagcgcagcagaaagctgttcccgccagatcttcgcaagattgtcgtcggtagtctctgcaatctctactattatgcatttgcacctacgtccaacccaaactacgtcgacttgtactgggatgcctgtgtcaagtccgtcatcaagacagtggtagttcccgagaacaccgacgggaaatctgaagacaagcaaaagacgccatctgccgacctcattgcacatgccatcaacatactgagtggactgttcaatcatacgtcgttgcgactatggaaagaggatcgcatctcggagaacgccttggccaaacctgaagacctccccgcattggatcccaaatggattcgacgcaatggacaccgagtcttttcagtcgtcgaccccctactaagcaggacgtttctcgacttggctgattcggcttcagacacgtccaaactctggaaatctctggtcgggtctgttgctgcagccgcgtccaaagaagtcaaggtttcagtagacaccgccgcctttttgggacatgcactcagcctgttcatgaggatatggtctggtggcttgggcgaagcggtggtcgccgtcgagcagcagcaaagattcttagccgcagctcagagctacctcacgactgtcatttcatctctaggccatcttccattcacggagaagcttctcaccatgaacaagcaacagaacactctggttccgttagcaacaccgtcacatcggtcaggcaaaagccatggcctcacacgatcaccactacatcacctcttttccatattaatgaccctgccccccggaatttctggcagcggagagctatcgaccttgatcaagaccgtattcgagccttttgtccccactcggtcagctcgtgccagacgggaattcgctcaagaattgatgcaaatctcgtcatctgagggaccaacaccttatggtatctgggcattcattgctgatactctatctacatcaatggaccacagccagtccagtacctcatcaacagactcgacataccatccccaaattggccatgaattccgtgagatggtcaaacatctcgaaaagggtatcagtaatacccctgaactgccatgggatctctggctgtcattcttcgaattcgtcgttgctcaagccaccgaattgtctggagaagcagggtgttcgcttgcagttgtcgaggcattgtccaaggctctcatcgataatttccctgccgaacaagctgccgatacagtctcagtgagcccgagactactccaatgcggtacttgtctggtgtcaacagcgaaacatccccgcgaccgtcctgcccttgacgcagctagaagacgtctgtgggggactgccattgctggtgccaaatctgcgtcgtttgatccatttgacaagttttatgagctggtgggccggtccctcaagatggcctattcgaatgtggacgcactcgatgatgtcgtcacctcgtctctcctagagcaggtcactcaattcttatcacgatgcaaccctctgctcgtcttcaaatcacttgtgcagctgcaacaagggttgggtccatggatacaggatgctgacggacgatacggcaataaacaacatccgtctgtagccgaagctgtcatgacattgtgggaccgcatctgtaccctgtttgccgatgctgccattgaagacttccagcttgacgttatcgagcatctcctctgctgtgccttcaggtccaaacacagacataccgtcaatagtgccgtgatgctgtggaaccgtggattcgaatacgcagagaagattgagtatccagaaaccctgaaggaggtgttgctgtctgtccgggcctatgctgatattgtcctccctggcctggatgtgtcgagtttcgactccaacagtgcagcaaagcccatgtttattgactcgcaagacgatatcgacatcgacatccctacgaacctgtcgagctatcgtgtgactcctcgcttcacccggcctccgtcgtccagagcctcggcatcgggtacgcctgcatcagacagatcatcgtcgtcatcgaatcgtcaaaggtcggagagtgcacgtcttcgatcgcagactaagtcgtccaagcgcaacaagacggccaagctacgtcatgacgactcacagatccagtttgccccgattgagcagccatctccgtcggaagatctggcaatggagtcacaagtcttgacggataggcagaaggaggttcgtgatcgacagcaagagaatgcggctttgttcccagctatccgatctagtcctgagaaggcaacgacccgctcaagtcacagttctcgtcagccatcgccactgcgacccaaggctgccgagcccactgtagacgacgaagctaccacgccgaaagtgaaccgcagttacgagtatgtatcatcgactccgacaccaaggcgtggtcaagccgccatcatcgatgaggatcacgagatgacggatgatgttccctcgtcgccacctgagccccgacgaaacttgttgccggagatgaaatcgcattctagaagcaatagcgtgttggcagagatacccatctcatcctcgcccatttctggatcacccgtcaccagatcttcacaacgtctacgtgaaatgaaggcctcgtctcagggaggcggtgttgatccagtgtcaccgtccaagttaagccaacaacatggtgtctcggcacctgaggctattccagactcgtcccaattgccaatgatcaccttgacgcatgaaccaagtcaggaacagcccctagagctcccaactatcgacgcgaccacgccgaccaagctgaaccctccaaagaatcaggagacacccaaatccgataacgatgtgtttgtggatgcattgacgagccctgcacgacgccagactcgttccactgtgtctataccttccagctatactaagggacgggaagaagacatccaccatcatggagatcgttcatttgagatgagcgatggtgaagagcgtatcatggctcgtctggtcattgagcttgattctaggaaatgtgaccctacaccaagctacgatagctcgccggagaaacatcagcagaagactgaagttgaggatgccttggactcgattacggtactgattgacgacgaggatgacggactgcccccaccttcagtcaaggaggattccccaccagtgattccatctacacaagcagagccgagcaattcacaatcttccgaggtgaacaaatcgaagaaaaaacgcaagcgaagctcggaaaagagatcaagcagtagcaagaagcggagacagcagcgggagcagcagcagagtgtcgtcgaggctgaggctgaggttgaggctgagcatgtcagtgcgattgaagacagccagccagccattgccgaagtacagtcgtcacaacctcaggacatcgaacccgcagcccattccatcccgtcacccgatcttgcacaccaagtagatgactcgttcgggcccctaaacatggattccccctcggaccagagcatcgacggcgataacgcggctgtccatcgtcaactcattactgaggcatcacagcagtcggaacacagcctcacagaggaggccattcccgagtctttcattatggatgatgaggaacctattaaactcgacgacgatcgagaaatggctgggacagacgaggcgatcccttcgagtgtgccggcgccactcaccgagccatcggccatagagaaaatcatgacatctctcagagacggcctttcagagcttcaaaccgctaccctgtcacgagaagaggtgtataagattgaggacatgtttatggacatcaagagggagttgtacgaggcggagagccgtagtcggcgattaaacttagatggatgcacataactaagatattgagagcttatgatgatggagagagaaatactgttattgtatgataccgagagggaaaaataacatagtatggccggtagcattggcatggcgttagatgggagggatatgatcgggctactaatcaatattacgtgtctattctgatgaattcgttaccgtttctcattagtgagtagatccccgaataacggatcgtcgagtctccttattgaggcccggataatcagctgaattgacttcgggacgctcttctgcttctaaaggggacttgagagttcctgctaggtgtgtatgatgctgccatgtctcactatagcacgatttgcactcatatcaactcagtattcgaatacgtaaaccctacaatacctcaaaacatgcctaatccacccc

SEQ ID NO: 18928 - DNA, 1425 bp, Muscodor strobelii
  misc_feature: SGI cDNA ID NO. 566357
  misc_feature: Encodes the peptide sequence at SEQ ID NO 18929
atggcggccgatcctcgtttattacaagccgcgacgttggctggaccagcaaagcttgctgccgttacgagtctcgtcgacaagctcaccaacgaccttgagacgatcaacttactcccacatcaaagagatgccgctctagaggaattgaagatatacggccgggatccacgcaatgccgatcccatcttcaccaaagctgggattgaaatgctcacgcgacatgctttcaacagcccatctagcacaacctcgagaaatgctctacgttgtttatgtaatgccctactactagagaagaaatgccggcagatgtttgtcgatctgggttatgaagctaaggcctgcaacaaactcaagaacgacaaccgcgatgatgagtttctggtgtcacgagtcatctttctcactacctacgacacagatgcaaagctagcagacttaattgacaagtatcaactggctgacaccattgccaagaacctggaacgccatgccagacatcacaacgacggattgcccacgaccgacccaatgcaggacatggcactggccgagacattgcgactgctgtacaacatcactcattactgcgacgacaaggtttcttcattcactcaggctattccacatatcgtctctctcctgtgcaaaacaccatcgtttgcatcagacaagccccttgatgcccccataggggccctcgtcaacgccctctcgaatctggatctcagtgcaaaagagatacacccatcactcttccccaagtcagaccccaatcttctcactaatcgtctcatcgacatcctttcgcgctgtagaacgaagtatgacgatgatgcactggaaaccaatgtcccctcccttctctcggtcatacgggtgctatacgagcatgccccagaggaagtgcaagcctccatacgtgagaagcttctaccaacggaagaagaccgtaatgaggtactgggccgcactgactcgctctcgtcgtggatgctgaagacttctgtcaatggtctaacgccgaagctacgggatacgatctcatatctcctgttcgacctctccgataaggatgccagcaagttcgtcgagaatgttggatacggctttgcatctggtttcttgtacaataacaacatgtccatccctcaaagtgcgtcggaagcttttagtaatggacctggggactcttctcgacccattaatcccgtcactggccagttcctcgatgccgagagacacgccgagatgcctgagatgacagaggaagagaaggagcgcgaggcggagaggttattcgttctcttcgagagattacgggcaaatggggtcatatcagccgagaatcctgtacggacagcagtggaagagggtcggtttgaggaactgcctgacgattatgaggaagaacgacgataa

SEQ ID NO: 18929 - protein, 474 aa, Muscodor strobelii
  misc_feature: SGI Peptide ID NO. 566357
  misc_feature (8)..(472): NCBI GI: 85111454 Blast Desc: NCU02788 [Neurospora crassa OR74A] gi|28925696|gb|EAA34708.1| [Neurospora crassa OR74A]
  misc_feature (11)..(471): NCBI GI: 116182286 Blast Desc: CHGG_01771 [Chaetomium globosum CBS 148.51] gi|88186068|gb|EAQ93536.1| CHGG_01771 [Chaetomium globosum CBS 148.51]
  misc_feature (17)..(468): NCBI GI: 171695336 Blast Desc: protein product [Podospora anserina] gi|170947910|emb|CAP60074.1| protein product [Podospora anserina]
  misc_feature (27)..(461): NCBI GI: 145604468 Blast Desc: MGG_14008 [Magnaporthe grisea 70-15] gi|145012461|gb|EDJ97117.1| MGG_14008 [Magnaporthe grisea 70-15]
  misc_feature (8)..(468): NCBI GI: 156061289 Blast Desc: SS1G_02787 [Sclerotinia sclerotiorum 1980] gi|154700191|gb|EDN99929.1| SS1G_02787 [Sclerotinia sclerotiorum 1980]
  misc_feature (10)..(472): NCBI GI: 46109258 Blast Desc: FG01511.1 [Gibberella zeae PH-1]
  misc_feature (15)..(465): NCBI GI: 261358627 Blast Desc: conserved [Verticillium albo-atrum VaMs.102]
  misc_feature (8)..(465): NCBI GI: 261204155 Blast Desc: conserved [Ajellomyces dermatitidis SLH14081] gi|239587076|gb|EEQ69719.1| conserved [Ajellomyces dermatitidis SLH14081] gi|239614368|gb|EEQ91355.1| conserved [Ajellomyces
  misc_feature (14)..(472): NCBI GI: 189191210 Blast Desc: conserved [Pyrenophora tritici-repentis Pt-1C-BFP] gi|187973550|gb|EDU41049.1| conserved [Pyrenophora tritici-repentis Pt-1C-BFP]
  misc_feature (8)..(465): NCBI GI: 225679837 Blast Desc: conserved [Paracoccidioides brasiliensis Pb03]
MAADPRLLQAATLAGPAKLAAVTSLVDKLTNDLETINLLPHQRDAALEELKIYGRDPRNADPIFTKAGIEMLTRHAFNSPSSTTSRNALRCLCNALLLEKKCRQMFVDLGYEAKACNKLKNDNRDDEFLVSRVIFLTTYDTDAKLADLIDKYQLADTIAKNLERHARHHNDGLPTTDPMQDMALAETLRLLYNITHYCDDKVSSFTQAIPHIVSLLCKTPSFASDKPLDAPIGALVNALSNLDLSAKEIHPSLFPKSDPNLLTNRLIDILSRCRTKYDDDALETNVPSLLSVIRVLYEHAPEEVQASIREKLLPTEEDRNEVLGRTDSLSSWMLKTSVNGLTPKLRDTISYLLFDLSDKDASKFVENVGYGFASGFLYNNNMSIPQSASEAFSNGPGDSSRPINPVTGQFLDAERHAEMPEMTEEEKEREAERLFVLFERLRANGVISAENPVRTAVEEGRFEELPDDYEEERR

SEQ ID NO: 18930 - DNA, 6150 bp, Muscodor strobelii
  misc_feature: SGI EST ID NO. CUFF.44501.1
  misc_feature: Variant of the nucleotide sequence at SEQ ID NO 18928
gtacagcttcggctacagacggatgttgtttattgccgtatcgtccgtcagcatcctgtatccatggacccaacccttgttgcagctgcacaagtgatttgaagacgagcagagggttgcatcgtgataagaattgagtgacctgctctaggagagacgaggtgacgacatcatcgagtgcgtccacattcgaataggccatcttgagggaccggcccaccagctcataaaacttgtcaaatggatcaaacgacgcagatttggcaccagcaatggcagtcccccacagacgtcttctagctgcgtcaagggcaggacggtcgcggggatgtttcgctgttgacaccagacaagtaccgcattggagtagtctcgggctcactgagactgtatcggcagcttgttcggcagggaaattatcgatgagagccttggacaatgcctcgacaactgcaagcgaacaccctgcttctccagacaattcggtggcttgagcaacgacgaattcgaagaatgacagccagagatcccatggcagttcaggggtattactgatacccttttcgagatgtttgaccatctcacggaattcatggccaatttggggatggtatgtcgagtctgttgatgaggtactggactggctgtggtccattgatgtagatagagtatcagcaatgaatgcccagataccataaggtgttggtccctcagatgacgagatttgcatcaattcttgagcgaattcccgtctggcacgagctgaccgagtggggacaaaaggctcgaatacggtcttgatcaaggtcgatagctctccgctgccagaaattccggggggcagggtcattaatatggaaaagaggtgatgtagtggtgatcgtgtgaggccatggcttttgcctgaccgatgtgacggtgttgctaacggaaccagagtgttctgttgcttgttcatggtgagaagcttctccgtgaatggaagatggcctagagatgaaatgacagtcgtgaggtagctctgagctgcggctaagaatctttgctgctgctcgacggcgaccaccgcttcgcccaagccaccagaccatatcctcatgaacaggctgagtgcatgtcccaaaaaggcggcggtgtctactgaaaccttgacttctttggacgcggctgcagcaacagacccgaccagagatttccagagtttggacgtgtctgaagccgaatcagccaagtcgagaaacgtcctgcttagtagggggtcgacgactgaaaagactcggtgtccattgcgtcgaatccatttgggatccaatgcggggaggtcttcaggtttggccaaggcgttctccgagatgcgatcctctttccatagtcgcaacgacgtatgattgaacagtccactcagtatgttgatggcatgtgcaatgaggtcggcagatggcgtcttttgcttgtcttcagatttcccgtcggtgttctcgggaactaccactgtcttgatgacggacttgacacaggcatcccagtacaagtcgacgtagtttgggttggacgtaggtgcaaatgcataatagtagagattgcagagactaccgacgacaatcttgcgaagatctggcgggaacagctttctgctgcgcttgagctggctcgtgaagggttgacagagcatgtttaccgtcttgttgaacgatgactcatgtagatgcagagcgtagaccaggcggttccaagctaggttggcctcgactttggtgtctttgtcggcgctgttgaaacacttctgtatgatctccagccactggtcgaaaaactcccacctgtcgatcggacttcgcaggagcagaacaacgacactccagacctggggcactgccgacatgagttccttgtcccttgtcatggccgtgagctgcttgacgtagtactcgatgtacctggtctcgtcgacggtcatctgaagaatgtcggtaaccttcttcgtcagctgcttctccttggccacgccgaagctggcctcgaggccgagcgcgatggcattggcccgcgtctccttcatgctgctcaacatgtcggtgaacagatccaacagccagtcggaatgggtgatcatgtgggccctgcattgcctgagcagcctcctgtacacgagaatgcggcccacgacgatgctctttcccttgaggtggttctcgacgtggtggagcgcggcgacgaggcgtcccacgcggtcggcagacatgaccttggcagggaagttctgggcggcgacgatctgcatgagatacctcgcgtgctccttgggcgtggccgggtcctcgaagcatcggatgcagtggtcgacgacgaagactccgaagtccggggagatggaggaggcgatggcctggaagtgcaggaatgtggcgagcaggatgacggcgtggttgacgacagaccagtcgggggccccgctggcgggcttggtggcgatgtcgcgctggatgaagtgggtgaagagggtcatcttgtcctgcagggcgatgcggtcgggcaggttgttggacgtcttgagggcgcggacgagcagctcgtaggcgtcgatcttgctgtcgcggtcgttgccggccagctgcttgatggcggactcgagcatgacggccacagacgcagtgcggcttgcctcgtcctggccggaggaggggtcgagcgggttgagcgggttgggcgggttgggggacgacgtcggcttgaggatggacttgagcggtctctcgaggccgacggcggcggcggaggaggagggggcagagatgggcgtcgactgcttgtgggcattcgcattctccttgcccgggaaggcagcagagacggacgtggcgtaggaggggggctcgcggtactcggcgtcgacggtgaactcgaccttcttcctcgtccgccgcgagctcgggttcgtcgagagggccgagccgggcgagtggctgggcggcgtttggagggtgaggcgcgtggccagggggttcctcgacagcgtcagcttgttggggtcttggtcggcgggcgcctgtctctcgcgcgggggcgtcgggggtctcgcgggcaacgcatccaggcctccggttgccgcgtctgcgtcggttgtcatggctgcaagcctgcgcctcctccggaacctgccaggccaccacacagacgacagcagacgcagagatcaagtctcatgtgtctctccgactcatagaggtagccgtggagctgcgccaaagggtacggaggccggggctgatgtggatgactgggttgggcgaggagagagatggagttgggagggggaggatgagtagccggcagttttgatggcgtgggcgaacaagacagaggcgcagagaggatatcagaggcgagaatccaagaagaacgacggcaaagtagaagacgatcgctcgcaacgacgactcgggtcacgcaggagaaaggatgaggttgacgagttggcgcagatggcgcagatggatggattgggtgaagttctgatgtaccttacggtggagtggagtggatcatccgatgatacatgtgcggaaagtgaagcccggattatggcaaagactcgttcgcacctccctctgccatctattccgtaccaaacagcttggtagtcgggcaggacaggtggacgacgacgatgatgggagtcaagtcaaaagtgcatgtcaaccaaccccagtcgttttcatttgtccatccgcaattcctacgatcgcgagatccctgcctgtccctgcctcgccttcccccgttagtctgtcccgcctcccccaaaacgcggtaaaagtggtcactagagttgacgcgcccgcgacgcgcctgacgcctctgctacctacatgacctgactactccacgcctgctaaagtgctttcttctttgggctactggcccgtgctcgacacctaagataaccgttcagcgcccactagcccctcacacgtcaccgtcacaggcgagacaagagaggcatccccatacctgtcgtcgcttcgacctgcatccacccgctcgccgtcacgaatagacatccgactttgtgtcccatcatctcatctcttctctcgtatcctatctggttcctctcaacatctcatcccacatcaacttggccgtcgaacctaccggatatcccttccccgtccttcttgtgtcctggccttgactcccatgtcctacattgacagcctcttttgccctaccacgtacaaacttcaatataactccatccgcttgattgccttgccctcatcttccatagacaatcccactttatccgtaaggtacctaatcagctcgacaacggccagagggtttgttacgcatcttctcggcgaaccatcagccttgtagccctcctgaaccactatttccatctcatcccatggcggccgatcctcgtttattacaagccgcgacgttggctggaccagcaaagcttgctgccgttacgagtctcgtcgacaagctcaccaacgaccttgagacgatcaacttactcccacatcaaagagatgccgctctagaggaattgaagatatacggccgggatccacgcaatgccgatcccatcttcaccaaagctgggattgaaatgctcacgcgacatgctttcaacagcccatctagcacaacctcgagaaatgctctacgttgtttatgtaatgccctactactagagaagaaatgccggcagatgtttgtcgatctgggttatgaagctaaggcctgcaacaaactcaagaacgacaaccgcgatgatgagtttctggtgtcacgagtcatctttctcactacctacgacacagatgcaaagctagcagacttaattgacaagtatcaactggctgacaccattgccaagaacctggaacgccatgccagacatcacaacgacggattgcccacgaccgacccaatgcaggacatggcactggccgagacattgcgactgctgtacaacatcactcattactgcgacgacaaggtttcttcattcactcaggctattccacatatcgtctctctcctgtgcaaaacaccatcgtttgcatcagacaagccccttgatgcccccataggggccctcgtcaacgccctctcgaatctggatctcagtgcaaaagagatacacccatcactcttccccaagtcagaccccaatcttctcactaatcgtctcatcgacatcctttcgcgctgtagaacgaagtatgacgatgatgcactggaaaccaatgtcccctcccttctctcggtcatacgggtgctatacgagcatgccccagaggaagtgcaagcctccatacgtgagaagcttctaccaacggaagaagaccgtaatgaggtactgggccgcactgactcgctctcgtcgtggatgctgaagacttctgtcaatggtctaacgccgaagctacgggatacgatctcatatctcctgttcgacctctccgataaggatgccagcaagttcgtcgagaatgttggatacggctttgcatctggtttcttgtacaataacaacatgtccatccctcaaagtgcgtcggaagcttttagtaatggacctggggactcttctcgacccattaatcccgtcactggccagttcctcgatgccgagagacacgccgagatgcctgagatgacagaggaagagaaggagcgcgaggcggagaggttattcgttctcttcgagagattacgggcaaatggggtcatatcagccgagaatcctgtacggacagcagtggaagagggtcggtttgaggaactgcctgacgattatgaggaagaacgacgataacacatactagacatgttggcaatgtacgtaacctggaaacaggcagtaaaccaatgcaatggcttattctgagcgtgctgtagaggcaattcagtttacggtggcttgcaaatgaagggctctcgtaaagatctcgggttgagttgaaataagaggattctacaactgcttagaggtggccactatatcatcaactcttgatatggcctcacccatggatgcaagaagatgtagatctgacgtcaagtgcgcctttgcctcgccttccgtaattatggccaagctggcctcataataacaacactcacgga

SEQ ID NO: 18931 - DNA, 909 bp, Muscodor strobelii
  misc_feature: SGI cDNA ID NO. 566358
  misc_feature: Encodes the peptide sequence at SEQ ID NO 18932
atgtcaggcaatagcgccaacgaaatccacgacgctcagcagcagggcaatgtcgtcgataccctccatgccgccaacgcaattgaccatgttctaggcgacatcgcccccagtgagaccaatcaactcactgacgacttatttgtgagcgctgacgacagagatatagctaagaagggtaaggccaaggtgggcatgtttcgaggcaacccgggcgactacgctgaggtctctgacactggcaacgccgatggcgagggtgaagtcaagactcgtaacgaagcaggacgcgctaaaggcaaggccaagactaccgtcctccataccaaggaggtcaagaacggcgacgacaatgatggcgacagtgaggtcgacgcagcccttacagcattcctgaaccgtggcaaaggaaagaagagagctgtcaagatggagagcgaatctgatgaccagtccaagcccggtcgatccttcaagactaagtctgcctccgcccgtctcgccgtcaagcgcaagcgcgagagtgaggaacgtgtcggcacccgtcgatcatcccgtgccgctgccaacgttgccgcacagcagatcacggagcagagccagcccaagcgcgccaagacagtcgctgctgcagccccctcaacgcctatccgtcgaggcagagccaaaactaagtctgctactcccgcctccggtcgcaagggccgaggcaagggtatcgctaagaaggcagagttcttcgaggtcaacgtcatcctcgactcccgcaagaacaagaggaccaaaaccaccgagtatctggtcaactggaagggataccagcccaaggacaacacgtgggagccggctgagaacctcgccacctgcccccaggtcctcaagaagtatcaggcttccattggcaagtga

SEQ ID NO: 18932 - protein, 302 aa, Muscodor strobelii
  misc_feature: SGI Peptide ID NO. 566358
  misc_feature (247)..(299): Pfam Id: PF00385 Pfam Desc: 'chromo' (CHRromatin Organisation MOdifier) domain
  misc_feature (247)..(302): NCBI GI: 193587398 Blast Desc: : similar to chriz [Acyrthosiphon pisum]
  misc_feature (245)..(296): NCBI GI: 183396792 Blast Desc: chromodomain protein, Y chromosome-like isoform 2 [Mus musculus] gi|38565937|gb|AAH62123.1| Cdyl protein [Mus musculus]
  misc_feature (245)..(296): NCBI GI: 74224307 Blast Desc: protein product [Mus musculus]
  misc_feature (175)..(299): NCBI GI: 145604470 Blast Desc: MGG_14009 [Magnaporthe grisea 70-15] gi|145012462|gb|EDJ97118.1| MGG_14009 [Magnaporthe grisea 70-15]
  misc_feature (245)..(296): NCBI GI: 118086453 Blast Desc: : similar to chromodomain protein, Y chromosome-like [Gallus gallus]
  misc_feature (245)..(296): NCBI GI: 32479358 Blast Desc: chromodomain Y-like protein [Macaca fascicularis]
  misc_feature (245)..(296): NCBI GI: 156121093 Blast Desc: chromodomain protein, Y chromosome-like [Bos taurus] gi|154426020|gb|AAI51604.1| CDYL protein [Bos taurus]
  misc_feature (245)..(296): NCBI GI: 221307494 Blast Desc: chromodomain protein, Y chromosome-like isoform a [Homo sapiens] gi|80476758|gb|AAI08726.1| Chromodomain protein, Y-like [Homo sapiens]
  misc_feature (245)..(296): NCBI GI: 158256634 Blast Desc: protein product [Homo sapiens]
  misc_feature (242)..(296): NCBI GI: 194687283 Blast Desc: : similar to chromodomain protein, Y chromosome-like, partial [Bos taurus]
MSGNSANEIHDAQQQGNVVDTLHAANAIDHVLGDIAPSETNQLTDDLFVSADDRDIAKKGKAKVGMFRGNPGDYAEVSDTGNADGEGEVKTRNEAGRAKGKAKTTVLHTKEVKNGDDNDGDSEVDAALTAFLNRGKGKKRAVKMESESDDQSKPGRSFKTKSASARLAVKRKRESEERVGTRRSSRAAANVAAQQITEQSQPKRAKTVAAAAPSTPIRRGRAKTKSATPASGRKGRGKGIAKKAEFFEVNVILDSRKNKRTKTTEYLVNWKGYQPKDNTWEPAENLATCPQVLKKYQASIGK

SEQ ID NO: 18933 - DNA, 578 bp, Muscodor strobelii
  misc_feature: SGI EST ID NO. CUFF.44455.0
  misc_feature: Variant of the nucleotide sequence at SEQ ID NO 18931
tgggcatgtttcgaggcaacccgggcgactacgctgaggtctctgacactggcaacgccgatggcgagggtgaagtcaagactcgtaacgaagcaggacgcgctaaaggcaaggccaagactaccgtcctccataccaaggaggtcaagaacggcgacgacaatgatggcgacagtgaggtcgacgcagcccttacagcattcctgaaccgtggcaaaggaaagaagagagctgtcaagatggagagcgaatctgatgaccagtccaagcccggtcgatccttcaagactaagtctgcctccgcccgtctcgccgtcaagcgcaagcgcgagagtgaggaacgtgtcggcacccgtcgatcatcccgtgccgctgccaacgttgccgcacagcagatcacggagcagagccagcccaagcgcgccaagacagtcgctgctgcagccccctcaacgcctatccgtcgaggcagagccaaaactaagtctgctactcccgcctccggtcgcaagggccgaggcaagggtatcgctaagaaggcagagttcttcgaggtcaacgtcatcctcgactcccgc

SEQ ID NO: 18934 - DNA, 873 bp, Muscodor strobelii
  misc_feature: SGI cDNA ID NO. 566359
  misc_feature: Reduced expression when VOC is produced
  misc_feature: Encodes the peptide sequence at SEQ ID NO 18935
atggacgccctcaaatctgcgctccagcccctccgccccatcacggcggccatgccagctcccatcgcggacatcggcacctcaatcctcggcgacgtctgctacaactcgctgatcctcaacctggaccccaccgacagcgaatgcgtcaagctggccatctccaagggactgggcatcggcatcatcggcgcatcctccatcgtcaaggtgccccagatcctcaagctggtcaactcgcagagcagcgatggcatctccttcctcagctacctgctcgagactgcctcctacctcatcactctggcctacaactggcgcaatgggtttcccttctccacgttcggcgagacggcgctcatcctgggccagaatgtcgtcatctgtgtgctggtgttgaactactcgggccgtgcccccgctgctgccatgtttgtcgccgtcctcgctgccgctttcggggtcctcttccagcagggcgtgctggacatgcagactctgggatacctccaggctggtgccggtgtccttggcgtcgcgagcaaggtcccgcagatcgccgccatcttctccgagggcggtacgggccagctgagtgcttttaccgtcttcaactacctcgccggctccctctcccgcatcttcaccaccctgcaagaagtcgacgacaagctcatcctctacggcttcatcgccggcttcaccctcaacctcgtcctcgccgcccagatgctgtactactggaatgcgccctctgccaaggccaaggggaagatgaaggaggttcctctctcttcttcttccttcgcttcgagcagcgccacgacggctacgcctacgaaaaagggtcctacgacgcgtcgtcgaggatga

SEQ ID NO: 18935 - protein, 290 aa, Muscodor strobelii
  misc_feature: SGI Peptide ID NO. 566359
  misc_feature (51)..(117): Pfam Id: PF04193 Pfam Desc: PQ loop repeat
  misc_feature (1)..(290): NCBI GI: 116182284 Blast Desc: CHGG_01770 [Chaetomium globosum CBS 148.51] gi|88186067|gb|EAQ93535.1| CHGG_01770 [Chaetomium globosum CBS 148.51]
  misc_feature (1)..(290): NCBI GI: 171695338 Blast Desc: protein product [Podospora anserina] gi|170947911|emb|CAP60075.1| protein product [Podospora anserina]
  misc_feature (1)..(290): NCBI GI: 261358625 Blast Desc: mannose-P-dolichol utilization defect 1 protein [Verticillium albo-atrum VaMs.102]
  misc_feature (1)..(290): NCBI GI: 164424890 Blast Desc: NCU11327 [Neurospora crassa OR74A] gi|157070706|gb|EAA36030.2| NCU11327 [Neurospora crassa OR74A]
  misc_feature (1)..(290): NCBI GI: 25294146 Blast Desc: MPU1p [Gibberella moniliformis]
  misc_feature (1)..(290): NCBI GI: 256734823 Blast Desc: [Nectria haematococca mpVI 77-13-4]
  misc_feature (1)..(290): NCBI GI: 154319680 Blast Desc: BC1G_02321 [Botryotinia fuckeliana B05.10] gi|150855979|gb|EDN31171.1| BC1G_02321 [Botryotinia fuckeliana B05.10]
  misc_feature (1)..(290): NCBI GI: 46105296 Blast Desc: FG00276.1 [Gibberella zeae PH-1]
  misc_feature (1)..(252): NCBI GI: 39946600 Blast Desc: MGG_08600 [Magnaporthe grisea 70-15] gi|145012463|gb|EDJ97119.1| MGG_08600 [Magnaporthe grisea 70-15]
  misc_feature (1)..(290): NCBI GI: 189202968 Blast Desc: PTRG_07488 [Pyrenophora tritici-repentis Pt-1C-BFP] gi|187984919|gb|EDU50407.1| PTRG_07488 [Pyrenophora tritici-repentis Pt-1C-BFP]
  misc_feature: Useful for introducing or modulating the production of volatile compounds
MDALKSALQPLRPITAAMPAPIADIGTSILGDVCYNSLILNLDPTDSECVKLAISKGLGIGIIGASSIVKVPQILKLVNSQSSDGISFLSYLLETASYLITLAYNWRNGFPFSTFGETALILGQNVVICVLVLNYSGRAPAAAMFVAVLAAAFGVLFQQGVLDMQTLGYLQAGAGVLGVASKVPQIAAIFSEGGTGQLSAFTVFNYLAGSLSRIFTTLQEVDDKLILYGFIAGFTLNLVLAAQMLYYWNAPSAKAKGKMKEVPLSSSSFASSSATTATPTKKGPTTRRRG

SEQ ID NO: 18936 - DNA, 4378 bp, Muscodor strobelii
  misc_feature: SGI EST ID NO. CUFF.44602.0
  misc_feature: Variant of the nucleotide sequence at SEQ ID NO 18934
cagtggcgcccgttgtagcggcattggagaaccttgcgggcaggggttctttgggggcgggcaaggcagcctacactgcgtagatagggcattcgggacaaggcaggcagctaattaaaatgggaaatttattctatcagaagtcgtctgtcgcctcacatcagcctcgcactttccagctcatccactcgccgtcccttcaaattccacaccggcgtgacgcaacgtgttcactccgatgcagcagcatcatcatcaccatcgccgtcgcgtgaaccttttatagctcccatcgtcatcactccattttcaccgcattgctgcatcccaaacacacaacgacgacaacgacaggatggacgccctcaaatctgcgctccagcccctccgccccatcacggcggccatgccagctcccatcgcggacatcggcacctcaatcctcggcgacgtctgctacaactcgctgatcctcaacctggaccccaccgacagcgaatgcgtcaagctggccatctccaagggactgggcatcggcatcatcggcgcatcctccatcgtcaaggtgccccagatcctcaagctggtcaactcgcagagcagcgatggcatctccttcctcagctacctgctcgagactgcctcctacctcatcactctggcctacaactggcgcaatgggtttcccttctccacgttcggcgagacggcgctcatcctgggccagaatgtcgtcatctgtgtgctggtgttgaactactcgggccgtgcccccgctgctgccatgtttgtcgccgtcctcgctgccgctttcggggtcctcttccagcagggcgtgctggacatgcagactctgggatacctccaggctggtgccggtgtccttggcgtcgcgagcaaggtcccgcagatcgccgccatcttctccgagggcggtacgggccagctgagtgcttttaccgtcttcaactacctcgccggctccctctcccgcatcttcaccaccctgcaagaagtcgacgacaagctcatcctctacggcttcatcgccggcttcaccctcaacctcgtcctcgccgcccagatgctgtactactggaatgcgccctctgccaaggccaaggggaagatgaaggaggttcctctctcttcttcttccttcgcttcgagcagcgccacgacggctacgcctacgaaaaagggtcctacgacgcgtcgtcgaggatgattacgatgaggcaggttttttgtcgcgagggagcatggggtcatctgcgttgcattgttgattgagcagagtctgtctacgtagctactgttttaatcacgcttaatacatacacattctgccaactcttatcccctgtcgctctcattctccgtgtatgcacatcataatatcctcgtattcggatgctatcaatcctgagtatggcggatttgctgctttttcttaccttggctgcctgctgcagattatgaccattacctaatatttttctcaagtagtcttctcgaggcgttgcgcaacctaggtagatggcccccagcttgcccaggcactcactcggctgcatacacggcgtcccgtgacaactactatgtcgtggcgcggcgattgatcatcacatctcttgtgctctttacttgcccaatcatttttctgaaatcaagccctgtcgtgcaaggtctcgtgatgctcttgtgctacgggtgccttgcgattctcactgtaagagatatgcttgcatcctaaagggatgaacgttattgggtttcactacgtataattcgatggccaaactaccaatacagtttgctgattatcgaaagttcactcgactaatcagagaatcctgtcttgttaggcgttgattgagccgcattacctgagcatgtgaggctgcaccgtctgtttcgactatggtgtggccttgacgaaagatgcggtactcgaagatgctggggtggaaacatacctgttttctcgctctctgctctgctctgctctgctctgctctgctctgcaatcgttgacaacagcctgcacgatgcatccagaatatgctgcaggtgtgctcgggtcatgtggtgcgtgaggtgggttggtcgtttccgagagagtcccgagaaggccgtcggtcacagtacccgtttcttggaacttgggctccgtcgtgtttctttacgttgtcgtactttgtgcctcgaaacaccatgtgatcaattttgttgtacaagattccgatccctcatgtcttcctctgcctgtttcgcaatgattgaagctgttgtgttgtgctgcgttgacttaacctagtcctttgtcttgctgttgtgctgtaagttgttgcatttctttcctggtgcacttcattccggcacggctctcggtggtggtgactggggcgggcgggctggctggctgacaacctgcggtatcgctattcctgcatttgcaactctcccagaacgttctcgtcaacccaacatgtggcgacacggcagaaaaataatgcattttcaatcggttgcaggtgcagatgaactagctttccctcttgcattgagttctgcttctgcatcctatctttgacagcggcaactcgcttcttccgactggttgtgatggaaggaaagggcgggggatgatttcttgaaatcgccaagtcggcgaggttcccctggtcccaggttgatccatctcccactgttttcggatgtctgctttttcagttgatagttaggtgtcgaggggtgtgatagcgtatgggtagcgtgtgatatggaagatatcttatgtatgtgatccggttgttgtggccgtgacaccgtgggacatccgccttatctcctctgacaatgactaagtagtccttccgaaactgggaagtcctagcgtatgataacacacacacatactgcttcatgttggctgggctcttgttaaaacagcgtcgtttgttttcaagatcattcatcccccatgtgtcacacatcgagataaaacatccaaacctcgccaacgagcgcgaaaatgcaagataggatgattgtgagtggctccgagacgacggcgaaggcgacttgctggtccaacccccttgttatactcttgtgagaacacgcaaccctccgtcccactcgcaaaacactgtagtttggtttccgatgtcgcttgtccattggaaaagacttgcgctacaccatataagggtagtcataactgatgttgcaatcttgccaagccatgttgtaaccatcggtttgtccaattggacgatatggcttgtctttgaatggcgaaaatggatggccaataccaccctcgccacctacaaggaccacagcgcctctgcagaacggcattggtcagatatgtgcccaatgggaaacgctcaatttagttctgaacttttcgcttgctcagtaggacaactgacgagaatgccagctgacaatgcgggactatatcatcataacccatatcccaacctaatggcaactgacagatgcaggcaaggcagctcgggactgacgaggcaggcgagtcagacaggcgagcagggtcgacaaggacagctcgggactgacagagcggacagggctggaaagaccctgatactaccgtcttgcttggccacattactaagcttggtttagtcaagaaaacaagaaacgacagaattgtagatccacatacctcctgactatcctgatcatcaagaccgtatcgcgtacgtggcagctcggcagcaattgcactcaaaggagaacgaaacgaaaccaagatcgcaagattcatcacaccgactctcaggtaagattatacggaaagcccggacgttgttatactcgaaaccttctttcgctgtgcatctgaggtattgcactactcccccggtctatggcgtgatcgacggtgacgaagacagtccagtcagacaacggcgaagagccaatcatgttgcagaattggcttccccacgttgagccaaatggtcacttttgaaacttttaagttttgggcatcgtggatcgtctgtagtcgggatgatggggccaatgaatctactacgcggggagctagattcctacggtacttggtcgagcttgtaaaacactcgttacccatttgctgggtctcgtggaatgcatacgtgttttcgtggattatgcacagttgtctacgagtgcaggttgctatctaagtggctgggagactatctggatggttacgggtgtggttgagatagaagctgtatgcaatgtcggactttgaaacagagacatacgcagaccgactctttgacgcaacaggatgattaaagccaagccacaatgcctatacgtagcctgaccgagcctgacatgcagt

SEQ ID NO: 18937 - DNA, 1713 bp, Muscodor strobelii
  misc_feature: SGI cDNA ID NO. 566360
  misc_feature: Encodes the peptide sequence at SEQ ID NO 18938
atggcacctgacattgattctttcccaccgccaaagaccaacggccatgcttcaacggcgccgccaccagcaccaccgggactcaatgcttgtcctcccaccccaggcacagatgagcttcccaacatcctcttcatcatggcagatcaactagcagcccctcaactcaaaatttacaaccctgaatcccagatcctgacccccaatctggatgctttggctgcccagtccgtccaattcgactcggcctactgcccttcacctctttgtgccccttcgcgtatgagtctgatctcaggccagctgcccatgaagattggagcatacgacaatgcctcgcaaatacccagtgacgtgcccacgtatgcccactacttgcggcttaagggctaccacactgcattggctggcaagatgcattttgtgggcgatcagctgcatgggtatgagactcgcttgaccagtgacatctaccccggcgattttggctgggctgtcaactgggatgaacccgataggcgcttggagtggtaccacaacgccagctccattctgcaggccggcacttgtgtgcgtagcaaccagttggactatgacgaggaggtcatgtataagtcgacgcaattcctgtacgatcaggttcgcgaggggccggacaagcgtcctttctgtctaacgctctcactcactcatccccacgatccttacacgattgaggagaaatattgggacctgtatgagggtgttgacattgctttgcccaaggtccacatccctcaagatcaacaagacaaccacagcaagcgtctcctcaaagtgaccgatatctggggtaagaatttcacagatgaacagatcaagcgcgcaagaagagcatattatggcgctgttagctatgtggatgactgcattggccgtattcttcgaaccttgaagcaatgtcgactagaccgcaacaccattgtcgtgtttagtggtgaccacggtgacatgcttggcgagcggggtctttggtacaagatgagctactttgagtcctcggtccgcgttcccctattgatctccgaccctcgacgattccagcctcatcgtgtcaaggagaacgtctctactctggacattctccccacgctctgtgacattgtcggcgccgaacttgttccagggctccccatggacggtatctcgatgatgcctcatctccagggcaaacctggccacgataccgtgattgcggaatatacaggcgagggtaccatctcgccccttatgatgatccgacgtggtccatggaagtacatcacctgccccacggatgcaccccagctgttcaacctcgaaaatgatcctctggaattggtcaacctggcagagctagctacaaagacagacggcctgaccgcggacgagcaagaggccaaggccaaatttgccaaattcgaagccgaggccaagtcgagatgggattttgatgccatcaccaaagctgtattcatgtctcagcgtactcgcaggctggtgtggggcgctctcaacaagggcacatttgatgcgtgggattacaaccctcccgacaacggtaccaacaaatacattcggtccttcctgcctcttgacgatctcgaacgccgtgctcgcttccctcctgttgacgagtttggccgtgagacgcgagctatctttgttgatcaggccggagcgcacggcgagtaa

SEQ ID NO: 18938 - protein, 570 aa, Muscodor strobelii
  misc_feature: SGI Peptide ID NO. 566360
  misc_feature (39)..(455): Pfam Id: PF00884 Pfam Desc: Sulfatase
  misc_feature (1)..(570): NCBI GI: 116182282 Blast Desc: CHGG_01769 [Chaetomium globosum CBS 148.51] gi|88186066|gb|EAQ93534.1| CHGG_01769 [Chaetomium globosum CBS 148.51]
  misc_feature (1)..(560): NCBI GI: 46109228 Blast Desc: FG01496.1 [Gibberella zeae PH-1]
  misc_feature (8)..(570): NCBI GI: 145604472 Blast Desc: MGG_08601 [Magnaporthe grisea 70-15] gi|145012464|gb|EDJ97120.1| MGG_08601 [Magnaporthe grisea 70-15]
  misc_feature (1)..(569): NCBI GI: 156041040 Blast Desc: SS1G_11498 [Sclerotinia sclerotiorum 1980] gi|154695882|gb|EDN95620.1| SS1G_11498 [Sclerotinia sclerotiorum 1980]
  misc_feature (1)..(570): NCBI GI: 154305253 Blast Desc: BC1G_08921 [Botryotinia fuckeliana B05.10] gi|150853663|gb|EDN28855.1| BC1G_08921 [Botryotinia fuckeliana B05.10]
  misc_feature (1)..(507): NCBI GI: 261355180 Blast Desc: choline-sulfatase [Verticillium albo-atrum VaMs.102]
  misc_feature (38)..(570): NCBI GI: 171695340 Blast Desc: protein product [Podospora anserina] gi|170947912|emb|CAP60076.1| protein product [Podospora anserina]
  misc_feature (34)..(570): NCBI GI: 85117476 Blast Desc: NCU08364 [Neurospora crassa OR74A] gi|28927073|gb|EAA36031.1| NCU08364 [Neurospora crassa OR74A]
  misc_feature (13)..(555): NCBI GI: 71020801 Blast Desc: UM04484.1 [Ustilago maydis 521] gi|46100364|gb|EAK85597.1| UM04484.1 [Ustilago maydis 521]
  misc_feature (34)..(570): NCBI GI: 169606990 Blast Desc: SNOG_06547 [Phaeosphaeria nodorum SN15] gi|111065258|gb|EAT86378.1| SNOG_06547 [Phaeosphaeria nodorum SN15]
  misc_feature (41)..(548): SWISSPROT Homolog: EC 3.1.6.6 Choline-sulfatase
MAPDIDSFPPPKTNGHASTAPPPAPPGLNACPPTPGTDELPNILFIMADQLAAPQLKIYNPESQILTPNLDALAAQSVQFDSAYCPSPLCAPSRMSLISGQLPMKIGAYDNASQIPSDVPTYAHYLRLKGYHTALAGKMHFVGDQLHGYETRLTSDIYPGDFGWAVNWDEPDRRLEWYHNASSILQAGTCVRSNQLDYDEEVMYKSTQFLYDQVREGPDKRPFCLTLSLTHPHDPYTIEEKYWDLYEGVDIALPKVHIPQDQQDNHSKRLLKVTDIWGKNFTDEQIKRARRAYYGAVSYVDDCIGRILRTLKQCRLDRNTIVVFSGDHGDMLGERGLWYKMSYFESSVRVPLLISDPRRFQPHRVKENVSTLDILPTLCDIVGAELVPGLPMDGISMMPHLQGKPGHDTVIAEYTGEGTISPLMMIRRGPWKYITCPTDAPQLFNLENDPLELVNLAELATKTDGLTADEQEAKAKFAKFEAEAKSRWDFDAITKAVFMSQRTRRLVWGALNKGTFDAWDYNPPDNGTNKYIRSFLPLDDLERRARFPPVDEFGRETRAIFVDQAGAHGE

SEQ ID NO: 18939 - DNA, 3112 bp, Muscodor strobelii
  misc_feature: SGI EST ID NO. CUFF.44498.1
  misc_feature: Variant of the nucleotide sequence at SEQ ID NO 18937
gtttttccgtcgtttccactttccgggcagagtccgggcagtaggggtacacaacgacagaagggtagaagagtccaggcttctaggtcgctcccaagaatcgaaggcggtgacgaggaaatagagcctattactatcgcaaaatagaaacataatccacttacactctacagagagacagacgaggctaatgtcgccatcgcacgacagcccgactcccgtctctacactccaccgactctttcgatcctcctcctctcgaccactcgctctcccttttcggtctgtcgttgttctgttgctggtatgctatgctgacaagtgtccttgagttttatcggtcatcacccatccatccatccatcgcccatttttagtatctctgatcgtcgtcatctctcatctaccgacaaagcttgcaaagtaatacaaatacgcgtgacgtgctagttggaaaatattgaaggattccaattcgaaaagagcctcctgctgatctgtatcgttctcgttctcgccaacttattgttgtcgcctcttcctttgcacgcgttgggctgtaactcgtctacaacaacgacctaaacgtggatcgcgaactattcctctttctttcgtcttcccctgtgattattgatatgcacccgaatccatgtggagatagacctactagttactaaaacaccaacgacccagacgagttcaaataaccgactcatttccgtcattttcgttccgttctcgttccgttctcactctcattctcattctcattcccattctccctatactcgacacagcttcattcctagttatcccccttctcacatacctcactacggtatcgctgtccgacacaacacacacgtacaaacacaactagatacacacacatacatacacacgcacaaacccactatacaatactgtctccccaacttcagtctcttcgtcttacatacaactggacccgacacacaccgacccaccatcaccatggcacctgacattgattctttcccaccgccaaagaccaacggccatgcttcaacggcgccgccaccagcaccaccgggactcaatgcttgtcctcccaccccaggcacagatgagcttcccaacatcctcttcatcatggcagatcaactagcagcccctcaactcaaaatttacaaccctgaatcccagatcctgacccccaatctggatgctttggctgcccagtccgtccaattcgactcggcctactgcccttcacctctttgtgccccttcgcgtatgagtctgatctcaggccagctgcccatgaagattggagcatacgacaatgcctcgcaaatacccagtgacgtgcccacgtatgcccactacttgcggcttaagggctaccacactgcattggctggcaagatgcattttgtgggcgatcagctgcatgggtatgagactcgcttgaccagtgacatctaccccggcgattttggctgggctgtcaactgggatgaacccgataggcgcttggagtggtaccacaacgccagctccattctgcaggccggcacttgtgtgcgtagcaaccagttggactatgacgaggaggtcatgtataagtcgacgcaattcctgtacgatcaggttcgcgaggggccggacaagcgtcctttctgtctaacgctctcactcactcatccccacgatccttacacgattgaggagaaatattgggacctgtatgagggtgttgacattgctttgcccaaggtccacatccctcaagatcaacaagacaaccacagcaagcgtctcctcaaagtgaccgatatctggggtaagaatttcacagatgaacagatcaagcgcgcaagaagagcatattatggcgctgttagctatgtggatgactgcattggccgtattcttcgaaccttgaagcaatgtcgactagaccgcaacaccattgtcgtgtttagtggtgaccacggtgacatgcttggcgagcggggtctttggtacaagatgagctactttgagtcctcggtccgcgttcccctattgatctccgaccctcgacgattccagcctcatcgtgtcaaggagaacgtctctactctggacattctccccacgctctgtgacattgtcggcgccgaacttgttccagggctccccatggacggtatctcgatgatgcctcatctccagggcaaacctggccacgataccgtgattgcggaatatacaggcgagggtaccatctcgccccttatgatgatccgacgtggtccatggaagtacatcacctgccccacggatgcaccccagctgttcaacctcgaaaatgatcctctggaattggtcaacctggcagagctagctacaaagacagacggcctgaccgcggacgagcaagaggccaaggccaaatttgccaaattcgaagccgaggccaagtcgagatgggattttgatgccatcaccaaagctgtattcatgtctcagcgtactcgcaggctggtgtggggcgctctcaacaagggcacatttgatgcgtgggattacaaccctcccgacaacggtaccaacaaatacattcggtccttcctgcctcttgacgatctcgaacgccgtgctcgcttccctcctgttgacgagtttggccgtgagacgcgagctatctttgttgatcaggccggagcgcacggcgagtaaatgcccacatggatacccgaacaatacatttgagcttcgtgtctgcaatagacacccggtcacagattgaaagtgtatatcgtcaatatttgagcgggacgaattatgactgatgatcccagtttgctgccgtgttttttttaaagaagagatacctactctaagtttttttctggtgtcgatttatcttgcagcatttcgatagtcacagcttgggcattgtttgcagggaaaatcccatctattcagcgttttgatttaggtacataggttaagataggaatgtagacatcagaatgaagatcaacaaattgtacataaaggagcctactttggaacattcgagtgatgtgtgcttgatccggtaatgtaagctgatgcgtcagagacgatctactctgtg

SEQ ID NO: 18940 - DNA, 726 bp, Muscodor strobelii
  misc_feature: SGI cDNA ID NO. 566361
  misc_feature: Encodes the peptide sequence at SEQ ID NO 18941
atgtcgtccctcggcctcacccaagacgagctgaaggcggtcgagaagacgcggcagcagctctctcagctgtccaacaccatcaacagcctcaagaatgacgtcttcaccagcaacccactgcccaccctagactccctccagtcctcgaccgacatcctcgagcgcaacatcaccgccatcgtccagatcatggcccagaacgacgacctcttcaaccgcgtcaccgttcacccttccaccaactaccccggccgcacccaggaaggcatcctgctccagctgctgcgcaagaaggccgagcccgacgtcgaggccgccatggacgagggccgcaagaccgccgccgccctgcagctcgatgtgcctggaaagcgggaggagatggaggacatatgggcccaggcactcgccgcatgtagagagggcatcggggagtttgccatgggcgagtcggatccgtacacggccgaggagagggagatgggcatcgagaatgtgaggacggggttgaggaggagcctggatgacgatgactcggatgaagaggaagaggacgacgacgaggacgacgaaaacgacgacaaggagggcgaggatgcggatctcatgattattgatcggccgccgcctccgcctgctcccgcggtcacgacgatggaggtgcctggtgtgagtctggagaacgtgctgaggtttgccacgagggggtcctttaccgggtga

SEQ ID NO: 18941 - protein, 241 aa, Muscodor strobelii
  misc_feature: SGI Peptide ID NO. 566361
  misc_feature (1)..(239): NCBI GI: 46109226 Blast Desc: FG01495.1 [Gibberella zeae PH-1]
  misc_feature (9)..(173): NCBI GI: 256730808 Blast Desc: NECHADRAFT_29887 [Nectria haematococca mpVI 77-13-4]
  misc_feature (3)..(175): NCBI GI: 85117480 Blast Desc: NCU08365 [Neurospora crassa OR74A] gi|74618738|sp|Q7SGQ0.1|MED8_NEUCR RecName: Full=Mediator of RNA polymerase II transcription subunit 8; AltName: Full=Mediator 8
  misc_feature (2)..(175): NCBI GI: 261355181 Blast Desc: mediator of RNA polymerase II transcription subunit 8 [Verticillium albo-atrum VaMs.102]
  misc_feature (6)..(175): NCBI GI: 116182280 Blast Desc: CHGG_01768 [Chaetomium globosum CBS 148.51] gi|121790205|sp|Q2HDD6.1|MED8_CHAGB RecName: Full=Mediator of RNA polymerase II transcription subunit 8; AltName: Full=Mediator 8
  misc_feature (4)..(172): NCBI GI: 156046056 Blast Desc: SS1G_09304 [Sclerotinia sclerotiorum 1980] gi|154693700|gb|EDN93438.1| SS1G_09304 [Sclerotinia sclerotiorum 1980]
  misc_feature (1)..(175): NCBI GI: 39946596 Blast Desc: MGG_08602 [Magnaporthe grisea 70-15] gi|145012465|gb|EDJ97121.1| MGG_08602 [Magnaporthe grisea 70-15]
  misc_feature (6)..(176): NCBI GI: 240110335 Blast Desc: CPC735_063670 [Coccidioides posadasii C735 delta SOWgp]
  misc_feature (7)..(239): NCBI GI: 121707095 Blast Desc: RNA polymerase II mediator complex component Med8, [Aspergillus clavatus NRRL 1] gi|158512628|sp|A1CHE9.1|MED8_ASPCL RecName: Full=Mediator of RNA polymerase II transcription subunit
  misc_feature (6)..(183): NCBI GI: 240281715 Blast Desc: RNA polymerase II mediator complex component Med8 [Ajellomyces capsulatus H143]
MSSLGLTQDELKAVEKTRQQLSQLSNTINSLKNDVFTSNPLPTLDSLQSSTDILERNITAIVQIMAQNDDLFNRVTVHPSTNYPGRTQEGILLQLLRKKAEPDVEAAMDEGRKTAAALQLDVPGKREEMEDIWAQALAACREGIGEFAMGESDPYTAEEREMGIENVRTGLRRSLDDDDSDEEEEDDDEDDENDDKEGEDADLMIIDRPPPPPAPAVTTMEVPGVSLENVLRFATRGSFTG

SEQ ID NO: 18942 - DNA, 1826 bp, Muscodor strobelii
  misc_feature: SGI EST ID NO. CUFF.44508.0
  misc_feature: Variant of the nucleotide sequence at SEQ ID NO 18940
cgactacttgcatctccgctacaacctctgtcgaagctaccgtacatcgctcaactctcgaatgacgtcgtcgcggcctggttgcgaccattatcagttgctttcatttattcggtggaggtcgttggctcggtcgcttttctatccgatagatcatttcccgcggattgaatcgtctaagggtacctacagtttacacgggcgcggacgggcaacggcgtgtcggaaccttgacccccgaacactcggcttcctccctcccctcctccgactccttcgtctcgcagcgcatctccaacatcaaacatcagagccactcagatcacgcgtagaccgtcgtttcgtctgtggcgcgcctcctcgaccatgtcgtccctcggcctcacccaagacgagctgaaggcggtcgagaagacgcggcagcagctctctcagctgtccaacaccatcaacagcctcaagaatgacgtcttcaccagcaacccactgcccaccctagactccctccagtcctcgaccgacatcctcgagcgcaacatcaccgccatcgtccagatcatggcccagaacgacgacctcttcaaccgcgtcaccgttcacccttccaccaactaccccggccgcacccaggaaggcatcctgctccagctgctgcgcaagaaggccgagcccgacgtcgaggccgccatggacgagggccgcaagaccgccgccgccctgcagctcgatgtgcctggaaagcgggaggagatggaggacatatgggcccaggcactcgccgcatgtagagagggcatcggggagtttgccatgggcgagtcggatccgtacacggccgaggagagggagatgggcatcgagaatgtgaggacggggttgaggaggagcctggatgacgatgactcggatgaagaggaagaggacgacgacgaggacgacgaaaacgacgacaaggagggcgaggatgcggatctcatgattattgatcggccgccgcctccgcctgctcccgcggtcacgacgatggaggtgcctggtgtgagtctggagaacgtgctgaggtttgccacgagggggtcctttaccgggtgaaatgtcaagattgttgatgctgcaactctcatcttacggagctatctattacgggaaggcgatgtctccggagctatatcaatcgagaggctatccgctatacgagtgtcctgccagcgtgcatgaatcgcagccggtgtgttgacagcgagtgggatcaccgaaggaagcaagaatggtgatgcatggctttgcggaggactttcggaggctatcgcgcagcatctatagttgcagagccgttgaaaagcactcgatggacagctccacgggtgattgtgtgttggggctgctgccgatcttgctcttgggctcctcagcgattcggctttcgggttatcgtattctcatcgatccggcgcatcatccggctgcctgtcgatatagcaaacccttttcagctcatctcaacagccctcatcgctgcagatgcgcaaacacttctcacatcgtcgtcgcggagagattgaacctagggtcctagccaatggtacgaagggggtcgcgaaagacagagaaaggtcctgcggtgggatacatgcgtggcggcgatagtatgagatcaagtaaatggcagataggcttaaatacatgcccgtatcgccacgtatgtacacgatgtgccacatgtgacattggatttatttcggcatcacgacgatggcttaaacggcttaagaacttgggtggacagcctacaagcgagttcataggacgctgggggttcaatggag

SEQ ID NO: 18943 - DNA, 1380 bp, Muscodor strobelii
  misc_feature: SGI cDNA ID NO. 566362
  misc_feature: Reduced expression when VOC is produced
  misc_feature: Encodes the peptide sequence at SEQ ID NO 18944
atgagccagattctcacttcccggcaggccgatgagctgcacaaggccatgatcgcatacatggccacggtcggcctgccccagacagcagcggccatgcgccaggagctcgacctcggcgactcgttcaacgacgatacggccaagaagtacgccgggctcttggagaagaagtggaccagcgtcgtgaggctgcagaagaagatcatggatctcgagtccaagaacaccgccctccagtccgagatcgacaacgcgacgcccacctcgctctcgcgccgcaaccaagaccccaccagctggctcccgcgatccccagcccgccacactctgcagtcccaccagcagcccatcacctgtctcgccttccaccctgtcttctcctcgctcgtgactgggtccgaagactcgagcatcaagatctgggactgggagctgggcgagctcgagcgcaccatcaagggccacaccaagcccgtcctcgacgtcgactttggcggcccccgtggcggcacgctcctcgcctcctgctccagcgatctgaccatcaagctctgggacccctccaacaactacaccaacatccgcaccctgcctggccacgaccacagcgtcagcgccgtccgcttcatcccctcgggtgccgccggcgccccgacctcgtccaacctcctggtgtctgcctcgcgcgacaagacgctgcgcatctgggacgtcaccacgggctactgcatccgaacactccggggccatgccgactgggtgcggacggtggatccatccgtggacgggcgcttcctcctgtcggccggcacggaccagacggctaggctctgggacatctcggtcacaaatcccgagaccaagctagctctggtcgggcacgagcacgtcgtcgaatgctgtgttctggctcctccggcggcctacgaacaccttgcgacccttgccggccagaagaagccgcccccggctacgagctcggccgagttcatggctacgggctcgcgcgacaagacgattcggctctgggatgcgcgcggcaactgcatcaagacgctggtgggccacgacaactgggtgcgggcgttggcgttccaccctggcggcaagtatctcctcagcgtcgccgacgacaagacgctgcggtgctgggacctgacgcaagagggcaagtgtgtcaagacgctggcagacacgcacgggcacttcatctcgtgcttgcgatgggcgcccggcatcgtccgcgaccccaacccggcaggttctggcgaggccggcggcgcgaccaatggcactgcggccgccagcacggtgcagatccggtgcgtgatcgcgacgggcagtgtggacatgaacctgcgcatctttgccaattga

SEQ ID NO: 18944 - protein, 459 aa, Muscodor strobelii
  misc_feature: SGI Peptide ID NO. 566362
  misc_feature (348)..(386): Pfam Id: PF00400 Pfam Desc: WD domain, G-beta repeat
  misc_feature (192)..(238): Pfam Id: PF00400 Pfam Desc: WD domain, G-beta repeat
  misc_feature (286)..(345): Pfam Id: PF00400 Pfam Desc: WD domain, G-beta repeat
  misc_feature (242)..(280): Pfam Id: PF00400 Pfam Desc: WD domain, G-beta repeat
  misc_feature (147)..(187): Pfam Id: PF00400 Pfam Desc: WD domain, G-beta repeat
  misc_feature (105)..(143): Pfam Id: PF00400 Pfam Desc: WD domain, G-beta repeat
  misc_feature (391)..(458): Pfam Id: PF00400 Pfam Desc: WD domain, G-beta repeat
  misc_feature (1)..(458): NCBI GI: 70992653 Blast Desc: nuclear migration protein NudF [Aspergillus fumigatus Af293] gi|74670427|sp|Q4WLM7.1|NUDF_ASPFU RecName: Full=Nuclear distribution protein nudF homolog gi|66848808|gb|EAL89137.1| NudF
  misc_feature (1)..(459): NCBI GI: 169622160 Blast Desc: SNOG_14296 [Phaeosphaeria nodorum SN15] gi|111057047|gb|EAT78167.1| SNOG_14296 [Phaeosphaeria nodorum SN15]
  misc_feature (1)..(459): NCBI GI: 226293351 Blast Desc: nuclear distribution protein nudF [Paracoccidioides brasiliensis Pb18]
  misc_feature (1)..(459): NCBI GI: 189191046 Blast Desc: platelet-activating factor acetylhydrolase IB alpha subunit [Pyrenophora tritici-repentis Pt-1C-BFP] gi|187973468|gb|EDU40967.1| platelet-activating factor IB alpha
  misc_feature (1)..(458): NCBI GI: 121700168 Blast Desc: nuclear migration protein NudF [Aspergillus clavatus NRRL 1] gi|119396491|gb|EAW06923.1| nuclear migration protein NudF [Aspergillus clavatus NRRL 1]
  misc_feature (1)..(459): NCBI GI: 164425716 Blast Desc: nuclear migration protein nudF [Neurospora crassa OR74A] gi|157071034|gb|EAA27709.2| nuclear migration protein nudF [Neurospora crassa OR74A]
  misc_feature (1)..(452): NCBI GI: 225683959 Blast Desc: platelet-activating factor acetylhydrolase IB alpha subunit [Paracoccidioides brasiliensis Pb03]
  misc_feature (1)..(435): NCBI GI: 156054054 Blast Desc: SS1G_05875 [Sclerotinia sclerotiorum 1980] gi|154703655|gb|EDO03394.1| SS1G_05875 [Sclerotinia sclerotiorum 1980]
  misc_feature (1)..(458): NCBI GI: 46121319 Blast Desc: FG05038.1 [Gibberella zeae PH-1] gi|109892807|sp|Q4ICM0.1|NUDF_GIBZE RecName: Full=Nuclear distribution protein PAC1; AltName: Full=nudF homolog
  misc_feature (1)..(458): NCBI GI: 255946962 Blast Desc: Pc22g02040 [Penicillium chrysogenum Wisconsin 54-1255] gi|211591265|emb|CAP97492.1| Pc22g02040 [Penicillium chrysogenum Wisconsin 54-1255]
  misc_feature (109)..(390): SWISSPROT Homolog: EC 2.7.11.1 Non-specific serine/threonine protein kinase
  misc_feature: Useful for introducing or modulating the production of volatile compounds
MSQILTSRQADELHKAMIAYMATVGLPQTAAAMRQELDLGDSFNDDTAKKYAGLLEKKWTSVVRLQKKIMDLESKNTALQSEIDNATPTSLSRRNQDPTSWLPRSPARHTLQSHQQPITCLAFHPVFSSLVTGSEDSSIKIWDWELGELERTIKGHTKPVLDVDFGGPRGGTLLASCSSDLTIKLWDPSNNYTNIRTLPGHDHSVSAVRFIPSGAAGAPTSSNLLVSASRDKTLRIWDVTTGYCIRTLRGHADWVRTVDPSVDGRFLLSAGTDQTARLWDISVTNPETKLALVGHEHVVECCVLAPPAAYEHLATLAGQKKPPPATSSAEFMATGSRDKTIRLWDARGNCIKTLVGHDNWVRALAFHPGGKYLLSVADDKTLRCWDLTQEGKCVKTLADTHGHFISCLRWAPGIVRDPNPAGSGEAGGATNGTAAASTVQIRCVIATGSVDMNLRIFAN

SEQ ID NO: 18945 - DNA, 3169 bp, Muscodor strobelii
  misc_feature: SGI EST ID NO. CUFF.44613.2
  misc_feature: Variant of the nucleotide sequence at SEQ ID NO 18943
ctctcatctccatcaccgtccgcttctttgaccagacaagagtttgtagtagtatattttgaacatagattgcttgccattcatcagcctacctcttctgcctctcccccccttgtctgtggtgtctgttctggggttgtacttgagcgatacccctgtccgtagctgcccaccgtctttctaatgttcttgccaggcgcgcatcaattatttggctgtgattgttgacatttgtttgcattcgccgtctccttctactctactttccgcacactttggagcaccgcgcacttcacttcgccgtctctgacttgtgagctgctggaggctctgcagtctctccctaaagtgccttcctagttgtagctattttagctgcgacgcacacactttcgagcataatcctcgcacttgggcgcacccctcgcctggctgccgcccgccgccgtagctaagcttccatcgggcccggttctgtggttctgcgtgcatcactcgacctcacctgcttgttcgccgacagagcgtcagctggccagtcacaagcctcgatttcttcttgacccccttcataccctcgagcattgatgttcgccgagacccgccacactgcggaggacaatcagctaccatgagccagattctcacttcccggcaggccgatgagctgtgagtctcttttctttcctcatcatctcttctcgacaatgcccgcaagcaccccaagcacctccaatccccagagttgcctctggcttcaccctatccaccgggtctcccttggtttcactgctgcatcttccaatgatctagccgagatctacagtcttgatggtgactgctatggcctctgcttacgatgagagctcaatgctatcgtgaggcagttggttactattcagatggtagatctcggaatggctagtgtctctttcttgatcctgtggtcatatgattcttcccccctaaacctgtacgtccaggtcgacgatttgcgccgagcgcatgtttcgccgggccaatccagcaagatagcgacccgagactgccctgctaacgacttgacgcgataggcacaaggccatgatcgcatacatggccacggtcggcctgccccagacagcagcggccatgcgccaggagctcgacctcggcgactcgttcaacgacgatacggccaagaagtacgccgggctcttggagaagaagtggaccagcgtcgtgaggctgcagaagaagatcatggatctcgagtccaagaacaccgccctccagtccgagatcgacaacgcgacgcccacctcgctctcgcgccgcaaccaagaccccaccagctggctcccgcgatccccagcccgccacactctgcagtcccaccagcagcccatcacctgtctcgccttccaccctgtcttctcctcgctcgtgactgggtccgaagactcgagcatcaagatctgggactgggagctgggcgagctcgagcgcaccatcaagggccacaccaagcccgtcctcgacgtcgactttggcggcccccgtggcggcacgctcctcgcctcctgctccagcgatctgaccatcaagctctgggacccctccaacaactacaccaacatccgcaccctgcctggccacgaccacagcgtcagcgccgtccgcttcatcccctcgggtgccgccggcgccccgacctcgtccaacctcctggtgtctgcctcgcgcgacaagacgctgcgcatctgggacgtcaccacgggctactgcatccgaacactccggggccatgccgactgggtgcggacggtggatccatccgtggacgggcgcttcctcctgtcggccggcacggaccagacggctaggctctgggacatctcggtcacaaatcccgagaccaagctagctctggtcgggcacgagcacgtcgtcgaatgctgtgttctggctcctccggcggcctacgaacaccttgcgacccttgccggccagaagaagccgcccccggctacgagctcggccgagttcatggctacgggctcgcgcgacaagacgattcggctctgggatgcgcgcggcaactgcatcaagacgctggtgggccacgacaactgggtgcgggcgttggcgttccaccctggcggcaagtatctcctcagcgtcgccgacgacaagacgctgcggtgctgggacctgacgcaagagggcaagtgtgtcaagacgctggcagacacgcacgggcacttcatctcgtgcttgcgatgggcgcccggcatcgtccgcgaccccaacccggcaggttctggcgaggccggcggcgcgaccaatggcactgcggccgccagcacggtgcagatccggtgcgtgatcgcgacgggcagtgtggacatgaacctgcgcatctttgccaattgacgaagacttgcgcgtgatggcttgtccagctgcgacagccacactgctctcatgtaatatcaggcacaggtacctccggacgacacagccatgcaactcttaggcgggtggcctacccaggtctgacgatctatctggcgataaagggcagccggtttggaggtggagatgtgacgacggaggaggaagagttaatctggggtgaatcacgatagaggagtgtgagtaatgcggaaaaggatcagatttgggcccaagatacccctttgcagtgttgttttgacactatgttacactgttgatattacgaatagctgtggtcgcggctaccttgatggtctggttcgacttgtggacagaaaggggctgatggatggccagtggtaacctgtatgaagatggaagaagacatggtgttggtcacatggaaatggacagataaagggaataggtgtggaagcagctgcatggcaagcttgtcctgggcgggttgggctatcatcacatcacatcacattcagggacggcagaactcatgttatgtgcatgtctgacgctttgtattggcagtataggataggctcttgggctcgaactttagggaagtgtcagcttaggtagacttcaatcatacgagggacgcaacgaagtgagaagagacctgtatcacccaaatggtttttctgttactccttttttcggcagctatggtatgattacataggtatcttatgctagaccgacatcagagaag

SEQ ID NO: 18946 - DNA, 2979 bp, Muscodor strobelii
  misc_feature: SGI cDNA ID NO. 566363
  misc_feature: Reduced expression when VOC is produced
  misc_feature: Encodes the peptide sequence at SEQ ID NO 18947
atgcctcgtccacgcgccaaagccaagggcaaacccaaggacaaacccaaggcgcaggacccaaaccagttgtccttctttcccaggctaatgagaaaagtgtcagacgctctagctgcccgccatcgcaaacacgaagacggagacaccaacgactttgaccgtcgcatctacctcgcgcccaccccttcgccgtacgacctcccggacagcgaacaccctcacgatactcgcgtctccccgcggcggactgagcgagcccaccacactcctgccaacatggctgacggagagcccgactacagctctctgcccctcgccgagcgatgggtgcacaaggtgtggaaagtgcgtaaacaagcctacgaagacgccgccaaggctttcgaggtcacccccgacgagcatgacccggctttccgcccgttcaaccaagaccccagcctgtggaaaggcgccgtcgccgactccaacgtcgccgcacagtcggatggcatcgccgccttttgcgctttcctcaagttcggcgggcgggagaactgcttgcggtctcgaggtcaggtcatcggtcccatagtggaaaagggtctggtgtcgacccgtcccgccaccaaagtctcctccatcgaggcccttctgttactcatcgagttagattccgcgcctcctgtcgtcgaagacatcctccccgctctctctgccaagcaacccaaagtcattgctgctgcattggccgctttgacgaccatctatcacaactatggctgcagggtcgcggatcccaagcctgttctcaaagtcctccccaaggcttttggccatgccgacaagaatgtgcgcgccgaggccactaatctcgccgtcgagttttacagatggctccgcgacgccatgaagcccatgttctggggcgatctgaaacctacacaacagacggatctcgaggctcagttcgacaagatcaaagcggagcccgcgccgaaacaggagcgcctcttaaggtctcagcaggaagctatggcacgagctccaccgcctggcgccgaagacgatggtgcttacgaagacgaaggaggcgacgatgccggtgaagtggatgctttcgatctcgcagaaccccaagacgtactgtccaaggtgcctcccagcttccacgagaacctagcttcatcaaagtggaaagatcgaaaggaggcgttggaaggtctgtacgctgctgtcaacgtgccaagaatcaaagacggggattacaacgagatcaacagagggctggccaagagtatgaaagacgccaacgtggcttgcgtcacgcaggctgcacagtgtattgaagcattggcccaaggcttgcggaagagttatgggaaataccgatctgtggtcatggcccccatcatggagcgattgaaagagaaaaagcagtctgtcgctgatgcgctcggcgctgctctcgatcaggttttcctagctaccaatctcaccgagtgtctggaagacattttgtcgttcctgggccacaaaaatcctcaagtcaaagagggtacagtcaagtttctcatccgctgtctgtgcacaacgcgagacgtcccaagcaagcaagaagtcacgagcattgtcgaagcggcgaagaagcttctgtctgaatctagcgaagggcttcggtctggtggtgccgaagtgctgggaactgtgatgaaaatcttgggagagcgtgccatgaaccctcaccttgaaggattggatgatatccggaaagccaagatccgagaatatttcgagaaagccgaagtcaaagcaaaagacaagcccaagcccaagcccgctccagctccagccgcacgagctccggccgggggggccaaaaagatagtgggagccggtatcaagaaggcgcccggagccgtcaagaaagctgctcctgctcccagcgcaccagctgccgaaccttcggcgcctcttgcaccgcaacctacatcccgagcggcacccgttgctggcaagctggggatgccgaagccttcgggactatcaggtctcaaagcgccgcaaaggcgtattggcgctccagccagcgcagcgtctccaagaagagccccggcagctaccgcgccccagcccgtcgaagacgacgaatatattccctcgtcaccccctcccaagccacgtatcggcctaggacgtggcggtctcgcgggcaggtcattagccaagcctatggcgactcctgcgcccgcacccgtatcccccccgccttcgagtggtctctcttccatagagagggctgaacttgaagagctccgcactgccaacgaccatctcttgaggcagattgatgagttccgccaagagaagagcaagatggcatccgagatacaggaactgaagaatcacaacgctgcacttatagaagatcacaccagagacgtactcagcattaaagccaaggagacacagttagtccgcgcacgaagcgatgccgagacttcggagcagaccaacgataggcttcgacgggagttggaacgactcaaacgggcactcagtagagctgagggcctcggtgtctcggctggctccgccagtcccggggtggccagtccgaccaacgatgatgtgggcatctatcacgatgggttcaaccatgcgagtgctaggtccaatcgcatgagttttgccagcaccatgtcggaagagaaggagaatggcggcgatgcaccgccggcgtatgcacgcaacaaactcagccccgagatcaggtacgccagtggctcgagtggacgcggcagcccggcccgcgggtttcgatcagctgctgtggaggaccgagcgcccagcgcaggagacagttcgacaactgcggccggcagtgggacagccgcaaatggagccgaaagctggaagagggccgccgaagtaacgagtcagctgaaggccaggatcgagcaaatgaaggctaaacagggcttcaatcggccttga

SEQ ID NO: 18947 - protein, 992 aa, Muscodor strobelii
  misc_feature: SGI Peptide ID NO. 566363
  misc_feature (92)..(992): NCBI GI: 261360412 Blast Desc: spindle pole body component alp14 [Verticillium albo-atrum VaMs.102]
  misc_feature (94)..(990): NCBI GI: 145607882 Blast Desc: MGG_13613 [Magnaporthe grisea 70-15] gi|145015363|gb|EDJ99899.1| MGG_13613 [Magnaporthe grisea 70-15]
  misc_feature (94)..(992): NCBI GI: 256735655 Blast Desc: NECHADRAFT_90558 [Nectria haematococca mpVI 77-13-4]
  misc_feature (94)..(984): NCBI GI: 171678567 Blast Desc: protein product [Podospora anserina] gi|170937353|emb|CAP62011.1| protein product [Podospora anserina]
  misc_feature (94)..(991): NCBI GI: 156054052 Blast Desc: SS1G_05874 [Sclerotinia sclerotiorum 1980] gi|154703654|gb|EDO03393.1| SS1G_05874 [Sclerotinia sclerotiorum 1980]
  misc_feature (94)..(992): NCBI GI: 164425720 Blast Desc: NCU04535 [Neurospora crassa OR74A] gi|157071036|gb|EAA27710.2| NCU04535 [Neurospora crassa OR74A]
  misc_feature (92)..(991): NCBI GI: 154295685 Blast Desc: BC1G_13113 [Botryotinia fuckeliana B05.10] gi|150843993|gb|EDN19186.1| BC1G_13113 [Botryotinia fuckeliana B05.10]
  misc_feature (98)..(992): NCBI GI: 46138027 Blast Desc: FG10528.1 [Gibberella zeae PH-1]
  misc_feature (94)..(991): NCBI GI: 121700170 Blast Desc: spindle pole body component, [Aspergillus clavatus NRRL 1] gi|119396492|gb|EAW06924.1| spindle pole body component, [Aspergillus clavatus NRRL 1]
  misc_feature (94)..(992): NCBI GI: 258567946 Blast Desc: conserved [Uncinocarpus reesii 1704] gi|237906163|gb|EEP80564.1| conserved [Uncinocarpus reesii 1704]
  misc_feature: Useful for introducing or modulating the production of volatile compounds
MPRPRAKAKGKPKDKPKAQDPNQLSFFPRLMRKVSDALAARHRKHEDGDTNDFDRRIYLAPTPSPYDLPDSEHPHDTRVSPRRTERAHHTPANMADGEPDYSSLPLAERWVHKVWKVRKQAYEDAAKAFEVTPDEHDPAFRPFNQDPSLWKGAVADSNVAAQSDGIAAFCAFLKFGGRENCLRSRGQVIGPIVEKGLVSTRPATKVSSIEALLLLIELDSAPPVVEDILPALSAKQPKVIAAALAALTTIYHNYGCRVADPKPVLKVLPKAFGHADKNVRAEATNLAVEFYRWLRDAMKPMFWGDLKPTQQTDLEAQFDKIKAEPAPKQERLLRSQQEAMARAPPPGAEDDGAYEDEGGDDAGEVDAFDLAEPQDVLSKVPPSFHENLASSKWKDRKEALEGLYAAVNVPRIKDGDYNEINRGLAKSMKDANVACVTQAAQCIEALAQGLRKSYGKYRSVVMAPIMERLKEKKQSVADALGAALDQVFLATNLTECLEDILSFLGHKNPQVKEGTVKFLIRCLCTTRDVPSKQEVTSIVEAAKKLLSESSEGLRSGGAEVLGTVMKILGERAMNPHLEGLDDIRKAKIREYFEKAEVKAKDKPKPKPAPAPAARAPAGGAKKIVGAGIKKAPGAVKKAAPAPSAPAAEPSAPLAPQPTSRAAPVAGKLGMPKPSGLSGLKAPQRRIGAPASAASPRRAPAATAPQPVEDDEYIPSSPPPKPRIGLGRGGLAGRSLAKPMATPAPAPVSPPPSSGLSSIERAELEELRTANDHLLRQIDEFRQEKSKMASEIQELKNHNAALIEDHTRDVLSIKAKETQLVRARSDAETSEQTNDRLRRELERLKRALSRAEGLGVSAGSASPGVASPTNDDVGIYHDGFNHASARSNRMSFASTMSEEKENGGDAPPAYARNKLSPEIRYASGSSGRGSPARGFRSAAVEDRAPSAGDSSTTAAGSGTAANGAESWKRAAEVTSQLKARIEQMKAKQGFNRP

SEQ ID NO: 18948 - DNA, 7911 bp, Muscodor strobelii
  misc_feature: SGI EST ID NO. CUFF.44793.0
  misc_feature: Variant of the nucleotide sequence at SEQ ID NO 18946
cccacctgaccgacaacatgtcagtccagcccacgcagccgatgtcatcgcagccctgacctgacatctacagattttgtgattcctctattcacttcagcggcccattcgcttgcgatacctacctacgtagcccaaacccgtcaaccacgctgaagtctcacggacttgttcctctattcaccactgaattgacatctgcttgatttcagcaacgtaggtgtgcgcatctgtctgctggtcgttgtctatacgtaatagtctctgttaccccctttaggttaatacttccaacgcgtacactacttcacagttgtctgcgcttttaacatccagcctatcgtcacaccgaattattggcggatgctcgctctctaggctggccgcatcaaacataagagatatatatgcatactacacaatctctgagacgctgttggatcgccgttgagacaggcttaaaattgactcaggcggcctaaaatctgggagatctccaaaacatctttctaagacgctctagctgcccgccatcgcaaacacgaagacggagacaccaacgactttgaccgtcgcatctacctcgcgcccaccccttcgccgtacgacctcccggacagcgaacaccctcacgatactcgcgtctccccgcggcggactgagcgagcccaccacactcctgccaacatggctgacggagagcccgactacagctctctgcccctcgccgagcgatgggtgcacaaggtgtggaaagtgcgtaaacaagcctacgaagacgccgccaaggctttcgaggtcacccccgacgagcatgacccggctttccgcccgttcaaccaagaccccagcctgtggaaaggcgccgtcgccgactccaacgtcgccgcacagtcggatggcatcgccgccttttgcgctttcctcaagttcggcgggcgggagaactgcttgcggtctcgaggtcaggtcatcggtcccatagtggaaaagggtctggtgtcgacccgtcccgccaccaaagtctcctccatcgaggcccttctgttactcatcgagttagattccgcgcctcctgtcgtcgaagacatcctccccgctctctctgccaagcaacccaaagtcattgctgctgcattggccgctttgacgaccatctatcacaactatggctgcagggtcgcggatcccaagcctgttctcaaagtcctccccaaggcttttggccatgccgacaagaatgtgcgcgccgaggccactaatctcgccgtcgagttttacagatggctccgcgacgccatgaagcccatgttctggggcgatctgaaacctacacaacagacggatctcgaggctcagttcgacaagatcaaagcggagcccgcgccgaaacaggagcgcctcttaaggtctcagcaggaagctatggcacgagctccaccgcctggcgccgaagacgatggtgcttacgaagacgaaggaggcgacgatgccggtgaagtggatgctttcgatctcgcagaaccccaagacgtactgtccaaggtgcctcccagcttccacgagaacctagcttcatcaaagtggaaagatcgaaaggaggcgttggaaggtctgtacgctgctgtcaacgtgccaagaatcaaagacggggattacaacgagatcaacagagggctggccaagagtatgaaagacgccaacgtggcttgcgtcacgcaggctgcacagtgtattgaagcattggcccaaggcttgcggaagagttatgggaaataccgatctgtggtcatggcccccatcatggagcgattgaaagagaaaaagcagtctgtcgctgatgcgctcggcgctgctctcgatcaggttttcctagctaccaatctcaccgagtgtctggaagacattttgtcgttcctgggccacaaaaatcctcaagtcaaagagggtacagtcaagtttctcatccgctgtctgtgcacaacgcgagacgtcccaagcaagcaagaagtcacgagcattgtcgaagcggcgaagaagcttctgtctgaatctagcgaagggcttcggtctggtggtgccgaagtgctgggaactgtgatgaaaatcttgggagagcgtgccatgaaccctcaccttgaaggattggatgatatccggaaagccaagatccgagaatatttcgagaaagccgaagtcaaagcaaaagacaagcccaagcccaagcccgctccagctccagccgcacgagctccggccgggggggccaaaaagatagtgggagccggtatcaagaaggcgcccggagccgtcaagaaagctgctcctgctcccagcgcaccagctgccgaaccttcggcgcctcttgcaccgcaacctacatcccgagcggcacccgttgctggcaagctggggatgccgaagccttcgggactatcaggtctcaaagcgccgcaaaggcgtattggcgctccagccagcgcagcgtctccaagaagagccccggcagctaccgcgccccagcccgtcgaagacgacgaatatattccctcgtcaccccctcccaagccacgtatcggcctaggacgtggcggtctcgcgggcaggtcattagccaagcctatggcgactcctgcgcccgcacccgtatcccccccgccttcgagtggtctctcttccatagagagggctgaacttgaagagctccgcactgccaacgaccatctcttgaggcagattgatgagttccgccaagagaagagcaagatggcatccgagatacaggaactgaagaatcacaacgctgcacttatagaagatcacaccagagacgtactcagcattaaagccaaggagacacagttagtccgcgcacgaagcgatgccgagacttcggagcagaccaacgataggcttcgacgggagttggaacgactcaaacgggcactcagtagagctgagggcctcggtgtctcggctggctccgccagtcccggggtggccagtccgaccaacgatgatgtgggcatctatcacgatgggttcaaccatgcgagtgctaggtccaatcgcatgagttttgccagcaccatgtcggaagagaaggagaatggcggcgatgcaccgccggcgtatgcacgcaacaaactcagccccgagatcaggtacgccagtggctcgagtggacgcggcagcccggcccgcgggtttcgatcagctgctgtggaggaccgagcgcccagcgcaggagacagttcgacaactgcggccggcagtgggacagccgcaaatggagccgaaagctggaagagggccgccgaagtaacgagtcagctgaaggccaggatcgagcaaatgaaggctaaacagggcttcaatcggccttgagaggacatcatcggctgggaatactgtgggttgcatttgagcattacgcgttgcttgttacgaaatggcgtgcatagaccgggatgggagctaagtttgggaatgatcggtagagagggcgatcgcgtgtcgattgaagaaaacttggcgaggaatgcattgtttcggcgtcggatgtgtccaaataccccttcgttcatctgcgctgtctggtcttgggttcggttggcttcttgtagatgcgatacgctggaattggcttgagctacaagcacgcctacgcatgcacgtacatatctaagtaatgtctcgtggcactgcgagttgaaaagtgaagcagatttttaaaggcgagagggcgagaacagtctcccttgaaactgcaggtggtagacccgtctggatatcagatgagtagtgcgtatgacatttgctatacgtttagctaaagcaagagatgccagtaatcacgatgggccgctttacggtccctgaagcaagttcactacgtaaataattgagatttcaaggccatcctgatgtgaaaccatacgtcaacccggatcaggtccgaaagtccgatgtctgcactggtaaaataagtattatttcgagtgtttattcgaattcgcaaatccactagaccttgtctcaaaaatctagtgacgagccatgtacaatcctacacatttatacctcctcgttgcatttgtccagcacaagattcgcgtcctcgcccacgaggccatcaagatacgcgagcagcgtcttgaccggcaacatatccatcactccaagagaagggttagaggatttgagagcttggccgccgaacaacacgcggatgtagaattcgccatcgctggtcttgctgtagagttcgaaaactatttcgcttcccatgccaggccacaccatgacatcgatctggaggatactcaagacacggcttacagagccatcatgtgctacgttgtggaaataaaggggcgccggttccctggctataacagcgcgcagatgcgctgctagctctgctatccagatgccgtaagtggaaacagacgctgcaagagattcgggtgcgtctcggtacatctgtgagtattcccattgcccgagtcgatacacggtgtctgcgagactttgggtgatacatggctccgaaggggtcccattgatgagcttacacggcagcgatttcgcgtggcattgtcttgcggataggttatcaaaatagtgatcgaaactagcgtgaaatcccacgtcgttcgacggaaccccagagatagagtcgagggtacggtatagatccgcggcggcagtgaggtgttgtgcccatggagcattagcagaggatttgatgctgttgaatagattactaccagcgggacaactgtattgcggctcgaggctgtcgacgcccgcggcttcgatgagtagtgggatagactcggtcgttttccacatgccaccgattaacataccggccacttggctcgtgatgacgttctgcgtgacgcggtagacgaccttactccgccagtcttcatcacgggctggtagaaattcgaggagttcgtggtagacgccgtacaagtcttggccatgcgtatacgaatcgtccaagccctcggcggtgatctgcgggaattgacatgtccctaaccaacctgattgtgtatagggatttgtaggagagatgaatcctttccaataccccgatgcgggatgcttgtcacctcgaaaaggtgcgccgtagtagaacagaccctgatcgtcacagtcccagtgatattgctctactgggaatgcattgctggcgtagggtgtccttttgtgatggcgttggatctaccaatgtaatatcggtatcagtatctaccaaggcggacatacgtacctataggaaattttgtattggtttgctcacaatttcaacatattttaactcataatcagagagcggcacgggatactctgttttcctgacgcgaggcatgttgcaccagttgtacgtgccatactctgtgtcgggtgtaattgagctatcaaatatgaagccgtacacaccttgcgcagtgaatgctgtggtcagattgttgatcgatgtagcactcggtgcataccagttcagatctactgtctcatttgtcggatatgacgaggctgacgagaccggtgccagtatagctggcgtggctagccagattgatcgcatggctttggattgcacccacagtgtgtaggccgacagcaagagtatcccagttacacctagtctacaggctgtatgcagagtgctttggtcgacttttacatttttaagactattttcggatttattcaccatgatgttcaagtcgcgatgagctgcagatatttgtaagtgacgtactgagttgcattggagaggtgaattagatggtctgacaggcccacgtgcatatgatctgccccgccattccgcagcgatcaacttcggcagcctaaacactaacccattttgaaaacaaaaatgtagaacgatacttcaggagatgattgaaaatagcgtgagttacgagtcgaaggcaaggttcaatcgatacgtacgtgcaggtgcctcttgccggttgtttcagtatttgattagcagcaacaagttttaggtggatgtttgagcgttcatgatgtgaactagaagataatgcgatcatctcataaccaggtgccacctcgttcagatctatcataattcgacgacatgtgagcttgcgcttctcgtttcccttctaacttgtcttatacccagactcatttgcacgttcacgaactctagccctcggtactcttaggctcccacccaggcgtagccatctggaagctctataatacaatcggagtcagtcattactatcttggggatattcaagggattaaacggccacttttactccgaatgcttacctcaaacacaaatgcgggtgatacggtacatccaaccagcgtccagtcgccgagcgagcgtgcatgctgccactcgttgcgttgcacgactacctgagggcgctcacccttcaacacgtctttccctaagaccacgtcccgaacgggtttcccatcatcccaggacagtgagagctgaagcggggcaccggcataatggtgccatatctccacggcgtcgacgacgcggtgccagtgtgagacgccggccgaggcttcgagaaggtagtagatggccgtgctctgagcgcgggaagcggattctgagggattcgtgcggacggttgacgggtcacggaaggtttccacgtagtatcccttttcgggatggggagtcagacctagagccttgatgacgtcttgggccgagagattctgtgactggcttgccatcttgtgcgtatggtgcaggtcaggtgctccgctgtctgtttacggaactgatagctcagtcatcaaatatagaccagtagtccagtactgtgtctcttcctctttaggacaggcaaaataagacgtcggatgagtgagatcagattctcaggcacacggtagaatgaaagacagagataagagaagtaagggaaggtgagttaccactaataagcacggtggtgtattctgcactgccggtgctcggccttttagtgtcagattgacggggaggcggtgacgggcacggcaaggaagggtggtccggagggccggaactctcggattggcgacaagtacccgcatacagcccatcatctaggtgcaacataagtgacatcgactccgttccaacatttctcattggctacgtagatgtagttatacggacccatacagtcgtcccaacacgtgcatgtgtttcctccattacatgtagatttctacaccatttagtgcttgaaacgtatgacgacgtatttgctctagttgttaacagagtcttaactcctcgcttcttcattttgcctcaagacacactaggactgatattggctgacacagagagagtagaacgtggtgcgggaggggggatgggaaagggaggtgattaggtatgtacccgaggcagggggaagcaggttacctgggaattgcgacggtttatctggctcaagccattctcaaggtcatgtatatgtcccgcgtggtattaggacgtgtggacgactgtgggagaaccaaaggcattaccatagctctcgaggtgagaatatatgacatacacccataagccgggcgatgtgctatgttgatgatgttaaaaaggagaaagattcaccttaggtacacagctgatagggtggggagtcgcatgcaacgtacatgtagataagaacggcgtgtacatgtacatgcatctcggatgggacataacgtatgacagctgatgcaggtcggcaggcaacactttagcacacagcacatcttgggcaacttgtctataatctgagtcggacgcgagaaagcgagaggagctggcgacacgatgtgggagcagtatctagagacattgcagactcgacatggataatgtgagtgaga

SEQ ID NO: 18949 - DNA, 2961 bp, Muscodor strobelii
  misc_feature: SGI cDNA ID NO. 566364
  misc_feature: Elevated expression when VOC is produced
  misc_feature: Encodes the peptide sequence at SEQ ID NO 18950
atgcctcgtccacgcgccaaagccaagggcaaacccaaggacaaacccaaggcgcaggacccaaaccagttgtccttctttcccaggctaatgagaaaagtgtcagacgctctagctgcccgccatcgcaaacacgaagacggagacaccaacgactttgaccgtcgcatctacctcgcgcccaccccttcgccgtacgacctcccggacagcgaacaccctcacgatactcgcgtctccccgcggcggactgagcgagcccaccacactcctgccaacatggctgacggagagcccgactacagctctctgcccctcgccgagcgatgggtgcacaaggtgtggaaagtgcgtaaacaagcctacgaagacgccgccaaggctttcgaggtcacccccgacgagcatgacccggctttccgcccgttcaaccaagaccccagcctgtggaaaggcgccgtcgccgactccaacgtcgccgcacagtcggatggcatcgccgccttttgcgctttcctcaagttcggcgggcgggagaactgcttgcggtctcgaggtcaggtcatcggtcccatagtggaaaagggtctggtgtcgacccgtcccgccaccaaagtctcctccatcgaggcccttctgttactcatcgagttagattccgcgcctcctgtcgtcgaagacatcctccccgctctctctgccaagcaacccaaagtcattgctgctgcattggccgctttgacgaccatctatcacaactatggctgcagggtcgcggatcccaagcctgttctcaaagtcctccccaaggcttttggccatgccgacaagaatgtgcgcgccgaggccactaatctcgccgtcgagttttacagatggctccgcgacgccatgaagcccatgttctggggcgatctgaaacctacacaacagacggatctcgaggctcagttcgacaagatcaaagcggagcccgcgccgaaacaggagcgcctcttaaggtctcagcaggaagctatggcacgagctccaccgcctggcgccgaagacgatggtgcttacgaagacgaaggaggcgacgatgccggtgaagtggatgctttcgatctcgcagaaccccaagacgtactgtccaaggtgcctcccagcttccacgagaacctagcttcatcaaagtggaaagatcgaaaggaggcgttggaaggtctgtacgctgctgtcaacgtgccaagaatcaaagacggggattacaacgagatcaacagagggctggccaagagtatgaaagacgccaacgtggcttgcgtcacgcaggctgcacagtgtattgaagcattggcccaaggcttgcggaagagttatgggaaataccgatctgtggtcatggcccccatcatggagcgattgaaagagaaaaagcagtctgtcgctgatgcgctcggcgctgctctcgatcaggttttcctagctaccaatctcaccgagtgtctggaagacattttgtcgttcctgggccacaaaaatcctcaagtcaaagagggtacagtcaagtttctcatccgctgtctgtgcacaacgcgagacgtcccaagcaagcaagaagtcacgagcattgtcgaagcggcgaagaagcttctgtctgaatctagcgaagggcttcggtctggtggtgccgaagtgctgggaactgtgatgaaaatcttgggagagcgtgccatgaaccctcaccttgaaggattggatgatatccggaaagccaagatccgagaatatttcgagaaagccgaagtcaaagcaaaagacaagcccaagcccaagcccgctccagctccagccgcacgagctccggccgggggggccaaaaagatagtgggagccggtatcaagaaggcgcccggagccgtcaagaaagctgctcctgctcccagcgcaccagctgccgaaccttcggcgcctcttgcaccgcaacctacatcccgagcggcacccgttgctggcaagctggggatgccgaagccttcgggactatcaggtctcaaagcgccgcaaaggcgtattggcgctccagccagcgcagcgtctccaagaagagccccggcagctaccgcgccccagcccgtcgaagacgacgaatatattccctcgtcaccccctcccaagccacgtatcggcctaggacgtggcggtctcgcgggcaggtcattagccaagcctatggcgactcctgcgcccgcacccgtatcccccccgccttcgagtggtctctcttccatagagagggctgaacttgaagagctccgcactgccaacgaccatctcttgaggcagattgatgagttccgccaagagaagagcaagatggcatccgagatacaggaactgaagaatcacaacgctgcacttatagaagatcacaccagagacgtactcagcattaaagccaaggagacacagttagtccgcgcacgaagcgatgccgagacttcggagcagaccaacgataggcttcgacgggagttggaacgactcaaacgggcactcagtagagctgagggcctcggtgtctcggctggctccgccagtcccggggtggccagtccgaccaacgatgatgtgggcatctatcacgatgggttcaaccatgcgagtgctaggtccaatcgcatgagttttgccagcaccatgtcggaagagaaggagaatggcggcgatgcaccgccggcgtatgcacgcaacaaactcagccccgagatcaggtacgccagtggctcgagtggacgcggcagcccggcccgcgggtttcgatcagctgctgtggaggaccgagcgcccagcgcaggagacagttcgacaactgcggccggcagtgggacagccgcaaatggagccgaaagctggaagagggccgccgaagtaacgagtcagctgaaggccaggatcgagcaaatgaaggtaagatag

SEQ ID NO: 18950 - protein, 986 aa, Muscodor strobelii
  misc_feature: SGI Peptide ID NO. 566364
  misc_feature (92)..(986): NCBI GI: 261360412 Blast Desc: spindle pole body component alp14 [Verticillium albo-atrum VaMs.102]
  misc_feature (94)..(985): NCBI GI: 145607882 Blast Desc: MGG_13613 [Magnaporthe grisea 70-15] gi|145015363|gb|EDJ99899.1| MGG_13613 [Magnaporthe grisea 70-15]
  misc_feature (94)..(986): NCBI GI: 256735655 Blast Desc: NECHADRAFT_90558 [Nectria haematococca mpVI 77-13-4]
  misc_feature (94)..(985): NCBI GI: 171678567 Blast Desc: protein product [Podospora anserina] gi|170937353|emb|CAP62011.1| protein product [Podospora anserina]
  misc_feature (94)..(986): NCBI GI: 156054052 Blast Desc: SS1G_05874 [Sclerotinia sclerotiorum 1980] gi|154703654|gb|EDO03393.1| SS1G_05874 [Sclerotinia sclerotiorum 1980]
  misc_feature (92)..(986): NCBI GI: 154295685 Blast Desc: BC1G_13113 [Botryotinia fuckeliana B05.10] gi|150843993|gb|EDN19186.1| BC1G_13113 [Botryotinia fuckeliana B05.10]
  misc_feature (94)..(986): NCBI GI: 164425720 Blast Desc: NCU04535 [Neurospora crassa OR74A] gi|157071036|gb|EAA27710.2| NCU04535 [Neurospora crassa OR74A]
  misc_feature (98)..(986): NCBI GI: 46138027 Blast Desc: FG10528.1 [Gibberella zeae PH-1]
  misc_feature (94)..(986): NCBI GI: 121700170 Blast Desc: spindle pole body component, [Aspergillus clavatus NRRL 1] gi|119396492|gb|EAW06924.1| spindle pole body component, [Aspergillus clavatus NRRL 1]
  misc_feature (94)..(986): NCBI GI: 258567946 Blast Desc: conserved [Uncinocarpus reesii 1704] gi|237906163|gb|EEP80564.1| conserved [Uncinocarpus reesii 1704]
  misc_feature: Useful for introducing or modulating the production of volatile compounds
MPRPRAKAKGKPKDKPKAQDPNQLSFFPRLMRKVSDALAARHRKHEDGDTNDFDRRIYLAPTPSPYDLPDSEHPHDTRVSPRRTERAHHTPANMADGEPDYSSLPLAERWVHKVWKVRKQAYEDAAKAFEVTPDEHDPAFRPFNQDPSLWKGAVADSNVAAQSDGIAAFCAFLKFGGRENCLRSRGQVIGPIVEKGLVSTRPATKVSSIEALLLLIELDSAPPVVEDILPALSAKQPKVIAAALAALTTIYHNYGCRVADPKPVLKVLPKAFGHADKNVRAEATNLAVEFYRWLRDAMKPMFWGDLKPTQQTDLEAQFDKIKAEPAPKQERLLRSQQEAMARAPPPGAEDDGAYEDEGGDDAGEVDAFDLAEPQDVLSKVPPSFHENLASSKWKDRKEALEGLYAAVNVPRIKDGDYNEINRGLAKSMKDANVACVTQAAQCIEALAQGLRKSYGKYRSVVMAPIMERLKEKKQSVADALGAALDQVFLATNLTECLEDILSFLGHKNPQVKEGTVKFLIRCLCTTRDVPSKQEVTSIVEAAKKLLSESSEGLRSGGAEVLGTVMKILGERAMNPHLEGLDDIRKAKIREYFEKAEVKAKDKPKPKPAPAPAARAPAGGAKKIVGAGIKKAPGAVKKAAPAPSAPAAEPSAPLAPQPTSRAAPVAGKLGMPKPSGLSGLKAPQRRIGAPASAASPRRAPAATAPQPVEDDEYIPSSPPPKPRIGLGRGGLAGRSLAKPMATPAPAPVSPPPSSGLSSIERAELEELRTANDHLLRQIDEFRQEKSKMASEIQELKNHNAALIEDHTRDVLSIKAKETQLVRARSDAETSEQTNDRLRRELERLKRALSRAEGLGVSAGSASPGVASPTNDDVGIYHDGFNHASARSNRMSFASTMSEEKENGGDAPPAYARNKLSPEIRYASGSSGRGSPARGFRSAAVEDRAPSAGDSSTTAAGSGTAANGAESWKRAAEVTSQLKARIEQMKVR

SEQ ID NO: 18951 - DNA, 7911 bp, Muscodor strobelii; identical to SEQ ID NO: 18948
  misc_feature: SGI EST ID NO. CUFF.44793.0
  misc_feature: Variant of the nucleotide sequence at SEQ ID NO 18949

SEQ ID NO: 18952 - DNA, 1452 bp, Muscodor strobelii
  misc_feature: SGI cDNA ID NO. 566365
  misc_feature: Elevated expression when VOC is produced
  misc_feature: Encodes the peptide sequence at SEQ ID NO 18953
atgcgatcaatctggctagccacgccagctatactggcaccggtctcgtcagcctcgtcatatccgacaaatgagacagtagatctgaactggtatgcaccgagtgctacatcgatcaacaatctgaccacagcattcactgcgcaaggtgtgtacggcttcatatttgatagctcaattacacccgacacagagtatggcacgtacaactggtgcaacatgcctcgcgtcaggaaaacagagtatcccgtgccgctctctgattatgagttaaaatatgttgaaattatccaacgccatcacaaaaggacaccctacgccagcaatgcattcccagtagagcaatatcactgggactgtgacgatcagggtctgttctactacggcgcaccttttcgaggtgacaagcatcccgcatcggggtattggaaaggattcatctctcctacaaatccctatacacaatcaggttggttagggacatgtcaattcccgcagatcaccgccgagggcttggacgattcgtatacgcatggccaagacttgtacggcgtctaccacgaactcctcgaatttctaccagcccgtgatgaagactggcggagtaaggtcgtctaccgcgtcacgcagaacgtcatcacgagccaagtggccggtatgttaatcggtggcatgtggaaaacgaccgagtctatcccactactcatcgaagccgcgggcgtcgacagcctcgagccgcaatacagttgtcccgctggtagtaatctattcaacagcatcaaatcctctgctaatgctccatgggcacaacacctcactgccgccgcggatctataccgtaccctcgactctatctctggggttccgtcgaacgacgtgggatttcacgctagtttcgatcactattttgataacctatccgcaagacaatgccacgcgaaatcgctgccgtgtaagctcatcaatgggaccccttcggagccatgtatcacccaaagtctcgcagacaccgtgtatcgactcgggcaatgggaatactcacagatgtaccgagacgcacccgaatctcttgcagcgtctgtttccacttacggcatctggatagcagagctagcagcgcatctgcgcgctgttatagccagggaaccggcgcccctttatttccacaacgtagcacatgatggctctgtaagccgtgtcttgagtatcctccagatcgatgtcatggtgtggcctggcatgggaagcgaaatagttttcgaactctacagcaagaccagcgatggcgaattctacatccgcgtgttgttcggcggccaagctctcaaatcctctaacccttctcttggagtgatggatatgttgccggtcaagacgctgctcgcgtatcttgatggcctcgtgggcgaggacgcgaatcttgtgctggacaaatgcaacgaggaggtataa

SEQ ID NO: 18953 - protein, 483 aa, Muscodor strobelii
  misc_feature: SGI Peptide ID NO. 566365
  misc_feature (90)..(438): Pfam Id: PF00328 Pfam Desc: Histidine acid phosphatase
  misc_feature (365)..(438): Pfam Id: PF00328 Pfam Desc: Histidine acid phosphatase
  misc_feature (12)..(483): NCBI GI: 256732312 Blast Desc: NECHADRAFT_41379 [Nectria haematococca mpVI 77-13-4]
  misc_feature (26)..(479): NCBI GI: 238842759 Blast Desc: conserved [Microsporum canis CBS 113480]
  misc_feature (27)..(481): NCBI GI: 240110865 Blast Desc: Histidine acid phosphatase family protein [Coccidioides posadasii C735 delta SOWgp]
  misc_feature (2)..(459): NCBI GI: 145608594 Blast Desc: MGG_12813 [Magnaporthe grisea 70-15] gi|145016047|gb|EDK00537.1| MGG_12813 [Magnaporthe grisea 70-15]
  misc_feature (27)..(481): NCBI GI: 119196509 Blast Desc: CIMG_02629 [Coccidioides immitis RS]
  misc_feature (14)..(482): NCBI GI: 225678579 Blast Desc: conserved [Paracoccidioides brasiliensis Pb03]
  misc_feature (14)..(482): NCBI GI: 226285770 Blast Desc: conserved [Paracoccidioides brasiliensis Pb01]
  misc_feature (3)..(409): NCBI GI: 261355467 Blast Desc: conserved [Verticillium albo-atrum VaMs.102]
  misc_feature (50)..(482): NCBI GI: 226294706 Blast Desc: conserved [Paracoccidioides brasiliensis Pb18]
  misc_feature (23)..(482): NCBI GI: 212546237 Blast Desc: conserved [Penicillium marneffei ATCC 18224] gi|210064792|gb|EEA18887.1| conserved [Penicillium marneffei ATCC 18224]
  misc_feature: Useful for introducing or modulating the production of volatile compounds
MRSIWLATPAILAPVSSASSYPTNETVDLNWYAPSATSINNLTTAFTAQGVYGFIFDSSITPDTEYGTYNWCNMPRVRKTEYPVPLSDYELKYVEIIQRHHKRTPYASNAFPVEQYHWDCDDQGLFYYGAPFRGDKHPASGYWKGFISPTNPYTQSGWLGTCQFPQITAEGLDDSYTHGQDLYGVYHELLEFLPARDEDWRSKVVYRVTQNVITSQVAGMLIGGMWKTTESIPLLIEAAGVDSLEPQYSCPAGSNLFNSIKSSANAPWAQHLTAAADLYRTLDSISGVPSNDVGFHASFDHYFDNLSARQCHAKSLPCKLINGTPSEPCITQSLADTVYRLGQWEYSQMYRDAPESLAASVSTYGIWIAELAAHLRAVIAREPAPLYFHNVAHDGSVSRVLSILQIDVMVWPGMGSEIVFELYSKTSDGEFYIRVLFGGQALKSSNPSLGVMDMLPVKTLLAYLDGLVGEDANLVLDKCNEEV

SEQ ID NO: 18954 - DNA, 7770 bp, Muscodor strobelii
  misc_feature: SGI EST ID NO. CUFF.44794.1
  misc_feature: Variant of the nucleotide sequence at SEQ ID NO 18952
tctcactcacattatccatgtcgagtctgcaatgtctctagatactgctcccacatcgtgtcgccagctcctctcgctttctcgcgtccgactcagattatagacaagttgcccaagatgtgctgtgtgctaaagtgttgcctgccgacctgcatcagctgtcatacgttatgtcccatccgagatgcatgtacatgtacacgccgttcttatctacatgtacgttgcatgcgactccccaccctatcagctgtgtacctaaggtgaatctttctcctttttaacatcatcaacatagcacatcgcccggcttatgggtgtatgtcatatattctcacctcgagagctatggtaatgcctttggttctcccacagtcgtccacacgtcctaataccacgcgggacatatacatgaccttgagaatggcttgagccagataaaccgtcgcaattcccaggtaacctgcttccccctgcctcgggtacatacctaatcacctccctttcccatcccccctcccgcaccacgttctactctctctgtgtcagccaatatcagtcctagtgtgtcttgaggcaaaatgaagaagcgaggagttaagactctgttaacaactagagcaaatacgtcgtcatacgtttcaagcactaaatggtgtagaaatctacatgtaatggaggaaacacatgcacgtgttgggacgactgtatgggtccgtataactacatctacgtagccaatgagaaatgttggaacggagtcgatgtcacttatgttgcacctagatgatgggctgtatgcgggtacttgtcgccaatccgagagttccggccctccggaccacccttccttgccgtgcccgtcaccgcctccccgtcaatctgacactaaaaggccgagcaccggcagtgcagaatacaccaccgtgcttattagtggtaactcaccttcccttacttctcttatctctgtctttcattctaccgtgtgcctgagaatctgatctcactcatccgacgtcttattttgcctgtcctaaagaggaagagacacagtactggactactggtctatatttgatgactgagctatcagttccgtaaacagacagcggagcacctgacctgcaccatacgcacaagatggcaagccagtcacagaatctctcggcccaagacgtcatcaaggctctaggtctgactccccatcccgaaaagggatactacgtggaaaccttccgtgacccgtcaaccgtccgcacgaatccctcagaatccgcttcccgcgctcagagcacggccatctactaccttctcgaagcctcggccggcgtctcacactggcaccgcgtcgtcgacgccgtggagatatggcaccattatgccggtgccccgcttcagctctcactgtcctgggatgatgggaaacccgttcgggacgtggtcttagggaaagacgtgttgaagggtgagcgccctcaggtagtcgtgcaacgcaacgagtggcagcatgcacgctcgctcggcgactggacgctggttggatgtaccgtatcacccgcatttgtgtttgagagcttccagatggctacgcctgggtgggagcctaagagtaccgagggctagagttcgtgaacgtgcaaatgagtctgggtataagacaagttagaagggaaacgagaagcgcaagctcacatgtcgtcgaattatgatagatctgaacgaggtggcacctggttatgagatgatcgcattatcttctagttcacatcatgaacgctcaaacatccacctaaaacttgttgctgctaatcaaatactgaaacaaccggcaagaggcacctgcacgtacgtatcgattgaaccttgccttcgactcgtaactcacgctattttcaatcatctcctgaagtatcgttctacatttttgttttcaaaatgggttagtgtttaggctgccgaagttgatcgctgcggaatggcggggcagatcatatgcacgtgggcctgtcagaccatctaattcacctctccaatgcaactcagtacgtcacttacaaatatctgcagctcatcgcgacttgaacatcatggtgaataaatccgaaaatagtcttaaaaatgtaaaagtcgaccaaagcactctgcatacagcctgtagactaggtgtaactgggatactcttgctgtcggcctacacactgtgggtgcaatccaaagccatgcgatcaatctggctagccacgccagctatactggcaccggtctcgtcagcctcgtcatatccgacaaatgagacagtagatctgaactggtatgcaccgagtgctacatcgatcaacaatctgaccacagcattcactgcgcaaggtgtgtacggcttcatatttgatagctcaattacacccgacacagagtatggcacgtacaactggtgcaacatgcctcgcgtcaggaaaacagagtatcccgtgccgctctctgattatgagttaaaatatgttgaaattatccaacgccatcacaaaaggacaccctacgccagcaatgcattcccagtagagcaatatcactgggactgtgacgatcagggtctgttctactacggcgcaccttttcgaggtgacaagcatcccgcatcggggtattggaaaggattcatctctcctacaaatccctatacacaatcaggttggttagggacatgtcaattcccgcagatcaccgccgagggcttggacgattcgtatacgcatggccaagacttgtacggcgtctaccacgaactcctcgaatttctaccagcccgtgatgaagactggcggagtaaggtcgtctaccgcgtcacgcagaacgtcatcacgagccaagtggccggtatgttaatcggtggcatgtggaaaacgaccgagtctatcccactactcatcgaagccgcgggcgtcgacagcctcgagccgcaatacagttgtcccgctggtagtaatctattcaacagcatcaaatcctctgctaatgctccatgggcacaacacctcactgccgccgcggatctataccgtaccctcgactctatctctggggttccgtcgaacgacgtgggatttcacgctagtttcgatcactattttgataacctatccgcaagacaatgccacgcgaaatcgctgccgtgtaagctcatcaatgggaccccttcggagccatgtatcacccaaagtctcgcagacaccgtgtatcgactcgggcaatgggaatactcacagatgtaccgagacgcacccgaatctcttgcagcgtctgtttccacttacggcatctggatagcagagctagcagcgcatctgcgcgctgttatagccagggaaccggcgcccctttatttccacaacgtagcacatgatggctctgtaagccgtgtcttgagtatcctccagatcgatgtcatggtgtggcctggcatgggaagcgaaatagttttcgaactctacagcaagaccagcgatggcgaattctacatccgcgtgttgttcggcggccaagctctcaaatcctctaacccttctcttggagtgatggatatgttgccggtcaagacgctgctcgcgtatcttgatggcctcgtgggcgaggacgcgaatcttgtgctggacaaatgcaacgaggaggtataaatgtgtaggattgtacatggctcgtcactagatttttgagacaaggtctagtggatttgcgaattcgaataaacactcgaaataatacttattttaccagtgcagacatcggactttcggacctgatccgggttgacgtatggtttcacatcaggatggccttgaaatctcaattatttacgtagtgaacttgcttcagggaccgtaaagcggcccatcgtgattactggcatctcttgctttagctaaacgtatagcaaatgtcatacgcactactcatctgatatccagacgggtctaccacctgcagtttcaagggagactgttctcgccctctcgcctttaaaaatctgcttcacttttcaactcgcagtgccacgagacattacttagatatgtacgtgcatgcgtaggcgtgcttgtagctcaagccaattccagcgtatcgcatctacaagaagccaaccgaacccaagaccagacagcgcagatgaacgaaggggtatttggacacatccgacgccgaaacaatgcattcctcgccaagttttcttcaatcgacacgcgatcgccctctctaccgatcattcccaaacttagctcccatcccggtctatgcacgccatttcgtaacaagcaacgcgtaatgctcaaatgcaacccacagtattcccagccgatgatgtcctctcaaggccgattgaagccctgtttagcctgtcgcctggttagccaagggctcggtgctacctttcagaagtaaattctatcttaccttcatttgctcgatcctggccttcagctgactcgttacttcggcggccctcttccagctttcggctccatttgcggctgtcccactgccggccgcagttgtcgaactgtctcctgcgctgggcgctcggtcctccacagcagctgatcgaaacccgcgggccgggctgccgcgtccactcgagccactggcgtacctgatctcggggctgagtttgttgcgtgcatacgccggcggtgcatcgccgccattctccttctcttccgacatggtgctggcaaaactcatgcgattggacctagcactcgcatggttgaacccatcgtgatagatgcccacatcatcgttggtcggactggccaccccgggactggcggagccagccgagacaccgaggccctcagctctactgagtgcccgtttgagtcgttccaactcccgtcgaagcctatcgttggtctgctccgaagtctcggcatcgcttcgtgcgcggactaactgtgtctccttggctttaatgctgagtacgtctctggtgtgatcttctataagtgcagcgttgtgattcttcagttcctgtatctcggatgccatcttgctcttctcttggcggaactcatcaatctgcctcaagagatggtcgttggcagtgcggagctcttcaagttcagccctctctatggaagagagaccactcgaaggcgggggggatacgggtgcgggcgcaggagtcgccataggcttggctaatgacctgcccgcgagaccgccacgtcctaggccgatacgtggcttgggagggggtgacgagggaatatattcgtcgtcttcgacgggctggggcgcggtagctgccggggctcttcttggagacgctgcgctggctggagcgccaatacgcctttgcggcgctttgagacctgatagtcccgaaggcttcggcatccccagcttgccagcaacgggtgccgctcgggatgtaggttgcggtgcaagaggcgccgaaggttcggcagctggtgcgctgggagcaggagcagctttcttgacggctccgggcgccttcttgataccggctcccactatctttttggcccccccggccggagctcgtgcggctggagctggagcgggcttgggcttgggcttgtcttttgctttgacttcggctttctcgaaatattctcggatcttggctttccggatatcatccaatccttcaaggtgagggttcatggcacgctctcccaagattttcatcacagttcccagcacttcggcaccaccagaccgaagcccttcgctagattcagacagaagcttcttcgccgcttcgacaatgctcgtgacttcttgcttgcttgggacgtctcgcgttgtgcacagacagcggatgagaaacttgactgtaccctctttgacttgaggatttttgtggcccaggaacgacaaaatgtcttccagacactcggtgagattggtagctaggaaaacctgatcgagagcagcgccgagcgcatcagcgacagactgctttttctctttcaatcgctccatgatgggggccatgaccacagatcggtatttcccataactcttccgcaagccttgggccaatgcttcaatacactgtgcagcctgcgtgacgcaagccacgttggcgtctttcatactcttggccagccctctgttgatctcgttgtaatccccgtctttgattcttggcacgttgacagcagcgtacagaccttccaacgcctcctttcgatctttccactttgatgaagctaggttctcgtggaagctgggaggcaccttggacagtacgtcttggggttctgcgagatcgaaagcatccacttcaccggcatcgtcgcctccttcgtcttcgtaagcaccatcgtcttcggcgccaggcggtggagctcgtgccatagcttcctgctgagaccttaagaggcgctcctgtttcggcgcgggctccgctttgatcttgtcgaactgagcctcgagatccgtctgttgtgtaggtttcagatcgccccagaacatgggcttcatggcgtcgcggagccatctgtaaaactcgacggcgagattagtggcctcggcgcgcacattcttgtcggcatggccaaaagccttggggaggactttgagaacaggcttgggatccgcgaccctgcagccatagttgtgatagatggtcgtcaaagcggccaatgcagcagcaatgactttgggttgcttggcagagagagcggggaggatgtcttcgacgacaggaggcgcggaatctaactcgatgagtaacagaagggcctcgatggaggagactttggtggcgggacgggtcgacaccagacccttttccactatgggaccgatgacctgacctcgagaccgcaagcagttctcccgcccgccgaacttgaggaaagcgcaaaaggcggcgatgccatccgactgtgcggcgacgttggagtcggcgacggcgcctttccacaggctggggtcttggttgaacgggcggaaagccgggtcatgctcgtcgggggtgacctcgaaagccttggcggcgtcttcgtaggcttgtttacgcactttccacacctggatctcatgtgaatacggacacagcattggacgagtgacagcgtgcgtggctcaccttgtgcacccatcgctcggcgaggggcagagagctgtagtcgggctctccgtcagccatgttggcaggagtgtggtgggctcgctcagtccgccgcggggagacgcgagtatcgtgagggtgttcgctgtccgggaggtcgtacggcgaaggggtgggcgcgaggtagatgcgacggtcaaagtcgttggtgtctccgtcttcgtgtttgcgatggcgggcagctagagcgtctgacacttttctcattagcctgggaaagaaggacaactggtttgggtcctgcgccttgggtttgtccttgggtttgcccttggctttggcgcgtggacgaggcatcttgcctaggtaggtgctggagggatagcagtcgtagcctcgtacaacagcagcgaggcgcatcgaaatggagtagactgagcagagcatgtacacagagtcgtaaggtacagtcaccgagtcggagagtggtgtgtgttcttggaagggggacgacaagcgagggtagatgtagctgggaagctgcggcttcgcctgcgagcttgttgttgcaggagaggtccacgagcaaacggccgaggcttctcagacgttgaacaaacgggaaggggcatacagcagcgtcatggagagccgcagtgccatggggc

SEQ ID NO: 18955 - DNA, 780 bp, Muscodor strobelii
  misc_feature: SGI cDNA ID NO. 566366
  misc_feature: Elevated expression when VOC is produced
  misc_feature: Encodes the peptide sequence at SEQ ID NO 18956
atgtggaaaacgaccgagtctatcccactactcatcgaagccgcgggcgtcgacagcctcgagccgcaatacagttgtcccgctggtagtaatctattcaacagcatcaaatcctctgctaatgctccatgggcacaacacctcactgccgccgcggatctataccgtaccctcgactctatctctggggttccgtcgaacgacgtgggatttcacgctagtttcgatcactattttgataacctatccgcaagacaatgccacgcgaaatcgctgccgtgtaagctcatcaatgggaccccttcggagccatgtatcacccaaagtctcgcagacaccgtgtatcgactcgggcaatgggaatactcacagatgtaccgagacgcacccgaatctcttgcagcgtctgtttccacttacggcatctggatagcagagctagcagcgcatctgcgcgctgttatagccagggaaccggcgcccctttatttccacaacgtagcacatgatggctctgtaagccgtgtcttgagtatcctccagatcgatgtcatggtgtggcctggcatgggaagcgaaatagttttcgaactctacagcaagaccagcgatggcgaattctacatccgcgtgttgttcggcggccaagctctcaaatcctctaacccttctcttggagtgatggatatgttgccggtcaagacgctgctcgcgtatcttgatggcctcgtgggcgaggacgcgaatcttgtgctggacaaatgcaacgaggaggtataa

SEQ ID NO: 18956 - protein, 259 aa, Muscodor strobelii
  misc_feature: SGI Peptide ID NO. 566366
  misc_feature (141)..(214): Pfam Id: PF00328 Pfam Desc: Histidine acid phosphatase
  misc_feature (1)..(259): NCBI GI: 256732312 Blast Desc: NECHADRAFT_41379 [Nectria haematococca mpVI 77-13-4]
  misc_feature (1)..(257): NCBI GI: 240110865 Blast Desc: Histidine acid phosphatase family protein [Coccidioides posadasii C735 delta SOWgp]
  misc_feature (1)..(255): NCBI GI: 238842759 Blast Desc: conserved [Microsporum canis CBS 113480]
  misc_feature (1)..(257): NCBI GI: 119196509 Blast Desc: CIMG_02629 [Coccidioides immitis RS]
  misc_feature (4)..(235): NCBI GI: 145608594 Blast Desc: MGG_12813 [Magnaporthe grisea 70-15] gi|145016047|gb|EDK00537.1| MGG_12813 [Magnaporthe grisea 70-15]
  misc_feature (1)..(256): NCBI GI: 169595838 Blast Desc: SNOG_00663 [Phaeosphaeria nodorum SN15] gi|160701168|gb|EAT92158.2| SNOG_00663 [Phaeosphaeria nodorum SN15]
  misc_feature (1)..(257): NCBI GI: 258569617 Blast Desc: [Uncinocarpus reesii 1704] gi|237903882|gb|EEP78283.1| [Uncinocarpus reesii 1704]
  misc_feature (1)..(258): NCBI GI: 212546237 Blast Desc: conserved [Penicillium marneffei ATCC 18224] gi|210064792|gb|EEA18887.1| conserved [Penicillium marneffei ATCC 18224]
  misc_feature (1)..(258): NCBI GI: 226285770 Blast Desc: conserved [Paracoccidioides brasiliensis Pb01]
  misc_feature (1)..(255): NCBI GI: 242823966 Blast Desc: DNA replication factor C subunit Rfc4, [Talaromyces stipitatus ATCC 10500] gi|218713087|gb|EED12512.1| DNA replication factor C subunit Rfc4, [Talaromyces stipitatus ATCC
  misc_feature: Useful for introducing or modulating the production of volatile compounds
MWKTTESIPLLIEAAGVDSLEPQYSCPAGSNLFNSIKSSANAPWAQHLTAAADLYRTLDSISGVPSNDVGFHASFDHYFDNLSARQCHAKSLPCKLINGTPSEPCITQSLADTVYRLGQWEYSQMYRDAPESLAASVSTYGIWIAELAAHLRAVIAREPAPLYFHNVAHDGSVSRVLSILQIDVMVWPGMGSEIVFELYSKTSDGEFYIRVLFGGQALKSSNPSLGVMDMLPVKTLLAYLDGLVGEDANLVLDKCNEEV

SEQ ID NO: 18957 - DNA, 7770 bp, Muscodor strobelii; identical to SEQ ID NO: 18954
  misc_feature: SGI EST ID NO. CUFF.44794.1
  misc_feature: Variant of the nucleotide sequence at SEQ ID NO 18955

SEQ ID NO: 18958 - DNA, 483 bp, Muscodor strobelii
  misc_feature: SGI cDNA ID NO. 566367
  misc_feature: Encodes the peptide sequence at SEQ ID NO 18959
atggcaagccagtcacagaatctctcggcccaagacgtcatcaaggctctaggtctgactccccatcccgaaaagggatactacgtggaaaccttccgtgacccgtcaaccgtccgcacgaatccctcagaatccgcttcccgcgctcagagcacggccatctactaccttctcgaagcctcggccggcgtctcacactggcaccgcgtcgtcgacgccgtggagatatggcaccattatgccggtgccccgcttcagctctcactgtcctgggatgatgggaaacccgttcgggacgtggtcttagggaaagacgtgttgaagggtgagcgccctcaggtagtcgtgcaacgcaacgagtggcagcatgcacgctcgctcggcgactggacgctggttggatgtaccgtatcacccgcatttgtgtttgagagcttccagatggctacgcctgggtgggagcctaagagtaccgagggctag

SEQ ID NO: 18959 - protein, 160 aa, Muscodor strobelii
  misc_feature: SGI Peptide ID NO. 566367
  misc_feature (10)..(150): Pfam Id: PF06172 Pfam Desc: Cupin superfamily (DUF985)
  misc_feature (9)..(159): NCBI GI: 67902316 Blast Desc: AN8145.2 [Aspergillus nidulans FGSC A4] gi|40739977|gb|EAA59167.1| AN8145.2 [Aspergillus nidulans FGSC A4] gi|259480911|tpe|CBF73974.1| TPA: DUF985 domain protein FGSC
  misc_feature (9)..(156): NCBI GI: 157488548 Blast Desc: [Claviceps fusiformis]
  misc_feature (9)..(156): NCBI GI: 199429226 Blast Desc: DEHA2A14828p [Debaryomyces hansenii]
  misc_feature (9)..(156): NCBI GI: 156054760 Blast Desc: SS1G_06228 [Sclerotinia sclerotiorum 1980] gi|154704008|gb|EDO03747.1| SS1G_06228 [Sclerotinia sclerotiorum 1980]
  misc_feature (9)..(156): NCBI GI: 50410539 Blast Desc: DEHA0A15136g [Debaryomyces hansenii CBS767]
  misc_feature (9)..(158): NCBI GI: 46119735 Blast Desc: FG04791.1 [Gibberella zeae PH-1]
  misc_feature (1)..(156): NCBI GI: 156054764 Blast Desc: SS1G_06230 [Sclerotinia sclerotiorum 1980] gi|154704010|gb|EDO03749.1| SS1G_06230 [Sclerotinia sclerotiorum 1980]
  misc_feature (7)..(156): NCBI GI: 154276054 Blast Desc: conserved [Ajellomyces capsulatus NAm1] gi|150413945|gb|EDN09310.1| conserved [Ajellomyces capsulatus NAm1]
  misc_feature (7)..(156): NCBI GI: 225555978 Blast Desc: conserved [Ajellomyces capsulatus G186AR]
  misc_feature (8)..(155): NCBI GI: 159185824 Blast Desc: Atu3615 [Agrobacterium tumefaciens str. C58] gi|159140958|gb|AAK89781.2| conserved [Agrobacterium tumefaciens str. C58]
MASQSQNLSAQDVIKALGLTPHPEKGYYVETFRDPSTVRTNPSESASRAQSTAIYYLLEASAGVSHWHRVVDAVEIWHHYAGAPLQLSLSWDDGKPVRDVVLGKDVLKGERPQVVVQRNEWQHARSLGDWTLVGCTVSPAFVFESFQMATPGWEPKSTEG

SEQ ID NO: 18960 - DNA, 7770 bp, Muscodor strobelii; identical to SEQ ID NO: 18954
  misc_feature: SGI EST ID NO. CUFF.44794.1
  misc_feature: Variant of the nucleotide sequence at SEQ ID NO 18958

SEQ ID NO: 18961 - DNA, 504 bp, Muscodor strobelii
  misc_feature: SGI cDNA ID NO. 566368
  misc_feature: Reduced expression when VOC is produced
  misc_feature: Encodes the peptide sequence at SEQ ID NO 18962
atgttcttcctctacaacctcgagcgcagggtgacgctgcacccgtcctacttcggcaagaacatgcacgagctggtcaccggcaagctgctcaaggacgtcgagggcacctgcaccggcagctactacatcatctccatcatggacaccttcgacatctccgagggccgcatcctgcccggcagcgggctcgccgagttcaccgtcggctaccgcgccgtcgtctggcgccccttcaagggcgagaccgtcgacgccgtcgtcgtctccgtcaaccagcacggcttcttcgccgaggccgggcccctgcgcatcttcgtctcgacccacgagatcaggtgggatcccaatgccaccccgccccagttcaccaacaacgaggacaccaccatcgaggtcggcacccacgtgcgcgtcaagatcatgggcacccgagccgaggtcggcgaactctgggccatcgggagcatcaaggaagactatctgggcacactacaggtttga

SEQ ID NO: 18962 - protein, 167 aa, Muscodor strobelii
  misc_feature: SGI Peptide ID NO. 566368
  misc_feature (8)..(76): Pfam Id: PF03876 Pfam Desc: RNA polymerase Rpb7-like, N-terminal domain
  misc_feature (77)..(158): Pfam Id: PF00575 Pfam Desc: S1 RNA binding domain
  misc_feature (1)..(163): NCBI GI: 261356315 Blast Desc: DNA-directed RNA polymerase II subunit RPB7 [Verticillium albo-atrum VaMs.102]
  misc_feature (1)..(166): NCBI GI: 154295091 Blast Desc: BC1G_13674 [Botryotinia fuckeliana B05.10] gi|150844450|gb|EDN19643.1| BC1G_13674 [Botryotinia fuckeliana B05.10]
  misc_feature (1)..(163): NCBI GI: 156050367 Blast Desc: SS1G_07770 [Sclerotinia sclerotiorum 1980] gi|154692171|gb|EDN91909.1| SS1G_07770 [Sclerotinia sclerotiorum 1980]
  misc_feature (1)..(166): NCBI GI: 46108676 Blast Desc: FG01220.1 [Gibberella zeae PH-1]
  misc_feature (1)..(167): NCBI GI: 116207108 Blast Desc: conserved [Chaetomium globosum CBS 148.51] gi|88183444|gb|EAQ90912.1| conserved [Chaetomium globosum CBS 148.51]
  misc_feature (1)..(163): NCBI GI: 171684353 Blast Desc: protein product [Podospora anserina] gi|170942137|emb|CAP67789.1| protein product [Podospora anserina]
  misc_feature (1)..(163): NCBI GI: 38567178 Blast Desc: DNA-directed RNA polymerase II chain Rpb7 [Neurospora crassa]
  misc_feature (1)..(167): NCBI GI: 256735077 Blast Desc: [Nectria haematococca mpVI 77-13-4]
  misc_feature (1)..(165): NCBI GI: 240111582 Blast Desc: DNA-directed RNA polymerase II, [Coccidioides posadasii C735 delta SOWgp]
  misc_feature (1)..(165): NCBI GI: 154283689 Blast Desc: HCAG_02811 [Ajellomyces capsulatus NAm1] gi|150410820|gb|EDN06208.1| HCAG_02811 [Ajellomyces capsulatus NAm1] gi|225561964|gb|EEH10244.1| RNA polymerase II subunit 7 RNA
  misc_feature (1)..(166): SWISSPROT Homolog: EC 2.7.7.6 DNA-directed RNA polymerase
  misc_feature: Useful for introducing or modulating the production of volatile compounds
MFFLYNLERRVTLHPSYFGKNMHELVTGKLLKDVEGTCTGSYYIISIMDTFDISEGRILPGSGLAEFTVGYRAVVWRPFKGETVDAVVVSVNQHGFFAEAGPLRIFVSTHEIRWDPNATPPQFTNNEDTTIEVGTHVRVKIMGTRAEVGELWAIGSIKEDYLGTLQV

SEQ ID NO: 18963 - DNA, 1846 bp, Muscodor strobelii
  misc_feature: SGI EST ID NO. CUFF.44573.0
  misc_feature: Variant of the nucleotide sequence at SEQ ID NO 18961
ctggtttgttgttagatgcagccggatcccacctggaatatcaaagcagaaacctataagtcataatctgttagcatcctactagtagcggctggactaagatgcatgtggacagcaggtacctgttgttcaatgcgcgtgcctaacttctgagagtcacacttttcttaccactcgaacaaggtccagcttcccaacttcaatccaggcctcgcattcattctttgtccatcggccggctgcattcgcccgccaccacgtctgggcctcgcaacaagcccgcgtcgccgtctctgccgttctgcgtcaactctcctcgcctactccctacgctgtctgctcccactttgcatcatcgtcgtcatcgtccatctgcagtctgcagcactcaccactcactgcgtctgcgacctctctcggtcgacctcgctgccgccgtccttgccacactgccacattgccacagacaccaccacgccgcgcgcccgttttgccatgagtctcgcaccctgaccacgaccgacagattctgatcacggccgcctctcgcacccgccccgccagccctccgccaacaccccgaggcgcattgcgcattgcgcgccctggcacccgtcgggcctccgccatgttcttcctctacaacctcgagcgcagggtgacgctgcacccgtcctacttcggcaagaacatgcacgagctggtcaccggcaagctgctcaaggacgtcgagggcacctgcaccggcagctactacatcatctccatcatggacaccttcgacatctccgagggccgcatcctgcccggcagcgggctcgccgagttcaccgtcggctaccgcgccgtcgtctggcgccccttcaagggcgagaccgtcgacgccgtcgtcgtctccgtcaaccagcacggcttcttcgccgaggccgggcccctgcgcatcttcgtctcgacccacttgatccccccaggagatcaggtgggatcccaatgccaccccgccccagttcaccaacaacgaggacaccaccatcgaggtcggcacccacgtgcgcgtcaagatcatgggcacccgagccgaggtcggcgaactctgggccatcgggagcatcaaggaagactatctgggcacactacaggtttgatgggacatgggcttgtatcagggatacaacggtcgaggcctgggcgccggtctcttcgtgccgagggtgtggggcggaatgacaagtggacaaggcattacgaggccagcatgtcactctttgctgcacctcggagaggtgggacgttgttctacatagtgatatttccgagagcttgacttcgcctagcagttgtacggacaaggaaaagcaaggtaaagtctgatcatacttcgtgcgcatgcaccacctcttagtgccaacctgccgccgccaccgctctctaggcatctctggacatctctgggcacgtagtcactataaactgagttaccggggtgaagaagatgcatattttgctacaggcagactctcatcccatcagcccagcacattgcactttcagggctgttcacgggcaaggtatccaccacccctttgacgtagaccggagacaagaggttcatgcgatgtacaggctggcccagaagagccatgtgagggaaagttgagcgaaaggctcaaaactggagcaatatacaatcagtcacatatgccgttcagtctttgctcatgatattgtgtccctcaggccattaaagcaaatgcaatgttgagaagggcgctcgagaggaacacgacgaagagggaaagcaactacaatacaagtctcctgctggaatccgtaagcctcgcatttt

SEQ ID NO: 18964 - DNA, 582 bp, Muscodor strobelii
  misc_feature: SGI cDNA ID NO. 566369
  misc_feature: Encodes the peptide sequence at SEQ ID NO 18965
atgtccctcaatctcgagaaacagctcactttctatggggcatatcaccacaattctgtcaacgtcctcatacacatgatctgtgtgcctttgatattgttcaccggctttgctctcgccgccaacaccggcaccctcatcccgctgccgagcgccctagctgtgtctaacctgcagctcaacctcggcaccattgctgctttgacctggggtgctctgtatgtcctgctggaacctgtagccggcaccatactagctgtcatctgcctcgccgccgccgctctcgccaacgcctctatcgcccatgatcctacatggaccaacaaggttgcctcggtcacccaccttgtttgctggctgctgcagttccttggccacggcgccttcgagcgccgggctcccgccctcctcgacaacctcgttcaggctatcttcctggccccccttttcgtctggctcgagcttctcttcaagtttggctatcgccgagagctgcagggccgtgtcgacaaggccgtccaggccgagattgccaagtttaagagccgtcaggacagcggcaagaatggcaaggcccagtga

SEQ ID NO: 18965 - protein, 193 aa, Muscodor strobelii
  misc_feature: SGI Peptide ID NO. 566369
  misc_feature (3)..(159): Pfam Id: PF06127 Pfam Desc: Domain of function (DUF962)
  misc_feature (1)..(193): NCBI GI: 261356316 Blast Desc: DUF962 domain-containing protein [Verticillium albo-atrum VaMs.102]
  misc_feature (1)..(188): NCBI GI: 38567177 Blast Desc: conserved [Neurospora crassa]
  misc_feature (1)..(193): NCBI GI: 171684355 Blast Desc: protein product [Podospora anserina] gi|170942138|emb|CAP67790.1| protein product [Podospora anserina]
  misc_feature (1)..(193): NCBI GI: 256734361 Blast Desc: [Nectria haematococca mpVI 77-13-4]
  misc_feature (1)..(193): NCBI GI: 46108674 Blast Desc: FG01219.1 [Gibberella zeae PH-1]
  misc_feature (1)..(193): NCBI GI: 156050363 Blast Desc: SS1G_07768 [Sclerotinia sclerotiorum 1980] gi|154692169|gb|EDN91907.1| SS1G_07768 [Sclerotinia sclerotiorum 1980]
  misc_feature (26)..(193): NCBI GI: 39974689 Blast Desc: MGG_00509 [Magnaporthe grisea 70-15] gi|145018592|gb|EDK02871.1| MGG_00509 [Magnaporthe grisea 70-15]
  misc_feature (1)..(192): NCBI GI: 261197850 Blast Desc: DUF962 domain-containing protein [Ajellomyces dermatitidis SLH14081] gi|239595290|gb|EEQ77871.1| DUF962 domain-containing protein [Ajellomyces dermatitidis SLH14081]
  misc_feature (1)..(186): NCBI GI: 169766382 Blast Desc: [Aspergillus oryzae RIB40] gi|238483089|ref|XP_002372783.1| DUF962 domain protein [Aspergillus flavus NRRL3357] gi|83765517|dbj|BAE55660.1| protein
  misc_feature (1)..(192): NCBI GI: 239607717 Blast Desc: DUF962 domain-containing protein [Ajellomyces dermatitidis ER-3]
MSLNLEKQLTFYGAYHHNSVNVLIHMICVPLILFTGFALAANTGTLIPLPSALAVSNLQLNLGTIAALTWGALYVLLEPVAGTILAVICLAAAALANASIAHDPTWTNKVASVTHLVCWLLQFLGHGAFERRAPALLDNLVQAIFLAPLFVWLELLFKFGYRRELQGRVDKAVQAEIAKFKSRQDSGKNGKAQ

SEQ ID NO: 18966 - DNA, 1684 bp, Muscodor strobelii
  misc_feature: SGI EST ID NO. CUFF.44575.0
  misc_feature: Variant of the nucleotide sequence at SEQ ID NO 18964
ctactcttttcaacacactccattaagtttcataccaaatgtaattatcgaagtgctatgtgtactcaaccctcatggcttggaggatactgagatactcttcataaactagcacaatccacaaactggaactgatgtactctacttctgttgtagttattccttgagctcactcccccctctgctggtgctgcctctgccacagctaccgccgccacgcctccctccctcattactctccctcatctcacacctcacgactcacgactcacacctctccgtctgtccgtgttttcaccccttctctctgggttctctgcctattgtcctcgtgacttcaatgatcgaggcaccatgtccctcaatctcgagaaacagctcactttctatggggcatatcaccacaattctgtcaacgtcctcatacacatgatctgtgtgcctttgatattgttcaccggctttgctctcgccgccaacaccggcaccctcatcccgctgccgagcgccctagctgtgtctaacctgcagctcaacctcggcaccattgctgctttgacctggggtgctctgtatgtcctgctggaacctgtagccggcaccatactagctgtcatctgcctcgccgccgccgctctcgccaacgcctctatcgcccatgatcctacatggaccaacaaggttgcctcggtcacccaccttgtttgctggctgctgcagttccttggccacggcgccttcgagcgccgggctcccgccctcctcgacaacctcgttcaggctatcttcctggccccccttttcgtctggctcgagcttctcttcaagtttggctatcgccgagagctgcagggccgtgtcgacaaggccgtccaggccgagattgccaagtttaagagccgtcaggacagcggcaagaatggcaaggcccagtgagcggccgagcgacggccaagtccaaggaactcgacggccgacccgagttcggacgctcgagcaatgccaatcacgatgaaccattcctcactgtattacaaacacaaagaggacgccagcacatggctggaaccacatcgtccagactccacagccgtctgctaagtaatcaccccgaagcttcgtatgggcgaaaggcgtagtagtagtcattcacacagagccaacgcaaaacgtacaacagtatcagtttgatccactatctagtatgccatatcgtcaaggattcgtaacccatctttcgaaacagctctgggcatatactctggcgagcctaagactttaaagtgtattcgacattttgggcattctacaatgcctcgactctggttgcaatagtctacggcagggggtggagggcttaatacaacgttgccaagtcatcatagcgaagctacgccaggtgaagaaagatggttttagaacggtttagaggtcaaccgtgataataaataatatgtggtagtatgtggagctcttgctaggcggtagaaataaggcagtagagatgactgaaaactcgtgtggtacaattctcactttaacctagtactctatagtacgtcttccatatcatgacacactagactctttgggccatggcacaggtaattataaagtaacgtgagaaaacatggcgcttagtacagaacagaaattcttagggtatctcgggggttctattgat

SEQ ID NO: 18967 - DNA, 1479 bp, Muscodor strobelii
  misc_feature: SGI cDNA ID NO. 566370
  misc_feature: Encodes the peptide sequence at SEQ ID NO 18968
atgggtctcgggattcttgaagacctggtcctggacagggttccaggaaccactcaatggcatgttgccaatttcatcccgttcctgggcatcttctattatgataaaacagcccgcaaatggctggaggatttcgatgatccgcagcgacctcaacccgcgcaggggtctacctcgcgccgcttgaagtgcgattacaccggctccgtccctataatgcatccgcaaccatcagacgatccaaacgatccactgaactggccgctctggcgccgcgatctcatcaccttcattctatgtctcaccgctatttttgctacatccttgggtcccattctggccgctaatacgctgaccctctctgtgtggtttcgcctggatttcacctacatcgccctcctaacaggttactttcttctcggtgttggtgtcgccggatttattgtcgtccctactggccgcatatggggcaaacggcacatgttcattcttggcaccgctatcctgatcggaagtagcgcctgggtaggtcaccgatttcttgattccggcacgttcagtttaccaaagttaacaccgcccgcagtaggattccgttgcttttgcgttgcgaaggacgttcagtcttactgggcaggggcggcggggcataattatacaagcctgctctgggctcgcgttatccagggcgttggcgctgcaccattcgaaggtctcgtcaacgcggctgtaggtgacctatattatgtccaccaacgaggcaagcgtatggcttttacgaaccttgccgtcttcgggggcgccttttttacgcctatctgtgtagggaaggtaagtatcattatgttagacatgaaagcatacttctcttattcaaaacccggggccatagatggtaaactgatgattggctggactgtattcattggcgtcattcttgcggcaatctttctgggaccccctctattttgggacgaagtcaatactggttacgcctacacaggcccgttcctaggtgcactgttagggttcttcactgccggggctctagcagactggagcgcgaaggaactcacacgcctcaataacggtatttatgaaccggaatttcgtattttcctagtcattccacagttggtcttcggcgtaactggccttttcggctttgctatcgagggcacattggaaagcgaatatcactgggttgtacctattgtgttcttcgggtttgaggtggcagacatcgtcgatgcgtaccgtaaggctcctttcctgttcttgtgtgatattcaaagattggtcaaactgaaaaactacataggagatctttcaatcgagggatttacctgtctcatcattttcaagaatatgttcagcttcgccttaacattcaaggcatatgattggcttgtacacagtggtatcagaaaggttttctttgcccttggaaccgtccagatcgtcatgtcagtgatctaa

SEQ ID NO: 18968 - protein, 492 aa, Muscodor strobelii
  misc_feature: SGI Peptide ID NO. 566370
  misc_feature (98)..(273): Pfam Id: PF07690 Pfam Desc: Major Facilitator Superfamily
  misc_feature (1)..(492): NCBI GI: 261357502 Blast Desc: conserved [Verticillium albo-atrum VaMs.102]
  misc_feature (1)..(487): NCBI GI: 156057327 Blast Desc: SS1G_04394 [Sclerotinia sclerotiorum 1980] gi|154702180|gb|EDO01919.1| SS1G_04394 [Sclerotinia sclerotiorum 1980]
  misc_feature (1)..(279): NCBI GI: 116196644 Blast Desc: CHGG_04920 [Chaetomium globosum CBS 148.51] gi|88180833|gb|EAQ88301.1| CHGG_04920 [Chaetomium globosum CBS 148.51]
  misc_feature (1)..(279): NCBI GI: 39940310 Blast Desc: MGG_05085 [Magnaporthe grisea 70-15] gi|145010661|gb|EDJ95317.1| MGG_05085 [Magnaporthe grisea 70-15]
  misc_feature (1)..(279): NCBI GI: 171676966 Blast Desc: protein product [Podospora anserina] gi|170936550|emb|CAP61210.1| protein product [Podospora anserina]
  misc_feature (1)..(279): NCBI GI: 256735301 Blast Desc: [Nectria haematococca mpVI 77-13-4]
  misc_feature (1)..(282): NCBI GI: 85106082 Blast Desc: NCU07960 [Neurospora crassa OR74A] gi|28923688|gb|EAA32857.1| conserved [Neurospora crassa OR74A]
  misc_feature (1)..(279): NCBI GI: 154295827 Blast Desc: BC1G_13283 [Botryotinia fuckeliana B05.10] gi|150843833|gb|EDN19026.1| BC1G_13283 [Botryotinia fuckeliana B05.10]
  misc_feature (1)..(279): NCBI GI: 238844748 Blast Desc: conserved [Microsporum canis CBS 113480]
  misc_feature (1)..(282): NCBI GI: 240106576 Blast Desc: Major Facilitator Superfamily protein [Coccidioides posadasii C735 delta SOWgp]
MGLGILEDLVLDRVPGTTQWHVANFIPFLGIFYYDKTARKWLEDFDDPQRPQPAQGSTSRRLKCDYTGSVPIMHPQPSDDPNDPLNWPLWRRDLITFILCLTAIFATSLGPILAANTLTLSVWFRLDFTYIALLTGYFLLGVGVAGFIVVPTGRIWGKRHMFILGTAILIGSSAWVGHRFLDSGTFSLPKLTPPAVGFRCFCVAKDVQSYWAGAAGHNYTSLLWARVIQGVGAAPFEGLVNAAVGDLYYVHQRGKRMAFTNLAVFGGAFFTPICVGKVSIIMLDMKAYFSYSKPGAIDGKLMIGWTVFIGVILAAIFLGPPLFWDEVNTGYAYTGPFLGALLGFFTAGALADWSAKELTRLNNGIYEPEFRIFLVIPQLVFGVTGLFGFAIEGTLESEYHWVVPIVFFGFEVADIVDAYRKAPFLFLCDIQRLVKLKNYIGDLSIEGFTCLIIFKNMFSFALTFKAYDWLVHSGIRKVFFALGTVQIVMSVI

SEQ ID NO: 18969 - DNA, 1585 bp, Muscodor strobelii
  misc_feature: SGI EST ID NO. CUFF.44566.0
  misc_feature: Variant of the nucleotide sequence at SEQ ID NO 18967
cggggccatagatggtaaactggtaagacgtcagctgacacgacacctttcggttcaatagatcaacggttattttgtgctccgcccgtaattaggcgtcgtaacctcaagacgccacaactaatcttcggctatgagtagcacataccattaaatggtggtggacattcaacttggtggccatcttctgcgctgtatctcttgtcgccgtaatcctgttctgccccgagactgcatatcgtcgggatgctgtactgaatacagatattgggatatacgagtcaagcaaacatagctcggtccatgctgctgagaaaggggcaatggatcatacacagacagcctcgtcaactacagagctttctcggcatgcccaacagaagacctttctccaatcattagcgctgttcgacggtcgcaagaccgatgataactttatcaagctattattccggccatttcctcttttcgcccaaccagcatttttgtgggcgagtttaatccaaggcaccatgattggctggactgtattcattggcgtcattcttgcggcaatctttctgggaccccctctattttgggacgaagtcaatactggttacgcctacacaggcccgttcctaggtgcactgttagggttcttcactgccggggctctagcagactggagcgcgaaggaactcacacgcctcaataacggtatttatgaaccggaatttcgtattttcctagtcattccacagttggtcttcggcgtaactggccttttcggctttgctatcggtatgtttggactatcctgcgtgactatgtttcttgacggactgctaatatatcttgataacttatttatagtaagtattactggtccggtatcgaaatcgcgggttttatatacgtggttctacgtgatgaaactgtggaaactgactgacctggcatctttctggctactagactgcgcggtaagtgcatccctgctactaatcctactactaagcgacatcaatcctcgattctgactcggcagcagtaagtcatctggtattttcatgacttcggattgacgatagagtgtgatgtattgcttgtgtccgaatagactgcctaaactggcggcttggtgctatgggctaatgcgacgcagagggcacattggaaagcgaatatcactgggttgtacctattgtgttcttcgggtttgaggtggcaggtactgtaattggtgccgttgcaagctctctctgtatgtgaccacccgcctaagtagtttgtaccaataggagcgtatcatcaagaaacaaagcaagaaacttaggagactggatactgtatgctgacgcgtgataccggctcatagacatcgtcgatgcgtaccgtaaggctcctttcctgttcttgtgtgatattcaaagattggtcaaactgaaaaactacataggagatctttcaatcgagggatttacctgtctcatcattttcaagaatatgttcagcttcgccttaacattcaaggcatatgattggcttgtacacagtggtatcagaaaggttttctttgcccttggaaccgtccagatcgtca

SEQ ID NO: 18970 - DNA, 1353 bp, Muscodor strobelii
  misc_feature: SGI cDNA ID NO. 566371
  misc_feature: Encodes the peptide sequence at SEQ ID NO 18971
atgcagtggcgggtgttcctactatcatgggcggctttgcccctcgccgccagcaccgagacggttctcggcatctatgtcttttcccgtcatggcgatcgcacccccaaaattcttgcgccggccaatctaacgtctctgggagccgacgaggtctatcagtctggcagctggtatcgaaaccgttatgtggctaacgattcattctccccaatcttcggactcagccgcgatacggccgctttgacgcagttggctgtctcagcacccgttgacaatgtattgatgagctccgcttatgccttcttgcaagggttatatccacctgcgggcgccttgacggccgagaagctcgccaacagctcttctctccaaagcccgctcagtggctatcaggctatcgtatcgtccaacaactatctcgtgtcgagcgagtacgccgctgtctatgaccagagccagtcattcttcacaagcttgtcgcctgtaatcaacagcacctacgcgagcaaccagaccaatttcaaaaatgcctactctatcttcgactacatcaatgtcgccaccatccacaacgagtccattccatcgggagatttacttacccctgagaccataaacaagcttcaggtccttgccaacattcacgagtggaatctggcctacaacagctccgatgccgttcgggccatcgccggcgctactctcgctgccgagatcattgaggggctcaatgccactctaacggggaagggcgcacaacctgtcaacatccagttcggtgcatacgctactttctcctcctttttcggccttgcgcagctgcagtccgtgtcggccgactttgaaggtatcgtggactacgcggccaacatggtcttcgaactggtgaccaacgcaacggtgagatccggagacgactaccctagtcccgatgatgtctctgtgcgtttccgattctctaaccagtcctcgggccttgccgagccaagagtatatcctttgttcggccaatccgataccatactcccattctcagactttgccgctcgcatgaacaagtttgctattggtgatactgcctcctggtgtcaagcctgtggtggcaatacgacaggcatatgtgctacctccacgaatgaccctggcgacggtgagtcgaccacgtcatcaaaaacctccaaccatatctctaccgccgttgctggtgttatcggtgctctcgtcacgctggtagttgtgctcggtgtcgaaggcctcattgcccttgttgcaggtttaagggtggtcaagaaatcaacactggcccaaggcggttttaatgatacccccaccactggcgtcaaggtctaa

SEQ ID NO: 18971 - protein, 450 aa, Muscodor strobelii
  misc_feature: SGI Peptide ID NO. 566371
  misc_feature (21)..(321): Pfam Id: PF00328 Pfam Desc: Histidine acid phosphatase
  misc_feature (12)..(436): NCBI GI: 256734572 Blast Desc: NECHADRAFT_90176 [Nectria haematococca mpVI 77-13-4]
  misc_feature (20)..(435): NCBI GI: 227121176 Blast Desc: histidine acid phosphatase [Beauveria bassiana]
  misc_feature (20)..(435): NCBI GI: 46106055 Blast Desc: FG00406.1 [Gibberella zeae PH-1]
  misc_feature (11)..(438): NCBI GI: 154323994 Blast Desc: BC1G_00396 [Botryotinia fuckeliana B05.10] gi|150842625|gb|EDN17818.1| BC1G_00396 [Botryotinia fuckeliana B05.10]
  misc_feature (1)..(432): NCBI GI: 85106078 Blast Desc: NCU07959 [Neurospora crassa OR74A] gi|28923687|gb|EAA32856.1| [Neurospora crassa OR74A]
  misc_feature (1)..(439): NCBI GI: 189189224 Blast Desc: conserved [Pyrenophora tritici-repentis Pt-1C-BFP] gi|187972557|gb|EDU40056.1| conserved [Pyrenophora tritici-repentis Pt-1C-BFP]
  misc_feature (7)..(436): NCBI GI: 238839525 Blast Desc: conserved [Microsporum canis CBS 113480]
  misc_feature (7)..(438): NCBI GI: 70985296 Blast Desc: conserved [Aspergillus fumigatus Af293] gi|66845782|gb|EAL86116.1| conserved [Aspergillus fumigatus Af293] gi|159125923|gb|EDP51039.1| conserved [Aspergillus A1163]
  misc_feature (18)..(432): NCBI GI: 115443246 Blast Desc: conserved [Aspergillus terreus NIH2624] gi|114188299|gb|EAU29999.1| conserved [Aspergillus terreus NIH2624]
  misc_feature (7)..(438): NCBI GI: 121719318 Blast Desc: histidine acid phosphatase, [Aspergillus clavatus NRRL 1] gi|119404556|gb|EAW14932.1| histidine acid phosphatase, [Aspergillus clavatus NRRL 1]
MQWRVFLLSWAALPLAASTETVLGIYVFSRHGDRTPKILAPANLTSLGADEVYQSGSWYRNRYVANDSFSPIFGLSRDTAALTQLAVSAPVDNVLMSSAYAFLQGLYPPAGALTAEKLANSSSLQSPLSGYQAIVSSNNYLVSSEYAAVYDQSQSFFTSLSPVINSTYASNQTNFKNAYSIFDYINVATIHNESIPSGDLLTPETINKLQVLANIHEWNLAYNSSDAVRAIAGATLAAEIIEGLNATLTGKGAQPVNIQFGAYATFSSFFGLAQLQSVSADFEGIVDYAANMVFELVTNATVRSGDDYPSPDDVSVRFRFSNQSSGLAEPRVYPLFGQSDTILPFSDFAARMNKFAIGDTASWCQACGGNTTGICATSTNDPGDGESTTSSKTSNHISTAVAGVIGALVTLVVVLGVEGLIALVAGLRVVKKSTLAQGGFNDTPTTGVKV

SEQ ID NO: 18972 - DNA, 1875 bp, Muscodor strobelii
  misc_feature: SGI EST ID NO. CUFF.44667.2
  misc_feature: Variant of the nucleotide sequence at SEQ ID NO 18970
ggctatcgtatcgtccaacaactatctcgtgtcgagcgagtacgccgctgtctatgaccagagccagtcattcttcacaagcttgtcgcctgtaatcaacagcacctacgcgagcaaccagaccaatttcaaaaatgcctactctatcttcgactacatcaatgtcgccaccatccacaacgagtccattccatcgggagatttacttacccctgagaccataaacaagcttcaggtccttgccaacattcacgagtggaatctggcctacaacagctccgatgccgttcgggccatcgccggcgctactctcgctgccgagatcattgaggggctcaatgccactctaacggggaagggcgcacaacctgtcaacatccagttcggtgcatacgctactttctcctcctttttcggccttgcgcagctgcagtccgtgtcggccgactttgaaggtatcgtggactacgcggccaacatggtcttcgaactggtgaccaacgcaacggtgagatccggagacgactaccctagtcccgatgatgtctctgtgcgtttccgattctctaaccagtcctcgggccttgccgagccaagagtatatcctttgttcggccaatccgataccatactcccattctcagactttgccgctcgcatgaacaagtttgctattggtgatactgcctcctggtgtcaagcctgtggtgtgtataaaacaaccccattccttttcgttatacattgttttcgagaatgatctatgctaatataattgtagtgggtatactcttgatttcgatctaaaaaccccagcacctgcctggaaattctggaatataacaatccaacttcagaccatgacgaataagaaagggaactaacaagttgtggtctactagggcaatacgacaggcatatgtgctacctccacgaatgaccctggcgacggtgagtcgaccacgtcatcaaaaacctccaaccatatctctaccgccgttgctggtgttatcggtgctctcgtcacgctggtagttgtgctcggtgtcgaaggcctcattgcccttgttgcaggtttaagggtggtcaagaaatcaacactggcccaaggcggttttaatgatacccccaccactggcgtcaaggtctaaaagtcgaatacatttacttcctcaagcaacgacagtacgagacgcatgttgcggtatgtatacaagaggaaatgaaagcatcgtactgtaatgtagtcaagtttggttgggccatgcatcgtagtatgatatagtcgagtcaattctagaatgctgctacttgaacagtcgccgccgcatccttctgttgctagaaaacaggagtatcagcaattacagagaaaacgccctccttctgttgcgtgtgggagcgtaaaacgtagcatctcgagtcgagcaatacttcgaagatgtgtagatggatgcagtatgactcttcaaggtcgcggcactagtaagacgaatacatctagcggtatatgtacaatcaccgggcgaggtctcaatgtcgcgtcgattcaatttgcaatgtcataacggtggaaaagtaccttcaaggatgtacatagaaccccacatttccatgcaggattaccatccggactcgcaatagtatatgctacaatggtccatcaacgtgtgagcgcatctggtcagcaaaatcgtcctaagccatagaacttctccagcccgacttgattttattatcacctcaatccgcacacacctaggagatcccggcgatggaagaaactccggttccgtttcccaaagatatctatgctcatgttagaaaccagccagcgtatgggcgacgcttaaagagatcgaagtcgcttgcgca

SEQ ID NO: 18973 - DNA, 1089 bp, Muscodor strobelii
  misc_feature: SGI cDNA ID NO. 566372
  misc_feature: Encodes the peptide sequence at SEQ ID NO 18974
atgtctctcgccatctcatggtccgccacttccctcacgcccgagagacgcgcctcccatcgcctgatcctgcctggcataaagtctttgcatcatgtcgctcgtcgatatcattttctccgctccgccaacccgagacgcatcgataagatcgttatcacctccgacttggccttctgtcctgttgagccctggtctcgcttcctggtttggaacggcaatcgcgccatcttccagcatcctgattcaccgtgggccttcgacgatgctctgcttgtccatcccagcggctctggccttgtggcttatgacctggaaaatggccaacgcaactccattccctttgatgtcacagacagaatcgttaggcgcctacgactcgcccagcgtatcctaatcatcgaatggtgcgaccgcaacgccattgagacccgtcactctcattatgctacagctttcgacgtgcaaaggccgactccatcttccgcaggttcccataggccatatgtttgtaatatagctaggcgctcggaatggaacttgcatcgtcctggtatctccatagaccaccacgatcgcttcttctcggcacacacagctactcattacgcgctctatgtctggcaacggaactgtgccccagaggatcctctggagcagctcactatttgggacatcacaaccgctacaccaatcattattagcagattcagccagcagcacctgaacgatctaggcatcagccagcgtgatactccttcgctctcgacattacttctagacgaggcaaatgtctacttccacgaggaggagcaccgctggctcgcgtgtaccggatttccgttgctcatgatagagggtccgcgctggttcgacgagtgctgtgccgagggcgatattcacatgagtttttgcccgcgcgcacgatctactccattgatcggaagtccaaatcaccacgatcacggtcgatggcccggctacgcaccctgctggcggcacgaagagttcccctacctgacagtatgtgatgtcgtagattcggcagcatgcgtccgcatcgtaagtagtattctaccaggtaactaa

SEQ ID NO: 18974 - protein, 362 aa, Muscodor strobelii
  misc_feature: SGI Peptide ID NO. 566372
  misc_feature (10)..(231): NCBI GI: 85118210 Blast Desc: NCU03022 [Neurospora crassa OR74A] gi|28927216|gb|EAA36172.1| [Neurospora crassa OR74A]
  misc_feature (10)..(231): NCBI GI: 38566970 Blast Desc: [Neurospora crassa]
  misc_feature (30)..(288): NCBI GI: 119496723 Blast Desc: F-box domain protein [Neosartorya fischeri NRRL 181] gi|119413297|gb|EAW23238.1| F-box domain protein [Neosartorya fischeri NRRL 181]
  misc_feature (29)..(259): NCBI GI: 171696144 Blast Desc: protein product [Podospora anserina] gi|170948314|emb|CAP60478.1| protein product [Podospora anserina]
  misc_feature (30)..(288): NCBI GI: 159130755 Blast Desc: F-box domain protein [Aspergillus fumigatus A1163]
  misc_feature (30)..(288): NCBI GI: 70990866 Blast Desc: F-box domain protein [Aspergillus fumigatus Af293] gi|66847914|gb|EAL88244.1| F-box domain protein [Aspergillus fumigatus Af293]
  misc_feature (28)..(335): NCBI GI: 121702731 Blast Desc: F-box domain protein [Aspergillus clavatus NRRL 1] gi|119397773|gb|EAW08204.1| F-box domain protein [Aspergillus clavatus NRRL 1]
  misc_feature (30)..(258): NCBI GI: 145229159 Blast Desc: An01g04610 [Aspergillus niger] gi|134054988|emb|CAK36996.1| protein product [Aspergillus niger]
  misc_feature (29)..(228): NCBI GI: 116181704 Blast Desc: CHGG_01480 [Chaetomium globosum CBS 148.51] gi|88185777|gb|EAQ93245.1| CHGG_01480 [Chaetomium globosum CBS 148.51]
  misc_feature (33)..(288): NCBI GI: 67515935 Blast Desc: AN0249.2 [Aspergillus nidulans FGSC A4] gi|40746966|gb|EAA66122.1| AN0249.2 [Aspergillus nidulans FGSC A4] gi|259489533|tpe|CBF89882.1| TPA: F-box domain protein FGSC
MSLAISWSATSLTPERRASHRLILPGIKSLHHVARRYHFLRSANPRRIDKIVITSDLAFCPVEPWSRFLVWNGNRAIFQHPDSPWAFDDALLVHPSGSGLVAYDLENGQRNSIPFDVTDRIVRRLRLAQRILIIEWCDRNAIETRHSHYATAFDVQRPTPSSAGSHRPYVCNIARRSEWNLHRPGISIDHHDRFFSAHTATHYALYVWQRNCAPEDPLEQLTIWDITTATPIIISRFSQQHLNDLGISQRDTPSLSTLLLDEANVYFHEEEHRWLACTGFPLLMIEGPRWFDECCAEGDIHMSFCPRARSTPLIGSPNHHDHGRWPGYAPCWRHEEFPYLTVCDVVDSAACVRIVSSILPGN

SEQ ID NO: 18975 - DNA, 3279 bp, Muscodor strobelii
  misc_feature: SGI EST ID NO. CUFF.44607.1
  misc_feature: Variant of the nucleotide sequence at SEQ ID NO 18973
gctggacgagggcggtcgactgaggtgcggccttgtcggcggcatcggcggcggggacggcctcgagcaacttctggggcggcctcagcgacggctggggtgtctgtgtcggtggcttctgtggcttctgggatctgggttgggcggcctgggtgcgggcggcgagggcgggcggcagagcatcaagatgcaggtactcggcgtgcagatgcctgggcaagacggcgtctcggtcgggctcggctgcggccagcctgggcttcttggcggcgggagaggcgtagaagagagtgtgggagcgctttgcattctgcagggccagcatctccaggctggggtcgaggctgtggtcgacgacgtccatggcggcaagctgcgtcgctgcgtcgtcgctggctgcacctctcttcgtctgtgcgatctgaccgagggtggtggatgttgtcaagtctgctgtgtgtcgaatctacctatgatgataaatctattgtgagacgaggcagtgcgatgacagacgcgcgtgcagatagatccgaatgctggatgctccactcccgcgctgtcggcgtgtgtggcgtgtaggacgggccgatatcgacgggccgtggtacctggcttggtccaaccttccaattatgtcaggccgcctccgctcatcctcagaacggactgttgatggttgagctgcgactgtaaggctgtacggggagaccggtttgctgtcgagcgtagatggaaaggcacttgctacaccgaggtgtacatgtcgtttaggtagccaattgtaatatgcacacttggcgccagctgacgcccagactcaccccggcgcgctccgtgtctgtccttgtctgtgtcgctgccttctcagtcggcatgacggtgagttcagaagataagatgcgccggtatgagatcattttcatgactctggaatctatcatactacagatcgtctcaccatccgtccgaactactcacctcgacggagaccatgacattcatctcactttacgtctcacgtctgccccgacagcgctgatgatggccaactcgctgaaccgcttcttatctccgtcgtcagcttcgaaacccgtcgccaagtagatctgtgcatgcggctcaggtacctgcatgtagctgtcttctgctcttctggcccttactccaccatgcggccttgctcttcacaccatgacttcagaccccatgccgccactcgatttgactggcctgcccatcgatgtcttccttctagtcatccaacatctctcacctcgcgactgtgtgctctgccgcagagtaagtcgcccttggaacctggctttcacacgccacgatgtctctcgccatctcatggtccgccacttccctcacgcccgagagacgcgcctcccatcgcctgatcctgcctggcataaagtctttgtgagttcaagtctgtctcaacttatagagcaggcagcagccgagagtcccgagcgtggaagcatgatcgtcaagtcgtgtttccgaatcaagcgggcaacagcctgacctgttctcatctagcatcatgtcgctcgtcgatatcattttctccgctccgccaacccgagacgcatcgataagatcgttatcacctccgacttggccttctgtcctgttgagccctggtctcgcttcctggtttggaacggcaatcgcgccatcttccagcatcctgattcaccgtgggccttcgacgatgctctgcttgtccatcccagcggctctggccttgtggcttatgacctggaaaatggccaacgcaactccattccctttgatgtcacagacagaatcgttaggcgcctacgactcgcccagcgtatcctaatcatcgaatggtgcgaccgcaacgccattgagacccgtcactctcattatgctacagctttcgacgtgcaaaggccgactccatcttccgcaggttcccataggccatatgtttgtaatatagctaggcgctcggaatggaacttgcatcgtcctggtatctccatagaccaccacgatcgcttcttctcggcacacacagctactcattacgcgctctatgtctggcaacggaactgtgccccagaggatcctctggagcagctcactatttgggacatcacaaccgctacaccaatcattattagcagattcagccagcagcacctgaacgatctaggcatcagccagcgtgatactccttcgctctcgacattacttctagacgaggcaaatgtctacttccacgaggaggaggtacgtcgccccataccaggcatgactcccctcctcgtctttttctctccgagctggcgacatcatgttccgaagttttacacttggcctgcttgcttcatgatctccctgagccagatagtcttgcccgtcggttgcattcactgattcgctgccattgtatcagcaccgctggctcgcgtgacctaacttgttaactattagaaactagcgctttgttttaacccggcggccccgcaaatagtcgtggaaaattactaacgcaatacctttctggctaccagtggaccgcaatcatctcccttccccccgaggcaccatcatgttcgttgtaccggatttccgttgctcatgatagagggtccgcgctggttcgacgagtgctgtgccgagggcgatattcacatgagtttttgcccgcgcgcacgatctactccattgatcggaagtccaaatcaccacgatcacggtcgatggcccggctacgcaccctgctggcggcacgaagagttcccctacctgacagtatgtgatgtcgtagattcggcagcatgcgtccgcatcgtaagtagtattctaccaggtaactaaatagtatcattgcctgagcaactgcggctgtacctgagttctcagcagaatgagctaatgtgagacgcttcggctatagattgcacgccaatgtttcatcatggaagcgctttcagctttcctacctcccaaaattagtctcgagtccaatccggaaggaaaggaactcgaggtccgcttcccagatgacatgtggcagaaactattgtctaatggcaagattgcgggtgatgaaagatgggtaatcggtgacagtgcagatggaaatattactttgttaagattctagccgcaagctctagctctactaattcttcaacattattcactaataaatgttaagagttttacaccatacaagtaagaccagaaagacagagagtatgaaccacactagcaacgctcactaacaag

SEQ ID NO: 18976 - DNA, 481 bp, Muscodor strobelii
  misc_feature: SGI cDNA ID NO. 566373
  misc_feature: Reduced expression when VOC is produced
  misc_feature: Encodes the peptide sequence at SEQ ID NO 18977
atgccgactgagaaggcagcgacacagacaaggacagacacggagcgcgccgggatcgcacagacgaagagaggtgcagccagcgacgacgcagcgacgcagcttgccgccatggacgtcgtcgaccacagcctcgaccccagcctggagatgctggccctgcagaatgcaaagcgctcccacactctcttctacgcctctcccgccgccaagaagcccaggctggccgcagccgagcccgaccgagacgccgtcttgcccaggcatctgcacgccgagtacctgcatcttgatgctctgccgcccgccctcgccgcccgcacccaggccgcccaacccagatcccagaagccacagaagccaccgacacagacaccccagccgtcgctgaggccgccccagaagttgctcgaggccgtccccgccgccgatgccgccgacaaggccgcacctcagtcgaccgccctcgtccagcggccgc

SEQ ID NO: 18977 - protein, 160 aa, Muscodor strobelii
  misc_feature: SGI Peptide ID NO. 566373
  misc_feature (49)..(157): NCBI GI: 171684739 Blast Desc: protein product [Podospora anserina] gi|170942330|emb|CAP67982.1| protein product [Podospora anserina]
  misc_feature: Useful for introducing or modulating the production of volatile compounds
MPTEKAATQTRTDTERAGIAQTKRGAASDDAATQLAAMDVVDHSLDPSLEMLALQNAKRSHTLFYASPAAKKPRLAAAEPDRDAVLPRHLHAEYLHLDALPPALAARTQAAQPRSQKPQKPPTQTPQPSLRPPQKLLEAVPAADAADKAAPQSTALVQRP

SEQ ID NO: 18978 - DNA, 1023 bp, Muscodor strobelii
  misc_feature: SGI cDNA ID NO. 566374
  misc_feature: Reduced expression when VOC is produced
  misc_feature: Encodes the peptide sequence at SEQ ID NO 18979
atgattcctgtacgagctatctttgccgccggccagcgccgtgccttctccgcctctgcacgcgatctctccaaggtcaccgtcctcggtgctgccggtggcatcggccagcctctgtccctgctcttgaagctcaaccctagagtcactgagctcgctctctacgatatccgtggtggacctggtgtcgctgctgatgtctcgcacgtcaacaccaagagcaaggtcaccggctacgagcccacccccagcgggctggccagcgccctcaagggctccgatgtggtcctcatccccgccggcgtcccccgcaagcccggcatgacccgtgacgacctgttcaacaccaacgcctccatcgtccgcgacctggccaaggctgctgccgagtcctgccccgaggccaacgtcctcgtcatctccaaccccgtcaactccaccgtccccatctgcgccgaggtcttcaagaacgccggcgtctacaaccccaagcgcctcttcggtgtcaccaccctcgacgtcgtccgcgcttcccgcttcgtcagcgaggtcaagggcagcgaccccaaggacgagaagatcactgttgtcggcggccactcgggcgtcaccatcgtccctctcttcagccagagcggccaccccgacctcacctccaacgccgacctgatcaagcgcgtccagttcggtggtgacgaggttgtccaggccaaggacggtgccggctctgccaccctctccatggccatggctggtgcccgtatggctgactccgtcctccgtgctgcccagggcgagaagggtgtcattgagcccaccttcgtcgacagccctctctacaaggaccagggcatcgacttctttgcctccaaggttgagctaggccccaacggtgttgagaagatcctccctgtcggcgaggttgatgctgccgaggagaagctcctcgaggcttgcctgggcgacctcaagaagaacatcgagaagggtgtctctttcgttgccgccaacccccctaagtaa

SEQ ID NO: 18979 - protein, 340 aa, Muscodor strobelii
  misc_feature: SGI Peptide ID NO. 566374
  misc_feature (170)..(334): Pfam Id: PF02866 Pfam Desc: lactate/malate dehydrogenase, alpha/beta C-terminal domain
  misc_feature (24)..(168): Pfam Id: PF00056 Pfam Desc: lactate/malate dehydrogenase, NAD binding domain
  misc_feature (7)..(340): NCBI GI: 39960255 Blast Desc: MGG_09367 [Magnaporthe grisea 70-15] gi|59803007|gb|AAX07691.1| malate dehydrogenase-like protein [Magnaporthe grisea] gi|145014318|gb|EDJ98886.1| MGG_09367 grisea
  misc_feature (7)..(338): NCBI GI: 256725630 Blast Desc: [Nectria haematococca mpVI 77-13-4]
  misc_feature (5)..(338): NCBI GI: 154309029 Blast Desc: conserved [Botryotinia fuckeliana B05.10] gi|150852452|gb|EDN27644.1| conserved [Botryotinia fuckeliana B05.10]
  misc_feature (12)..(338): NCBI GI: 116197148 Blast Desc: malate dehydrogenase, mitochondrial precursor [Chaetomium globosum CBS 148.51] gi|88181085|gb|EAQ88553.1| malate dehydrogenase, mitochondrial precursor [Chaetomium CBS
  misc_feature (12)..(340): NCBI GI: 261360051 Blast Desc: malate dehydrogenase [Verticillium albo-atrum VaMs.102]
  misc_feature (5)..(338): NCBI GI: 156032838 Blast Desc: conserved [Sclerotinia sclerotiorum 1980] gi|154699227|gb|EDN98965.1| conserved [Sclerotinia sclerotiorum 1980]
  misc_feature (7)..(340): NCBI GI: 85090420 Blast Desc: malate dehydrogenase, mitochondrial precursor [Neurospora crassa OR74A] gi|28919768|gb|EAA29172.1| malate dehydrogenase, mitochondrial precursor [Neurospora crassa OR74A]
  misc_feature (12)..(340): NCBI GI: 171688174 Blast Desc: protein product [Podospora anserina] gi|170944049|emb|CAP70159.1| protein product [Podospora anserina]
  misc_feature (7)..(340): NCBI GI: 46111159 Blast Desc: FG02461.1 [Gibberella zeae PH-1]
  misc_feature (1)..(338): NCBI GI: 169766066 Blast Desc: [Aspergillus oryzae RIB40] gi|83765359|dbj|BAE55502.1| protein product [Aspergillus oryzae]
  misc_feature (13)..(336): SWISSPROT Homolog: EC 1.1.1.37 Malate dehydrogenase
  misc_feature: Useful for introducing or modulating the production of volatile compounds
MIPVRAIFAAGQRRAFSASARDLSKVTVLGAAGGIGQPLSLLLKLNPRVTELALYDIRGGPGVAADVSHVNTKSKVTGYEPTPSGLASALKGSDVVLIPAGVPRKPGMTRDDLFNTNASIVRDLAKAAAESCPEANVLVISNPVNSTVPICAEVFKNAGVYNPKRLFGVTTLDVVRASRFVSEVKGSDPKDEKITVVGGHSGVTIVPLFSQSGHPDLTSNADLIKRVQFGGDEVVQAKDGAGSATLSMAMAGARMADSVLRAAQGEKGVIEPTFVDSPLYKDQGIDFFASKVELGPNGVEKILPVGEVDAAEEKLLEACLGDLKKNIEKGVSFVAANPPK

SEQ ID NO: 18980 - DNA, 2017 bp, Muscodor strobelii
  misc_feature: SGI EST ID NO. CUFF.44600.0
  misc_feature: Variant of the nucleotide sequence at SEQ ID NO 18978
ttttcctctcgtctcatgcatcgatccagtttcgcagccccattcccccaagattctcgagagaagaggtagaatttccctcgtcctatctccatatcgcctagcgtccgtccttatttctagacgtactagtttcccggccccgtcgagttttaataccgctctcgttgctcacgccgactcttttccgtctcaagaccttttcttccaacaccaccacatcaacagacatcatgattcctgtacgagctatctttgccgccggccagcgccgtgccttctccgcctctgcacgcgatctctccaaggtcaccgtcctcggtgctgccggtggcatcggccagcctctgtccctgctcttgaagctcaaccctagagtcactgagctcgctctctacgatatccgtggtggacctggtgtcgctgctgatgtctcgcacgtcaacaccaagagcaaggtcaccggctacgagcccacccccagcgggctggccagcgccctcaagggctccgatgtggtcctcatccccgccggcgtcccccgcaagcccggcatgacccgtgacgacctgttcaacaccaacgcctccatcgtccgcgacctggccaaggctgctgccgagtcctgccccgaggccaacgtcctcgtcatctccaaccccgtcaactccaccgtccccatctgcgccgaggtcttcaagaacgccggcgtctacaaccccaagcgcctcttcggtgtcaccaccctcgacgtcgtccgcgcttcccgcttcgtcagcgaggtcaagggcagcgaccccaaggacgagaagatcactgttgtcggcggccactcgggcgtcaccatcgtccctctcttcagccagagcggccaccccgacctcacctccaacgccgacctgatcaagcgcgtccagttcggtggtgacgaggttgtccaggccaaggacggtgccggctctgccaccctctccatggccatggctggtgcccgtatggctgactccgtcctccgtgctgcccagggcgagaagggtgtcattgagcccaccttcgtcgacagccctctctacaaggaccagggcatcgacttctttgcctccaaggttgagctaggccccaacggtgttgagaagatcctccctgtcggcgaggttgatgctgccgaggagaagctcctcgaggcttgcctgggcgacctcaagaagaacatcgagaagggtgtctctttcgttgccgccaacccccctaagtaaaccgaccgtattgccaacccagaatagtgccactggtatctccattgagatagactcaggagttaaagaggaaatgggcaacacgctggatccagggccccgcattttgtgatagaaatggtggtccttgccggattgcctgtgactagtagtaatagacttgcacggctcttgagcctgcaaactgtatgaatataggaatgttaagataccacaaatgctcttctgtctctatcctcggttgttacctatattctcttgtttcccacttatcccgagtgccagttcaagagaacagcaatggcatcacacttgcttacagtatactaacacgtgctcatctctcgcaaacatatcatacaatctctctccacacgagtcactgcccactcgtattccgacgactcctaatcacctccgctttcccaacaacagcctccagcgccccagtgagtccagcctcatcatagcacaacataccatccactctacgcccgtagacacgaatacagtctacacctagagcgccaagttccgccttatcgacctttggcacgccctcgccctcaaggtacagtaaatgcgtcacgtacctcctaacctccgcctctttctcatcacctccaaagcacccctgactctctgccccagcacgtgcaatcgcacggacgaagtcggtcgctgttaaagtccctgtttctctatcgagagtagagttgaggatcaagattttatgccgtacgcctgagtgtgctattgcg

SEQ ID NO: 18981 - DNA, 1365 bp, Muscodor strobelii
  misc_feature: SGI cDNA ID NO. 566375
  misc_feature: Encodes the peptide sequence at SEQ ID NO 18982
atgtcgtcctcaagcgccgctggctgtgactggctgattagccccgaggacttgaccaacaaccctcagcacggcattcaatgggaccaaaagggctacaacctcgcaccgacgtgggcgatcaagccgacacccaagtacatcatcgccgccatcaagggtcatgttgtgtctgtcaagaacgccaaccttgaggttgatcccaatcctcttccaggaggaaatgagtgcaaggtcttcaatgtgactatcaacggcaagaagttcgtcatccgtgtgcttctgcccaccaatgggatccgagggtacaagattgagaacgaagtagcgactctccgacacgcacgccagagcactggtcttcgacctccggaggtctttgcttatcaaaccacccgcttcaatcccctaggctacgagtggcttctgatgagcaagatgcctggacagccactttcacaagtctggacctcactcacattcgagaagaaggagctgtttgtcaaggggctcgcatcctgtatggccaaagctataaccaagcaagtattcggtgcctcaaaccggcttaaggcttggaagatcggcagtctctacgacccttccacttgctctaaccttctcaattggcccgctcatgacccccgcgatatcatctgtgatgcgattccctccgctgaggacttcaaacctgtcattggaccttttctcgcaccgattgaatggggaaaggctcgtctctccgagcaactggcctatgtcaaccaagcgtccagatcctcgaacagaggacatgccgacaatgcagagtcacagaaacacatgatgcaactgcaaaagatggccgcaacaatccaggaactgaagaatatggcgccagagttccttccgtcaaagccccagcccactatgctctggcataactgcctctccaaggacaacatctttgtcgacgacgacggcaacttcacgggtgtagtggactggcaagctgtaccactccttccactgtacgatgtgtgccagttccccgccttgctacagcagacatacgatcgggtcgaagacattcaatggggcagatatgccttgagctccatggccatggtacatcctctagcaaaccgagacaacgagcgagctgagctaaccaagctgcgccacctatacatcaagacactagaaggagaatgcccgctcttcgttaagatcatggacaacaagactagcaaggacgctagggagttcgagacggctattgcgaactgcaccctagagttccgagctaacaagctcgcgtggtgggtcgagcacaagaaagagcgccgagagactcccagactttacgagctcttcatggagtaa

SEQ ID NO: 18982 - protein, 454 aa, Muscodor strobelii
  misc_feature: SGI Peptide ID NO. 566375
  misc_feature (25)..(436): NCBI GI: 255946373 Blast Desc: Pc20g14790 [Penicillium chrysogenum Wisconsin 54-1255] gi|211588689|emb|CAP86808.1| Pc20g14790 [Penicillium chrysogenum Wisconsin 54-1255]
  misc_feature (24)..(437): NCBI GI: 255948844 Blast Desc: Pc22g12450 [Penicillium chrysogenum Wisconsin 54-1255] gi|211592206|emb|CAP98533.1| Pc22g12450 [Penicillium chrysogenum Wisconsin 54-1255]
  misc_feature (23)..(437): NCBI GI: 154292660 Blast Desc: BC1G_14656 [Botryotinia fuckeliana B05.10] gi|150845870|gb|EDN21063.1| BC1G_14656 [Botryotinia fuckeliana B05.10]
  misc_feature (18)..(454): NCBI GI: 238842484 Blast Desc: conserved [Microsporum canis CBS 113480]
  misc_feature (26)..(443): NCBI GI: 256720179 Blast Desc: NECHADRAFT_56350 [Nectria haematococca mpVI 77-13-4]
  misc_feature (22)..(452): NCBI GI: 169607435 Blast Desc: SNOG_06773 [Phaeosphaeria nodorum SN15] gi|111064304|gb|EAT85424.1| SNOG_06773 [Phaeosphaeria nodorum SN15]
  misc_feature (39)..(348): NCBI GI: 169779597 Blast Desc: [Aspergillus oryzae RIB40] gi|83773002|dbj|BAE63130.1| protein product [Aspergillus oryzae]
  misc_feature (18)..(363): NCBI GI: 85068518 Blast Desc: NCU05162 [Neurospora crassa OR74A] gi|28923448|gb|EAA32630.1| [Neurospora crassa OR74A]
  misc_feature (25)..(437): NCBI GI: 171683677 Blast Desc: protein product [Podospora anserina] gi|170941798|emb|CAP67452.1| protein product [Podospora anserina]
  misc_feature (74)..(348): NCBI GI: 256721267 Blast Desc: NECHADRAFT_17767 [Nectria haematococca mpVI 77-13-4]
MSSSSAAGCDWLISPEDLTNNPQHGIQWDQKGYNLAPTWAIKPTPKYIIAAIKGHVVSVKNANLEVDPNPLPGGNECKVFNVTINGKKFVIRVLLPTNGIRGYKIENEVATLRHARQSTGLRPPEVFAYQTTRFNPLGYEWLLMSKMPGQPLSQVWTSLTFEKKELFVKGLASCMAKAITKQVFGASNRLKAWKIGSLYDPSTCSNLLNWPAHDPRDIICDAIPSAEDFKPVIGPFLAPIEWGKARLSEQLAYVNQASRSSNRGHADNAESQKHMMQLQKMAATIQELKNMAPEFLPSKPQPTMLWHNCLSKDNIFVDDDGNFTGVVDWQAVPLLPLYDVCQFPALLQQTYDRVEDIQWGRYALSSMAMVHPLANRDNERAELTKLRHLYIKTLEGECPLFVKIMDNKTSKDAREFETAIANCTLEFRANKLAWWVEHKKERRETPRLYELFME

SEQ ID NO: 18983 - DNA, 1056 bp, Muscodor strobelii
  misc_feature: SGI cDNA ID NO. 566376
  misc_feature: Encodes the peptide sequence at SEQ ID NO 18984
atgtcttacttccccgaccagaacgaaatcgcttgcgattacgattacgaaatcaccgactacccagagacgatccccttctcaggcccctctttctgccaggcattcttcttctaccactcctgcggctgtcgagtcctcgaacccttcatcagctgccggccaggcactccatgcgagagttctaatacatgcaagcatccctcccccactattcatattgccaagcttcccaattcatgtcatggagagattggtaacaccccagcttgctctgagcaggatcccggcacgacagagtttgtgagagagtgcgatactgctgagagtctcgatctagtgaagctcgacgattgtccgtacccggctgcgcgtgctgccctgccgcttagcgcgaagagtctggacgaggttgttaagcattatcatctaaagcggggtaagaagactggctactcggtgaatgcaccggtttttgtccctgcttctttgcaggctgctgcaaagcccgttgagcctagtaagcctgacctggtagagaaggaggcaatgcctgaggtagtagaggaagagaatcctgagaaagtaagcattgagtcctctgaggtcactgacatcgaagagatacacgtcgaggatagtactcaaagcgagattcccgagcctgaaagtgtcgagcctgagagcgtcgagcctgagagcgtcgagcctgagagcgtcgagcctgagagcgttcaggctgacactgtcacggtcgagagcgtcaaggttgaggacgtcaaagttgggagtatcaaggctgaatgtgtcaaaacagagatcattcagaacgatagcatacgggatgaaacagaggagttcctctacggtaagtatgacacatcatcagcagcacccgctgttgatgttgtaggcacacccgaggaaacagagacggagcctgaagatctcatggatttctggagctacgaacaagagcctcctaagacttctaggtggaccagtctattctcaatgatgcctggttttacaaaacgtacagaggctagttattag

SEQ ID NO: 18984 - protein, 351 aa, Muscodor strobelii
  misc_feature: SGI Peptide ID NO. 566376
  misc_feature (213)..(284): NCBI GI: 157963578 Blast Desc: TPR repeat-containing protein [Shewanella pealeana ATCC 700345] gi|157848578|gb|ABV89077.1| TPR repeat-containing protein [Shewanella pealeana ATCC 700345]
  misc_feature (219)..(276): NCBI GI: 157963578 Blast Desc: TPR repeat-containing protein [Shewanella pealeana ATCC 700345] gi|157848578|gb|ABV89077.1| TPR repeat-containing protein [Shewanella pealeana ATCC 700345]
  misc_feature (206)..(284): NCBI GI: 253997734 Blast Desc: MJ0042 family finger-like protein [Methylovorus sp. SIP3-4] gi|253984413|gb|ACT49270.1| MJ0042 family finger-like protein [Methylovorus sp. SIP3-4]
  misc_feature (192)..(268): NCBI GI: 253997734 Blast Desc: MJ0042 family finger-like protein [Methylovorus sp. SIP3-4] gi|253984413|gb|ACT49270.1| MJ0042 family finger-like protein [Methylovorus sp. SIP3-4]
MSYFPDQNEIACDYDYEITDYPETIPFSGPSFCQAFFFYHSCGCRVLEPFISCRPGTPCESSNTCKHPSPTIHIAKLPNSCHGEIGNTPACSEQDPGTTEFVRECDTAESLDLVKLDDCPYPAARAALPLSAKSLDEVVKHYHLKRGKKTGYSVNAPVFVPASLQAAAKPVEPSKPDLVEKEAMPEVVEEENPEKVSIESSEVTDIEEIHVEDSTQSEIPEPESVEPESVEPESVEPESVEPESVQADTVTVESVKVEDVKVGSIKAECVKTEIIQNDSIRDETEEFLYGKYDTSSAAPAVDVVGTPEETETEPEDLMDFWSYEQEPPKTSRWTSLFSMMPGFTKRTEASY

SEQ ID NO: 18985 - DNA, 1323 bp, Muscodor strobelii
  misc_feature: SGI EST ID NO. CUFF.44593.0
  misc_feature: Variant of the nucleotide sequence at SEQ ID NO 18983
cgaaatcgcttgcgattacgattacgaaatcaccgactacccagagacgatccccttctcaggcccctctttctgccaggcattcttcttctaccactcctgcggctgtcgagtcctcgaacccttcatcagctgccggccaggcactccatgcgagagttctaatacatgcaagcatccctcccccactattcatattgccaagcttcccaattcatgtcatggagagattggtaacaccccagcttgctctgagcaggatcccggcacgacagagtttgtgagagagtgcgatactgctgagagtctcgatctagtgaagctcgacgattgtccgtacccggctgcgcgtgctgccctgccgcttagcgcgaagagtctggacgaggttgttaagcattatcatctaaagcggggtaagaagactggctactcggtgaatgcaccggtttttgtccctgcttctttgcaggctgctgcaaagcccgttgagcctagtaagcctgacctggtagagaaggaggcaatgcctgaggtagtagaggaagagaatcctgagaaagtaagcattgagtcctctgaggtcactgacatcgaagagatacacgtcgaggatagtactcaaagcgagattcccgagcctgaaagtgtcgagcctgagagcgtcgagcctgagagcgtcgagcctgagagcgtcgagcctgagagcgttcaggctgacactgtcacggtcgagagcgtcaaggttgaggacgtcaaagttgggagtatcaaggctgaatgtgtcaaaacagagatcattcagaacgatagcatacgggatgaaacagaggagttcctctacggtaagtatgacacatcatcagcagcacccgctgttgatgttgtaggcacacccgaggaaacagagacggagcctgaagatctcatggatttctggagctacgaacaagagcctcctaagacttctaggtggaccagtctattctcaatgatgcctggttttacaaaacgtacagaggctagttattaggatagatgtcggtacttgtttcgaattacacggagggggatgatgcggaatacacagagatttataacgtggaatgcacgggagagactttcgggaacaaatggaggccagttattaggatagatgtaggtacactattcgaaatacatggaaggttatagttcagaatacataaagatatataatgcggaatgcacgggaaagatttactagaacagacggaggcgagttgttggaattaagatcacaggaaactgagaatcatcaggtagtcatctagatcattgccg

SEQ ID NO: 18986 - DNA, 699 bp, Muscodor strobelii
  misc_feature: SGI cDNA ID NO. 566377
  misc_feature: Elevated expression when VOC is produced
  misc_feature: Encodes the peptide sequence at SEQ ID NO 18987
atggctgccgcgactcccaagttgagactctacaccaaccacggctgcccatgggcgcaccgtgctcatattgctctgaacgagctgaagattcccttcgaggaggagattattgacctcactaagccacgggagcctgaatatttgaaagtcaatcctcgaggacttgttccttctctttctgttgatggcgagatcatcacagagtcagcagtcgtcgctggatacttagctgatgctttcccgtcacacttggttcctaagtctgatgatcctaagggtgcttgggaacgcgccaagatcgccttcttcgtggacaccttcatgtccaaggttcaaaccccgttaataggcgtctataaggcgaacgcaaaaaacgaagacacaacagctgcgtccgaggctatcgtgaacaatgccgtcaaggaagtcgagccactgttagcaaatgcagggccgtttttcaatggtagcgacaagttgacgttagccgaggtgttgactggatcgtttgtggtccgactgtggactggcgcgaaatacggtctcattcccgaaagtctcatttcagatttgaagagcaaggcaccgaacctaagtcgatgggctgacgctgttgcaacgcacccaagcgtcactgatatctatgacggggagaagactgcaacggctctaaaggcaagactcgctaaggcgtag

SEQ ID NO: 18987 - protein, 232 aa, Muscodor strobelii
  misc_feature: SGI Peptide ID NO. 566377
  misc_feature (6)..(79): Pfam Id: PF02798 Pfam Desc: Glutathione S-transferase, N-terminal domain
  misc_feature (3)..(229): NCBI GI: 116193941 Blast Desc: CHGG_06688 [Chaetomium globosum CBS 148.51] gi|88182601|gb|EAQ90069.1| CHGG_06688 [Chaetomium globosum CBS 148.51]
  misc_feature (1)..(231): NCBI GI: 171683131 Blast Desc: protein product [Podospora anserina] gi|170941525|emb|CAP67177.1| protein product [Podospora anserina]
  misc_feature (4)..(232): NCBI GI: 115401134 Blast Desc: conserved [Aspergillus terreus NIH2624] gi|114190096|gb|EAU31796.1| conserved [Aspergillus terreus NIH2624]
  misc_feature (10)..(231): NCBI GI: 256732379 Blast Desc: NECHADRAFT_69758 [Nectria haematococca mpVI 77-13-4]
  misc_feature (4)..(230): NCBI GI: 119497705 Blast Desc: glutathione S-transferase, [Neosartorya fischeri NRRL 181] gi|119413774|gb|EAW23713.1| glutathione S-transferase, [Neosartorya fischeri NRRL 181]
  misc_feature (8)..(231): NCBI GI: 46105088 Blast Desc: FG00172.1 [Gibberella zeae PH-1]
  misc_feature (6)..(230): NCBI GI: 121711012 Blast Desc: glutathione S-transferase, [Aspergillus clavatus NRRL 1] gi|119401272|gb|EAW11696.1| glutathione S-transferase, [Aspergillus clavatus NRRL 1]
  misc_feature (4)..(230): NCBI GI: 70988675 Blast Desc: glutathione S-transferase [Aspergillus fumigatus Af293] gi|66846826|gb|EAL87157.1| glutathione S-transferase, [Aspergillus fumigatus Af293] gi|159128609|gb|EDP53723.1| A1163]
  misc_feature (4)..(229): NCBI GI: 145237106 Blast Desc: An07g01100 [Aspergillus niger] gi|134075666|emb|CAK96558.1| protein product [Aspergillus niger]
  misc_feature (6)..(230): NCBI GI: 189193337 Blast Desc: conserved [Pyrenophora tritici-repentis Pt-1C-BFP] gi|187978571|gb|EDU45197.1| conserved [Pyrenophora tritici-repentis Pt-1C-BFP]
  misc_feature (8)..(219): SWISSPROT Homolog: EC 2.5.1.18 Glutathione transferase
  misc_feature: Useful for introducing or modulating the production of volatile compounds
MAAATPKLRLYTNHGCPWAHRAHIALNELKIPFEEEIIDLTKPREPEYLKVNPRGLVPSLSVDGEIITESAVVAGYLADAFPSHLVPKSDDPKGAWERAKIAFFVDTFMSKVQTPLIGVYKANAKNEDTTAASEAIVNNAVKEVEPLLANAGPFFNGSDKLTLAEVLTGSFVVRLWTGAKYGLIPESLISDLKSKAPNLSRWADAVATHPSVTDIYDGEKTATALKARLAKA

SEQ ID NO: 18988 - DNA, 1730 bp, Muscodor strobelii
  misc_feature: SGI EST ID NO. CUFF.44675.2
  misc_feature: Variant of the nucleotide sequence at SEQ ID NO 18986
gaaaattatacttagacttgatactataatgcggcactggagccgcattgtggatatgccggccgtttgaacacgggtttcctcggatctccagtatgtcatacttgcatttacttcgtgagccatcattagtagagctgtacaaagggctggcaattttgacttctggatgttttcggaatgatgtccagttcgatttgtcagctctgtacgtagatcagtttcgaagtatcgttggcgaagatatagagaaagaaacaatccttcaactccggccgcttgtaaaagctatccctgctcggagatagaaaacgtgccgtcatccgagccggtgccacatccggtcgcatagagatgtggtcaaatccggccaggcaatgtcgacatttcgagctgcgggtggggagtgggaggattaccaatcagtgccaacacccggagggacgactgacgcgttcgacttataaaccttcgaagtattaaagcatctcttttctcaagttaatactacgagtcaaattcgggtagtatcaagtatcatcatcgtgcctgaattatagttgcaagaatctccaaggtatcgctttgctttgaatcatcggactcgctttgagaacacaattatttgacgatagctcagaatggctgccgcgactcccaagttgagactctacaccaaccacggctgcccatgggcgcaccgtgctcatattgctctgaacgagctgaagattcccttcgaggaggagattattgacctcactaagccacgggagcctgaatatttgaaagtcaatcctcgaggacttgttccttctctttctgttgatggcgagatcatcacagagtcagcagtcgtcgctggatacttagctgatgctttcccgtcacacttggttcctaagtctgatgatcctaagggtgcttgggaacgcgccaagatcgccttcttcgtggacaccttcatgtccaaggttcaaaccccgttaataggcgtctataaggcgaacgcaaaaaacgaagacacaacagctgcgtccgaggctatcgtgaacaatgccgtcaaggaagtcgagccactgttagcaaatgcagggccgtttttcaatggtagcgacaagttgacgttagccgaggtgttgactggatcgtttgtggtccgactgtggactggcgcgaaatacggtctcattcccgaaagtctcatttcagatttgaagagcaaggcaccgaacctaagtcgatgggctgacgctgttgcaacgcacccaagcgtcactgatatctatgacggggagaagactgcaacggctctaaaggcaagactcgctaaggcgtagattagtctgcacttgatgtaattctggttgatgcgaaccaggcgatctcatatatgcatgggactattatgccgagtaacctaggtgtgcgtcatgcaaacagtggaagcgattgaaccgttgggaaccaaggtaattggtcattatacgagacagagcatacctggcagttgcacgccgatagtcaacacggtaataccggtgtgcacttataatgcaatgacacctcgtttccttagtgcgaattcatgcgcttatgacttgagtatcaagagagacaattatagtagatatcatcttacatgcccgtgatgcgtgtcagccggtgtagtattacttgcataagaaacatgagagggtgttaccctcatgtcgcttgcttgagctgct

SEQ ID NO: 18989 - DNA, 1644 bp, Muscodor strobelii
  misc_feature: SGI cDNA ID NO. 566378
  misc_feature: Encodes the peptide sequence at SEQ ID NO 18990
atgggaactgcatgcgccacgaggccccgtcgggacaaacgtcctctggattccaattccattgaaccaacggatagtctcgctctcagcacaccaagtagtattgatgatgatgatgaaagcccaacaaagatagaggaggatgccgaaccctcaatcaagactgagaaggaaacaccggacgcgcagcggacgagccgccgtcgaaaaccccacagccctgaaagctgggaaacggtcaaggatgatattgcccgtctttatttggaggagaatcggcgcctcaaggatgtcatggcaataatggaagagaaacatggattctgggcctcctccaagatgtataagacgaaactcacacaatggaaattcttcaagaacaatcgccaaacagatgtcgccaatctgttgtacttgcagcgacaccgattagcattgggcaaagagagtgatttccggcggaacggaaggacagtggatgtctctacgtacatgcggaggaaaggtttgagtccgatcgagcttttggagacagcacaatcaggagatctaccgccgacactgcgggtgcggacgccgccgttatcgccaatatttaggaccatcgatgcgccggatgatctcattgtccaagataattatatgcaatggtcgacgggcacggtcttattgccagcacagatggactcggcctacttcaaaaacctcgcacggtaccaccagagccatgcgatgcagtcagtgatacttctgttgcatggatgctggctattctccatcggcaaggttcaagaaggagggatcttttgccggcgcgcgttcgcgaatatccatgccttgctagatgtctcttcacactttgccgtgtacgagctgatgggagccgccgctcgctatccagattcaggcatccttcgagagttatggggctacttaggaaaatacgcaaagataacgggagtagccagtgaacaaatgcggcggatgttggcagcctttgccaaactatcacgagatcataatctcgaccataatgtcgaaatgctgcagtggggtaggagacaagcctccatccatgcgcacggcacgttcgacggcaaacccttcgactatacgcagcttcggccatgggatattctaccacttgatgcgtattatcaccggtactatatgagccaggagcaatggactgtagacgacataacatctgcctccatgcatggcctagaagcgttcaaatggagtctgcgtgcagatctcttgttaatatttggaaacacaacgaattgggcggacgaaagggtatccgcgatggctctcaaaatgctggaggactcctcaacagagcaacctctaccgcaatatctacgttttgtgtgcttctatgctctcgcacactgcaatcgggcgcgttgtcacggagagaaagccaggtccagcactgaccacaagctagccagacagaatttactttgggctgcacaagtgcaacgagaagcgtggcctgcgggcaaaaattactacgaaacactgtcgcttctggagacctggtacaaggaggctggagaggaagatcaagcggaagccactcggcaaaggcgtgatgtagaatgccagagagcattcaaacaactgcatctatga

SEQ ID NO: 18990 - protein, 547 aa, Muscodor strobelii
  misc_feature: SGI Peptide ID NO. 566378
  misc_feature (62)..(352): NCBI GI: 46109922 Blast Desc: FG01843.1 [Gibberella zeae PH-1]
  misc_feature (2)..(341): NCBI GI: 256728687 Blast Desc: NECHADRAFT_85885 [Nectria haematococca mpVI 77-13-4]
  misc_feature (75)..(177): NCBI GI: 145603809 Blast Desc: [Magnaporthe grisea 70-15] gi|145011959|gb|EDJ96615.1| [Magnaporthe grisea 70-15]
  misc_feature (75)..(198): NCBI GI: 164425649 Blast Desc: NCU06072 [Neurospora crassa OR74A] gi|157071008|gb|EAA30599.2| [Neurospora crassa OR74A]
  misc_feature (73)..(217): NCBI GI: 116197018 Blast Desc: CHGG_05107 [Chaetomium globosum CBS 148.51] gi|88181020|gb|EAQ88488.1| CHGG_05107 [Chaetomium globosum CBS 148.51]
  misc_feature (114)..(341): NCBI GI: 261359811 Blast Desc: conserved [Verticillium albo-atrum VaMs.102]
  misc_feature (72)..(159): NCBI GI: 85092833 Blast Desc: NCU08174 [Neurospora crassa OR74A] gi|28921009|gb|EAA30331.1| [Neurospora crassa OR74A]
  misc_feature (77)..(186): NCBI GI: 145605984 Blast Desc: MGG_06762 [Magnaporthe grisea 70-15] gi|145013719|gb|EDJ98360.1| MGG_06762 [Magnaporthe grisea 70-15]
  misc_feature (41)..(176): NCBI GI: 156041192 Blast Desc: SS1G_11575 [Sclerotinia sclerotiorum 1980] gi|154695958|gb|EDN95696.1| SS1G_11575 [Sclerotinia sclerotiorum 1980]
  misc_feature (107)..(316): NCBI GI: 261360862 Blast Desc: conserved [Verticillium albo-atrum VaMs.102]
MGTACATRPRRDKRPLDSNSIEPTDSLALSTPSSIDDDDESPTKIEEDAEPSIKTEKETPDAQRTSRRRKPHSPESWETVKDDIARLYLEENRRLKDVMAIMEEKHGFWASSKMYKTKLTQWKFFKNNRQTDVANLLYLQRHRLALGKESDFRRNGRTVDVSTYMRRKGLSPIELLETAQSGDLPPTLRVRTPPLSPIFRTIDAPDDLIVQDNYMQWSTGTVLLPAQMDSAYFKNLARYHQSHAMQSVILLLHGCWLFSIGKVQEGGIFCRRAFANIHALLDVSSHFAVYELMGAAARYPDSGILRELWGYLGKYAKITGVASEQMRRMLAAFAKLSRDHNLDHNVEMLQWGRRQASIHAHGTFDGKPFDYTQLRPWDILPLDAYYHRYYMSQEQWTVDDITSASMHGLEAFKWSLRADLLLIFGNTTNWADERVSAMALKMLEDSSTEQPLPQYLRFVCFYALAHCNRARCHGEKARSSTDHKLARQNLLWAAQVQREAWPAGKNYYETLSLLETWYKEAGEEDQAEATRQRRDVECQRAFKQLHL

SEQ ID NO: 18991 - DNA, 2743 bp, Muscodor strobelii
  misc_feature: SGI EST ID NO. CUFF.44618.1
  misc_feature: Variant of the nucleotide sequence at SEQ ID NO 18989
tggcaaggctcgtcgggcgtggcagggggccgagatagaggagagatgcgaaagctgaacgataaatcaggtcctgcccaccttccccggtacttgggccattctggtcagcatactccgtctatgcccctggtctctggatccctgtgctaggcctttcaagcccacctgcgtgacactcgatgtcctgacgttgatttctttcgggctgtctgttgtgccggggatgtaaaagcctgatcattgcaattcatagattgccagagcgagagagcatcgcgggcatcgtcagttgtattggggatgcccttgagtgttctcttggcgtatacataccttgctaggtcacctagattgatctcaatgattgagcggtcagaagcctcccacttaccgagcagtatcgcgggttgttaaggactcaattcgatgatcgcatcctcgctcggaaaacgcacgtcagatgggaactgcatgcgccacgaggccccgtcgggacaaacgtcctctggattccaattccattgaaccaacggatagtctcgctctcagcacaccaagtagtattgatgatgatgatgaaagcccaacaaagatagaggaggatgccgaaccctcaatcaagactgagaaggaaacaccggacgcgcagcggacgagccgccgtcgaaaaccccacagccctgaaagctgggaaacggtcaaggatgatattgcccgtctttatttggaggagaatcggcgcctcaaggatgtcatggcaataatggaagagaaacatggattctgggcctcctccaagatgtataagacgaaactcacacaatggaaattcttcaagaacaatcgccaaacagatgtcgccaatctgttgtacttgcagcgacaccgattagcattgggcaaagagagtgatttccggcggaacggaaggacagtggatgtctctacgtacatgcggaggaaaggtttgagtccgatcgagcttttggagacagcacaatcaggagatctaccgccgacactgcgggtgcggacgccgccgttatcgccaatatttaggaccatcgatgcgccggatgatctcattgtccaagataattatatgcaatggtcgacgggcacggtcttattgccagcacagatggactcggcctacttcaaaaacctcgcacggtaccaccagagccatgcgatgcagtcagtgatacttctgttgcatggatgctggctattctccatcggcaaggttcaagaaggagggatcttttgccggcgcgcgttcgcgaatatccatgccttgctagatgtctcttcacactttgccgtgtacgagctgatgggagccgccgctcgctatccagattcaggcatccttcgagagttatggggctacttaggaaaatacgcaaagataacgggagtagccagtgaacaaatgcggcggatgttggcagcctttgccaaactatcacgagatcataatctcgaccataatgtcgaaatgctgcagtggggtaggagacaagcctccatccatgcgcacggcacgttcgacggcaaacccttcgactatacgcagcttcggccatgggatattctaccacttgatgcgtattatcaccggtactatatgagccaggagcaatggactgtagacgacataacatctgcctccatgcatggcctagaagcgttcaaatggagtctgcgtgcagatctcttgttaatatttggaaacacaacgaattgggcggacgaaagggtatccgcgatggctctcaaaatgctggaggactcctcaacagagcaacctctaccgcaatatctacgttttgtgtgcttctatgctctcgcacactgcaatcgggcgcgttgtcacggagagaaagccaggtccagcactgaccacaagctagccagacagaatttactttgggctgcacaaggtaattactgctctcactcaccgtcttgtattataacacagatgttggaacgaagatagaactaactcaattgtagtgcaacgagaagcgtggcctgcgggcaaaaattactacgaaacactgtcgcttctggagacctggtacaaggaggctggagaggaagatcaagcggaagccactcggcaaaggcgtgatgtagaatgccagagagcattcaaacaactgcatctatgagggtgcatctatacacatcacgcaaaggtcgaggcttcggccatttggaagactagtgctatttagcggtttatgatgttgaattcaattcaaagtggcatacctatatgctaactttttgtatgaaatgataccacaaaccacagaagatcttccgaaaacattagcaatccaaaactgagcagcatctacgcaagttattatagaactttctagaacaggatgttaggagttggaccatgctctaaggactattgttcttgtgaaaagcctgcccaatgcaaagaccgttatcgcgacactgaagtagcgtatgagagtatgagccataccgtgcacttctcaagtcttgtatctgctgtaggagcactccgatcggcgacagatccaagaagttgggtgtgactggatacaggtcacacaaatgtggctgggagctgccaaacaagcggttcctggcagtttcaattagtgagcggggccgttggaacgcgggtacccctgggctctctaggtaatcgctagtgtggactgtgaactgcagctgcccctctaagtgg

SEQ ID NO: 18992 - DNA, 1863 bp, Muscodor strobelii
  misc_feature: SGI cDNA ID NO. 566379
  misc_feature: Encodes the peptide sequence at SEQ ID NO 18993
atggccgacgccgccaccgaggccgtggccaagctggtgctcgacgatgtcaccggcgagatggtctccaagaacgagctgaagaagcgaactcagaagcgagcgaagaaggccgcgacggagaaagccaaggccgcggcgcctaccgatcccaacaaacagaatgcgcccaagcccaagccgaagcaggaagaagctgcaatcgatcctgaatccatgttcaagcttggatttctcgatgatgtcttcaaagagcgccccatgaaacccgtcgtcactcgattccctcccgaacccaacgggttcctacacattgggcacgcgaaggcaatctgcgtgaattttggctttgccaaataccacggaggcaatacatatttgcgctacgatgatacgaatcccgaagcagaagaggagaaatatttcgtcgcaatcgaagggttcagtccgtacaagatcacatattcgagtgacaatttcgacaagctgtacgaactcgccgagaaactcataagcctcgacaaagcttacgtatgccattgcaacgatgaggagatcaaggcccagcgtggaggcgaggcacatggtgagcgattccggtgcgctcatgctgagcagagcgccgagaagaacctcgaagagtttagaggcatgcgcgacggtaaatacaaaccgcgcgaggcattcttgcgcatgaagcaggacatcacagatggcaacccccaaatgtgggatcttgctgcttacagagtactcgagaaacctcatcaccgcacagggtcaaagtggcggatatatccaacttatgatttcactcattgtctttgtgatagctttgaggatatcactcattcactgtgcacaacggaattcatccaaagtcgtgtcagctacgagtggctgaataagtcactcggagtatacgaaccaatgcagagagaatacggtcgcctgagcattactggcactgtgttgtcgaagaggaaaattatgaagttggtgaacgagggcatcgtacgcggatgggacgacccaaggctgtacaccttgatcggtatcaagaggagaggagtgccacctggtgctatcatcgaatttgtttcggagcttggagttactacgtcgccttcggtgatccagctcaagcgtttcgatcaaaccattcgaagataccttgagcgcacggtgccaaggctggcactcgttctcgatccgattcccgttgtgatcgaggatgcagaggagctagaagtcgacgtacccttctctcccaaggtccctgcaatgggctcccacaaggtcaagtttacacccaccgtatacatcgatcgctcagatttccgtgaagtcgacagcaaggattatttcagactagcgccgaacaagacagttggtttacttcaagtcccccatcctatcaaagctgtgtctttcagcaaagacgaggcaacgggaaagattactgaagttcgtgctgttttcgacaaagagacgaaaaagcccaagacctacattcagtgggtaccgtctgggtctcgtgaagtggaagtaagaatccacaactcccttttcaaatcggagaagcctgaagatgccgagggcggatttttgaaagatctaaatcccgagagcgaggtcatatatcccagggcaatgatcgaatcagcgggctttaacgaagtcaaggcgagggcaccatggccggaagccgcaggtgagagcgaattaggtaaaggtggtgtagagagcgttcgctttcaaggaatgagagttgcttattttgccatggattcggatagcacggacgacaaggtcatcttgaaccggattgtgtccctgaaagaagacgctggcaagagctga

SEQ ID NO: 18993 - protein, 620 aa, Muscodor strobelii
  misc_feature: SGI Peptide ID NO. 566379
  misc_feature (90)..(394): Pfam Id: PF00749 Pfam Desc: tRNA synthetases class I (E and Q), catalytic domain
  misc_feature (396)..(597): Pfam Id: PF03950 Pfam Desc: tRNA synthetases class I (E and Q), anti-codon binding domain
  misc_feature (397)..(597): Pfam Id: PF03950 Pfam Desc: tRNA synthetases class I (E and Q), anti-codon binding domain
  misc_feature (1)..(620): NCBI GI: 85107769 Blast Desc: glutaminyl-tRNA synthetase [Neurospora crassa OR74A] gi|28924048|gb|EAA33206.1| glutaminyl-tRNA synthetase [Neurospora crassa OR74A]
  misc_feature (1)..(620): NCBI GI: 39959970 Blast Desc: MGG_09393 [Magnaporthe grisea 70-15] gi|145014355|gb|EDJ98923.1| MGG_09393 [Magnaporthe grisea 70-15]
  misc_feature (1)..(620): NCBI GI: 116196746 Blast Desc: CHGG_04971 [Chaetomium globosum CBS 148.51] gi|88180884|gb|EAQ88352.1| CHGG_04971 [Chaetomium globosum CBS 148.51]
  misc_feature (1)..(619): NCBI GI: 156032824 Blast Desc: SS1G_13818 [Sclerotinia sclerotiorum 1980] gi|154699220|gb|EDN98958.1| SS1G_13818 [Sclerotinia sclerotiorum 1980]
  misc_feature (1)..(620): NCBI GI: 261359931 Blast Desc: glutaminyl-tRNA synthetase [Verticillium albo-atrum VaMs.102]
  misc_feature (11)..(620): NCBI GI: 171676884 Blast Desc: protein product [Podospora anserina] gi|170936509|emb|CAP61169.1| protein product [Podospora anserina]
  misc_feature (1)..(620): NCBI GI: 242815047 Blast Desc: glutaminyl-tRNA synthetase [Talaromyces stipitatus ATCC 10500] gi|218714832|gb|EED14255.1| glutaminyl-tRNA synthetase [Talaromyces stipitatus ATCC 10500]
  misc_feature (1)..(620): NCBI GI: 67904340 Blast Desc: AN9157.2 [Aspergillus nidulans FGSC A4] gi|40742800|gb|EAA61990.1| AN9157.2 [Aspergillus nidulans FGSC A4] gi|259485419|tpe|CBF82425.1| TPA: Glutaminyl-tRNA synthetase
  misc_feature (1)..(619): NCBI GI: 145234763 Blast Desc: An03g01280 [Aspergillus niger] gi|134057703|emb|CAK38101.1| protein product [Aspergillus niger]
  misc_feature (1)..(619): NCBI GI: 212545230 Blast Desc: glutaminyl-tRNA synthetase, [Penicillium marneffei ATCC 18224] gi|210065738|gb|EEA19832.1| glutaminyl-tRNA synthetase, [Penicillium marneffei ATCC 18224]
  misc_feature (91)..(620): SWISSPROT Homolog: EC 6.1.1.18 Glutamine--tRNA ligase
MADAATEAVAKLVLDDVTGEMVSKNELKKRTQKRAKKAATEKAKAAAPTDPNKQNAPKPKPKQEEAAIDPESMFKLGFLDDVFKERPMKPVVTRFPPEPNGFLHIGHAKAICVNFGFAKYHGGNTYLRYDDTNPEAEEEKYFVAIEGFSPYKITYSSDNFDKLYELAEKLISLDKAYVCHCNDEEIKAQRGGEAHGERFRCAHAEQSAEKNLEEFRGMRDGKYKPREAFLRMKQDITDGNPQMWDLAAYRVLEKPHHRTGSKWRIYPTYDFTHCLCDSFEDITHSLCTTEFIQSRVSYEWLNKSLGVYEPMQREYGRLSITGTVLSKRKIMKLVNEGIVRGWDDPRLYTLIGIKRRGVPPGAIIEFVSELGVTTSPSVIQLKRFDQTIRRYLERTVPRLALVLDPIPVVIEDAEELEVDVPFSPKVPAMGSHKVKFTPTVYIDRSDFREVDSKDYFRLAPNKTVGLLQVPHPIKAVSFSKDEATGKITEVRAVFDKETKKPKTYIQWVPSGSREVEVRIHNSLFKSEKPEDAEGGFLKDLNPESEVIYPRAMIESAGFNEVKARAPWPEAAGESELGKGGVESVRFQGMRVAYFAMDSDSTDDKVILNRIVSLKEDAGKS

SEQ ID NO: 18994 - DNA, 2595 bp, Muscodor strobelii
  misc_feature: SGI EST ID NO. CUFF.44685.1
  misc_feature: Variant of the nucleotide sequence at SEQ ID NO 18992
aagctatctcgtcccgcccttgcccaagatatctagacatcgccgtttgagtcatcgctttgatatcacacgacaacagttgatcaacactttttcaaccttcaatatctcaataccgtgtactttttttcctaactgcgaaatcgacccacttcgatcatatcaaattcctcgagcgccatggccgacgccgccaccgaggccgtggccaagctggtgctcgacgatgtcaccggcgagatggtctccaagaacgagctgaagaagcgaactcagaagcgagcgaagaaggccgcgacggagaaagccaaggccgcggcgcctaccgatcccaacaaacagaatgcgcccaagcccaagccgaagcaggaagaagctgcaatcgatcctgaatccatgttcaagcttggatttctcgatgatgtcttcaaagagcgccccatgaaacccgtcgtcactcgattccctcccgaacccaacgggttcctacacattgggcacgcgaaggcaatctgcgtgaattttggctttgccaaataccacggaggcaatacatatttgcgctacgatgatacgaatcccgaagcagaagaggagaaatatttcgtcgcaatcgaagaaatggtccgatggctagggttcagtccgtacaagatcacatattcgagtgacaatttcgacaagctgtacgaactcgccgagaaactcataagcctcgacaaagcttacgtatgccattgcaacgatgaggagatcaaggcccagcgtggaggcgaggcacatggtgagcgattccggtgcgctcatgctgagcagagcgccgagaagaacctcgaagagtttagaggcatgcgcgacggtaaatacaaaccgcgcgaggcattcttgcgcatgaagcaggacatcacagatggcaacccccaaatgtgggatcttgctgcttacagagtactcgagaaacctcatcaccgcacagggtcaaagtggcggatatatccaacttatgatttcactcattgtctttgtgatagctttgaggatatcactcattcactgtgcacaacggaattcatccaaagtcgtgtcagctacgagtggctgaataagtcactcggagtatacgaaccaatgcagagagaatacggtcgcctgagcattactggcactgtgttgtcgaagaggaaaattatgaagttggtgaacgagggcatcgtacgcggatgggacgacccaaggctgtacaccttgatcggtatcaagaggagaggagtgccacctggtgctatcatcgaatttgtttcggagcttggagttactacgtcgccttcggtgatccagctcaagcgtttcgatcaaaccattcgaagataccttgagcgcacggtgccaaggctggcactcgttctcgatccgattcccgttgtgatcgaggatgcagaggagctagaagtcgacgtacccttctctcccaaggtccctgcaatgggctcccacaaggtcaagtttacacccaccgtatacatcgatcgctcagatttccgtgaagtcgacagcaaggattatttcagactagcgccgaacaagacagttggtttacttcaagtcccccatcctatcaaagctgtgtctttcagcaaagacgaggcaacgggaaagattactgaagttcgtgctgttttcgacaaagagacgaaaaagcccaagacctacattcagtgggtaccgtctgggtctcgtgaagtggaagtaagaatccacaactcccttttcaaatcggagaagcctgaagatgccgagggcggatttttgaaagatctaaatcccgagagcgaggtcatatatcccagggcaatgatcgaatcagcgggctttaacgaagtcaaggcgagggcaccatggccggaagccgcaggtgagagcgaattaggtaaaggtggtgtagagagcgttcgctttcaaggaatgagagttgcttattttgccatggattcggatagcacggacgacaaggtcatcttgaaccggattgtgtccctgaaagaagacgctggcaagagctgaggaaatcatagcgaaatggacatgtgatacgcgtttttttagacctccaccttcaattatctgacagcatcgtggctaattcatacctcccaagagtcttgataaccactgaacactacaattgtctcccgtcatatgaacaatagtatgtcaattttacctcggaccgaagactcactgtatagacacttggcatggcaacttgtaagtgcatagctagatttgccttacccagcatcacaacacgacagattcatctactacatgccttgtcaaagaatgctatatggctcatgacaagtggcaaaaggatgtcagttacccactgcattagccacgctatgtgaagatgtcgcccagacgtgatagagctgggagcgctcccaagatgcgcccggctaattacaacccagtcaccaaaacatctcgaacccgaacgtgactcgccacaccctcttcacctgttcaccaaattgtgtactcaatcaaaaattagattgcatgatggcctatcagataattgccgccctcccg

SEQ ID NO: 18995 - DNA, 1083 bp, Muscodor strobelii
  misc_feature: SGI cDNA ID NO. 566380
  misc_feature: Encodes the peptide sequence at SEQ ID NO 18996
atgtattggacttctctgctcggcttcaccacgctcgttggggcggtgcctcagtttggaggctctgggggactgactatgctgcgctttggatgctcacaagtcgtcatcgacagacttgatcctctcgttaatccgggctccgtaccctctcctcacgtccatcagattgtcggcggaaatgcgttcaatgcctcgatgaccactggcgatgtctcgacaggcgcgacttgcactacgtgtgcgttctctcaggacttctcgaattactggacggcgaacttgtacttcaaggcccggaatggaacgtacaagagagttcaacagggtggtgctgcataccaatttaacgataacttcagcacacaaatcggaggtggtgtcctcgtctactatgtatctgcccagcccgggaagatcacggctttcaagcctggtttccgcatgctcgtcggagacgccagcgctcgctcgcgaactggcacacagctgaagaagcagaactgctaccgatgctacaccggccctaacttcggaggagacgtctctgctccttgcgcagatgctaggatcgacaccgaggctctgcccaaggccgcttgcaagggtggtatccgatcgaacattctgttcccaacatgctgggatggaaagaatctcgacactcccaaccaccaagaccacgttgcttatcccaccactggcccagctgatttcctgagcttgggaggctcttgcccttcgactcaccctatccgcattcctcagctgatgtacgaggttgtctgggacaccacccccttcaacaaccccaatgactggccgaccgacggctctcagccattttacttctccactggagacaacaccggatatggccaacacgccgactacgtcttcggctggcaaggtgattcgctccagaaggccatggacgcctccggatgcatgggtgccaagtgctcgaccctttccaaccaggccatcacccaggccaagtcctgctctgtcaaggctgttgtccaggaggaccacgatggctggatcacggagctccctggtatgactatgcccatggcttag

SEQ ID NO: 18996 - protein, 360 aa, Muscodor strobelii
  misc_feature: SGI Peptide ID NO. 566380
  misc_feature (41)..(302): Pfam Id: PF09362 Pfam Desc: Domain of function (DUF1996)
  misc_feature (1)..(359): NCBI GI: 164427037 Blast Desc: NCU02341 [Neurospora crassa OR74A] gi|157071579|gb|EAA30531.2| conserved [Neurospora crassa OR74A]
  misc_feature (1)..(359): NCBI GI: 40804600 Blast Desc: conserved [Neurospora crassa]
  misc_feature (1)..(357): NCBI GI: 145609071 Blast Desc: MGG_09109 [Magnaporthe grisea 70-15] gi|145016512|gb|EDK00942.1| MGG_09109 [Magnaporthe grisea 70-15]
  misc_feature (17)..(346): NCBI GI: 171678881 Blast Desc: protein product [Podospora anserina] gi|170937511|emb|CAP62169.1| protein product [Podospora anserina]
  misc_feature (20)..(355): NCBI GI: 189205016 Blast Desc: conserved [Pyrenophora tritici-repentis Pt-1C-BFP] gi|187985942|gb|EDU51430.1| conserved [Pyrenophora tritici-repentis Pt-1C-BFP]
  misc_feature (1)..(357): NCBI GI: 171680460 Blast Desc: protein product [Podospora anserina] gi|170939857|emb|CAP65082.1| protein product [Podospora anserina]
  misc_feature (16)..(354): NCBI GI: 116197483 Blast Desc: CHGG_06897 [Chaetomium globosum CBS 148.51] gi|88178176|gb|EAQ85644.1| CHGG_06897 [Chaetomium globosum CBS 148.51]
  misc_feature (15)..(354): NCBI GI: 171677610 Blast Desc: protein product [Podospora anserina] gi|170936873|emb|CAP61531.1| protein product [Podospora anserina]
  misc_feature (24)..(357): NCBI GI: 116205357 Blast Desc: CHGG_10562 [Chaetomium globosum CBS 148.51] gi|88176690|gb|EAQ84158.1| CHGG_10562 [Chaetomium globosum CBS 148.51]
  misc_feature (1)..(355): NCBI GI: 85090100 Blast Desc: NCU07763 [Neurospora crassa OR74A] gi|28919599|gb|EAA29021.1| conserved [Neurospora crassa OR74A]
MYWTSLLGFTTLVGAVPQFGGSGGLTMLRFGCSQVVIDRLDPLVNPGSVPSPHVHQIVGGNAFNASMTTGDVSTGATCTTCAFSQDFSNYWTANLYFKARNGTYKRVQQGGAAYQFNDNFSTQIGGGVLVYYVSAQPGKITAFKPGFRMLVGDASARSRTGTQLKKQNCYRCYTGPNFGGDVSAPCADARIDTEALPKAACKGGIRSNILFPTCWDGKNLDTPNHQDHVAYPTTGPADFLSLGGSCPSTHPIRIPQLMYEVVWDTTPFNNPNDWPTDGSQPFYFSTGDNTGYGQHADYVFGWQGDSLQKAMDASGCMGAKCSTLSNQAITQAKSCSVKAVVQEDHDGWITELPGMTMPMA

SEQ ID NO: 18997 - DNA, 1460 bp, Muscodor strobelii
  misc_feature: SGI EST ID NO. CUFF.44609.1
  misc_feature: Variant of the nucleotide sequence at SEQ ID NO 18995
cggtgcctcagtttggaggctctgggggactgactatgctgcgctttggatgctcacaagtcgtcatcgacagacttgatcctctcgttaatccgggctccgtaccctctcctcacgtccatcagattgtcggcggaaatgcgttcaatgcctcgatgaccactggcgatgtctcgacaggcgcgacttgcactacgtgtgcgttctctcaggacttctcgaattactggacggcgaacttgtacttcaaggcccggaatggaacgtacaagagagttcaacagggtggtgctgcataccaatttaacgataacttcagcacacaaatcggaggtggtgtcctcgtctactatgtatctgcccagcccgggaagatcacggctttcaagcctgtatggtactccgaagtctcataggtttggatagggatactgatagttccagggtttccgcatgctcgtcggagacgccagcgctcgctcgcgaactggcacacagctgaagaagcagaactgctaccgatgctacaccggccctaacttcggaggagacgtctctgctccttgcgcagatgctaggttcgtttgtctaagttccgatcaaaaacatcataattaatcataactgcaggatcgacaccgaggctctgcccaaggccgcttgcaagggtggtatccgatcgaacattctgttcccaacatgctgggatggaaagaatctcgacactcccaaccaccaagaccacgttgcttatcccaccactggcccagctgatttcctgagcttgggaggctcttgcccttcgactcaccctatccgcattcctcagctgatgtacgaggttgtctgggacaccacccccttcaacaaccccaatgactggccgaccgacggctctcagccattttacttctccactggagacaacaccggatatggccaacgtacgtaatttcacttactctgtcttcttcactttgatatgcagaccgaagctaacaatgagtgtaatagacgccgactacgtcttcggctggcaaggtgattcgctccagaaggccatggacgcctccggatgcatgggtgccaagtgctcgaccctttccaaccaggccatcacccaggccaagtcctgctctgtcaaggctgttgtccaggaggaccacgatggctggatcacggagctccctggtatgactatgcccatggcttagataactcactggtttacggagatttggggagggtcgcatcgtgttagattgggagtctgagggatatgtggtgcaagtagtggtctctacggtgtaatctactctcgttgactagattgtatgtttcggtatcttggcagacagaataattcgatcattgcatatcatctgtagtcggggtgctttgttgacgttgctgatgtcgttatttgatctactattggaatgagagtatagagctccttt

SEQ ID NO: 18998 - DNA, 164 bp, Muscodor strobelii
  misc_feature: SGI cDNA ID NO. 566381
  misc_feature: Reduced expression when VOC is produced
  misc_feature: Encodes the peptide sequence at SEQ ID NO 18999
atgtcgagccgatcgacgccccgccgacgccagactctccgcgagtcgcacgccatcgcgcgcaatggcggccccgtgacgcccaagatcatcgacgcggcgccgtcgctcgagaaggccgagcggtacggcactagacgaccagcggtccacccacctccaag

SEQ ID NO: 18999 - protein, 54 aa, Muscodor strobelii
  misc_feature: SGI Peptide ID NO. 566381
  misc_feature (5)..(51): NCBI GI: 156059462 Blast Desc: SS1G_03743 [Sclerotinia sclerotiorum 1980] gi|154701530|gb|EDO01269.1| SS1G_03743 [Sclerotinia sclerotiorum 1980]
  misc_feature (1)..(44): NCBI GI: 39941440 Blast Desc: MGG_05631 [Magnaporthe grisea 70-15] gi|145022315|gb|EDK06335.1| MGG_05631 [Magnaporthe grisea 70-15]
  misc_feature: Useful for introducing or modulating the production of volatile compounds
MSSRSTPRRRQTLRESHAIARNGGPVTPKIIDAAPSLEKAERYGTRRPAVHPPP

SEQ ID NO: 19000 - DNA, 3794 bp, Muscodor strobelii
  misc_feature: SGI EST ID NO. CUFF.44941.0
  misc_feature: Variant of the nucleotide sequence at SEQ ID NO 18998
gccaagttcaagtgattgagtgctggactggttgtatcgagtgtgccagctatctgcacgacagggggcagcaggcacttgtacctttggtgtggtggccccgccagaaagggcctgcttgcgtgcgtccagctccaacaaggctcgttaggaagtcccgctactactctacctaaacctgccactacacacacccgacctgacgacgtctgacccttgcgcatcatcatcaccgtcaccccagcccattatcatcatcgcccgcccgccccgtaccttcgcccaccactgccgcccctcgactcacgagtcaccacgacccaacatccccggcttgacgtgctcttcttgcgtcccatcgtctgtcgtcgccggaggagcaggtatcttgccagcagtcctcgaccgtctctgcccacgcctgctgtgagcctccgccgccactccgggtctgtgcctctgctgctcacctctcccccgcgaggctgcattccgacaagacaagctcgtgccgccctgcccgctctctgccgctcgaccgcgcctcagcctgtcacctctcccagcatggccgagtccgatcccaccgtctggaagttcacccagtgtttcggtgacaagggagatgttgaggacataaccgaagccgatatcatatcgactgtcgagtttgaccacacgggcaactatctcgccaccggagacaaaggaggcagagtcgtcttgtttgagcggaacgaaacagtcagtctcctggtcctccgctggtcccgtggccccaacgcctctgctgatcctcccacagaaaaagacatgcgagtacaaattccacacagagttccagtctcacgaacccgagtttgactacttaaagtccctcgagatagaggagaagattaacaagatcaaatggtgtcgccgccagaatgcgtcccactacctcctgtccaccaatgataagacgataaagctgtggaaggtcttcgagaagtcgctcaaggtcgtcgccgagaacaacctgtcgcaagaggtcacccccggcaacttggccggcgccggtggcggagccgcgcgcccgctccctcagacccagttcaagacttccggggagctcaagctgcctcgcctgacgcaccacgacaccgtcgtcgccgccgtccctcgccgcacctacgccaacgcccacgcctaccacatcaacagcatctctgtcaacagcgacggagagaccttcataagtagcgatgacctccgcatcaacctttggaacctaaacatccaggaccagagcttcaacatcgtcgacatcaaacctgccaatatggaagaactaacagaggtcatcacggccgccgagttccatcccgtcagctgtaactggtttatgtatgccagttccaagggcaccatcaaactcgccgacatgcgtgagagtgctctctgtgaccagcatgcaaagctcttcgagcaagaggaagatccgtcctcgagatccttcttctccgaaattatttcttcaatatccgacgttcgcttctcccacgatggcagatatatactctcgcgtgattatctgaccgtgaaaatctgggatgtcaacatggagcggcagccagtcaagacgattcccatccacgagcatctgcgcccacggctctgcgatacgtatgaaaacgacagcatttttgacaagttcgaggtggtcttctcaggcgatgccaagaatgtgatgacgggaagctataataacaacttcatgatctacccatcggatccagagaaagagacagaggtggttctgcaagctgacaagtccgccttcaaggccaaaaaagtgggaataccgacacccatcaacacggcgacgagccccacggcaacaaacggcggtaagaaggccgggtcgcgtgccggcagtccggcggccggggcaggccaggggcaaaggatgaggaaggagaccgatgcagaccagatcgattttaacaagaagattctgcatatgagttggcatcctttcgaggacagcatcgccatcgcggcgacaaacaatttgtttgtcttctcggccctgtaaaggccatcagacagctggccgcgggcactagtaatttggcagccttgtgctctagcgattctacgatctaacctgtggaggagtgacttaaatccccggacccgacaaccctgatgcacaccgatactcgactaccaagcgccgcccaaattctttattttcacgatggcgagtatatagtgccatcagatcatgttcgagatgccaaccgcgacggtgcacgtggacggcatgggattgggccacccacagattaagagaggaaaaaagaaatggacagcactacgccgattatgatgaggaagagggaagaggagcaggcagagaatgctctcctaccctccttgtcgtggaaacacagacgggccaccacccaagcatagactctacaagcaggcgacgagcacaaataaatggcccaggcgtttgtgaataacgactgatgcgtttccatggatcgactaggcgatgtgatatgcggggagcgaagaccttcatcagtcttgcaagcccaagtttgtgatctagtctatattgctcccgcaaagatattatgaggacgctgtatcgaacgaatcatgccagaactaagcttcacaatgtaggcacccataatatcctcgtccgtgacctgaaccctgattactcgcctctggcgcccctaccctaatcattttgactacctatcgcactacgcctgtacctctcggcgtgtatgccatgtgcaagatcatgaggcgatatgtgtggtcgatatgatgtcatgactagcatttgagccccttgtcccatccctgaaacatcatataatgctgtaactgtgcagatatgtggagggaagttttgagaggaggcaacgaaaataagaacggtgaagagatgaggacgggctgaatcggcagacgttgggcaaaagtaggagaaagaagtgtgggatagtgttgaggtggtgttgagtagtcgacggcactaccaattaaggcccacgaagagaacgcctttctcgggtgactagccgtcgggcggtaaggtacccgctttccccgctggggccttaagtgctaggtttgataggtacctccaggctcctgtaggacatcgacaccctggcgggaatggactggctgggcctaaaaaaagcgaggccagcgggccacgggcgagatgggtgccgccaagagctgcagggcaaagccagtcccggcgatcaagccacatgtcgatcactttcttcgaggtcgttgctgtcctcttcgctcgacgtgcaacgttcctgctctggaccaccgactgcagcgccgacgctggtgacacactcgcactcactctctcccctgatgtttggcatcccacgccatcagccatcagccatcagccatcagccatcatcattcattcactcattcattcacccccgagccaggctgcaggtcccgtctccccgctggatgccaaggtagtctgacctgtcgctggttgaggccgtgctgcgctgccaaccccccgccatcgacacctcgacggccgtctcacgctcctcccttccgaccactccccgccacccgcgacggctccgcacacgccatgtcgagccgatcgacgccccgccgacgccagactctccgcgagtcgcacgccatcgcgcgcaatggcggccccgtgacgcccaagatcatcgacgcggcgccgtcgctcgagaaggccgagcggtacggca

SEQ ID NO: 19001 - DNA, 1449 bp, Muscodor strobelii
  misc_feature: SGI cDNA ID NO. 566382
  misc_feature: Encodes the peptide sequence at SEQ ID NO 19002
atggccgagtccgatcccaccgtctggaagttcacccagtgtttcggtgacaagggagatgttgaggacataaccgaagccgatatcatatcgactgtcgagtttgaccacacgggcaactatctcgccaccggagacaaaggaggcagagtcgtcttgtttgagcggaacgaaacaaaaaagacatgcgagtacaaattccacacagagttccagtctcacgaacccgagtttgactacttaaagtccctcgagatagaggagaagattaacaagatcaaatggtgtcgccgccagaatgcgtcccactacctcctgtccaccaatgataagacgataaagctgtggaaggtcttcgagaagtcgctcaaggtcgtcgccgagaacaacctgtcgcaagaggtcacccccggcaacttggccggcgccggtggcggagccgcgcgcccgctccctcagacccagttcaagacttccggggagctcaagctgcctcgcctgacgcaccacgacaccgtcgtcgccgccgtccctcgccgcacctacgccaacgcccacgcctaccacatcaacagcatctctgtcaacagcgacggagagaccttcataagtagcgatgacctccgcatcaacctttggaacctaaacatccaggaccagagcttcaacatcgtcgacatcaaacctgccaatatggaagaactaacagaggtcatcacggccgccgagttccatcccgtcagctgtaactggtttatgtatgccagttccaagggcaccatcaaactcgccgacatgcgtgagagtgctctctgtgaccagcatgcaaagctcttcgagcaagaggaagatccgtcctcgagatccttcttctccgaaattatttcttcaatatccgacgttcgcttctcccacgatggcagatatatactctcgcgtgattatctgaccgtgaaaatctgggatgtcaacatggagcggcagccagtcaagacgattcccatccacgagcatctgcgcccacggctctgcgatacgtatgaaaacgacagcatttttgacaagttcgaggtggtcttctcaggcgatgccaagaatgtgatgacgggaagctataataacaacttcatgatctacccatcggatccagagaaagagacagaggtggttctgcaagctgacaagtccgccttcaaggccaaaaaagtgggaataccgacacccatcaacacggcgacgagccccacggcaacaaacggcggtaagaaggccgggtcgcgtgccggcagtccggcggccggggcaggccaggggcaaaggatgaggaaggagaccgatgcagaccagatcgattttaacaagaagattctgcatatgagttggcatcctttcgaggacagcatcgccatcgcggcgacaaacaatttgtttgtcttctcggccctgtaa

SEQ ID NO: 19002 - protein, 482 aa, Muscodor strobelii
  misc_feature: SGI Peptide ID NO. 566382
  misc_feature (1)..(482): NCBI GI: 4322266 Blast Desc: protein phosphatase 2A regulatory B subunit [Neurospora crassa]
  misc_feature (2)..(482): NCBI GI: 256734998 Blast Desc: [Nectria haematococca mpVI 77-13-4]
  misc_feature (2)..(482): NCBI GI: 116206888 Blast Desc: CHGG_02737 [Chaetomium globosum CBS 148.51] gi|88183334|gb|EAQ90802.1| CHGG_02737 [Chaetomium globosum CBS 148.51]
  misc_feature (1)..(476): NCBI GI: 164422778 Blast Desc: protein phosphatase PP2A regulatory subunit B [Neurospora crassa OR74A] gi|157069817|gb|EAA34512.2| protein phosphatase PP2A regulatory subunit B [Neurospora crassa OR74A]
  misc_feature (3)..(482): NCBI GI: 171680341 Blast Desc: protein product [Podospora anserina] gi|170939797|emb|CAP65023.1| protein product [Podospora anserina]
  misc_feature (1)..(482): NCBI GI: 156050567 Blast Desc: SS1G_07871 [Sclerotinia sclerotiorum 1980] gi|154692271|gb|EDN92009.1| SS1G_07871 [Sclerotinia sclerotiorum 1980]
  misc_feature (2)..(482): NCBI GI: 189204213 Blast Desc: protein phosphatase 2A regulatory B subunit [Pyrenophora tritici-repentis Pt-1C-BFP] gi|187985541|gb|EDU51029.1| protein phosphatase 2A regulatory B
  misc_feature (1)..(482): NCBI GI: 154308761 Blast Desc: BC1G_07803 [Botryotinia fuckeliana B05.10] gi|150852754|gb|EDN27946.1| BC1G_07803 [Botryotinia fuckeliana B05.10]
  misc_feature (27)..(482): NCBI GI: 46108974 Blast Desc: FG01369.1 [Gibberella zeae PH-1]
  misc_feature (2)..(482): NCBI GI: 169626515 Blast Desc: SNOG_16549 [Phaeosphaeria nodorum SN15] gi|111054969|gb|EAT76089.1| SNOG_16549 [Phaeosphaeria nodorum SN15]
MAESDPTVWKFTQCFGDKGDVEDITEADIISTVEFDHTGNYLATGDKGGRVVLFERNETKKTCEYKFHTEFQSHEPEFDYLKSLEIEEKINKIKWCRRQNASHYLLSTNDKTIKLWKVFEKSLKVVAENNLSQEVTPGNLAGAGGGAARPLPQTQFKTSGELKLPRLTHHDTVVAAVPRRTYANAHAYHINSISVNSDGETFISSDDLRINLWNLNIQDQSFNIVDIKPANMEELTEVITAAEFHPVSCNWFMYASSKGTIKLADMRESALCDQHAKLFEQEEDPSSRSFFSEIISSISDVRFSHDGRYILSRDYLTVKIWDVNMERQPVKTIPIHEHLRPRLCDTYENDSIFDKFEVVFSGDAKNVMTGSYNNNFMIYPSDPEKETEVVLQADKSAFKAKKVGIPTPINTATSPTATNGGKKAGSRAGSPAAGAGQGQRMRKETDADQIDFNKKILHMSWHPFEDSIAIAATNNLFVFSAL

SEQ ID NO: 19003 - DNA, 3794 bp, Muscodor strobelii; identical to SEQ ID NO: 19000
  misc_feature: SGI EST ID NO. CUFF.44941.0
  misc_feature: Variant of the nucleotide sequence at SEQ ID NO 19001

SEQ ID NO: 19004 - DNA, 1446 bp, Muscodor strobelii
  misc_feature: SGI cDNA ID NO. 566383
  misc_feature: Encodes the peptide sequence at SEQ ID NO 19005
atggccgagtccgatcccaccgtctggaagttcacccagtgtttcggtgacaagggagatgttgaggacataaccgaagccgatatcatatcgactgtcgagtttgaccacacgggcaactatctcgccaccggagacaaaggaggcagagtcgtcttgtttgagcggaacgaaacaaaaaagacatgcgagtacaaattccacacagagttccagtctcacgaacccgagtttgactacttaaagtccctcgagatagaggagaagattaacaagatcaaatggtgtcgccgccagaatgcgtcccactacctcctgtccaccaatgataagacgataaagctgtggaaggtcttcgagaagtcgctcaaggtcgtcgccgagaacaacctgtcgcaagaggtcacccccggcaacttggccggcgccggtggcggagccgcgcgcccgctccctcagacccagttcaagacttccggggagctcaagctgcctcgcctgacgcaccacgacaccgtcgtcgccgccgtccctcgccgcacctacgccaacgcccacgcctaccacatcaacagcatctctgtcaacagcgacggagagaccttcataagtagcgatgacctccgcatcaacctttggaacctaaacatccaggaccagagcttcaacatcgtcgacatcaaacctgccaatatggaagaactaacagaggtcatcacggccgccgagttccatcccgtcagctgtaactggtttatgtatgccagttccaagggcaccatcaaactcgccgacatgcgtgagagtgctctctgtgaccagcatgcaaagctcttcgagcaagaggaagatccgtcctcgagatccttcttctccgaaattatttcttcaatatccgacgttcgcttctcccacgatggcagatatatactctcgcgtgattatctgaccgtgaaaatctgggatgtcaacatggagcggcagccagtcaagacgattcccatccacgagcatctgcgcccacggctctgcgatacgtatgaaaacgacagcatttttgacaagttcgaggtggtcttctcaggcgatgccaagaatgtgatgacgggaagctataataacaacttcatgatctacccatcggatccagagaaagagacagaggtggttctgcaagctgacaagtccgccttcaaggccaaaaaagtgggaataccgacacccatcaacacggcgacgagccccacggcaacaaacggcggtaagaaggccgggtcgcgtgccggcagtccggcggccggggcaggccaggggcaaaggatgaggaaggagaccgatgcagaccagatcgattttaacaagaagattctgcatatgagttggcatcctttcgaggacagcatcgccatcgcggcgacaaacaatgtaagtcgcgccggacgatga

SEQ ID NO: 19005 - protein, 481 aa, Muscodor strobelii
  misc_feature: SGI Peptide ID NO. 566383
  misc_feature (1)..(477): NCBI GI: 164422778 Blast Desc: protein phosphatase PP2A regulatory subunit B [Neurospora crassa OR74A] gi|157069817|gb|EAA34512.2| protein phosphatase PP2A regulatory subunit B [Neurospora crassa OR74A]
  misc_feature (1)..(476): NCBI GI: 4322266 Blast Desc: protein phosphatase 2A regulatory B subunit [Neurospora crassa]
  misc_feature (2)..(476): NCBI GI: 116206888 Blast Desc: CHGG_02737 [Chaetomium globosum CBS 148.51] gi|88183334|gb|EAQ90802.1| CHGG_02737 [Chaetomium globosum CBS 148.51]
  misc_feature (2)..(476): NCBI GI: 256734998 Blast Desc: [Nectria haematococca mpVI 77-13-4]
  misc_feature (3)..(476): NCBI GI: 171680341 Blast Desc: protein product [Podospora anserina] gi|170939797|emb|CAP65023.1| protein product [Podospora anserina]
  misc_feature (1)..(476): NCBI GI: 156050567 Blast Desc: SS1G_07871 [Sclerotinia sclerotiorum 1980] gi|154692271|gb|EDN92009.1| SS1G_07871 [Sclerotinia sclerotiorum 1980]
  misc_feature (2)..(476): NCBI GI: 189204213 Blast Desc: protein phosphatase 2A regulatory B subunit [Pyrenophora tritici-repentis Pt-1C-BFP] gi|187985541|gb|EDU51029.1| protein phosphatase 2A regulatory B
  misc_feature (1)..(476): NCBI GI: 154308761 Blast Desc: BC1G_07803 [Botryotinia fuckeliana B05.10] gi|150852754|gb|EDN27946.1| BC1G_07803 [Botryotinia fuckeliana B05.10]
  misc_feature (27)..(476): NCBI GI: 46108974 Blast Desc: FG01369.1 [Gibberella zeae PH-1]
  misc_feature (2)..(476): NCBI GI: 169626515 Blast Desc: SNOG_16549 [Phaeosphaeria nodorum SN15] gi|111054969|gb|EAT76089.1| SNOG_16549 [Phaeosphaeria nodorum SN15]
MAESDPTVWKFTQCFGDKGDVEDITEADIISTVEFDHTGNYLATGDKGGRVVLFERNETKKTCEYKFHTEFQSHEPEFDYLKSLEIEEKINKIKWCRRQNASHYLLSTNDKTIKLWKVFEKSLKVVAENNLSQEVTPGNLAGAGGGAARPLPQTQFKTSGELKLPRLTHHDTVVAAVPRRTYANAHAYHINSISVNSDGETFISSDDLRINLWNLNIQDQSFNIVDIKPANMEELTEVITAAEFHPVSCNWFMYASSKGTIKLADMRESALCDQHAKLFEQEEDPSSRSFFSEIISSISDVRFSHDGRYILSRDYLTVKIWDVNMERQPVKTIPIHEHLRPRLCDTYENDSIFDKFEVVFSGDAKNVMTGSYNNNFMIYPSDPEKETEVVLQADKSAFKAKKVGIPTPINTATSPTATNGGKKAGSRAGSPAAGAGQGQRMRKETDADQIDFNKKILHMSWHPFEDSIAIAATNNVSRAGR

SEQ ID NO: 19006 - DNA, 3794 bp, Muscodor strobelii; identical to SEQ ID NO: 19000
  misc_feature: SGI EST ID NO. CUFF.44941.0
  misc_feature: Variant of the nucleotide sequence at SEQ ID NO 19004

SEQ ID NO: 19007 - DNA, 918 bp, Muscodor strobelii
  misc_feature: SGI cDNA ID NO. 566384
  misc_feature: Encodes the peptide sequence at SEQ ID NO 19008
atgggcctcgaaagtgatcaagaagaaatggcattgtcaactggggatggaaaggggaaagggaaggagaaggagaaggtaccagaagaccaacagtccgcacgattgccatcacaatggccagaggacagcacacaggcgcagtctaccatgtcccgtatggcgtcctcagctaccagtgtcaccagcagcctcttcagcggacgagatgatggccgatttctgagtagtctcctctcctccggcaacaaacccgcgggtccgtccaacgtcatttcccaacctagcccgtccgcgcaggaaacggcgcaggtggcacgtagcaagtcacttcccgaccgacgacctggtgccacgttcaggtcaccggctggctttgagtcgaccgacgacggacaaccaacctggcttgagacttgcgatccacagcgtggacctggaaatggcaaaggggaaccacaacggtcgcacgcggcggtcatgtcgatgatggatggcttcgaggtggtgcagttattggagtcagggacagaatcggaagccttcagctacgaagatggcgatccgccaatgaatagccatgagatgtctgctcttcgtcaagcattgtttgaaggcggcgcggcgagcagaaagtccgcgtgggatgatgcactcaacttccttccggatagtctcgtggattacctgggcattgacaatgtccacgacgctcgtttgatctgggcgcagcagtggcaggacgtcttatcttcctacaccgatgaagtgtggggcgacttagacgctctcgtcaaagcagctcgtcgagagttgaacgacgtggcgaaagggccacaagcagagacggcatcagagccacgtctagatgctgtgctgcggcttcgacaaatactcgcacatctacgaggctcttaa

SEQ ID NO: 19008 - protein, 305 aa, Muscodor strobelii
  misc_feature: SGI Peptide ID NO. 566384
  misc_feature (160)..(305): NCBI GI: 261356563 Blast Desc: conserved [Verticillium albo-atrum VaMs.102]
  misc_feature (13)..(305): NCBI GI: 171680339 Blast Desc: protein product [Podospora anserina] gi|170939796|emb|CAP65022.1| protein product [Podospora anserina]
  misc_feature (20)..(303): NCBI GI: 39941450 Blast Desc: MGG_05636 [Magnaporthe grisea 70-15] gi|145022320|gb|EDK06340.1| MGG_05636 [Magnaporthe grisea 70-15]
  misc_feature (165)..(305): NCBI GI: 85111042 Blast Desc: NCU09376 [Neurospora crassa OR74A] gi|28925472|gb|EAA34511.1| [Neurospora crassa OR74A]
  misc_feature (165)..(304): NCBI GI: 116206886 Blast Desc: CHGG_02736 [Chaetomium globosum CBS 148.51] gi|88183333|gb|EAQ90801.1| CHGG_02736 [Chaetomium globosum CBS 148.51]
  misc_feature (242)..(304): NCBI GI: 156050555 Blast Desc: [Sclerotinia sclerotiorum 1980] gi|154692265|gb|EDN92003.1| [Sclerotinia sclerotiorum 1980]
  misc_feature (241)..(304): NCBI GI: 154308747 Blast Desc: [Botryotinia fuckeliana B05.10] gi|150852747|gb|EDN27939.1| [Botryotinia fuckeliana B05.10]
MGLESDQEEMALSTGDGKGKGKEKEKVPEDQQSARLPSQWPEDSTQAQSTMSRMASSATSVTSSLFSGRDDGRFLSSLLSSGNKPAGPSNVISQPSPSAQETAQVARSKSLPDRRPGATFRSPAGFESTDDGQPTWLETCDPQRGPGNGKGEPQRSHAAVMSMMDGFEVVQLLESGTESEAFSYEDGDPPMNSHEMSALRQALFEGGAASRKSAWDDALNFLPDSLVDYLGIDNVHDARLIWAQQWQDVLSSYTDEVWGDLDALVKAARRELNDVAKGPQAETASEPRLDAVLRLRQILAHLRGS

SEQ ID NO: 19009 - DNA, 1957 bp, Muscodor strobelii
  misc_feature: SGI EST ID NO. CUFF.44943.0
  misc_feature: Variant of the nucleotide sequence at SEQ ID NO 19007
gcgagctcaactcgggcaaggactactgtctcaagcgtaggtatccatcgagtgcccgctgtctaccattgaagacaccaaagcaatgtaccgacatccagataacggtattcgattctcgggctacatgtagggtaaggtacatgtatatgtatgtacctaccttatgagattgttaggccgcaatgacgtctttttccattggcccatcgcgttgacatatggggtcctccattctaccatcgacagttggcagataagttggacattgaggctcaagctcccaccactcagctcttacatcgcaactacatcaaaccgacccagcgcgccccaacaggaaggatagctccacgagctgaggtttaggtagatcagcaagatcaggtagggacatcaagagtcaagaaacttgcccaaccatcaactttgagcgtcgcataggtgcaaacgcatcttattgaaatcgccgctgttcttccagaagatcgagactggccatgtgaagccgagtagcctgcaggctaggtcttaccgaggtcttggggcctgtagtcaacttgccctggccggcttcggtttttaattttttttattcacattccaactcaaatcgccacgtcacttcacactcgtcatgaagaaaccgtctttggattaagccggcccgtgatctagctagaccgatttattgcgatgggcctcgaaagtgatcaagaagaaatggcattgtcaactggggatggaaaggggaaagggaaggagaaggagaaggtaccagaagaccaacagtccgcacgattgccatcacaatggccagaggacagcacacaggcgcagtctaccatgtcccgtatggcgtcctcagctaccagtgtcaccagcagcctcttcagcggacgagatgatggccgatttctgagtagtctcctctcctccggcaacaaacccgcgggtccgtccaacgtcatttcccaacctagcccgtccgcgcaggaaacggcgcaggtggcacgtagcaagtcacttcccgaccgacgacctggtgccacgttcaggtcaccggctggctttgagtcgaccgacgacggacaaccaacctggcttgagacttgcgatccacagcgtggacctggaaatggcaaaggggaaccacaacggtcgcacgcggcggtcatgtcgatgatggatggcttcgaggtggtgcagttattggagtcagggacagaatcggaagccttcagctacgaagatggcgatccgccaatgaatagccatgagatgtctgctcttcgtcaagcattgtttgaaggcggcgcggcgagcagaaagtccgcgtgggatgatgcactcaacttccttccggatagtctcgtggattacctgggcattgacaatgtccacgacgctcgtttgatctgggcgcagcagtggcaggacgtcttatcttcctacaccgatgaagtgtggggcgacttagacgctctcgtcaaagcagctcgtcgagagttgaacgacgtggcgaaagggccacaagcagagacggcatcagagccacgtctagatgctgtgctgcggcttcgacaaatactcgcacatctacgaggctcttaaagcccagtgcaggtggcatacacgcataagatatggatttttatgcgtcttatcagatactaggtgctaatacctcatgcacctgcctaacattgaagtgtcgaagtgaagaagacttcccgaatcgagttatatcatgtgcacagtctacctgatacgtacttttatagagaccttggctccaaatgtgtatcttacaggccatcgataaataaagctcagaggctgctaagatggacgcacgatgccgatgctgctgctcatgtccgtcgtctccccctatcagttcactgtgctagagtgggaaggttgacacggacctcggggattgcacagcccggaa

SEQ ID NO: 19010 - DNA, 2349 bp, Muscodor strobelii
  misc_feature: SGI cDNA ID NO. 566385
  misc_feature: Reduced expression when VOC is produced
  misc_feature: Encodes the peptide sequence at SEQ ID NO 19011
atgaccaccctcggcgatgacctgctgcgcgtcgtcaaccagctccaagacctggtcttcaacaccatcggcaccgactccctcgacctgccccagatcgtcgtcgtaggctcccagtcggccggcaaatcctcggtgctcgagaacatcgtcggccgcgacttcttgccgcgcggaagcggcatcgtcacccgccgcccgctcatcctgcagctcatcaacgtcgaggaggacgagtccgacgccgaccacgaccagcatgccgcctaccgcaacccgacccaggcccgccgctccgagtgggccgagttccaccacatccccagccgtcgcttcaccgactttggcgacgtcaagcgcgagatcgagaccgagacctcccgcgtcgccggcagcaacaagggcatcaaccgccagcccatcaacctcaagatctactcgccccacgtcctgaacctcaccctggtcgacctccccggcctcaccaaggtgcccatcggcgaccagccggcagacatcgagaagcagacgcgcactctgatatccgagtacatcgccaagcccaacagcatcatcctggccgtctcgcccgccaacgtcgacatcgtcaactccgaggccctcaagctggcccgccatgtcgatcccctcggccgcaggaccatcggcgtgctcaccaaggtggatctgatggaccacggcaccaacgccctcgacatcctgtcggggcgcgtctaccccctgaagctgggctttgtgggcgtcgtgaacaggtcgcagcaggacatccagggcaaccgcccgatggaggaggcgctgaaggccgagaccgagttcttccgccaccaccccgcgtatcgcaacatcgcggcacggagcgggacccagttcctcgccaagacgctcaaccacactctcatggcccacatccgcgagcgtctgccagatatcaaagcgcgcctgaacacgctcatgggggctcggatgattctgcagctcatgacgcgctttgccacgtccttcatctcctccatcgacggaacttctaccgagatctccaccaaggagctgtctggcggcgctcgcatctactacatattcaactcggtcttcggcagcgccctcgaatccatcgacccgacgtccaatctctccgcgctcgacatccggaccgccatacgcaactccaccggcccccgtcccagtctgtttgtacccgagatggcgttcgacctcctggtgaagccgcaaatcaagctgctggagatccccagccaacgctgtgtggagctcgtgtacgaagagctcatcaagatttgccacacgtgtggatcgacagagctgtcacggttccccaggctgcaaggcaaactgattgaggtggtctcggatttgctccgcgaacgactcggccctgcctcgtcctatgtcgagtccctcatctccatccaacgtgcgtatatcaacacgaaccaccccaatttcttgggcgcagccgcggccatgagcggtgttgtcaacgcaaagcaggagcgcgagaggaagaggttgatccaagatgagagggacaggcgggagaagaagcggctcaaggagttgggcggcgccaacggaaccgaaacccctgaggatgacgaggacgccgcccacgaaaggggggacctatcgcatccccgcaagcagctgcacaaaggctctcgtagcatgtcgcctgccgtccatgagaatggcgctggcagcatcgcctcaaccatcaacggggcacgctcgaactcgcctagccggttcaaccagccactcggccatgcccgagagtctttcctgacctacttcttcggaaaagatggtgccacgcctgctggggcggccgcagccccatcccctctgcctcgacatgtgagccaaggcacagaagccaccttctcgcaaagtattcgacgtggggaggacaagctaccttatcggccgagcccctcccctttcatccgcgaggaagagagtccccgaagtgctgctttcggcctcggctcgcagtttgtcgataacgttgagccggccctcacggagcgagaggccatggagacggaactcatccgtgccctcatctcatcctacttcaacatcgtacgcgagtcgatcgcggaccaagtgcccaaggccgtcatgcatctcctcgtcaaccactgcaaagatgttgtgcagaaccggctggtcagcgagctgtacaaggaaggtttgttcgaagagctactgtacgaggacgatggcgtcaagaaggaacgcgagaaatgcgagaagctcctagagacgtacagggaagcggcgaagatcatcggagaagttgtataa

SEQ ID NO: 19011 - protein, 782 aa, Muscodor strobelii
  misc_feature: SGI Peptide ID NO. 566385
  misc_feature (237)..(511): Pfam Id: PF01031 Pfam Desc: Dynamin central region
  misc_feature (33)..(228): Pfam Id: PF00350 Pfam Desc: Dynamin family
  misc_feature (690)..(781): Pfam Id: PF02212 Pfam Desc: Dynamin GTPase effector domain
  misc_feature (330)..(511): Pfam Id: PF01031 Pfam Desc: Dynamin central region
  misc_feature (237)..(325): Pfam Id: PF01031 Pfam Desc: Dynamin central region
  misc_feature (1)..(782): NCBI GI: 85111713 Blast Desc: NCU09808 [Neurospora crassa OR74A] gi|28925831|gb|EAA34832.1| NCU09808 [Neurospora crassa OR74A]
  misc_feature (1)..(782): NCBI GI: 261357304 Blast Desc: dynamin-A [Verticillium albo-atrum VaMs.102]
  misc_feature (1)..(782): NCBI GI: 171687995 Blast Desc: protein product [Podospora anserina] gi|82939230|emb|CAI99403.1| dynamin-related protein 1 [Podospora anserina] gi|170943959|emb|CAP69611.1| protein product [Podospora
  misc_feature (1)..(781): NCBI GI: 156062984 Blast Desc: SS1G_01608 [Sclerotinia sclerotiorum 1980] gi|154696944|gb|EDN96682.1| SS1G_01608 [Sclerotinia sclerotiorum 1980]
  misc_feature (1)..(782): NCBI GI: 116180276 Blast Desc: conserved [Chaetomium globosum CBS 148.51] gi|88185063|gb|EAQ92531.1| conserved [Chaetomium globosum CBS 148.51]
  misc_feature (1)..(782): NCBI GI: 39976917 Blast Desc: MGG_06361 [Magnaporthe grisea 70-15] gi|145016235|gb|EDK00725.1| MGG_06361 [Magnaporthe grisea 70-15]
  misc_feature (1)..(782): NCBI GI: 256734317 Blast Desc: [Nectria haematococca mpVI 77-13-4]
  misc_feature (1)..(782): NCBI GI: 240278888 Blast Desc: dynamin-2 [Ajellomyces capsulatus H143]
  misc_feature (1)..(782): NCBI GI: 225560141 Blast Desc: dynamin family protein [Ajellomyces capsulatus G186AR]
  misc_feature (1)..(782): NCBI GI: 258575493 Blast Desc: DNM1 protein [Uncinocarpus reesii 1704] gi|237902194|gb|EEP76595.1| DNM1 protein [Uncinocarpus reesii 1704]
  misc_feature (6)..(782): SWISSPROT Homolog: EC 3.6.5.5 Dynamin GTPase
  misc_feature: Useful for introducing or modulating the production of volatile compounds
MTTLGDDLLRVVNQLQDLVFNTIGTDSLDLPQIVVVGSQSAGKSSVLENIVGRDFLPRGSGIVTRRPLILQLINVEEDESDADHDQHAAYRNPTQARRSEWAEFHHIPSRRFTDFGDVKREIETETSRVAGSNKGINRQPINLKIYSPHVLNLTLVDLPGLTKVPIGDQPADIEKQTRTLISEYIAKPNSIILAVSPANVDIVNSEALKLARHVDPLGRRTIGVLTKVDLMDHGTNALDILSGRVYPLKLGFVGVVNRSQQDIQGNRPMEEALKAETEFFRHHPAYRNIAARSGTQFLAKTLNHTLMAHIRERLPDIKARLNTLMGARMILQLMTRFATSFISSIDGTSTEISTKELSGGARIYYIFNSVFGSALESIDPTSNLSALDIRTAIRNSTGPRPSLFVPEMAFDLLVKPQIKLLEIPSQRCVELVYEELIKICHTCGSTELSRFPRLQGKLIEVVSDLLRERLGPASSYVESLISIQRAYINTNHPNFLGAAAAMSGVVNAKQERERKRLIQDERDRREKKRLKELGGANGTETPEDDEDAAHERGDLSHPRKQLHKGSRSMSPAVHENGAGSIASTINGARSNSPSRFNQPLGHARESFLTYFFGKDGATPAGAAAAPSPLPRHVSQGTEATFSQSIRRGEDKLPYRPSPSPFIREEESPRSAAFGLGSQFVDNVEPALTEREAMETELIRALISSYFNIVRESIADQVPKAVMHLLVNHCKDVVQNRLVSELYKEGLFEELLYEDDGVKKEREKCEKLLETYREAAKIIGEVV

SEQ ID NO: 19012 - DNA, 4647 bp, Muscodor strobelii
  misc_feature: SGI EST ID NO. CUFF.46326.0
  misc_feature: Variant of the nucleotide sequence at SEQ ID NO 19010
gccggctctatgaccgcagggtggatatcagcccgtccgtaaatctggaaaggtgcatgctttttctcaaggcgcggtgctgtttatcgatcgttgccgagtcgcatcagacatctcccaaccaatgtaacagcactgtctcgggcccgcaaggtaatgttttgtcgcctcaacgacgccatcagcgcatcccgctcctcacgctcctcccgctcgtcctcttgtcgctagacgtgctcgtcctcgtctgccgcgctcccacttgccaacgctctctggtctgcagctcgaggcgacgacgctaacgacgcccgtcgtcaccatgaccaccctcggcgatgacctgctgcgcgtcgtcaaccagctccaagacctggtcttcaacaccatcggcaccgactccctcgacctgccccagatcgtcgtcgtaggctcccagtcggccggcaaatcctcggtgctcgagaacatcgtcggccgcgacttcttgccgcgcggaagcggcatcgtcacccgccgcccgctcatcctgcagctcatcaacgtcgaggaggacgagtccgacgccgaccacgaccagcatgccgcctaccgcaacccgacccaggcccgccgctccgagtgggccgagttccaccacatccccagccgtcgcttcaccgactttggcgacgtcaagcgcgagatcgagaccgagacctcccgcgtcgccggcagcaacaagggcatcaaccgccagcccatcaacctcaagatctactcgccccacgtcctgaacctcaccctggtcgacctccccggcctcaccaaggtgcccatcggcgaccagccggcagacatcgagaagcagacgcgcactctgatatccgagtacatcgccaagcccaacagcatcatcctggccgtctcgcccgccaacgtcgacatcgtcaactccgaggccctcaagctggcccgccatgtcgatcccctcggccgcaggaccatcggcgtgctcaccaaggtggatctgatggaccacggcaccaacgccctcgacatcctgtcggggcgcgtctaccccctgaagctgggctttgtgggcgtcgtgaacaggtcgcagcaggacatccagggcaaccgcccgatggaggaggcgctgaaggccgagaccgagttcttccgccaccaccccgcgtatcgcaacatcgcggcacggagcgggacccagttcctcgccaagacgctcaaccacactctcatggcccacatccgcgagcgtctgccagatatcaaagcgcgcctgaacacgctcatgggtcagacccagcaagagcttgcgagctatggcgacatgcacttcagtggcaaggagcacaggggctcggatgattctgcagctcatgacgcgctttgccacgtccttcatctcctccatcgacggaacttctaccgagatctccaccaaggagctgtctggcggcgctcgcatctactacatattcaactcggtcttcggcagcgccctcgaatccatcgacccgacgtccaatctctccgcgctcgacatccggaccgccatacgcaactccaccggcccccgtcccagtctgtttgtacccgagatggcgttcgacctcctggtgaagccgcaaatcaagctgctggagatccccagccaacgctgtgtggagctcgtgtacgaagagctcatcaagatttgccacacgtgtggatcgacagagctgtcacggttccccaggctgcaaggcaaactgattgaggtggtctcggatttgctccgcgaacgactcggccctgcctcgtcctatgtcgagtccctcatctccatccaacgtgcgtatatcaacacgaaccaccccaatttcttgggcgcagccgcggccatgagcggtgttgtcaacgcaaagcaggagcgcgagaggaagaggttgatccaagatgagagggacaggcgggagaagaagcggctcaaggagttgggcggcgccaacggaaccgaaacccctgaggatgacgaggacgccgcccacgaaaggggggacctatcgcatccccgcaagcagctgcacaaaggctctcgtagcatgtcgcctgccgtccatgagaatggcgctggcagcatcgcctcaaccatcaacggggcacgctcgaactcgcctagccggttcaaccagccactcggccatgcccgagagtctttcctgacctacttcttcggaaaagatggtgccacgcctgctggggcggccgcagccccatcccctctgcctcgacatgtgagccaaggcacagaagccaccttctcgcaaagtattcgacgtggggaggacaagctaccttatcggccgagcccctcccctttcatccgcgaggaagagagtccccgaagtgctgctttcggcctcggctcgcagtttgtcgataacgttgagccggccctcacggagcgagaggccatggagacggaactcatccgtgccctcatctcatcctacttcaacatcgtacgcgagtcgatcgcggaccaagtgcccaaggccgtcatgcatctcctcgtcaaccactgcaaagatgttgtgcagaaccggctggtcagcgagctgtacaaggaaggtttgttcgaagagctactgtacgaggacgatggcgtcaagaaggaacgcgagaaatgcgagaagctcctagagacgtacagggaagcggcgaagatcatcggagaagttgtataacagaagcaggcctagacggtgccgctcacatgaaagacagtaaagacttcaaggggggaaggtcaaccaggccggcgaaatcccccgtgggctcgatgtgcgagtcacggaggcgccacgctgatttgcattgtataaatagacaggacgcagagatgtatgcgtcagagcagcaggattccactagagccatcgaatgtattgtacatgtagtccttctcccacgacaaactctcgcccagttacatttgaggattcgtgaagcgatgccgcacctactagctctccataagggtgatcaagcaggaggctcgactgccctcgatggccaaaccattgagaaatcctcacctagatgtacacgtgctactgccacgatggtatggttggagtgtcgtaatgttcttgtctatttggatctacggcgctagatgctcgtcttctcgagtttgctcgctaggtcatcgacggtcttgtccttgagctgcacggtaggctcctcttgagcctcctcggcctccttgatgagcttctcggcccgcttttccacagtctcttcttcctcttcctcttcctcctcgtcctcgtcctcttcctcttcttcgtcagagtccagctcttccagatcactcaagctatctacaccccaagcgtcctcgtctacgatatcgccggcagagttgtccttacgctcgcccagcagcttctgcagggcgacgatggcggcgtcgtcctcggcaaacttgttgccgttcagctcgatcctcttgagggcgggcaaggcgtccttggcggcggcggagaggcgcgcgaggcccggggcggtgatgtcgttgtactgcaggcgcagcacctcgagcttcctgttgtggcccttggccagggcgtcggcgagcaagacggcccccttggcgccgagcagcgagtcgccgatgccgagctcgaggatgtcggcccacagcgggacgacgcgggcgagaacgcggccggccttgatggtgaaggtgttgtcctgcagatcgaggaccctgagcccggtggcgtggttgaggccgtcgccgaggagctgggagatgccctcctggcggatgccgttctggacccatcctgatctccttgaccctgcggtggaggcggaaggtctcggcccaggccagcatgctgccgttctcgaggcggttgcggccgcagatgacggtctcgaggtcggggacgtcgtggccggcggcgcgggcgtcgagcttcttggcgtggaggcgggacagggcgttggcgatgttgatgccggcgtggggcccgaggccgttgtgttgaggtgcaggtgctggaggggcaggtggctggcgaggaagtcgacgaggggcgcctgcgtgttcaggccgaaggcgttgtcgttgaggttgacggtgcgcaggcggggcaggttcaggacggcggtgagcaggtgcgagagggcgtcggggatctcgttgagcaggcggccggtgaagatgtcggcaaagttggcgacctgcagcgtcttcttggaggcgagcacctcgcccagcagcttgcaggcctcgacgcccagcgtgttgccgagcatgcggacctcctcgacgtgctccatggcgcgcagcgggccgatgtgagcctcgaggtcgctggccgtgtcgagcttcagccccttgccctcgagcgagaagagggtcgggtgcgccgccatggtctgcagcctttggtctgtcgatctatatatgcgtgtgtctctcggtgcgatgtctgtcggtatcggtgtgtgtatggtgcagggcgtgtcgatgggccgcgggcgccgggacctgagacctcgagacgtcaagacttggagttggcagtgtttacgagtggcaggagtccggagcggtggtaaacaagaccaagcagagcaatgttg

SEQ ID NO: 19013 - DNA, 1278 bp, Muscodor strobelii
  misc_feature: SGI cDNA ID NO. 566386
  misc_feature: Encodes the peptide sequence at SEQ ID NO 19014
atggcggcgcacccgaccctcttctcgctcgagggcaaggggctgaagctcgacacggccagcgacctcgaggctcacatcggcccgctgcgcgccatggagcacgtcgaggaggtccgcatgctcggcaacacgctgggcgtcgaggcctgcaagctgctgggcgaggtgctcgcctccaagaagacgctgcaggtcgccaactttgccgacatcttcaccggccgcctgctcaacgagatccccgacgccctctcgcacctgctcaccgccgtcctgaacctgccccgcctgcgcaccgtcaacctcaacgacaacgccttcggcctgaacacgcaggcgcccctcgtcgacttcctcgccagccacctgcccctccagcacctgcacctcaacacaacggcctcgggccccacgccggcatcaacatcgccaacgccctgtcccgcctccacgccaagaagctcgacgcccgcgccgccggccacgacgtccccgacctcgagaccgtcatctgcggccgcaaccgcctcgagaacggcagcatgctggcctgggccgagaccttccgcctccaccgcagggtcaaggagatcaggatgggtccagaacggcatccgccaggagggcatctcccagctcctcggcgacggcctcaaccacgccaccgggctcagggtcctcgatctgcaggacaacaccttcaccatcaaggccggccgcgttctcgcccgcgtcgtcccgctgtgggccgacatcctcgagctcggcatcggcgactcgctgctcggcgccaagggggccgtcttgctcgccgacgccctggccaagggccacaacaggaagctcgaggtgctgcgcctgcagtacaacgacatcaccgccccgggcctcgcgcgcctctccgccgccgccaaggacgccttgcccgccctcaagaggatcgagctgaacggcaacaagtttgccgaggacgacgccgccatcgtcgccctgcagaagctgctgggcgagcgtaaggacaactctgccggcgatatcgtagacgaggacgcttggggtgtagatagcttgagtgatctggaagagctggactctgacgaagaagaggaagaggacgaggacgaggaggaagaggaagaggaagaagagactgtggaaaagcgggccgagaagctcatcaaggaggccgaggaggctcaagaggagcctaccgtgcagctcaaggacaagaccgtcgatgacctagcgagcaaactcgagaagacgagcatctag

SEQ ID NO: 19014 - protein, 425 aa, Muscodor strobelii
  misc_feature: SGI Peptide ID NO. 566386
  misc_feature (1)..(425): NCBI GI: 85117705 Blast Desc: NCU03207 [Neurospora crassa OR74A] gi|28927114|gb|EAA36071.1| NCU03207 [Neurospora crassa OR74A]
  misc_feature (1)..(425): NCBI GI: 171687241 Blast Desc: protein product [Podospora anserina] gi|170943582|emb|CAP69234.1| protein product [Podospora anserina]
  misc_feature (1)..(425): NCBI GI: 256735223 Blast Desc: [Nectria haematococca mpVI 77-13-4]
  misc_feature (1)..(425): NCBI GI: 46107358 Blast Desc: FG00562.1 [Gibberella zeae PH-1]
  misc_feature (1)..(425): NCBI GI: 116181556 Blast Desc: CHGG_01406 [Chaetomium globosum CBS 148.51] gi|88185703|gb|EAQ93171.1| CHGG_01406 [Chaetomium globosum CBS 148.51]
  misc_feature (1)..(423): NCBI GI: 156063206 Blast Desc: SS1G_01719 [Sclerotinia sclerotiorum 1980] gi|154697055|gb|EDN96793.1| SS1G_01719 [Sclerotinia sclerotiorum 1980]
  misc_feature (1)..(423): NCBI GI: 154294408 Blast Desc: BC1G_13724 [Botryotinia fuckeliana B05.10] gi|150844733|gb|EDN19926.1| BC1G_13724 [Botryotinia fuckeliana B05.10]
  misc_feature (7)..(425): NCBI GI: 169623989 Blast Desc: SNOG_15244 [Phaeosphaeria nodorum SN15] gi|111056349|gb|EAT77469.1| SNOG_15244 [Phaeosphaeria nodorum SN15]
  misc_feature (7)..(425): NCBI GI: 39950787 Blast Desc: MGG_01248 [Magnaporthe grisea 70-15] gi|145020944|gb|EDK05073.1| MGG_01248 [Magnaporthe grisea 70-15]
  misc_feature (3)..(425): NCBI GI: 67537384 Blast Desc: AN4862.2 [Aspergillus nidulans FGSC A4] gi|40741750|gb|EAA60940.1| AN4862.2 [Aspergillus nidulans FGSC A4] gi|259482275|tpe|CBF76601.1| TPA: Ran specific GTPase protein
MAAHPTLFSLEGKGLKLDTASDLEAHIGPLRAMEHVEEVRMLGNTLGVEACKLLGEVLASKKTLQVANFADIFTGRLLNEIPDALSHLLTAVLNLPRLRTVNLNDNAFGLNTQAPLVDFLASHLPLQHLHLNTTASGPTPASTSPTPCPASTPRSSTPAPPATTSPTSRPSSAAATASRTAACWPGPRPSASTAGSRRSGWVQNGIRQEGISQLLGDGLNHATGLRVLDLQDNTFTIKAGRVLARVVPLWADILELGIGDSLLGAKGAVLLADALAKGHNRKLEVLRLQYNDITAPGLARLSAAAKDALPALKRIELNGNKFAEDDAAIVALQKLLGERKDNSAGDIVDEDAWGVDSLSDLEELDSDEEEEEDEDEEEEEEEEETVEKRAEKLIKEAEEAQEEPTVQLKDKTVDDLASKLEKTSI

SEQ ID NO: 19015 - DNA, 12287 bp, Muscodor strobelii
  misc_feature: SGI EST ID NO. CUFF.46327.1
  misc_feature: Variant of the nucleotide sequence at SEQ ID NO 19013
cgcgtctgggacatgcgcacccgcagcaacgtccacgtcctcgccggccaccgcggcaccgtcaccgacctcaagtgccaggacgccgacccccaggtcatcaccgcctccctcgacgccaccgtccgcatgtgggacctcgccgccggcaagaccatgggtgtcctcacccaccacaagaagggcgtccgcgccctcgccctgcaccccaccgagttcaccttcgccaccgccagcaccgccagcatcaagcagtggaagtgccccgagggcgccttcatgggcaacttcgacggccacaacgccatcatcaactccctcgccgccaacgacgacgtgctcttctccggcggcgacaacggctccatgagcttctgggactggaagtccggccaccgcttccaagccctcgactccatcgcccagccggggtcgctggatgccgaggccggcatcatgagctcgaccttcgaccgcaccggtctgcggctcatcgtcggcgaggcagacaagaccatcaagatctggaagcccgacgatcaggccacacccgagacgcacccgctcgagtggaagccgacactgggccggcagaaacactaacttcgcccgcttcttttgtctcccatcgtccaaaagctagtatggatagacttgggtataatcatgactaaaacagaaaaaggggggaggggggacgaatcggcattttcggcgggaagaaacggcattcacgtcttgattgtacaccatgttagtatagaatatcactggatgcattagggacgaggctatctcagagagtacaataatatttatgatacccacaagaacatggatcatcctctagaatgctatgcccagtgccttgatctcgggatcgtcgcgcagtgcgagcttcacctcttcgtcgcccaccgccaatcgcatcttgctgggtctctcagggcgctgcccttccaagatgatgactccggctcccgccaaggctaccgcggcggcatgcactccggcggtccggctcggatgggatgcctgactgcgtgtctcggcctgtcgacccgcgtccctctggctcacacgcaccagcacgtcggcccgccggctccccgcgtccagaacaagggcccgtctcgtctcttccagcacgtcgccgtacgtcgtgtcgggcagccccgacctctcgctgcgcagcaagagcgctgctagcatggctttgtaggcgaagggaagcccacgaaggtactgctgcaagggactggtggtggcttcgctgatggccctcttgacggtgccgatggtgacgacgccgcgagagctcttgagcttgtccgcgtccgccctgggtctcttgctgggggtggtcggatcaccgccgagcgtcttggtgtcagcttccgccagctcgacagcgcgccggcatatgtcgagggcccgccgcgcgtcgccactcacggcggccaccttgcggctagcgaattgcacggcgtcgggctctacgatctggcccggcacgccttcgagccgggactggatgatcttcatcagctgctcgtggttgtagccggggaacgtgatgcgggtgagaccgagccggctgctgatcttgttgctcagcgttcgctcgggcagatccatcgtgttggccaccgcgagcacgatcagccgcgagtggcgcaagccgggccaattgaaaaagttgtacatgacactctgatttttggtgaccagctggtcaagctcatccatcaagacgacacagggcacacgtcgggggctgggatggttgaactcgcgctccaacaggtccaatgcctggcccggactgacccgctggccacggagggcctcccacaagaggcaataggactggtggggatctgtgattttcataccgttgatctcgacgaagaggaaatcatccaactcgtctgcgtggactgcctcgtctaggcgggagatgacctcgcggacggtcgccgtcttgcccgtgcccggtgtacccgagatgtagatgcaggcgcccgagccgttggtgatggccgcttcgaggtgcgagtacacgacggcaaactcagactctcggcacggcaaggtcgtggggacagatgcgacgtgcagctgagccctggcgatctggaacggcgatgcctgattgtggctaggggacagcatgcgcgtcgccagcggggtaaattcgagcgccttcttgacgacgatcttactgcgggccggttagctctgtgccaaggacaggaacaagatagcaaagagtgggaaatggcgaagggcagaagagcatactttcggctcgagggtgtcgcgactcgcgtcgtcttttgccctctgctgggggtcctggtctttgatggggtctccggttctgaagataggtagtcgtcgtcttgttggtcgtgatgttcctcaccaccgtcgtcgtccgcatctcggcgccgctttcttggagtcgagcgggccgggcgtctaccgggcgtgtcgttggatttgggttgtcttcggggtggactgggtcccccgctggacaagacgcagcaggttagcgatgtcgtccggggcaccagagaactcatcctcccaggtgaactcgggggtgtatgtggtggtcctggcattgcagcctcggcgacagacgaaggtcttgttgtgtgcggacgaggatcgcgggactctggcggcgggaaactcgcgcaggaaggccgagtgggacatgacgcgggccttgccgtcgatggacgagagagagttgatgtcggtcgaggcagtgatgtacagctcattctgggcgcaggtgagacgcaaggagcagatattgggaaggggaaggggcggcacgtaccggcaggaagtcgtggcgtttgcgggggccgttgcgaatctcggcgtcggaggagaaccacaggaagtcggcggccatgtcgccgtcgtcgtcagcctcgacaaaggcggcgatgatggccacccaggggtggctggaggcctcggccctcagcaggacgcagtcgccgacgcgacactcgaagcggccgtggcgggcgccgacgatgtgtcgggtcgtgtcacgtcgtgcgcggccggactgggtggcggcatcggtgttgtatatccactcccactcccgctcgtgttcgtggtcccgatcccgatcccgatcccgggggcggtcgagcacgggatggtcgcgcgcgctggactggcggggcatctcgacagcagcagggctagcagagatggcagacgacgcagacgcagacaacgcggacgagagctgccaagacaagatcacagacaacgcgccagggcccgctgcacatgcgcagccatctgagtcttattgacgctgcgtatagacgcgagactttctctcggcagtgaggagctccagactttcgctgtgctctctgaggtgagccggggacggggtggattgtaggtagtgtcgatgcggatggtcgatacgcgcgaccggtgcaggggcgacacggcattctgcagggtgcaacgtttccgtgtccggccaagccactccgcgcctgccccggacaacgcgagatcatgtgactgccgccgccttcaccacacctggtctgtatctcatctttaacttgccttatgatgtatattatgtgctcatactacctagctcttctatgtatgttatatacctgtcgtgattgactttatgtatttatgtgccgctcccgtgcacttgcagtactagccttgtaagaccatgcatcacccacatgcctacctgcagaattggggccaggcacgcctggtatcgtcgttgagataaggacataatgtgcacctcaatggatctcatggcttttcaaaacaagtagagtcggccatcttcccgataacaaaaccggatgccgaattttgattgcactagtcgatatgtatgggatgtgctgctcgagagtgcaaactgcggatgtcgcccctagacgcatcgtcccttcttccgtgggatctccagtatgcgccatacgaaactgctgtttccgttgaagccacaggcagctgttgcgttgcttgccttctgaactagcaagacctaccgatgatggcccttgactgtgactggttcgcgacactcatcctgaaccctgtccgtacaatcgtctgcgtctaacctcttttcttggctttgttgtctctcccagagtcaagtcgcgtggttgccatgcaactgcgtagccgtgttcttgcaccccataccatcccctcggccggccttcctctcctctaacaaatcattgacaccttggacaattggcaacctggctactcgcaactaagagcctgctctggtgcatcatataaggtaccgtatccgactctggagtcacccgtttcttccatatgctcttctctcttcccaagtcacattcgtttacattattctggaagtagcacaatggagactgccaagccacagtcccctttccaccagcacggcagccagcaatctgctgaccagcggaccgaaggtgctggtgaggtcatccttcctgcatggtcgctggggtgcatgtcaaactctcagccgtctctgaatagccaggcaaagggcacgaagggtgcggtattttctaccggccaggtgactagagccacaaccgtagctgcgaccaaggtcgcaaaaataccagcggccgaccatgctcgcttcgttgtaggtcaagcctgctccattgccgccaaccattctcaacccgctttcactcacactgtcaaaggcctcctttatccttgcccagcattgcgacgaggtcgaggcgattgtccgtgagatgcatcacgaactgcaaaaagacgacaagaccggcagtaagatcgaagtggtgaccgtggagcgcgctgtcccctacatacgtgtgtccgcgagcaccgaagcggctgtactggagaccattcagtccgcgcagaggctggctgtcttttacctggccgccggtcccgagacgaggtctaagaccgtattcctcgagcccgcgtgcagcgacgtgaccgttccattccgggtggtagtggcagtggacgccactacccacgtcccacgacaccgtgtggagcgtaggccggacatgaagcctgccgtactcctcgagcagcgctctagcgactacgtagctcagatcaccaaggccttggatatgactctcgagaggaaccgtagtatctcggctgtcgcggtgcgaatccaccttggatactatgtgccgttcagactgggccattttactatgagcagcttcgaagaaatggtgataaaccctcggtcgaggggaaagttcatctatcgtctaggcaatagcatcacggtccaacgagcgatgcaagcgatgcatgctgccgagagcccgctattccctttggatagccgagtacaagcaccccgatccgtaactccaacttacagtgtcgagctttgtgtatcaggacgccgggttaaagccactttgacaactacatcaactcctgcgacgtatgggatgacgcatctggaggtttggggcacgcgcgatgaagaaatgcccgccctggagtttaccagcatcagcatcggaaagtaagtagcatgccacgaatttcaagtcacagatgtcatgggtctgttataattccgtccccttgttttcctcgattctcctctcgcttcatctaacgtcgacaacagagctacagactggaagattgaggccaagggccagcgcaatggtgtccctccgtccatgcccatcgaacaatacttcaagacagccacggcatcggtacaggggcgagtcgaggatttcggcacatatccccgcgttcgtatgggactggatccaccgacaggcaagctggacgcactctgggtcaacgccatgtacgagtacatgtggaaaggcaccggatatgtggtcgaattcaccatccatcgggggtggcgcgacgtcaaagacatggtgaagcaggggacgccgcgcaccgagtttggggtggtggtgtacgaggaagcttgggaccaagccggtctagatgcaggagagggcacaggaggcgagggttcggaaagcgacgcggctcgtggtggagcacgcaagaagcgggcggaggactgcctcgagacggttagagagattcgcgacttctttgacggtatgggcgcctcaatttgaacgtcggcgactgacggatagagggcgcgcattacacggggctgtgcagatcctaagcggccgtggaggaggagacggcagccatggcgacgggagcgagactcggggtgggactcatgatgtggaagttgcagtgtctggctctggtgcagaggccatcttctgtcgtaggactgtgtgcagcatgtcagcagactaggcgagcggggcagggtgatagggaacaatgcgagagtgtaccttgctcgatgacacggacgttgttcgtcttggcctggacaatggcctcgaggtccttgatgtttgcgccgacctcttgcatcttgtggtcgtagaactcggcggctgactggagattctgggcgggggtcagcaggagggctcaaggcgtagagcgggaggtagggtaagttgcgaccttctcgacgtaaaagccggtgccgacgtctacgaggacatgatcggcgtcggtcagggagccgcggacgtagagcgagttggtcaacggcacgaggatcgggttgttctctgcaggagagcgtggtgtcagcggggcccatgtagaggagggcagcgagttgacgcaccggggagggcgagggaggtggcggggcccttggccgggctgacgcagcgcagacagtcgcggaacttggactgggcggcctggagctgggtgaaggacgaggtgagatgctcaagctcctggtcgagctgcttcttgacctgggcgagctgctgggggttgagggtgtcgaggttcactgcagacgtgttagccaggcaaaagacgggatgcacgcgatgcacgcggcccacagacctgcctcgccgccactgcctgccgacatgttgggcgctgcggaacaacgagcttgggtaggtgtcttgcgcgggatgcttattacaaagtagagtctggagagtgtcggtagtccggatatcctccttttgcttgtagatgggtgctggtgcgagtgccgggtgtgtgggttcgtacctaaggagcgggggccctgacatcccacatcggcccagctgcagcaggcagggtgtcacaggggggattgataggcattcaatcaatggaactcactctttactaccttaccctacatatacatgtacctaggtaccttacctacccctccccccactaaggccagagagcatggggcataggtaggtcggtcgcgacacagcctaccaggcagcgtcaacgacggcaacccctccaacattgctctgcttggtcttgtttaccaccgctccggactcctgccactcgtaaacactgccaactccaagtcttgacgtctcgaggtctcaggtcccggcgcccgcggcccatcgacacgccctgcaccatacacacaccgataccgacagacatcgcaccgagagacacacgcatatatagatcgacagaccaaaggctgcagaccatggcggcgcacccgaccctcttctcgctcgagggcaaggggctgaagctcgacacggccagcgacctcgaggctcacatcggcccgctgcgcgccatggagcacgtcgaggaggtccgcatgctcggcaacacgctgggcgtcgaggcctgcaagctgctgggcgaggtgctcgcctccaagaagacgctgcaggtcgccaactttgccgacatcttcaccggccgcctgctcaacgagatccccgacgccctctcgcacctgctcaccgccgtcctgaacctgccccgcctgcgcaccgtcaacctcaacgacaacgccttcggcctgaacacgcaggcgcccctcgtcgacttcctcgccagccacctgcccctccagcacctgcacctcaacacaacggcctcgggccccacgccggcatcaacatcgccaacgccctgtcccgcctccacgccaagaagctcgacgcccgcgccgccggccacgacgtccccgacctcgagaccgtcatctgcggccgcaaccgcctcgagaacggcagcatgctggcctgggccgagaccttccgcctccaccgcagggtcaaggagatcaggatgggtccagaacggcatccgccaggagggcatctcccagctcctcggcgacggcctcaaccacgccaccgggctcagggtcctcgatctgcaggacaacaccttcaccatcaaggccggccgcgttctcgcccgcgtcgtcccgctgtgggccgacatcctcgagctcggcatcggcgactcgctgctcggcgccaagggggccgtcttgctcgccgacgccctggccaagggccacaacaggaagctcgaggtgctgcgcctgcagtacaacgacatcaccgccccgggcctcgcgcgcctctccgccgccgccaaggacgccttgcccgccctcaagaggatcgagctgaacggcaacaagtttgccgaggacgacgccgccatcgtcgccctgcagaagctgctgggcgagcgtaaggacaactctgccggcgatatcgtagacgaggacgcttggggtgtagatagcttgagtgatctggaagagctggactctgacgaagaagaggaagaggacgaggacgaggaggaagaggaagaggaagaagagactgtggaaaagcgggccgagaagctcatcaaggaggccgaggaggctcaagaggagcctaccgtgcagctcaaggacaagaccgtcgatgacctagcgagcaaactcgagaagacgagcatctagcgccgtagatccaaatagacaagaacattacgacactccaaccataccatcgtggcagtagcacgtgtacatctaggtgaggatttctcaatggtttggccatcgagggcagtcgagcctcctgcttgatcacccttatggagagctagtaggtgcggcatcgcttcacgaatcctcaaatgtaactgggcgagagtttgtcgtgggagaaggactacatgtacaatacattcgatggctctagtggaatcctgctgctctgacgcatacatctctgcgtcctgtctatttatacaatgcaaatcagcgtggcgcctccgtgactcgcacatcgagcccacgggggatttcgccggcctggttgaccttccccccttgaagtctttactgtctttcatgtgagcggcaccgtctaggcctgcttctgttatacaacttctccgatgatcttcgccgcttccctgtacgtctctaggagcttctcgcatttctcgcgttccttcttgacgccatcgtcctcgtacagtagctcttcgaacaaaccttccttgtacagctcgctgaccagccggttctgcacaacatctttgcagtggttgacgaggagatgcatgacggccttgggcacttggtccgcgatcgactcgcgtacgatgttgaagtaggatgagatgagggcacggatgagttccgtctccatggcctctcgctccgtgagggccggctcaacgttatcgacctgaacggtaggttaggaccacggcaccgagtcattaggaacagacgacttacaaactgcgagccgaggccgaaagcagcacttcggggactctcttcctcgcggatgaaaggggaggggctcggccgataaggtagcttgtcctccccacgtcgaatactttgcgagaaggtggcttctgtgccttggctcacatgtcgaggcagaggggatggggctgcggccgccccagcaggcgtggcaccatcttttccgaagaagtaggtcaggaaagactctcgggcatggccgagtggctggttgaaccggctaggcgagttcgagcgtgccccgttgatggttgaggcgatgctgccagcgccattctcatggacggcaggcgacatgctacgagagcctttgtgcagctgcttgcggggatgcgataggtcccccctttcgtgggcggcgtcctcgtcatcctcaggggtttcggttccgttggcgccgcccaactccttgagccgcttcttctcccgcctgtccctctcatcttggatcaacctcttcctctcgcgctcctgctttgcgttgacaacaccgctcatggccgcggctgcgcccaagaaattggggtggttcgtgttgatatacgcacgttggatggagatgagggactcgacataggacgaggcagggccgagtcgttcgcggagcaaatccgagaccacctcaatcagtttgccttgcagcctggggaaccgtgacagctctgtcgatccacacgtgtggcaaatcttgatgagctcttcgtacacgagctccacacagcgttggctggggatctccagcagcttgatttgcggcttcaccaggaggtcgaacgccatctcgggtacaaacagactgggacgggggccggtggagttgcgtatggcggtccggatgtcgagcgcggagagattggacgtcgggtcgatggattcgagggcgctgccgaagaccgagttgaatatgtagtagatgcgagcgccgccagacagctccttggtggagatctcggtagaagttccgtcgatggaggagatgaaggacgtggcaaagcgcgtcatgagctgcagaatcatccgagcccctgtgctccttgccactgaagtgcatgtcgccatagctcgcaagctcttgctgggtctgacccatgagcgtgttcaggcgcgctttgatatctggcagacgctcgcggatgtgggccatgagagtgtggttgagcgtcttggcgaggaactgggtcccgctccgtgccgcgatgttgcgatacgcggggtggtggcggaagaactcggtctcggccttcagcgcctcctccatcgggcggttgccctggatgtcctgctgcgacctgttcacgacgcccacaaagcccagcttcagggggtagacgcgccccgacaggatgtcgagggcgttggtgccgtggtccatcagatccaccttggtgagcacgccgatggtcctgcggccgaggggatcgacatggcgggccagcttgagggcctcggagttgacgatgtcgacgttggcgggcgagacggccaggatgatgctgttgggcttggcgatgtactcggatatcagagtgcgcgtctgcttctcgatgtctgccggctggtcgccgatgggcacctggggcacaggcaggtcagcggcggcagggaggggagaagggcaggagcagggcagggcagagcagggcagggcggaggcataccttggtgaggccggggaggtcgaccagggtgaggttcaggacgtggggcgagtagatcttgaggttgatgggctggcggttgatgcccttgttgctgccggcgacgcgggaggtctcggtctcgatctcgcgcttgacgtcgccaaagtcggtgaagcgacggctggggatgtggtggaactcggcccactcggagcggcgggcctgggtcgggttgcggtaggcggcatgctggtcgtggtcggcgtcggactcgtcctcctcgacgttgatgagctgcaggatgagcgggcggcgggtgacgatgccgcttccgcgcggcaagaagtcgcggccgacgatgttctcgagcaccgaggatttgccggccgactgggagcctacgacgacctagaggggcgccagggtgagcaagggcagcgcagcgcgtggagggtggagggaggagggtggagggacgcacgatctggggcaggtcgagggagtcggtgccgatggtgttgaagaccaggtcttggagctggttgacgacgcgcagcaggtcatcgccgagggtggtcatggtgacgacgggcgtcgttagcgtcgtcgcctcgagctgcagaccagagagcgttggcaagtgggagcgcggcagacgaggacgagcacgtctagcgacaagaggacgagcgggaggagcgtgaggagcgggatgcgctgatggcgtcgttgaggcgacaaaacattaccttgcgggcccgagacagtgctgttacattggttgggagatgtctgatgcgactcggcaacgatcgataaacagcaccgcgccttgagaaaaagcatgcacctttccagatttacggacgggctgatatccaccctgcggtcatagagccggc

SEQ ID NO: 19016 - DNA, 492 bp, Muscodor strobelii
  misc_feature: SGI cDNA ID NO. 566387
  misc_feature: Encodes the peptide sequence at SEQ ID NO 19017
atgtcggcaggcagtggcggcgaggcagtgaacctcgacaccctcaacccccagcagctcgcccaggtcaagaagcagctcgaccaggagcttgagcatctcacctcgtccttcacccagctccaggccgcccagtccaagttccgcgactgtctgcgctgcgtcagcccggccaagggccccgccacctccctcgccctccccgagaacaacccgatcctcgtgccgttgaccaactcgctctacgtccgcggctccctgaccgacgccgatcatgtcctcgtagacgtcggcaccggcttttacgtcgagaagaatctccagtcagccgccgagttctacgaccacaagatgcaagaggtcggcgcaaacatcaaggacctcgaggccattgtccaggccaagacgaacaacgtccgtgtcatcgagcaagtcctacgacagaagatggcctctgcaccagagccagacactgcaacttccacatcatga

SEQ ID NO: 19017 - protein, 163 aa, Muscodor strobelii
  misc_feature: SGI Peptide ID NO. 566387
  misc_feature (27)..(152): Pfam Id: PF02996 Pfam Desc: Prefoldin subunit
  misc_feature (8)..(150): NCBI GI: 256735018 Blast Desc: NECHADRAFT_74439 [Nectria haematococca mpVI 77-13-4]
  misc_feature (10)..(156): NCBI GI: 39976881 Blast Desc: MGG_06343 [Magnaporthe grisea 70-15] gi|145016257|gb|EDK00747.1| MGG_06343 [Magnaporthe grisea 70-15]
  misc_feature (7)..(163): NCBI GI: 116192363 Blast Desc: CHGG_05899 [Chaetomium globosum CBS 148.51] gi|88181812|gb|EAQ89280.1| CHGG_05899 [Chaetomium globosum CBS 148.51]
  misc_feature (8)..(159): NCBI GI: 85117969 Blast Desc: NCU02963 [Neurospora crassa OR74A] gi|28927158|gb|EAA36114.1| conserved [Neurospora crassa OR74A] gi|38566955|emb|CAE76257.1| prefoldin subunit 5 [Neurospora
  misc_feature (6)..(150): NCBI GI: 171684731 Blast Desc: protein product [Podospora anserina] gi|170942326|emb|CAP67978.1| protein product [Podospora anserina]
  misc_feature (7)..(163): NCBI GI: 154290623 Blast Desc: [Botryotinia fuckeliana B05.10] gi|150847506|gb|EDN22699.1| [Botryotinia fuckeliana B05.10]
  misc_feature (23)..(163): NCBI GI: 156053487 Blast Desc: SS1G_06911 [Sclerotinia sclerotiorum 1980] gi|154704689|gb|EDO04428.1| SS1G_06911 [Sclerotinia sclerotiorum 1980]
  misc_feature (10)..(150): NCBI GI: 238839112 Blast Desc: Byr1-binding protein Bob1 [Microsporum canis CBS 113480]
  misc_feature (10)..(155): NCBI GI: 189188876 Blast Desc: c-myc binding protein [Pyrenophora tritici-repentis Pt-1C-BFP] gi|187972383|gb|EDU39882.1| c-myc binding protein [Pyrenophora tritici-repentis Pt-1C-BFP]
  misc_feature (9)..(152): NCBI GI: 225560002 Blast Desc: conserved [Ajellomyces capsulatus G186AR] gi|240276127|gb|EER39639.1| prefoldin subunit 5 [Ajellomyces capsulatus H143]
MSAGSGGEAVNLDTLNPQQLAQVKKQLDQELEHLTSSFTQLQAAQSKFRDCLRCVSPAKGPATSLALPENNPILVPLTNSLYVRGSLTDADHVLVDVGTGFYVEKNLQSAAEFYDHKMQEVGANIKDLEAIVQAKTNNVRVIEQVLRQKMASAPEPDTATSTS

SEQ ID NO: 19018 - DNA, 7102 bp, Muscodor strobelii
  misc_feature: SGI EST ID NO. CUFF.46326.3
  misc_feature: Variant of the nucleotide sequence at SEQ ID NO 19016
ggggggaggggtaggtaaggtacctaggtacatgtatatgtagggtaaggtagtaaagagtgagttccattgattgaatgcctatcaatcccccctgtgacaccctgcctgctgcagctgggccgatgtgggatgtcagggcccccgctccttaggtacgaacccacacacccggcactcgcaccagcacccatctacaagcaaaaggaggatatccggactaccgacactctccagactctactttgtaataagcatcccgcgcaagacacctacccaagctcgttgttccgcagcgcccaacatgtcggcaggcagtggcggcgaggcagtgaacctcgacaccctcaacccccagcagctcgcccaggtcaagaagcagctcgaccaggagcttgagcatctcacctcgtccttcacccagctccaggccgcccagtccaagttccgcgactgtctgcgctgcgtcagcccggccaagggccccgccacctccctcgccctccccgagaacaacccgatcctcgtgccgttgaccaactcgctctacgtccgcggctccctgaccgacgccgatcatgtcctcgtagacgtcggcaccggcttttacgtcgagaagaatctccagtcagccgccgagttctacgaccacaagatgcaagaggtcggcgcaaacatcaaggacctcgaggccattgtccaggccaagacgaacaacgtccgtgtcatcgagcaagtcctacgacagaagatggcctctgcaccagagccagacactgcaacttccacatcatgagtcccaccccgagtctcgctcccgtcgccatggctgccgtctcctcctccacggccgcttaggatctgcacagccccgtgtaatgcgcgccctctatccgtcagtcgccgacgttcaaattgaggcgcccataccgtcaaagaagtcgcgaatctctctaaccgtctcgaggcagtcctccgcccgcttcttgcgtgctccaccacgagccgcgtcgctttccgaaccctcgcctcctgtgccctctcctgcatctagaccggcttggtcccaagcttcctcgtacaccaccaccccaaactcggtgcgcggcgtcccctgcttcaccatgtctttgacgtcgcgccacccccgatggatggtgaattcgaccacatatccggtgcctttccacatgtactcgtacatggcgttgacccagagtgcgtccagcttgcctgtcggtggatccagtcccatacgaacgcggggatatgtgccgaaatcctcgactcgcccctgtaccgatgccgtggctgtcttgaagtattgttcgatgggcatggacggagggacaccattgcgctggcccttggcctcaatcttccagtctgtagctctgttgtcgacgttagatgaagcgagaggagaatcgaggaaaacaaggggacggaattataacagacccatgacatctgtgacttgaaattcgtggcatgctacttactttccgatgctgatgctggtaaactccagggcgggcatttcttcatcgcgcgtgccccaaacctccagatgcgtcatcccatacgtcgcaggagttgatgtagttgtcaaagtggctttaacccggcgtcctgatacacaaagctcgacactgtaagttggagttacggatcggggtgcttgtactcggctatccaaagggaatagcgggctctcggcagcatgcatcgcttgcatcgctcgttggaccgtgatgctattgcctagactaagcacctttggtcagatctcccgcgtgctatgccgtgagctctcgaggcacctaccgatagatgaactttcccctcgaccgagggtttatcaccatttcttcgaagctgctcatagtaaaatggcccagtctgaacggcacatagtatccaaggtggattcgcaccgcgacagccgagatactacggttcctctcgagagtcatatccaaggccttggtgatctgagctacgtagtcgctagagcgctgctcgaggagtacggcaggcttcatgtccggcctacgctccacacggtgtcgtgggacgtgggtagtggcgtccactgccactaccacccggaatggaacggtcacgtcgctgcacgcgggctcgaggaatacggtcttagacctcgtctcgggaccggcggccaggtaaaagacagccagcctctgcgcggactgaatggtctccagtacagccgcttcggtgctcgcggacacacgtatgtaggggacagcgcgctccacggtcaccacttcgatcttactgccggtcttgtcgtctttttgcagttcgtgatgcatctcacggacaatcgcctcgacctcgtcgcaatgctgggcaaggataaaggaggcctttgacagtgtgagtgaaagcgggttgagaatggttggcggcaatggagcaggcttgacctacaacgaagcgagcatggtcggccgctggtatttttgcgaccttggtcgcagctacggttgtggctctagtcacctggccggtagaaaataccgcacccttcgtgccctttgcctggctattcagagacggctgagagtttgacatgcaccccagcgaccatgcaggaaggatgacctcaccagcaccttcggtccgctggtcagcagattgctggctgccgtgctggtggaaaggggactgtggcttggcagtctccattgtgctacttccagaataatgtaaacgaatgtgacttgggaagagagaagagcatatggaagaaacgggtgactccagagtcggatacggtaccttatatgatgcaccagagcaggctcttagttgcgagtagccaggttgccaattgtccaaggtgtcaatgatttgttagaggagaggaaggccggccgaggggatggtatggggtgcaagaacacggctacgcagttgcatggcaaccacgcgacttgactctgggagagacaacaaagccaagaaaagaggttagacgcagacgattgtacggacagggttcaggatgagtgtcgcgaaccagtcacagtcaagggccatcatcggtaggtcttgctagttcagaaggcaagcaacgcaacagctgcctgtggcttcaacggaaacagcagtttcgtatggcgcatactggagatcccacggaagaagggacgatgcgtctaggggcgacatccgcagtttgcactctcgagcagcacatcccatacatatcgactagtgcaatcaaaattcggcatccggttttgttatcgggaagatggccgactctacttgttttgaaaagccatgagatccattgaggtgcacattatgtccttatctcaacgacgataccaggcgtgcctggccccaattctgcaggtaggcatgtgggtgatgcatggtcttacaaggctagtactgcaagtgcacgggagcggcacataaatacataaagtcaatcacgacaggtatataacatacatagaagagctaggtagtatgagcacataatatacatcataaggcaagttaaagatgagatacagaccaggtgtggtgaaggcggcggcagtcacatgatctcgcgttgtccggggcaggcgcggagtggcttggccggacacggaaacgttgcaccctgcagaatgccgtgtcgcccctgcaccggtcgcgcgtatcgaccatccgcatcgacactacctacaatccaccccgtccccggctcacctcagagagcacagcgaaagtctggagctcctcactgccgagagaaagtctcgcgtctatacgcagcgtcaataagactcagatggctgcgcatgtgcagcgggccctggcgcgttgtctgtgatcttgtcttggcagctctcgtccgcgttgtctgcgtctgcgtcgtctgccatctctgctagccctgctgctgtcgagatgccccgccagtccagcgcgcgcgaccatcccgtgctcgaccgcccccgggatcgggatcgggatcgggaccacgaacacgagcgggagtgggagtggatatacaacaccgatgccgccacccagtccggccgcgcacgacgtgacacgacccgacacatcgtcggcgcccgccacggccgcttcgagtgtcgcgtcggcgactgcgtcctgctgagggccgaggcctccagccacccctgggtggccatcatcgccgcctttgtcgaggctgacgacgacggcgacatggccgccgacttcctgtggttctcctccgacgccgagattcgcaacggcccccgcaaacgccacgacttcctgccgaatgagctgtacatcactgcctcgaccgacatcaactctctctcgtccatcgacggcaaggcccgcgtcatgtcccactcggccttcctgcgcgagtttcccgccgccagagtcccgcgatcctcgtccgcacacaacaagaccttcgtctgtcgccgaggctgcaatgccaggaccaccacatacacccccgagttcacctgggaggatgagttctctggtgccccggacgacatcgctaacctgctgcgtcttgtccagcgggggacccagtccaccccgaagacaacccaaatccaacgacacgcccggtagacgcccggcccgctcgactccaagaaagcggcgccgagatgcggacgacgacggtggtgaggaacatcacgaccaacaagacgacgactacctatcttcagaaccggagaccccatcaaagaccaggacccccagcagagggcaaaagacgacgcgagtcgcgacaccctcgagccgaaagtatgctcttctgcccttcgccatttcccactctttgctatcttgttcctgtccttggcacagagctaaccggcccgcagtaagatcgtcgtcaagaaggcgctcgaatttaccccgctggcgacgcgcatgctgtcccctagccacaatcaggcatcgccgttccagatcgccagggctcagctgcacgtcgcatctgtccccacgaccttgccgtgccgagagtctgagtttgccgtcgtgtactcgcacctcgaagcggccatcaccaacggctcgggcgcctgcatctacatctcgggtacaccgggcacgggcaagacggcgaccgtccgcgaggtcatctcccgcctagacgaggcagtccacgcagacgagttggatgatttcctcttcgtcgagatcaacggtatgaaaatcacagatccccaccagtcctattgcctcttgtgggaggccctccgtggccagcgggtcagtccgggccaggcattggacctgttggagcgcgagttcaaccatcccagcccccgacgtgtgccctgtgtcgtcttgatggatgagcttgaccagctggtcaccaaaaatcagagtgtcatgtacaactttttcaattggcccggcttgcgccactcgcggctgatcgtgctcgcggtggccaacacgatggatctgcccgagcgaacgctgagcaacaagatcagcagccggctcggtctcacccgcatcacgttccccggctacaaccacgagcagctgatgaagatcatccagtcccggctcgaaggcgtgccgggccagatcgtagagcccgacgccgtgcaattcgctagccgcaaggtggccgccgtgagtggcgacgcgcggcgggccctcgacatatgccggcgcgctgtcgagctggcggaagctgacaccaagacgctcggcggtgatccgaccacccccagcaagagacccagggcggacgcggacaagctcaagagctctcgcggcgtcgtcaccatcggcaccgtcaagagggccatcagcgaagccaccaccagtcccttgcagcagtaccttcgtgggcttcccttcgcctacaaagccatgctagcagcgctcttgctgcgcagcgagaggtcggggctgcccgacacgacgtacggcgacgtgctggaagagacgagacgggcccttgttctggacgcggggagccggcgggccgacgtgctggtgcgtgtgagccagagggacgcgggtcgacaggccgagacacgcagtcaggcatcccatccgagccggaccgccggagtgcatgccgccgcggtagccttggcgggagccggagtcatcatcttggaagggcagcgccctgagagacccagcaagatgcgattggcggtgggcgacgaagaggtgaagctcgcactgcgcgacgatcccgagatcaaggcactgggcatagcattctagaggatgatccatgttcttgtgggtatcataaatattattgtactctctgagatagcctcgtccctaatgcatccagtgatattctatactaacatggtgtacaatcaagacgtgaatgccgtttcttcccgccgaaaatgccgattcgtcccccctcccccctttttctgttttagtcatgattatacccaagtctatccatactagcttttggacgatgggagacaaaagaagcgggcgaagttagtgtttctgccggcccagtgtcggcttccactcgagcgggtgcgtctcgggtgtggcctgatcgtcgggcttccagatcttgatggtcttgtctgcctcgccgacgatgagccgcagaccggtgcggtcgaaggtcgagctcatgatgccggcctcggcatccagcgaccccggctgggcgatggagtcgagggcttggaagcggtggccggacttccagtcccagaagctcatggagccgttgtcgccgccggagaagagcacgtcgtcgttggcggcgagggagttgatgatggcgttgtggccgtcgaagttgcccatgaaggcgccctcggggcacttccactgcttgatgctggcggtgctggcggtggcgaaggtgaactcggtggggtgcagggcgagggcgcggacgcccttcttgtggtgggtgaggacacccatggtcttgccggcggcgaggtcccacatgcggacggtggcgtcgagggaggcggtgatgacctgggggtcggcgtcctggcacttgaggtcggtgacggtgccgcggtggccggcgaggacgtggacgttgctgcgggtgcgcatgtcccagacg

SEQ ID NO: 19019 - DNA, 1575 bp, Muscodor strobelii
  misc_feature: SGI cDNA ID NO. 566388
  misc_feature: Encodes the peptide sequence at SEQ ID NO 19020
atggagactgccaagccacagtcccctttccaccagcacggcagccagcaatctgctgaccagcggaccgaaggtgctggtgaggtcatccttcctgcatggtcgctggggtgcatgtcaaactctcagccgtctctgaatagccaggcaaagggcacgaagggtgcggtattttctaccggccaggtgactagagccacaaccgtagctgcgaccaaggtcgcaaaaataccagcggccgaccatgctcgcttcgttgcctcctttatccttgcccagcattgcgacgaggtcgaggcgattgtccgtgagatgcatcacgaactgcaaaaagacgacaagaccggcagtaagatcgaagtggtgaccgtggagcgcgctgtcccctacatacgtgtgtccgcgagcaccgaagcggctgtactggagaccattcagtccgcgcagaggctggctgtcttttacctggccgccggtcccgagacgaggtctaagaccgtattcctcgagcccgcgtgcagcgacgtgaccgttccattccgggtggtagtggcagtggacgccactacccacgtcccacgacaccgtgtggagcgtaggccggacatgaagcctgccgtactcctcgagcagcgctctagcgactacgtagctcagatcaccaaggccttggatatgactctcgagaggaaccgtagtatctcggctgtcgcggtgcgaatccaccttggatactatgtgccgttcagactgggccattttactatgagcagcttcgaagaaatggtgataaaccctcggtcgaggggaaagttcatctatcgtctaggcaatagcatcacggtccaacgagcgatgcaagcgatgcatgctgccgagagcccgctattccctttggatagccgagtacaagcaccccgatccgtaactccaacttacagtgtcgagctttgtgtatcaggacgccgggttaaagccactttgacaactacatcaactcctgcgacgtatgggatgacgcatctggaggtttggggcacgcgcgatgaagaaatgcccgccctggagtttaccagcatcagcatcggaaaagctacagactggaagattgaggccaagggccagcgcaatggtgtccctccgtccatgcccatcgaacaatacttcaagacagccacggcatcggtacaggggcgagtcgaggatttcggcacatatccccgcgttcgtatgggactggatccaccgacaggcaagctggacgcactctgggtcaacgccatgtacgagtacatgtggaaaggcaccggatatgtggtcgaattcaccatccatcgggggtggcgcgacgtcaaagacatggtgaagcaggggacgccgcgcaccgagtttggggtggtggtgtacgaggaagcttgggaccaagccggtctagatgcaggagagggcacaggaggcgagggttcggaaagcgacgcggctcgtggtggagcacgcaagaagcgggcggaggactgcctcgagacggttagagagattcgcgacttctttgacggtatgggcgcctcaatttga

SEQ ID NO: 19020 - protein, 524 aa, Muscodor strobelii
  misc_feature: SGI Peptide ID NO. 566388
METAKPQSPFHQHGSQQSADQRTEGAGEVILPAWSLGCMSNSQPSLNSQAKGTKGAVFSTGQVTRATTVAATKVAKIPAADHARFVASFILAQHCDEVEAIVREMHHELQKDDKTGSKIEVVTVERAVPYIRVSASTEAAVLETIQSAQRLAVFYLAAGPETRSKTVFLEPACSDVTVPFRVVVAVDATTHVPRHRVERRPDMKPAVLLEQRSSDYVAQITKALDMTLERNRSISAVAVRIHLGYYVPFRLGHFTMSSFEEMVINPRSRGKFIYRLGNSITVQRAMQAMHAAESPLFPLDSRVQAPRSVTPTYSVELCVSGRRVKATLTTTSTPATYGMTHLEVWGTRDEEMPALEFTSISIGKATDWKIEAKGQRNGVPPSMPIEQYFKTATASVQGRVEDFGTYPRVRMGLDPPTGKLDALWVNAMYEYMWKGTGYVVEFTIHRGWRDVKDMVKQGTPRTEFGVVVYEEAWDQAGLDAGEGTGGEGSESDAARGGARKKRAEDCLETVREIRDFFDGMGASI

SEQ ID NO: 19021 - DNA, 12287 bp, Muscodor strobelii; identical to SEQ ID NO: 19015
  misc_feature: SGI EST ID NO. CUFF.46327.1
  misc_feature: Variant of the nucleotide sequence at SEQ ID NO 19019

SEQ ID NO: 19022 - DNA, 2190 bp, Muscodor strobelii
  misc_feature: SGI cDNA ID NO. 566389
  misc_feature: Reduced expression when VOC is produced
  misc_feature: Encodes the peptide sequence at SEQ ID NO 19023
atgccccgccagtccagcgcgcgcgaccatcccgtgctcgaccgcccccgggatcgggatcgggatcgggaccacgaacacgagcgggagtgggagtggatatacaacaccgatgccgccacccagtccggccgcgcacgacgtgacacgacccgacacatcgtcggcgcccgccacggccgcttcgagtgtcgcgtcggcgactgcgtcctgctgagggccgaggcctccagccacccctgggtggccatcatcgccgcctttgtcgaggctgacgacgacggcgacatggccgccgacttcctgtggttctcctccgacgccgagattcgcaacggcccccgcaaacgccacgacttcctgccgaatgagctgtacatcactgcctcgaccgacatcaactctctctcgtccatcgacggcaaggcccgcgtcatgtcccactcggccttcctgcgcgagtttcccgccgccagagtcccgcgatcctcgtccgcacacaacaagaccttcgtctgtcgccgaggctgcaatgccaggaccaccacatacacccccgagttcacctgggaggatgacgggggacccagtccaccccgaagacaacccaaatccaacgacacgcccggtagacgcccggcccgctcgactccaagaaagcggcgccgagatgcggacgacgacggtggtgaggaacatcacgaccaacaagacgacgactacctatcttcagaaccggagaccccatcaaagaccaggacccccagcagagggcaaaagacgacgcgagtcgcgacaccctcgagccgaaataagatcgtcgtcaagaaggcgctcgaatttaccccgctggcgacgcgcatgctgtcccctagccacaatcaggcatcgccgttccagatcgccagggctcagctgcacgtcgcatctgtccccacgaccttgccgtgccgagagtctgagtttgccgtcgtgtactcgcacctcgaagcggccatcaccaacggctcgggcgcctgcatctacatctcgggtacaccgggcacgggcaagacggcgaccgtccgcgaggtcatctcccgcctagacgaggcagtccacgcagacgagttggatgatttcctcttcgtcgagatcaacggtatgaaaatcacagatccccaccagtcctattgcctcttgtgggaggccctccgtggccagcgggtcagtccgggccaggcattggacctgttggagcgcgagttcaaccatcccagcccccgacgtgtgccctgtgtcgtcttgatggatgagcttgaccagctggtcaccaaaaatcagagtgtcatgtacaactttttcaattggcccggcttgcgccactcgcggctgatcgtgctcgcggtggccaacacgatggatctgcccgagcgaacgctgagcaacaagatcagcagccggctcggtctcacccgcatcacgttccccggctacaaccacgagcagctgatgaagatcatccagtcccggctcgaaggcgtgccgggccagatcgtagagcccgacgccgtgcaattcgctagccgcaaggtggccgccgtgagtggcgacgcgcggcgggccctcgacatatgccggcgcgctgtcgagctggcggaagctgacaccaagacgctcggcggtgatccgaccacccccagcaagagacccagggcggacgcggacaagctcaagagctctcgcggcgtcgtcaccatcggcaccgtcaagagggccatcagcgaagccaccaccagtcccttgcagcagtaccttcgtgggcttcccttcgcctacaaagccatgctagcagcgctcttgctgcgcagcgagaggtcggggctgcccgacacgacgtacggcgacgtgctggaagagacgagacgggcccttgttctggacgcggggagccggcgggccgacgtgctggtgcgtgtgagccagagggacgcgggtcgacaggccgagacacgcagtcaggcatcccatccgagccggaccgccggagtgcatgccgccgcggtagccttggcgggagccggagtcatcatcttggaagggcagcgccctgagagacccagcaagatgcgattggcggtgggcgacgaagaggtgaagctcgcactgcgcgacgatcccgagatcaaggcactgggcatagcattctag

SEQ ID NO: 19023 - protein, 729 aa, Muscodor strobelii
  misc_feature: SGI Peptide ID NO. 566389
  misc_feature (340)..(548): Pfam Id: PF00004 Pfam Desc: ATPase family associated with various cellular activities (AAA)
  misc_feature (62)..(185): Pfam Id: PF01426 Pfam Desc: BAH domain
  misc_feature (340)..(489): Pfam Id: PF00004 Pfam Desc: ATPase family associated with various cellular activities (AAA)
  misc_feature (31)..(729): NCBI GI: 171684735 Blast Desc: protein product [Podospora anserina] gi|170942328|emb|CAP67980.1| protein product [Podospora anserina]
  misc_feature (31)..(729): NCBI GI: 39941408 Blast Desc: MGG_05615 [Magnaporthe grisea 70-15] gi|145022297|gb|EDK06317.1| MGG_05615 [Magnaporthe grisea 70-15]
  misc_feature (3)..(727): NCBI GI: 164427593 Blast Desc: NCU02965 [Neurospora crassa OR74A] gi|38566957|emb|CAE76259.1| related to origin recognition protein Orc1p [Neurospora crassa] gi|157071808|gb|EAA36116.2| NCU02965
  misc_feature (60)..(729): NCBI GI: 116192367 Blast Desc: conserved [Chaetomium globosum CBS 148.51] gi|88181814|gb|EAQ89282.1| conserved [Chaetomium globosum CBS 148.51]
  misc_feature (28)..(728): NCBI GI: 256735017 Blast Desc: [Nectria haematococca mpVI 77-13-4]
  misc_feature (28)..(728): NCBI GI: 46108908 Blast Desc: FG01336.1 [Gibberella zeae PH-1]
  misc_feature (38)..(727): NCBI GI: 156053493 Blast Desc: SS1G_06914 [Sclerotinia sclerotiorum 1980] gi|154704692|gb|EDO04431.1| SS1G_06914 [Sclerotinia sclerotiorum 1980]
  misc_feature (18)..(728): NCBI GI: 189189866 Blast Desc: origin recognition complex subunit 1 [Pyrenophora tritici-repentis Pt-1C-BFP] gi|187972878|gb|EDU40377.1| origin recognition complex subunit 1 [Pyrenophora tritici-repentis
  misc_feature (97)..(728): NCBI GI: 154290617 Blast Desc: BC1G_15473 [Botryotinia fuckeliana B05.10] gi|150847503|gb|EDN22696.1| BC1G_15473 [Botryotinia fuckeliana B05.10]
  misc_feature (18)..(728): NCBI GI: 169607745 Blast Desc: SNOG_06931 [Phaeosphaeria nodorum SN15] gi|160701483|gb|EAT85582.2| SNOG_06931 [Phaeosphaeria nodorum SN15]
  misc_feature: Useful for introducing or modulating the production of volatile compounds
MPRQSSARDHPVLDRPRDRDRDRDHEHEREWEWIYNTDAATQSGRARRDTTRHIVGARHGRFECRVGDCVLLRAEASSHPWVAIIAAFVEADDDGDMAADFLWFSSDAEIRNGPRKRHDFLPNELYITASTDINSLSSIDGKARVMSHSAFLREFPAARVPRSSSAHNKTFVCRRGCNARTTTYTPEFTWEDDGGPSPPRRQPKSNDTPGRRPARSTPRKRRRDADDDGGEEHHDQQDDDYLSSEPETPSKTRTPSRGQKTTRVATPSSRNKIVVKKALEFTPLATRMLSPSHNQASPFQIARAQLHVASVPTTLPCRESEFAVVYSHLEAAITNGSGACIYISGTPGTGKTATVREVISRLDEAVHADELDDFLFVEINGMKITDPHQSYCLLWEALRGQRVSPGQALDLLEREFNHPSPRRVPCVVLMDELDQLVTKNQSVMYNFFNWPGLRHSRLIVLAVANTMDLPERTLSNKISSRLGLTRITFPGYNHEQLMKIIQSRLEGVPGQIVEPDAVQFASRKVAAVSGDARRALDICRRAVELAEADTKTLGGDPTTPSKRPRADADKLKSSRGVVTIGTVKRAISEATTSPLQQYLRGLPFAYKAMLAALLLRSERSGLPDTTYGDVLEETRRALVLDAGSRRADVLVRVSQRDAGRQAETRSQASHPSRTAGVHAAAVALAGAGVIILEGQRPERPSKMRLAVGDEEVKLALRDDPEIKALGIAF

SEQ ID NO: 19024 - DNA, 7102 bp, Muscodor strobelii; identical to SEQ ID NO: 19018
  misc_feature: SGI EST ID NO. CUFF.46326.3
  misc_feature: Variant of the nucleotide sequence at SEQ ID NO 19022

SEQ ID NO: 19025 - DNA, 603 bp, Muscodor strobelii
  misc_feature: SGI cDNA ID NO. 566390
  misc_feature: Reduced expression when VOC is produced
  misc_feature: Encodes the peptide sequence at SEQ ID NO 19026
cgcgtctgggacatgcgcacccgcagcaacgtccacgtcctcgccggccaccgcggcaccgtcaccgacctcaagtgccaggacgccgacccccaggtcatcaccgcctccctcgacgccaccgtccgcatgtgggacctcgccgccggcaagaccatgggtgtcctcacccaccacaagaagggcgtccgcgccctcgccctgcaccccaccgagttcaccttcgccaccgccagcaccgccagcatcaagcagtggaagtgccccgagggcgccttcatgggcaacttcgacggccacaacgccatcatcaactccctcgccgccaacgacgacgtgctcttctccggcggcgacaacggctccatgagcttctgggactggaagtccggccaccgcttccaagccctcgactccatcgcccagccggggtcgctggatgccgaggccggcatcatgagctcgaccttcgaccgcaccggtctgcggctcatcgtcggcgaggcagacaagaccatcaagatctggaagcccgacgatcaggccacacccgagacgcacccgctcgagtggaagccgacactgggccggcagaaacactaa

SEQ ID NO: 19026 - protein, 200 aa, Muscodor strobelii
  misc_feature: SGI Peptide ID NO. 566390
  misc_feature (8)..(46): Pfam Id: PF00400 Pfam Desc: WD domain, G-beta repeat
  misc_feature (50)..(87): Pfam Id: PF00400 Pfam Desc: WD domain, G-beta repeat
  misc_feature (91)..(127): Pfam Id: PF00400 Pfam Desc: WD domain, G-beta repeat
  misc_feature (1)..(200): NCBI GI: 225559622 Blast Desc: pre-mRNA-splicing factor [Ajellomyces capsulatus G186AR]
  misc_feature (1)..(200): NCBI GI: 154281055 Blast Desc: pre-mRNA splicing factor prp46 [Ajellomyces capsulatus NAm1] gi|150411519|gb|EDN06907.1| pre-mRNA splicing factor prp46 [Ajellomyces capsulatus NAm1]
  misc_feature (1)..(200): NCBI GI: 212542477 Blast Desc: mRNA splicing protein (Prp5), [Penicillium marneffei ATCC 18224] gi|210066300|gb|EEA20393.1| mRNA splicing protein (Prp5), [Penicillium marneffei ATCC 18224]
  misc_feature (1)..(200): NCBI GI: 239613327 Blast Desc: pre-mRNA splicing factor prp46 [Ajellomyces dermatitidis ER-3]
  misc_feature (1)..(200): NCBI GI: 261187774 Blast Desc: pre-mRNA splicing factor prp46 [Ajellomyces dermatitidis SLH14081] gi|239593518|gb|EEQ76099.1| pre-mRNA splicing factor prp46 [Ajellomyces dermatitidis SLH14081]
  misc_feature (1)..(200): NCBI GI: 119173996 Blast Desc: CIMG_08980 [Coccidioides immitis RS]
  misc_feature (1)..(200): NCBI GI: 240279361 Blast Desc: pre-mRNA-splicing factor prp46 [Ajellomyces capsulatus H143]
  misc_feature (1)..(200): NCBI GI: 240106652 Blast Desc: Pre-mRNA splicing protein prp5, [Coccidioides posadasii C735 delta SOWgp]
  misc_feature (1)..(200): NCBI GI: 225682855 Blast Desc: pre-mRNA-splicing factor prp46 [Paracoccidioides brasiliensis Pb03] gi|226290302|gb|EEH45786.1| pre-mRNA-splicing factor prp46 [Paracoccidioides brasiliensis Pb18]
  misc_feature (1)..(200): NCBI GI: 226285366 Blast Desc: pre-mRNA-splicing factor prp46 [Paracoccidioides brasiliensis Pb01]
  misc_feature (1)..(177): SWISSPROT Homolog: EC 2.7.11.1 Non-specific serine/threonine protein kinase
  misc_feature: Useful for introducing or modulating the production of volatile compounds
RVWDMRTRSNVHVLAGHRGTVTDLKCQDADPQVITASLDATVRMWDLAAGKTMGVLTHHKKGVRALALHPTEFTFATASTASIKQWKCPEGAFMGNFDGHNAIINSLAANDDVLFSGGDNGSMSFWDWKSGHRFQALDSIAQPGSLDAEAGIMSSTFDRTGLRLIVGEADKTIKIWKPDDQATPETHPLEWKPTLGRQKH

SEQ ID NO: 19027 - DNA, 12287 bp, Muscodor strobelii; identical to SEQ ID NO: 19015
  misc_feature: SGI EST ID NO. CUFF.46327.1
  misc_feature: Variant of the nucleotide sequence at SEQ ID NO 19025

SEQ ID NO: 19028 - DNA, 240 bp, Muscodor strobelii
  misc_feature: SGI cDNA ID NO. 566391
  misc_feature: Encodes the peptide sequence at SEQ ID NO 19029
tgcgatttcaagtgggagaagccggatgtcgatggcctcgtcaaatttctatgcactgacaagggcttcaacgaggatcgagtccgtgcaggagctgcaagacttgagaagggcgccaagagctcacagcaagcccggctcgagggcttcttcaagcctgtccccaagacggatgaggaaaaaggcaaccctgaaacgaaagcacgaagagcagaacgaagcaaagaagaagaagcttaa

SEQ ID NO: 19029 - protein, 79 aa, Muscodor strobelii
  misc_feature: SGI Peptide ID NO. 566391
  misc_feature (1)..(62): NCBI GI: 46138549 Blast Desc: FG10789.1 [Gibberella zeae PH-1]
  misc_feature (1)..(63): NCBI GI: 238506000 Blast Desc: Flap endonuclease Rad27, [Aspergillus flavus NRRL3357] gi|220690316|gb|EED46666.1| Flap endonuclease Rad27, [Aspergillus flavus NRRL3357]
  misc_feature (1)..(62): NCBI GI: 256729138 Blast Desc: [Nectria haematococca mpVI 77-13-4]
  misc_feature (1)..(63): NCBI GI: 169779978 Blast Desc: [Aspergillus oryzae RIB40] gi|83773193|dbj|BAE63320.1| protein product [Aspergillus oryzae]
  misc_feature (1)..(63): NCBI GI: 212544870 Blast Desc: Flap endonuclease Rad27, [Penicillium marneffei ATCC 18224] gi|210065558|gb|EEA19652.1| Flap endonuclease Rad27, [Penicillium marneffei ATCC 18224]
  misc_feature (1)..(63): NCBI GI: 258573689 Blast Desc: DNA-repair protein rad2 [Uncinocarpus reesii 1704] gi|237901292|gb|EEP75693.1| DNA-repair protein rad2 [Uncinocarpus reesii 1704]
  misc_feature (1)..(63): NCBI GI: 115402747 Blast Desc: DNA-repair protein rad2 [Aspergillus terreus NIH2624] gi|114189296|gb|EAU30996.1| DNA-repair protein rad2 [Aspergillus terreus NIH2624]
  misc_feature (1)..(63): NCBI GI: 67524613 Blast Desc: AN2764.2 [Aspergillus nidulans FGSC A4] gi|40744016|gb|EAA63198.1| AN2764.2 [Aspergillus nidulans FGSC A4] gi|259486319|tpe|CBF84062.1| TPA: 5' to 3' exonuclease, 5'
  misc_feature (1)..(63): NCBI GI: 119493310 Blast Desc: Flap endonuclease, [Neosartorya fischeri NRRL 181] gi|119412005|gb|EAW21948.1| Flap endonuclease, [Neosartorya fischeri NRRL 181]
  misc_feature (1)..(63): NCBI GI: 145245469 Blast Desc: An11g10450 [Aspergillus niger] gi|134079702|emb|CAK97128.1| protein product [Aspergillus niger]
CDFKWEKPDVDGLVKFLCTDKGFNEDRVRAGAARLEKGAKSSQQARLEGFFKPVPKTDEEKGNPETKARRAERSKEEEA

SEQ ID NO: 19030 - DNA, 884 bp, Muscodor strobelii
  misc_feature: SGI EST ID NO. CUFF.44621.0
  misc_feature: Variant of the nucleotide sequence at SEQ ID NO 19028
tgcgatttcaagtgggagaagccggatgtcgatggcctcgtcaaatttctatgcactgacaagggcttcaacgaggatcgagtccgtgcaggagctgcaagacttgagaagggcgccaagagctcacagcaagcccggctcgagggcttcttcaagcctgtccccaagacggatgaggaaaaaggcaaccctgaaacgaaagcacgaagagcagaacgaagcaaagaagaagaagcttaaggaagagaagaaagagaaggcgaaggcgaagggaaagcctagaggagcagcctaaataatcgttctcatcggctatatatgaggctcaatctagccccattgaagggagccacgagtcacaaattcggcggtttggtttccactggcgttggagcggagcacaggagcggcgttagtactatggttgctattaaaaggaagtgggatcggtattcgtgagtgatacgtcctgggatcatcgcatacacctgtgtagcttttacattacgaagagcgcttgtcaccaattaaaaagacgcagacgccctgtagactcaacttacactgaacctttttgagcgtctcaagaggcgggaataaaaggcgtgctttggtgacgggcgcttacagcaagacaatagcataatcattttaccttatggatgtcacaggcagtggcaatctcgagacctcgtccacatatacaacaccaaaaaacaggcgccaagcagaatacaacgccgctgtctatatccaggccgttagcaatcagaccggaaactaagtgcgcagcctacaattagcactaagagatagccactcaaatgcattgtctagcccttagagagcgaatttaactccagtacggccaaacctgctaagag

SEQ ID NO: 19031 - DNA, 306 bp, Muscodor strobelii
  misc_feature: SGI cDNA ID NO. 566392
  misc_feature: Encodes the peptide sequence at SEQ ID NO 19032
atgacggggaaacgatgctctagcctggggcaaatatcgccgctgagccactgtaaacggcgtttcgcaagctctcaagtggaaaatgatggtggcacgcgcgagtctgacgccaccaaggtggcaactgaatcacctgacgactcatcaagcaacaagaagacggtatcccaagtggacgaagagctgaggagaaagatgtccggcatagccggcgatggtggtgaggccggaatcgagtacgaagatggcaagcccgtctcgatgaagcggagcgtcaagaacaatatgttccgttacatatga

SEQ ID NO: 19032 - protein, 101 aa, Muscodor strobelii
  misc_feature: SGI Peptide ID NO. 566392
  misc_feature (32)..(101): NCBI GI: 259487564 Blast Desc: TPA: conserved [Aspergillus nidulans FGSC A4]
  misc_feature (21)..(101): NCBI GI: 119482005 Blast Desc: NFIA_090920 [Neosartorya fischeri NRRL 181] gi|119409185|gb|EAW19134.1| conserved [Neosartorya fischeri NRRL 181]
  misc_feature (5)..(101): NCBI GI: 116201455 Blast Desc: [Chaetomium globosum CBS 148.51] gi|88177130|gb|EAQ84598.1| [Chaetomium globosum CBS 148.51]
  misc_feature (37)..(101): NCBI GI: 159129959 Blast Desc: conserved [Aspergillus fumigatus A1163]
  misc_feature (37)..(101): NCBI GI: 71002446 Blast Desc: conserved [Aspergillus fumigatus Af293] gi|66853542|gb|EAL93866.1| conserved [Aspergillus fumigatus Af293]
  misc_feature (36)..(101): NCBI GI: 121716595 Blast Desc: conserved [Aspergillus clavatus NRRL 1] gi|119404010|gb|EAW14427.1| conserved [Aspergillus clavatus NRRL 1]
  misc_feature (51)..(101): NCBI GI: 255953135 Blast Desc: Pc21g02560 [Penicillium chrysogenum Wisconsin 54-1255] gi|211589031|emb|CAP95153.1| Pc21g02560 [Penicillium chrysogenum Wisconsin 54-1255]
  misc_feature (31)..(101): NCBI GI: 261359934 Blast Desc: conserved [Verticillium albo-atrum VaMs.102]
  misc_feature (42)..(101): NCBI GI: 169608043 Blast Desc: SNOG_07088 [Phaeosphaeria nodorum SN15] gi|111064619|gb|EAT85739.1| SNOG_07088 [Phaeosphaeria nodorum SN15]
  misc_feature (23)..(101): NCBI GI: 46111984 Blast Desc: FG02868.1 [Gibberella zeae PH-1]
MTGKRCSSLGQISPLSHCKRRFASSQVENDGGTRESDATKVATESPDDSSSNKKTVSQVDEELRRKMSGIAGDGGEAGIEYEDGKPVSMKRSVKNNMFRYI

SEQ ID NO: 19033 - DNA, 1293 bp, Muscodor strobelii
  misc_feature: SGI cDNA ID NO. 566393
  misc_feature: Encodes the peptide sequence at SEQ ID NO 19034
atgtctcgggccagtaggtcgagcttcggtctagagctcgagtttctagtcgctgtcgcgaaggagaatcagcgattaacagtacctgcaatgttccaacaatcatcaggtagtgctatcttcgtcccggcctcaacggctgcgtcacagatcctggcagcttcgcgtccaataatgcagagagcggttaacaatgcactaaatagattcaaaggtaagcgtgttatatcttcagggcaggccaatcagccttacaaagaatgggctgtcgaagtcgacacaagcgttttcctcccatcacagcttcggtctctccccaacatgactgactacacgtggcaggctgtcgagattacgtcgccagcgctttgggatgatgaatcttcctggagagagatcaagcttgtcgttgatgccatctatcgtaacttctgggtgctgacgccggagtctgcaggagtccatttccattacggtaacgggacggattacatccccttctttgcgcttaggagacttggagcctttttcttcgctgccgatccaattctttgccagctatatccactacacagacggaataacatgttctgcgctagtaataggctctattcatacattgcacgtggagggattccagacgaagcccattcgcagttcgtagaggcaccgcctgagattcgaaatgctcctagcaagaagtccacgggcaatcgcacccccacacgacgtagtgtctctattaaaaggggaagcttgactgggtatatttccagagatctgttctcaacggattccgatagtgaggatggaaacaccccagccattaaagacattcccagcgccgccgcggaaattctccgatcgacaaatgctcccaccgtagccgagcaaatgtcgctaaaacctgcagatctggacgaaaggatggcttataactttaataactatcgtcaaagtaggtacaggccatctgcagcgagcgacgcgagcaacggtttgctgctcacacctggcatgaccgggggtcagaagcgcacgatcgaatttagacaaatcgcagctagcatggattccactgagatcattgctcatggcaagacgatcatgcgcctctgcgagtttgccaaaactgccagcttaaaagacctgtggacggtcattcttgattgcgccacgggcgagacagacggagaatggttcgacgtttttgacctcttgctcaagcttgatctccaggaggaggcccgggtcctcgcgcgcgccgttgcgaagttccaaagaccaggatga

SEQ ID NO: 19034 - protein, 430 aa, Muscodor strobelii
  misc_feature: SGI Peptide ID NO. 566393
  misc_feature (2)..(227): NCBI GI: 46108596 Blast Desc: FG01180.1 [Gibberella zeae PH-1]
  misc_feature (3)..(209): NCBI GI: 154303412 Blast Desc: [Botryotinia fuckeliana B05.10] gi|150854588|gb|EDN29780.1| [Botryotinia fuckeliana B05.10]
  misc_feature (8)..(207): NCBI GI: 154314552 Blast Desc: [Botryotinia fuckeliana B05.10] gi|150848607|gb|EDN23800.1| [Botryotinia fuckeliana B05.10]
  misc_feature (6)..(188): NCBI GI: 261357625 Blast Desc: conserved [Verticillium albo-atrum VaMs.102]
  misc_feature (8)..(206): NCBI GI: 156062222 Blast Desc: [Sclerotinia sclerotiorum 1980] gi|154696563|gb|EDN96301.1| [Sclerotinia sclerotiorum 1980]
  misc_feature (1)..(424): NCBI GI: 156045762 Blast Desc: SS1G_09157 [Sclerotinia sclerotiorum 1980] gi|154693553|gb|EDN93291.1| SS1G_09157 [Sclerotinia sclerotiorum 1980]
  misc_feature (6)..(202): NCBI GI: 156056811 Blast Desc: SS1G_04136 [Sclerotinia sclerotiorum 1980] gi|154701922|gb|EDO01661.1| SS1G_04136 [Sclerotinia sclerotiorum 1980]
  misc_feature (70)..(200): NCBI GI: 156044971 Blast Desc: [Sclerotinia sclerotiorum 1980] gi|154694069|gb|EDN93807.1| [Sclerotinia sclerotiorum 1980]
  misc_feature (5)..(178): NCBI GI: 154314526 Blast Desc: [Botryotinia fuckeliana B05.10] gi|150848594|gb|EDN23787.1| [Botryotinia fuckeliana B05.10]
  misc_feature (84)..(224): NCBI GI: 116199311 Blast Desc: [Chaetomium globosum CBS 148.51] gi|88179090|gb|EAQ86558.1| [Chaetomium globosum CBS 148.51]
MSRASRSSFGLELEFLVAVAKENQRLTVPAMFQQSSGSAIFVPASTAASQILAASRPIMQRAVNNALNRFKGKRVISSGQANQPYKEWAVEVDTSVFLPSQLRSLPNMTDYTWQAVEITSPALWDDESSWREIKLVVDAIYRNFWVLTPESAGVHFHYGNGTDYIPFFALRRLGAFFFAADPILCQLYPLHRRNNMFCASNRLYSYIARGGIPDEAHSQFVEAPPEIRNAPSKKSTGNRTPTRRSVSIKRGSLTGYISRDLFSTDSDSEDGNTPAIKDIPSAAAEILRSTNAPTVAEQMSLKPADLDERMAYNFNNYRQSRYRPSAASDASNGLLLTPGMTGGQKRTIEFRQIAASMDSTEIIAHGKTIMRLCEFAKTASLKDLWTVILDCATGETDGEWFDVFDLLLKLDLQEEARVLARAVAKFQRPG

SEQ ID NO: 19035 - DNA, 370 bp, Muscodor strobelii
  misc_feature: SGI EST ID NO. CUFF.44639.0
  misc_feature: Variant of the nucleotide sequence at SEQ ID NO 19033
tgattctgaacgccatgtctcgggccagtaggtcgagcttcggtctagagctcgagtttctagtcgctgtcgcgaaggagaatcagcgattaacagtacctgcaatgttccaacaatcatcaggtagtgctatcttcgtcccggcctcaacggctgcgtcacagatcctggcagcttcgcgtccaataatgcagagagcggttaacaatgcactaaatagattcaaaggtaagcgtgttatatcttcagggcaggccaatcagccttacaaagaatgggctgtcgaagtcgacacaagcgttttcctcccatcacagcttcggtctctccccaacatgactgactacacgtggcaggctgtcgagattac

SEQ ID NO: 19036 - DNA, 1500 bp, Muscodor strobelii
  misc_feature: SGI cDNA ID NO. 566394
  misc_feature: Encodes the peptide sequence at SEQ ID NO 19037
atggacgagtcccagagggaggcctgcgaggctgaggcgtctaagctgcgcgccgacctgaagcgcttcgaagccgactgggccacctcgcacgacggcaagaagcccggccgcctcgagatcaagcagcaccccgacatcgccgccaagtacaagacgtacggccagctgcgagacgtgctcgccggcaagagcagggcctcctgcagaccctccaacagagcctgcaccaagcgccccgctcacgacaacgccgacgacgacaacgacgagagccaaggtgctcctcgggcgcaggcccagactccgtccaagagacactgccgcccgcaccgcaccccgtccaccgcccgcaccgccgatctcgaccacgccgccctcgccacgccctccaccaggcgcctcttcagtcccgccatgcccacgtccatcggccccacgccccagaggaacggccgcatcctcggcatcttcgacctcctggacgaagacgtcgagaacgctggtcacgacgcccccggcaggtacgccacgggccgcatccaggccacccccagcaagcggacggccggcgcccgagacgacgcagtcctcgagacgacgcccatgtcctcgtccaagcgcaacgtgctcgaaaccttcgccaccccgctcaagtccaggggcgccaacgctctcgacgcctcaacacctagctctgtctccaagcttcagctgtccactcccgccttcttgcgaagggcgcccatgcagaccctccacgagaacgcccagtttgtcggccctgcgcccttacggctaccgcggaagcctctgggtcgcagtctcagcagtgtagtggccggtctgagaaggctcgaagacgagaagttcgacgacgatcttgaggctttgcacgagatggaggacaacgatgccgtctctgcccaacctgtgcccctagctaagccaatggcaaaagcagcagcagcagccgagattctcgaaccagatagccaggcaccaccgcttctgggaggcttcgatgacgaaggcctatacgacagccccacagaagaaggcaaagggcgtgatggccaacccctcagagtgtacaagaaaaagggacagaagagaacgacgcggcgagtcaatatgcggcccacgagggtcaagcgacagccacagtctttgcaggatgctgtcgatggtaactctgctcacgagtctagcgatgacgacgtcgtccccgaaacacagtgtgatcggggcgctcctgctgaggaacccggcgatgctggatcggacctagacttcaatctttccgaggaggagcatgatcagcagcaggagaagaatccgcccagaaaacatgctcacggagagaaggagggcaaagtcaagaaggctgcaagaaaggtgaacgaactagcacacacaaacttcaaacggctgaagctgagaaacaccgggtcgaaaggaggacctggctttggaagccgctttcgccggcggagatga

SEQ ID NO: 19037 - protein, 499 aa, Muscodor strobelii
  misc_feature: SGI Peptide ID NO. 566394
  misc_feature (1)..(499): NCBI GI: 256729164 Blast Desc: NECHADRAFT_80133 [Nectria haematococca mpVI 77-13-4]
  misc_feature (1)..(499): NCBI GI: 46138501 Blast Desc: FG10765.1 [Gibberella zeae PH-1] gi|121810029|sp|Q4HW93.1|SLD2_GIBZE RecName: Full=DNA replication regulator SLD2
  misc_feature (1)..(499): NCBI GI: 145610809 Blast Desc: MGG_11473 [Magnaporthe grisea 70-15] gi|145018164|gb|EDK02443.1| MGG_11473 [Magnaporthe grisea 70-15]
  misc_feature (1)..(499): NCBI GI: 85092691 Blast Desc: NCU02241 [Neurospora crassa OR74A] gi|74615529|sp|Q7S438.1|SLD2_NEUCR RecName: Full=DNA replication regulator sld-2 gi|28920934|gb|EAA30264.1| conserved [Neurospora
  misc_feature (1)..(499): NCBI GI: 171679647 Blast Desc: protein product [Podospora anserina] gi|170939449|emb|CAP64677.1| protein product [Podospora anserina]
  misc_feature (1)..(499): NCBI GI: 156050695 Blast Desc: SS1G_07935 [Sclerotinia sclerotiorum 1980] gi|154692335|gb|EDN92073.1| SS1G_07935 [Sclerotinia sclerotiorum 1980]
  misc_feature (46)..(499): NCBI GI: 261355067 Blast Desc: DNA replication regulator SLD2 [Verticillium albo-atrum VaMs.102]
  misc_feature (9)..(499): NCBI GI: 121750448 Blast Desc: DNA replication regulator SLD2 [Verticillium albo-atrum VaMs.102]
  misc_feature (9)..(488): NCBI GI: 169599761 Blast Desc: SNOG_02706 [Phaeosphaeria nodorum SN15] gi|160705318|gb|EAT89437.2| SNOG_02706 [Phaeosphaeria nodorum SN15]
  misc_feature (9)..(481): NCBI GI: 189191516 Blast Desc: conserved [Pyrenophora tritici-repentis Pt-1C-BFP] gi|187973703|gb|EDU41202.1| conserved [Pyrenophora tritici-repentis Pt-1C-BFP]
MDESQREACEAEASKLRADLKRFEADWATSHDGKKPGRLEIKQHPDIAAKYKTYGQLRDVLAGKSRASCRPSNRACTKRPAHDNADDDNDESQGAPRAQAQTPSKRHCRPHRTPSTARTADLDHAALATPSTRRLFSPAMPTSIGPTPQRNGRILGIFDLLDEDVENAGHDAPGRYATGRIQATPSKRTAGARDDAVLETTPMSSSKRNVLETFATPLKSRGANALDASTPSSVSKLQLSTPAFLRRAPMQTLHENAQFVGPAPLRLPRKPLGRSLSSVVAGLRRLEDEKFDDDLEALHEMEDNDAVSAQPVPLAKPMAKAAAAAEILEPDSQAPPLLGGFDDEGLYDSPTEEGKGRDGQPLRVYKKKGQKRTTRRVNMRPTRVKRQPQSLQDAVDGNSAHESSDDDVVPETQCDRGAPAEEPGDAGSDLDFNLSEEEHDQQQEKNPPRKHAHGEKEGKVKKAARKVNELAHTNFKRLKLRNTGSKGGPGFGSRFRRRR

SEQ ID NO: 19038 - DNA, 951 bp, Muscodor strobelii
  misc_feature: SGI cDNA ID NO. 566395
  misc_feature: Encodes the peptide sequence at SEQ ID NO 19039
atgcacgctcagccctcgccatacgaccatctacagtctcaagtactgcagaagacgcttcaagaggtggcagaggtggcagacctagacaccgatcaaagccacccatgctgtgttatctgtctcgataacatcagcgaaccctgcgaggctcagccttgtggccaccgcaattttgactacctgtgcctactgaactggcttgaacgcctgtctcaatgcccattgtgcaaggccagcatccaccgtgtagcccacaacttcggccacgacggtccgggaagtagcagtgtttacctcgtccccaaggtctcaccaggtccacatcgcagcctctcgcagcccttgctggacccttcaccatctcgacctgcggctcgagctcgcaatgcacgtcgccgccaggttgcccctcgacagccctattcttcgccgactagagcagaccaggcacttcttcgccgccggtatgtctatcgcgaacgtctctatgcttgtcatgtcggttccaatccctattcgggatatagggacctgagtccgtctttgttccaatccgatgctgacctcaccccccgcgcgcgtgcttggctcagaagggagcttcaggttttccactttttgcgcccctctcgcgccatgcttgcgagcgagcataccatcactcgccgtcgcgcaatcaatgctgaatatcttcttgagtatattgttgccatcttaaaaacggtagatattcagggtagcgaggctgccgcgagggacatgttgaaggacttcctcggttcggagaacgcaactcagcttcttcatgaactgcgcaacttccttcgaagcccctggtctctcgcagagtgggatcgtaaggtacagtacccactgtcactgcctcatgggccaaaaggtcggggtgtagacactagacgtttgagggcggatgttgctcgtaattag

SEQ ID NO: 19039 - protein, 316 aa, Muscodor strobelii
  misc_feature: SGI Peptide ID NO. 566395
  misc_feature (38)..(77): Pfam Id: PF00097 Pfam Desc: Zinc finger, C3HC4 type (RING finger)
  misc_feature (9)..(291): NCBI GI: 256728956 Blast Desc: NECHADRAFT_39866 [Nectria haematococca mpVI 77-13-4]
  misc_feature (11)..(302): NCBI GI: 121705324 Blast Desc: RING finger domain protein [Aspergillus clavatus NRRL 1] gi|119399071|gb|EAW09499.1| RING finger domain protein [Aspergillus clavatus NRRL 1]
  misc_feature (11)..(302): NCBI GI: 119492127 Blast Desc: RING finger domain protein [Neosartorya fischeri NRRL 181] gi|119411694|gb|EAW21637.1| RING finger domain protein [Neosartorya fischeri NRRL 181]
  misc_feature (11)..(291): NCBI GI: 240107374 Blast Desc: C3HC4 type (RING finger) zinc finger containing protein [Coccidioides posadasii C735 delta SOWgp]
  misc_feature (11)..(291): NCBI GI: 119190947 Blast Desc: CIMG_05521 [Coccidioides immitis RS]
  misc_feature (11)..(291): NCBI GI: 67525163 Blast Desc: AN3039.2 [Aspergillus nidulans FGSC A4] gi|40744434|gb|EAA63610.1| AN3039.2 [Aspergillus nidulans FGSC A4] gi|259486014|tpe|CBF83519.1| TPA: RING finger domain protein
  misc_feature (11)..(302): NCBI GI: 70999984 Blast Desc: RING finger domain protein [Aspergillus fumigatus Af293] gi|66852346|gb|EAL92671.1| RING finger domain protein [Aspergillus fumigatus Af293] gi|159127718|gb|EDP52833.1| RING
  misc_feature (11)..(291): NCBI GI: 225678640 Blast Desc: [Paracoccidioides brasiliensis Pb03]
  misc_feature (10)..(291): NCBI GI: 242823496 Blast Desc: RING finger domain protein [Talaromyces stipitatus ATCC 10500] gi|218712998|gb|EED12423.1| RING finger domain protein [Talaromyces stipitatus ATCC 10500]
  misc_feature (11)..(291): NCBI GI: 258564977 Blast Desc: [Uncinocarpus reesii 1704] gi|237906934|gb|EEP81335.1| [Uncinocarpus reesii 1704]
MHAQPSPYDHLQSQVLQKTLQEVAEVADLDTDQSHPCCVICLDNISEPCEAQPCGHRNFDYLCLLNWLERLSQCPLCKASIHRVAHNFGHDGPGSSSVYLVPKVSPGPHRSLSQPLLDPSPSRPAARARNARRRQVAPRQPYSSPTRADQALLRRRYVYRERLYACHVGSNPYSGYRDLSPSLFQSDADLTPRARAWLRRELQVFHFLRPSRAMLASEHTITRRRAINAEYLLEYIVAILKTVDIQGSEAAARDMLKDFLGSENATQLLHELRNFLRSPWSLAEWDRKVQYPLSLPHGPKGRGVDTRRLRADVARN

SEQ ID NO: 19040 - DNA, 1601 bp, Muscodor strobelii
  misc_feature: SGI EST ID NO. CUFF.44645.0
  misc_feature: Variant of the nucleotide sequence at SEQ ID NO 19038
taacgtacctatccagcgtactattgatgcaatttgaagattcataggtcgagtcgtttccctttactcacgcttgatatgcgccgatacatgtatactacataccgatgagctggatttcacacgaggcactaggcaaaggcgcgcagcgtattgacgctgcctgcatacatgtacctttgcaggcattccctctccctccctgatccaagccattgcgccatatcgccttctcagctggtacctaatgcacgctcagccctcgccatacgaccatctacagtctcaagtactgcagaagacgcttcaagaggtggcagaggtggcagacctagacaccgatcaaagccacccatgctgtgttatctgtctcgataacatcagcgaaccctgcgaggctcagccttgtggccaccgcaattttgactacctgtgcctactgaactggcttgaacgcctgtctcaatgcccattgtgcaaggccagcatccaccgtgtagcccacaacttcggccacgacggtccgggaagtagcagtgtttacctcgtccccaaggtctcaccaggtccacatcgcagcctctcgcagcccttgctggacccttcaccatctcgacctgcggctcgagctcgcaatgcacgtcgccgccaggttgcccctcgacagccctattcttcgccgactagagcagaccaggcacttcttcgccgccggtatgtctatcgcgaacgtctctatgcttgtcatgtcggttccaatccctattcgggatatagggacctgagtccgtctttgttccaatccgatgctgacctcaccccccgcgcgcgtgcttggctcagaagggagcttcaggttttccactttttgcgcccctctcgcgccatgcttgcgagcgagcataccatcactcgccgtcgcgcaatcaatgctgaatatcttcttgagtatattgttgccatcttaaaaacggtagatattcagggtagcgaggctgccgcgagggacatgttgaaggacttcctcggttcggagaacgcaactcagcttcttcatgaactgcgcaacttccttcgaagcccctggtctctcgcagagtgggatcgtaaggtacagtacccactgtcactgcctcatgggccaaaaggtcggggtgtagacactagacgtttgagggcggatgttgctcgtaattagagacctgtatatccaacctttgtggcgcgtaattgactcgtgaaaggagcccaacccgcgcgaagctagatatatgccttatgctttcgcccactgtatgctgtctgctcaagtttggctttagacctgtgatatctggcgtccgaccttgaaccgaataaactggccttgcgactaccagcctttgcgagggcataaccatatgcaagctatcgttcgaccaataatgtttcacttgtcgttcgtgttacccatgctctctatagagcagcaaactagaaggaaactgaaatgcaagcgttgagccgaatctccgctgtatctctcatgaagaccgggttgtactacccattcacaaatcatctttgtgatgcgccagcgtactgtactgcactattttttc

SEQ ID NO: 19041 - DNA, 1407 bp, Muscodor strobelii
  misc_feature: SGI cDNA ID NO. 566396
  misc_feature: Encodes the peptide sequence at SEQ ID NO 19042
atgactcgcccaccaccctccgattcggtacgatccatcgtagagaatgcgttgcctaatattaaagttacttctgtctctacgataccgacacaacggattgtaagaccctttgaagtgaggcttgctgatggcaaaacccttttgcttaacctatcaccgccaccttccagattacttcgatcagaacaatggctcgtccaatcagaggccgtggttgtagactggctgtccaaggacatctctctgcggcatggaagcaagactcgactaattgacgagaggaatgccgacaaggctacaccattacgcaggtcatcacggccatgggatcaccaatcagtctcagaactatctatttcactcacacagcaactagccaagtatcttccaactttgatcaaacactccttgacgacagccgaatatcgaactccatttggtctttatgaaccaacaccgggggaacccgtctctactctggccaggccactcactgagaagcaacggagagatctagacttccagagaggatgcttaatgcggcgtattgttgagcccacatctccgaatggaagcttcgggttggctgtaactgtgctcggctcgcctcctccaagcatagaggatgcccgtggaaaagcgagagagcctacactggacttcagcgggactgctagctggaggagaacgttccattcgctactcgagagcattcttcgagatggcgaggatctggctgtgactgtgagctacgaactggtcaggaaaacatttcacagatttgctcatctactagacgcggtcatgacaccacggttggtcgtgtttgatgtagacgaggacgagaatctgctggtttctggactcgaaagaaggcacgaaagccgtgcagaagacgagatgccgaagatgtcgataaaggaggaggaggaacctgaagagtatagcatccagctcactggattgcgagactggagtaactccatatttggagaccctttgtttgcaacagtcttctcgcatgcgactccagagttcgagtgtggctttcgccaacgtcccggttcgcgccatagcgatgacgaccgagaccaacctcaagatcgacgattcgccgacatcatcgaagatcccgacaatgctgcgacccgcgttttactctacgaatgctatcatgccacggtatctattgttaggcaattctatcggccgagcgccgatagtagcagacgcgaaattgccgctcgtagacggttgacggcagcactagcgaagctcgatcatatcaatgtcgagaccgaagaacgggaaggatctgcggggaaaagaccacgacgtcctagccgcgaagatttccccgtgaaacggtcaaagggtgatatggagatcaaaaaggaggtgtga

SEQ ID NO: 19042 - protein, 468 aa, Muscodor strobelii
  misc_feature: SGI Peptide ID NO. 566396
  misc_feature (1)..(457): NCBI GI: 256732878 Blast Desc: NECHADRAFT_92412 [Nectria haematococca mpVI 77-13-4]
  misc_feature (1)..(463): NCBI GI: 46136641 Blast Desc: FG09836.1 [Gibberella zeae PH-1]
  misc_feature (6)..(431): NCBI GI: 261361164 Blast Desc: conserved [Verticillium albo-atrum VaMs.102]
  misc_feature (1)..(460): NCBI GI: 116179612 Blast Desc: CHGG_00434 [Chaetomium globosum CBS 148.51] gi|88184731|gb|EAQ92199.1| CHGG_00434 [Chaetomium globosum CBS 148.51]
  misc_feature (1)..(437): NCBI GI: 145602680 Blast Desc: MGG_13007 [Magnaporthe grisea 70-15] gi|145011074|gb|EDJ95730.1| MGG_13007 [Magnaporthe grisea 70-15]
  misc_feature (1)..(430): NCBI GI: 189091830 Blast Desc: [Podospora anserina] gi|27803026|emb|CAD60729.1| protein product [Podospora anserina] gi|188219268|emb|CAP49248.1| protein product [Podospora anserina]
  misc_feature (224)..(428): NCBI GI: 85093499 Blast Desc: NCU02383 [Neurospora crassa OR74A] gi|28921153|gb|EAA30467.1| [Neurospora crassa OR74A]
  misc_feature (122)..(427): NCBI GI: 119187489 Blast Desc: CIMG_03792 [Coccidioides immitis RS]
  misc_feature (59)..(430): NCBI GI: 169617770 Blast Desc: SNOG_12066 [Phaeosphaeria nodorum SN15] gi|160703480|gb|EAT80478.2| SNOG_12066 [Phaeosphaeria nodorum SN15]
  misc_feature (147)..(427): NCBI GI: 259482245 Blast Desc: TPA: conserved [Aspergillus nidulans FGSC A4]
MTRPPPSDSVRSIVENALPNIKVTSVSTIPTQRIVRPFEVRLADGKTLLLNLSPPPSRLLRSEQWLVQSEAVVVDWLSKDISLRHGSKTRLIDERNADKATPLRRSSRPWDHQSVSELSISLTQQLAKYLPTLIKHSLTTAEYRTPFGLYEPTPGEPVSTLARPLTEKQRRDLDFQRGCLMRRIVEPTSPNGSFGLAVTVLGSPPPSIEDARGKAREPTLDFSGTASWRRTFHSLLESILRDGEDLAVTVSYELVRKTFHRFAHLLDAVMTPRLVVFDVDEDENLLVSGLERRHESRAEDEMPKMSIKEEEEPEEYSIQLTGLRDWSNSIFGDPLFATVFSHATPEFECGFRQRPGSRHSDDDRDQPQDRRFADIIEDPDNAATRVLLYECYHATVSIVRQFYRPSADSSRREIAARRRLTAALAKLDHINVETEEREGSAGKRPRRPSREDFPVKRSKGDMEIKKEV

SEQ ID NO: 19043 - DNA, 4063 bp, Muscodor strobelii
  misc_feature: SGI EST ID NO. CUFF.44681.0
  misc_feature: Variant of the nucleotide sequence at SEQ ID NO 19041
ctctctgcggcatggaagcaagactcgactaattgacgagaggaatgccgacaaggctacaccattacgcaggtcatcacggccatgggatcaccaatcagtctcagaactatctatttcactcacacagcaactagccaagtatcttccaactttgatcaaacactccttgacgacagccgaatatcgaactccatttggtctttatgaaccaacaccgggggaacccgtctctactctggccaggccactcactgagaagcaacggagagatctagacttccagagaggatgcttaatgcggcgtattgttgagcccacatctccgaatggaagcttcgggttggctgtaactgtgctcggctcgcctcctccaagcatagaggatgcccgtggaaaagcgagagagcctacactggacttcagcgggactgctagctggaggagaacgttccattcgctactcgagagcattcttcgagatggcgaggatctggctgtgactgtgagctacgaactggtcaggaaaacatttcacagatttgctcatctactagacgcggtcatgacaccacggttggtcgtgtttgatgtagacgaggacgagaatctgctggtttctggactcgaaagaaggcacgaaagccgtgcagaagacgagatgccgaagatgtcgataaaggaggaggaggaacctgaagagtatagcatccagctcactggattgcgagactggagtaactccatatttggagaccctttgtttgcaacagtcttctcgcatgcgactccagagttcgagtgtggctttcgccaacgtcccggttcgcgccatagcgatgacgaccgagaccaacctcaagatcgacgattcgccgacatcatcgaagatcccgacaatgctgcgacccgcgttttactctacgaatgctatcatgccacggtatctattgttaggcaattctatcggccgagcgccgatagtagcagacgcgaaattgccgctcgtagacggttgacggcagcactagcgaagctcgatcatatcaatgtcgagaccgaagaacgggaaggatctgcggggaaaagaccacgacgtcctagccgcgaagatttccccgtgaaacggtcaaagggtgatatggagatcaaaaaggaggtgtgataaaagaacggggctcgtatatacccgtcttctagctgtgtatattgacgcctgttcgactcaattcacctgagtcaccagctacgctacggaggaggctaggtcgggaagaggcaagcatatttcttcgtgtatatacacatacccacgcgtacatagaatatcataagcatagtcacgtcagcctttgcttcctactcgtagagctggacaataccctttatatcaacttcgcgatttcgagattcgcaacaggtctctgtccacgctaacttgcacgctgctcccgttatcatgacagtagaacccgaatttcgcttatagtcctcggaaacaaggctcgtaaggagggtgtatcttcatcctccacattactctgattctctagccactcatcagccaagatcaatagttcctctatatgttcaaagtcttcgcaaaattgttccgcagcctgctccgtgacctcatgccgaagttgagcgtcctgaagatgtctgacattttcccgggcatcatcaatggcagatggtaggaaatcatcgagcccttgactcgcatttccgagagcatcgggacgtattgagtctaggctgggtatactggcaatgtccttctcggagtctgctcgtaaagacttgagcgctgagaataacggcgcaagagaggattcagagactagaaatttgtactgagcctcgacaagcttggtggtgtgctcgtcgacgctcgagcgcagacgagcgagcctcgaccttgtaaagcgagagaatggctctaggatagattgcgcggctagcaaacaattgagccggaaaatagagttggacggcgtactgatgttgcgcgccatattttcgcagcccgcgaggaaagggtcaaaggcttccgcgagtatggaatgaaagtcatccgcctcctcatcgacgctattggatgacacaactgatgtttcgtacgtctgcatgatcgctgtgagttgcttcagggcttcctgaagaaagtcaggaggccctaggtcagctggtgtgtgttggaagccgccctgtagtgtggtgatgtggtcgcgcatgagggagcggaaatgtcgcaaagcttcggcctcgagatttgccatgcactgtaacaagatagcgtcgctatcttcggtagtgcctagaagtcgcgagaatgtgaaccggtagaatccgagcagattggcgagtttatatgccagaatcgtctcctcattgctctggattacttgctcgatgcgttgccgtaggatcctcgcggcgcccgataggtcgcggtctacgagctcgctgagcgccttggccccatcgaactcgggtggagcttcatcgccttcgtcggccatgagacgccaaaactcattctcccggccctcttgtattcccttggcgatttcattgccgtctgaaacgaacagggcctctaacgcttcgcgctcactaactgttgccgagtgcgcccatgcgagcatgtcgcctacatagcgcaaggggtcgtgtgcagcaagctctatcggcttgatagtgctatctttagcacccgatgacgaagttccagtgagggctaaataaaatgagtccgagaggatttgctcgcgagcttcggcgaagaagtccagacaactctggaagagagagggtcgctcagccagcatacgcagcgcacgacgcaccgaagagttgatttgaggggcttccaagttcagagtcttgaattctttctggatccagcggtagagtttttggaaggcatgattcaggtacttggttgtttgttctataacgtctaaacccaaagtctggttctcgaagcccaagagaatttcgcagtctttccgtatgcgtttcgccttggcgagcacgacgaagaattggtcatcgataggctctgaagtcagagtcagagacgcaacctcatcatcggtgagggtgaagcgtgcacggaaagctgtcaacagctgctgctttgtctctatggttttcctctgggctatgagagaggacgcttcgtctatagtcgaggctgtagtggcatgagctgcagagatatggctcttcatatcctggtagctcttattgagcctgtcaatggtggagccgatacgtctcagttgctgcgttgacggtcaatgatgtgggcgtttcccaaggcagcaagggataacagcaaaatacctcggctacgcgaccgaactcggcgatgatctggccgttggtgtcaatgacctccttttggacatcgagacgcagctgtcgcctcgtctcggcggagttggttacggcacgatcatccagcaaggccaaggcagcgcgaaagtcggcatctgcataggaagttgagaggacggtggtgactttagaggatataggatttgctaatttgctattcagacccggactggaaggagtggcaggagataggggtccgggtgaagtagcgttacgaggcggcaactgaagcagccctggaccgttggaaaccatggtctgggagttgagatgtgaaaagggtgacagttatgggttcagattacttgatgcatggcgaaagagggaaacatgagtgagttggcagatagaagatgaattcacagcgttggggtgagcggtgatcgatctacctaggtatcctagggaaacagttttgtctcctccgtctctttctctgtgtctgccggtctcctggtgtttgggccaatatactgattacatacatggcatacctagtatgtctgtttatcattacgatcgtgtgtgtattccaggctcacaccgtaatgctgcggggcggttggtggcagctggcagagctcaatgctcacagggagagaggttcctaccttaggctggctgccctctcaggagttgccattctcccgctccg

SEQ ID NO: 19044 - DNA, 867 bp, Muscodor strobelii
  misc_feature: SGI cDNA ID NO. 566397
  misc_feature: Encodes the peptide sequence at SEQ ID NO 19045
atgcggcgtattgttgagcccacatctccgaatggaagcttcgggttggctgtaactgtgctcggctcgcctcctccaagcatagaggatgcccgtggaaaagcgagagagcctacactggacttcagcgggactgctagctggaggagaacgttccattcgctactcgagagcattcttcgagatggcgaggatctggctgtgactgtgagctacgaactggtcaggaaaacatttcacagatttgctcatctactagacgcggtcatgacaccacggttggtcgtgtttgatgtagacgaggacgagaatctgctggtttctggactcgaaagaaggcacgaaagccgtgcagaagacgagatgccgaagatgtcgataaaggaggaggaggaacctgaagagtatagcatccagctcactggattgcgagactggagtaactccatatttggagaccctttgtttgcaacagtcttctcgcatgcgactccagagttcgagtgtggctttcgccaacgtcccggttcgcgccatagcgatgacgaccgagaccaacctcaagatcgacgattcgccgacatcatcgaagatcccgacaatgctgcgacccgcgttttactctacgaatgctatcatgccacggtatctattgttaggcaattctatcggccgagcgccgatagtagcagacgcgaaattgccgctcgtagacggttgacggcagcactagcgaagctcgatcatatcaatgtcgagaccgaagaacgggaaggatctgcggggaaaagaccacgacgtcctagccgcgaagatttccccgtgaaacggtcaaagggtgatatggagatcaaaaaggaggtgtga

SEQ ID NO: 19045 - protein, 288 aa, Muscodor strobelii
  misc_feature: SGI Peptide ID NO. 566397
  misc_feature (1)..(279): NCBI GI: 256732878 Blast Desc: NECHADRAFT_92412 [Nectria haematococca mpVI 77-13-4]
  misc_feature (1)..(283): NCBI GI: 46136641 Blast Desc: FG09836.1 [Gibberella zeae PH-1]
  misc_feature (2)..(251): NCBI GI: 261361164 Blast Desc: conserved [Verticillium albo-atrum VaMs.102]
  misc_feature (8)..(280): NCBI GI: 116179612 Blast Desc: CHGG_00434 [Chaetomium globosum CBS 148.51] gi|88184731|gb|EAQ92199.1| CHGG_00434 [Chaetomium globosum CBS 148.51]
  misc_feature (1)..(257): NCBI GI: 145602680 Blast Desc: MGG_13007 [Magnaporthe grisea 70-15] gi|145011074|gb|EDJ95730.1| MGG_13007 [Magnaporthe grisea 70-15]
  misc_feature (44)..(248): NCBI GI: 85093499 Blast Desc: NCU02383 [Neurospora crassa OR74A] gi|28921153|gb|EAA30467.1| [Neurospora crassa OR74A]
  misc_feature (2)..(250): NCBI GI: 189091830 Blast Desc: [Podospora anserina] gi|27803026|emb|CAD60729.1| protein product [Podospora anserina] gi|188219268|emb|CAP49248.1| protein product [Podospora anserina]
  misc_feature (44)..(250): NCBI GI: 169617770 Blast Desc: SNOG_12066 [Phaeosphaeria nodorum SN15] gi|160703480|gb|EAT80478.2| SNOG_12066 [Phaeosphaeria nodorum SN15]
  misc_feature (44)..(250): NCBI GI: 119187489 Blast Desc: CIMG_03792 [Coccidioides immitis RS]
  misc_feature (44)..(247): NCBI GI: 259482245 Blast Desc: TPA: conserved [Aspergillus nidulans FGSC A4]
MRRIVEPTSPNGSFGLAVTVLGSPPPSIEDARGKAREPTLDFSGTASWRRTFHSLLESILRDGEDLAVTVSYELVRKTFHRFAHLLDAVMTPRLVVFDVDEDENLLVSGLERRHESRAEDEMPKMSIKEEEEPEEYSIQLTGLRDWSNSIFGDPLFATVFSHATPEFECGFRQRPGSRHSDDDRDQPQDRRFADIIEDPDNAATRVLLYECYHATVSIVRQFYRPSADSSRREIAARRRLTAALAKLDHINVETEEREGSAGKRPRRPSREDFPVKRSKGDMEIKKEV

SEQ ID NO: 19046 - DNA, 4063 bp, Muscodor strobelii; identical to SEQ ID NO: 19043
  misc_feature: SGI EST ID NO. CUFF.44681.0
  misc_feature: Variant of the nucleotide sequence at SEQ ID NO 19044

SEQ ID NO: 19047 - DNA, 2145 bp, Muscodor strobelii
  misc_feature: SGI cDNA ID NO. 566398
  misc_feature: Encodes the peptide sequence at SEQ ID NO 19048
atggtttccaacggtccagggctgcttcagttgccgcctcgtaacgctacttcacccggacccctatctcctgccactccttccagtccgggtctgaatagcaaattagcaaatcctatatcctctaaagtcaccaccgtcctctcaacttcctatgcagatgccgactttcgcgctgccttggccttgctggatgatcgtgccgtaaccaactccgccgagacgaggcgacagctgcgtctcgatgtccaaaaggaggtcattgacaccaacggccagatcatcgccgagttcggtcgcgtagccgagcaactgagacgtatcggctccaccattgacaggctcaataagagctaccaggatatgaagagccatatctctgcagctcatgccactacagcctcgactatagacgaagcgtcctctctcatagcccagaggaaaaccatagagacaaagcagcagctgttgacagctttccgtgcacgcttcaccctcaccgatgatgaggttgcgtctctgactctgacttcagagcctatcgatgaccaattcttcgtcgtgctcgccaaggcgaaacgcatacggaaagactgcgaaattctcttgggcttcgagaaccagactttgggtttagacgttatagaacaaacaaccaagtacctgaatcatgccttccaaaaactctaccgctggatccagaaagaattcaagactctgaacttggaagcccctcaaatcaactcttcggtgcgtcgtgcgctgcgtatgctggctgagcgaccctctctcttccagagttgtctggacttcttcgccgaagctcgcgagcaaatcctctcggactcattttatttagccctcactggaacttcgtcatcgggtgctaaagatagcactatcaagccgatagagcttgctgcacacgaccccttgcgctatgtaggcgacatgctcgcatgggcgcactcggcaacagttagtgagcgcgaagcgttagaggccctgttcgtttcagacggcaatgaaatcgccaagggaatacaagagggccgggagaatgagttttggcgtctcatggccgacgaaggcgatgaagctccacccgagttcgatggggccaaggcgctcagcgagctcgtagaccgcgacctatcgggcgccgcgaggatcctacggcaacgcatcgagcaagtaatccagagcaatgaggagacgattctggcatataaactcgccaatctgctcggattctaccggttcacattctcgcgacttctaggcactaccgaagatagcgacgctatcttgttacagtgcatggcaaatctcgaggccgaagctttgcgacatttccgctccctcatgcgcgaccacatcaccacactacagggcggcttccaacacacaccagctgacctagggcctcctgactttcttcaggaagccctgaagcaactcacagcgatcatgcagacgtacgaaacatcagttgtgtcatccaatagcgtcgatgaggaggcggatgactttcattccatactcgcggaagcctttgaccctttcctcgcgggctgcgaaaatatggcgcgcaacatcagtacgccgtccaactctattttccggctcaattgtttgctagccgcgcaatctatcctagagccattctctcgctttacaaggtcgaggctcgctcgtctgcgctcgagcgtcgacgagcacaccaccaagcttgtcgaggctcagtacaaatttctagtctctgaatcctctcttgcgccgttattctcagcgctcaagtctttacgagcagactccgagaaggacattgccagtatacccagcctagactcaatacgtcccgatgctctcggaaatgcgagtcaagggctcgatgatttcctaccatctgccattgatgatgcccgggaaaatgtcagacatcttcaggacgctcaacttcggcatgaggtcacggagcaggctgcggaacaattttgcgaagactttgaacatatagaggaactattgatcttggctgatgagtggctagagaatcagagtaatgtggaggatgaagatacaccctccttacgagccttgtttccgaggactataagcgaaattcgggttctactgtcatga

SEQ ID NO: 19048 - protein, 714 aa, Muscodor strobelii
  misc_feature: SGI Peptide ID NO. 566398
  misc_feature (59)..(713): Pfam Id: PF06419 Pfam Desc: Conserved oligomeric complex COG6
  misc_feature (59)..(337): Pfam Id: PF06419 Pfam Desc: Conserved oligomeric complex COG6
  misc_feature (372)..(609): Pfam Id: PF06419 Pfam Desc: Conserved oligomeric complex COG6
  misc_feature (16)..(714): NCBI GI: 116179648 Blast Desc: CHGG_00452 [Chaetomium globosum CBS 148.51] gi|121792303|sp|Q2HH52.1|COG6_CHAGB RecName: Full=Conserved oligomeric Golgi complex subunit 6; Short=COG complex subunit 6;
  misc_feature (9)..(714): NCBI GI: 164427107 Blast Desc: NCU02421 [Neurospora crassa OR74A] gi|190358860|sp|Q7S4D8.2|COG6_NEUCR RecName: Full=Conserved oligomeric Golgi complex subunit 6; Short=COG complex subunit 6;
  misc_feature (20)..(714): NCBI GI: 145602666 Blast Desc: MGG_09558 [Magnaporthe grisea 70-15] gi|190358784|sp|A4QUK5.1|COG6_MAGGR RecName: Full=Conserved oligomeric Golgi complex subunit 6; Short=COG complex subunit 6;
  misc_feature (1)..(714): NCBI GI: 256732869 Blast Desc: [Nectria haematococca mpVI 77-13-4]
  misc_feature (35)..(714): NCBI GI: 189091794 Blast Desc: [Podospora anserina] gi|27803007|emb|CAD60710.1| protein product [Podospora anserina] gi|188219250|emb|CAP49230.1| protein product [Podospora anserina]
  misc_feature (23)..(714): NCBI GI: 261361146 Blast Desc: conserved [Verticillium albo-atrum VaMs.102]
  misc_feature (8)..(714): NCBI GI: 46136669 Blast Desc: FG09850.1 [Gibberella zeae PH-1]
  misc_feature (18)..(714): NCBI GI: 156050737 Blast Desc: SS1G_07956 [Sclerotinia sclerotiorum 1980] gi|190358794|sp|A7ERK2.1|COG6_SCLS1 RecName: Full=Conserved oligomeric Golgi complex subunit 6; Short=COG complex subunit 6;
  misc_feature (22)..(714): NCBI GI: 169600619 Blast Desc: SNOG_03151 [Phaeosphaeria nodorum SN15] gi|121925894|sp|Q0UYL3.1|COG6_PHANO RecName: Full=Conserved oligomeric Golgi complex subunit 6; Short=COG complex subunit 6;
  misc_feature (15)..(714): NCBI GI: 189191722 Blast Desc: conserved [Pyrenophora tritici-repentis Pt-1C-BFP] gi|187973806|gb|EDU41305.1| conserved [Pyrenophora tritici-repentis Pt-1C-BFP]
MVSNGPGLLQLPPRNATSPGPLSPATPSSPGLNSKLANPISSKVTTVLSTSYADADFRAALALLDDRAVTNSAETRRQLRLDVQKEVIDTNGQIIAEFGRVAEQLRRIGSTIDRLNKSYQDMKSHISAAHATTASTIDEASSLIAQRKTIETKQQLLTAFRARFTLTDDEVASLTLTSEPIDDQFFVVLAKAKRIRKDCEILLGFENQTLGLDVIEQTTKYLNHAFQKLYRWIQKEFKTLNLEAPQINSSVRRALRMLAERPSLFQSCLDFFAEAREQILSDSFYLALTGTSSSGAKDSTIKPIELAAHDPLRYVGDMLAWAHSATVSEREALEALFVSDGNEIAKGIQEGRENEFWRLMADEGDEAPPEFDGAKALSELVDRDLSGAARILRQRIEQVIQSNEETILAYKLANLLGFYRFTFSRLLGTTEDSDAILLQCMANLEAEALRHFRSLMRDHITTLQGGFQHTPADLGPPDFLQEALKQLTAIMQTYETSVVSSNSVDEEADDFHSILAEAFDPFLAGCENMARNISTPSNSIFRLNCLLAAQSILEPFSRFTRSRLARLRSSVDEHTTKLVEAQYKFLVSESSLAPLFSALKSLRADSEKDIASIPSLDSIRPDALGNASQGLDDFLPSAIDDARENVRHLQDAQLRHEVTEQAAEQFCEDFEHIEELLILADEWLENQSNVEDEDTPSLRALFPRTISEIRVLLS

SEQ ID NO: 19049 - DNA, 4002 bp, Muscodor strobelii
  misc_feature: SGI EST ID NO. CUFF.44682.1
  misc_feature: Variant of the nucleotide sequence at SEQ ID NO 19047
cggagcgggagaatggcaactcctgagagggcagccagcctaaggtaggaacctctctccctgtgagcattgagctctgccagctgccaccaaccgccccgcagcattacggtgtgagcctggaatacacacacgatcgtaatgataaacagacatactaggtatgccatgtatgtaatcagtatattggcccaaacaccaggagaccggcagacacagagaaagagacggaggagacaaaactgtttccctaggatacctaggtagatcgatcaccgctcaccccaacgctgtgaattcatcttctatctgccaactcactcatgtttccctctttcgccatgcatcaagtaatctgaacccataactgtcacccttttcacatctcaactcccagaccatggtttccaacggtccagggctgcttcagttgccgcctcgtaacgctacttcacccggacccctatctcctgccactccttccagtccgggtctgaatagcaaattagcaaatcctatatcctctaaagtcaccaccgtcctctcaacttcctatgcagatgccgactttcgcgctgccttggccttgctggatgatcgtgccgtaaccaactccgccgagacgaggcgacagctgcgtctcgatgtccaaaaggaggtcattgacaccaacggccagatcatcgccgagttcggtcgcgtagccgagcaactgagacgtatcggctccaccattgacaggctcaataagagctaccaggatatgaagagccatatctctgcagctcatgccactacagcctcgactatagacgaagcgtcctctctcatagcccagaggaaaaccatagagacaaagcagcagctgttgacagctttccgtgcacgcttcaccctcaccgatgatgaggttgcgtctctgactctgacttcagagcctatcgatgaccaattcttcgtcgtgctcgccaaggcgaaacgcatacggaaagactgcgaaattctcttgggcttcgagaaccagactttgggtttagacgttatagaacaaacaaccaagtacctgaatcatgccttccaaaaactctaccgctggatccagaaagaattcaagactctgaacttggaagcccctcaaatcaactcttcggtgcgtcgtgcgctgcgtatgctggctgagcgaccctctctcttccagagttgtctggacttcttcgccgaagctcgcgagcaaatcctctcggactcattttatttagccctcactggaacttcgtcatcgggtgctaaagatagcactatcaagccgatagagcttgctgcacacgaccccttgcgctatgtaggcgacatgctcgcatgggcgcactcggcaacagttagtgagcgcgaagcgttagaggccctgttcgtttcagacggcaatgaaatcgccaagggaatacaagagggccgggagaatgagttttggcgtctcatggccgacgaaggcgatgaagctccacccgagttcgatggggccaaggcgctcagcgagctcgtagaccgcgacctatcgggcgccgcgaggatcctacggcaacgcatcgagcaagtaatccagagcaatgaggagacgattctggcatataaactcgccaatctgctcggattctaccggttcacattctcgcgacttctaggcactaccgaagatagcgacgctatcttgttacagtgcatggcaaatctcgaggccgaagctttgcgacatttccgctccctcatgcgcgaccacatcaccacactacagggcggcttccaacacacaccagctgacctagggcctcctgactttcttcaggaagccctgaagcaactcacagcgatcatgcagacgtacgaaacatcagttgtgtcatccaatagcgtcgatgaggaggcggatgactttcattccatactcgcggaagcctttgaccctttcctcgcgggctgcgaaaatatggcgcgcaacatcagtacgccgtccaactctattttccggctcaattgtttgctagccgcgcaatctatcctagagccattctctcgctttacaaggtcgaggctcgctcgtctgcgctcgagcgtcgacgagcacaccaccaagcttgtcgaggctcagtacaaatttctagtctctgaatcctctcttgcgccgttattctcagcgctcaagtctttacgagcagactccgagaaggacattgccagtatacccagcctagactcaatacgtcccgatgctctcggaaatgcgagtcaagggctcgatgatttcctaccatctgccattgatgatgcccgggaaaatgtcagacatcttcaggacgctcaacttcggcatgaggtcacggagcaggctgcggaacaattttgcgaagactttgaacatatagaggaactattgatcttggctgatgagtggctagagaatcagagtaatgtggaggatgaagatacaccctccttacgagccttgtttccgaggactataagcgaaattcgggttctactgtcatgataacgggagcagcgtgcaagttagcgtggacagagacctgttgcgaatctcgaaatcgcgaagttgatataaagggtattgtccagctctacgagtaggaagcaaaggctgacgtgactatgcttatgatattctatgtacgcgtgggtatgtgtatatacacgaagaaatatgcttgcctcttcccgacctagcctcctccgtagcgtagctggtgactcaggtgaattgagtcgaacaggcgtcaatatacacagctagaagacgggtatatacgagccccgttcttttatcacacctcctttttgatctccatatcaccctttgaccgtttcacggggaaatcttcgcggctaggacgtcgtggtcttttccccgcagatccttcccgttcttcggtctcgacattgatatgatcgagcttcgctagtgctgccgtcaaccgtctacgagcggcaatttcgcgtctgctactatcggcgctcggccgatagaattgcctaacaatagataccgtggcatgatagcattcgtagagtaaaacgcgggtcgcagcattgtcgggatcttcgatgatgtcggcgaatcgtcgatcttgaggttggtctcggtcgtcatcgctatggcgcgaaccgggacgttggcgaaagccacactcgaactctggagtcgcatgcgagaagactgttgcaaacaaagggtctccaaatatggagttactccagtctcgcaatccagtgagctggatgctatactcttcaggttcctcctcctcctttatcgacatcttcggcatctcgtcttctgcacggctttcgtgccttctttcgagtccagaaaccagcagattctcgtcctcgtctacatcaaacacgaccaaccgtggtgtcatgaccgcgtctagtagatgagcaaatctgtgaaatgttttcctgaccagttcgtagctcacagtcacagccagatcctcgccatctcgaagaatgctctcgagtagcgaatggaacgttctcctccagctagcagtcccgctgaagtccagtgtaggctctctcgcttttccacgggcatcctctatgcttggaggaggcgagccgagcacagttacagccaacccgaagcttccattcggagatgtgggctcaacaatacgccgcattaagcatcctctctggaagtctagatctctccgttgcttctcagtgagtggcctggccagagtagagacgggttcccccggtgttggttcataaagaccaaatggagttcgatattcggctgtcgtcaaggagtgtttgatcaaagttggaagatacttggctagttgctgtgtgagtgaaatagatagttctgagactgattggtgatcccatggccgtgatgacctgcgtaatggtgtagccttgtcggcattcctctcgtcaattagtcgagtcttgcttccatgccgcagagag

SEQ ID NO: 19050 - DNA, 1068 bp, Muscodor strobelii
  misc_feature: SGI cDNA ID NO. 566399
  misc_feature: Encodes the peptide sequence at SEQ ID NO 19051
atggccgacgaaggcgatgaagctccacccgagttcgatggggccaaggcgctcagcgagctcgtagaccgcgacctatcgggcgccgcgaggatcctacggcaacgcatcgagcaagtaatccagagcaatgaggagacgattctggcatataaactcgccaatctgctcggattctaccggttcacattctcgcgacttctaggcactaccgaagatagcgacgctatcttgttacagtgcatggcaaatctcgaggccgaagctttgcgacatttccgctccctcatgcgcgaccacatcaccacactacagggcggcttccaacacacaccagctgacctagggcctcctgactttcttcaggaagccctgaagcaactcacagcgatcatgcagacgtacgaaacatcagttgtgtcatccaatagcgtcgatgaggaggcggatgactttcattccatactcgcggaagcctttgaccctttcctcgcgggctgcgaaaatatggcgcgcaacatcagtacgccgtccaactctattttccggctcaattgtttgctagccgcgcaatctatcctagagccattctctcgctttacaaggtcgaggctcgctcgtctgcgctcgagcgtcgacgagcacaccaccaagcttgtcgaggctcagtacaaatttctagtctctgaatcctctcttgcgccgttattctcagcgctcaagtctttacgagcagactccgagaaggacattgccagtatacccagcctagactcaatacgtcccgatgctctcggaaatgcgagtcaagggctcgatgatttcctaccatctgccattgatgatgcccgggaaaatgtcagacatcttcaggacgctcaacttcggcatgaggtcacggagcaggctgcggaacaattttgcgaagactttgaacatatagaggaactattgatcttggctgatgagtggctagagaatcagagtaatgtggaggatgaagatacaccctccttacgagccttgtttccgaggactataagcgaaattcgggttctactgtcatga

SEQ ID NO: 19051 - protein, 355 aa, Muscodor strobelii
  misc_feature: SGI Peptide ID NO. 566399
  misc_feature (13)..(250): Pfam Id: PF06419 Pfam Desc: Conserved oligomeric complex COG6
  misc_feature (1)..(355): NCBI GI: 116179648 Blast Desc: CHGG_00452 [Chaetomium globosum CBS 148.51] gi|121792303|sp|Q2HH52.1|COG6_CHAGB RecName: Full=Conserved oligomeric Golgi complex subunit 6; Short=COG complex subunit 6;
  misc_feature (12)..(355): NCBI GI: 261361146 Blast Desc: conserved [Verticillium albo-atrum VaMs.102]
  misc_feature (1)..(355): NCBI GI: 164427107 Blast Desc: NCU02421 [Neurospora crassa OR74A] gi|190358860|sp|Q7S4D8.2|COG6_NEUCR RecName: Full=Conserved oligomeric Golgi complex subunit 6; Short=COG complex subunit 6;
  misc_feature (1)..(355): NCBI GI: 145602666 Blast Desc: MGG_09558 [Magnaporthe grisea 70-15] gi|190358784|sp|A4QUK5.1|COG6_MAGGR RecName: Full=Conserved oligomeric Golgi complex subunit 6; Short=COG complex subunit 6;
  misc_feature (1)..(355): NCBI GI: 189091794 Blast Desc: [Podospora anserina] gi|27803007|emb|CAD60710.1| protein product [Podospora anserina] gi|188219250|emb|CAP49230.1| protein product [Podospora anserina]
  misc_feature (4)..(355): NCBI GI: 156050737 Blast Desc: SS1G_07956 [Sclerotinia sclerotiorum 1980] gi|190358794|sp|A7ERK2.1|COG6_SCLS1 RecName: Full=Conserved oligomeric Golgi complex subunit 6; Short=COG complex subunit 6;
  misc_feature (12)..(355): NCBI GI: 46136669 Blast Desc: FG09850.1 [Gibberella zeae PH-1]
  misc_feature (4)..(355): NCBI GI: 256732869 Blast Desc: [Nectria haematococca mpVI 77-13-4]
  misc_feature (5)..(355): NCBI GI: 189191722 Blast Desc: conserved [Pyrenophora tritici-repentis Pt-1C-BFP] gi|187973806|gb|EDU41305.1| conserved [Pyrenophora tritici-repentis Pt-1C-BFP]
  misc_feature (6)..(355): NCBI GI: 169600619 Blast Desc: SNOG_03151 [Phaeosphaeria nodorum SN15] gi|121925894|sp|Q0UYL3.1|COG6_PHANO RecName: Full=Conserved oligomeric Golgi complex subunit 6; Short=COG complex subunit 6;
MADEGDEAPPEFDGAKALSELVDRDLSGAARILRQRIEQVIQSNEETILAYKLANLLGFYRFTFSRLLGTTEDSDAILLQCMANLEAEALRHFRSLMRDHITTLQGGFQHTPADLGPPDFLQEALKQLTAIMQTYETSVVSSNSVDEEADDFHSILAEAFDPFLAGCENMARNISTPSNSIFRLNCLLAAQSILEPFSRFTRSRLARLRSSVDEHTTKLVEAQYKFLVSESSLAPLFSALKSLRADSEKDIASIPSLDSIRPDALGNASQGLDDFLPSAIDDARENVRHLQDAQLRHEVTEQAAEQFCEDFEHIEELLILADEWLENQSNVEDEDTPSLRALFPRTISEIRVLLS

SEQ ID NO: 19052 - DNA, 4002 bp, Muscodor strobelii; identical to SEQ ID NO: 19049
  misc_feature: SGI EST ID NO. CUFF.44682.1
  misc_feature: Variant of the nucleotide sequence at SEQ ID NO 19050

SEQ ID NO: 19053 - DNA, 344 bp, Muscodor strobelii
  misc_feature: SGI cDNA ID NO. 566400
  misc_feature: Reduced expression when VOC is produced
  misc_feature: Encodes the peptide sequence at SEQ ID NO 19054
atgcctcgccatctgctctcggacctccctcccgaccacgacgaccggcccttctaccagcagctccgagacgaccgcctggacgaggagaacctggcccacgacttccacgaccacgacctcgatctcgaccacggccaccgccttgccctcgacgacagccgcatctcctcgcggagcaccgtcgcccccgccgcctcgaccgccgcaaggcaaccgctccagcaacaccaacagcgccagcaacgccagcaacgccaacaacgccccgaggcgcgctggctgctcaacgaagacgacggtgacggcgatggcgatggcgacaacgatgtccccgcctcccc

SEQ ID NO: 19054 - protein, 114 aa, Muscodor strobelii
  misc_feature: SGI Peptide ID NO. 566400
  misc_feature (1)..(114): NCBI GI: 189091792 Blast Desc: [Podospora anserina] gi|73619465|sp|Q875A7.1|ATG9_PODAN RecName: Full=Autophagy-related protein 9 gi|27803006|emb|CAD60709.1|
  misc_feature: Useful for introducing or modulating the production of volatile compounds
MPRHLLSDLPPDHDDRPFYQQLRDDRLDEENLAHDFHDHDLDLDHGHRLALDDSRISSRSTVAPAASTAARQPLQQHQQRQQRQQRQQRPEARWLLNEDDGDGDGDGDNDVPAS

SEQ ID NO: 19055 - DNA, 829 bp, Muscodor strobelii
  misc_feature: SGI EST ID NO. CUFF.44672.0
  misc_feature: Variant of the nucleotide sequence at SEQ ID NO 19053
tgatcacgcgaataaaggacatcacgtagaaagagtgaacacaatagatgggtccgcatcttgtttggaagtgcctaggcaagtaggtggtgctcaagatccgtcattcaccaccaggccttttgctccttggcccttggtccttgctcatcgctgcttgcttctcgcttcttgcttctcgctctgtctctcctcccgccatctcaagttctgactcctgccctctgtctgtctcttgttggcctcttgtcaatctgactggggcagcttctgtgtagagctttctcccgcttaagccattgtcagcagaacatagaatacacgaactgccagttgccctggtgggtgtatggcatgcacatctacatacccagcttgatgctacatattctcgtctcgccctgtgtccgatactcaacggctgttggtgtataatgttgtgaaatcagccatcgctccctgctgcaccaccatcgcgagagtgttgccagccatgcctcgccatctgctctcggacctccctcccgaccacgacgaccggcccttctaccagcagctccgagacgaccgcctggacgaggagaacctggcccacgacttccacgaccacgacctcgatctcgaccacggccaccgccttgccctcgacgacagccgcatctcctcgcggagcaccgtcgcccccgccgcctcgaccgccgcaaggcaaccgctccagcaacaccaacagcgccagcaacgccagcaacgccaacaacgccccgaggcgcgctggctgctcaacgaagacgacggtgacggcgatggcgatggcgacaacgatgtcccc

SEQ ID NO: 19056 - DNA, 4365 bp, Muscodor strobelii
  misc_feature: SGI cDNA ID NO. 566401
  misc_feature: Encodes the peptide sequence at SEQ ID NO 19057
atgaggccctcgagaccgctctcgcctccgtggccgtcggctgcgctcctcctgctcgccgccctgctctgggcgggctttgccggcgccaagtccgagcccagcatcgtcgtcaccccgttccaatccgccccgggcatccccagctacttccccgactccaatgccgtcctgctgcaggagaccggcccgtctcgcgcggtctggcgctctgccgacggcggagtccactgggccaaggtcgagggcatcgaccacgacgccgccgtcgccctcgtcatgcacgaacacgaccccgcgcgcgcctacgtcctgaccctcggcaacaagcactggaagacccacgaccgcggagagacctggcagcccttcctcaccggcgcctacctcagcgacttcgtcgagacctggggcagctggatggtcttccacgcccaggacccggacaagatcctcttcaccggcatggagtgcgagggcttcttctgcgaggagttcgtcatgtacaccaccgacggcttcggctccgtcgacctcctgcgccgcgccacccagggctgctcgtgggccaagacctcggcgagcttcaccaccggacagcccgacctggacgcctcccgcgtcatgtgcatcgtgaaggccggctacttcgccgaccagtccgagaaccgcctcttcatgtcagacaactacttccagcccgccgaggccagcggccagctgcaagaaaaggaggtcaacctcaacggcttcagccccgtccagggtgttgtccggatcgtcgaggccaagaagtatctcctggccgccaccacgtcgcgtgccaccgccgagatggctctcttcgtcaccgacgacgcccagacctggcaccgcgccatcttcccgcaagaccaccccatcatagaaaatgcgtacacggtcctggagagcacaaactacagcatccagatcgatgtgcgcaccaacaagcgcacgtctagccccatggggaccttgctcaccagcaattccaatggcacctactttacccggaacatagagcacaccaatcgcgacacgaccgccatcgtcgactttgagaaggtcacgggcatccagggcatcttcctagtcaatcaggtggacaactgggagaaagtggaggcagatggtgctacgaagaagattaagaccgtcattacctttgacgatggcagaaccttcgagcccatcaagaccggcgatgaagagatacacctgcattccgtcacggagctgaacaatgtcggtcctctcttcacgagcccagccccaggcctcgtcatgggcaatggcaactcgggggatcatctacaagactactggagttctcatctctatgtatctgacgatgcaggaaagacgtggctgaaaggacctgatggcccgcacaagtacgaatttggtgatcaaggatccatcttactggctgttcagcacagcaaggaggccgacgtgcgtgaagtcaagtactcacttgatcacggtcagaactgggtgccgatcaagctgcctggtgatctcagcatcgcacccggggttctcgtgacgacacaagactcgacgagcctaaagttcttgctcacggcccaaaatgcagcgggcgatgcagcgttcagtgttatttccatcgactttgaaggattacatgaagacacgtgtaagaagggcgacatggaagactggttcgcgcggaaaggtgaggatggcaagcctagttgtataatgggccatacccagcaataccttcggcgcaagaaggatgccaaatgtttcatcaaacacgagtttcaggaagcactccccgaaccttctccctgccaatgctccgatctcgacttcgagtgcgacttcaacttcgccagggacggggcggaatgcaagccaataggcccgattctcgcccccgagggtgcttgccgaggtgataacccggacgaaactttcaagggcacatcaggctggcggcgtatccctggaaacgactgtgcaggtggtgtgaagaaggacgagcagagagagtggaatatgtcccataagggtgagatcgctatcacgcatgatcatggcaagaaatgggctgcagtaaaggaattgaagggccaagaaatacgagagatcgtaacgcatccttatgtcaaagacatggcattcttcatcacggcgaaagacaaggtctactatacaacagataggggtaagagcgtggatttcttcgagccacgtgatccagcggcgagggaccggccgctcgcttttcatcctaatcggccggactggcttatatggcatggcaaaagatgtcctgaatccaaaccctgctacgtcgaagctacgatctccattgaccgcggcttcacctggaacattctcaagcgatacgtgggcaagtgtgagttcacaggctcgaacgcatatagtttccgccccaagacacagattgtttgctctgccagagctcatgaggatgacgatccagaaggcaatccgctccaactattctacacggatgaattccccaaggaggagttcaacatgacgctgaacaacgtgaaagactttgccaccatgaatgaattcatcgttgtggcaaccgaggatccagacaacggtacccttagtgctcttgccagtatcgacggcaagaagtacgccgatgcgcatttcccgttcggtttcaaagtacctcatcgaaatgcatacactgtgcttgattcgtcaacccatgcggtcaatctcttcgtcgccacagagaccgaaaataatcgtcagtatggctctatcttaaagagcaactcgaatgggacatcgtatgtgatgagcatctcgggtgtgaactgcgacgatggatacttcgttgatttcgagaaaatgctggggctggagggcgttgcggtcgtgaacaccgtcgtcaaccgggacagcgattccgaaccgaaaacgctgcagtccagaatcagtcacaacgatggtgcgcagtggtcttttatcccgcctccagtccaggattcggaaggcaagccatacgcttgctcgagtaaatcaggcgacgagggttgtgccctccatatacatggttacactgagcgacctgaccgtcgcaaaacctattcatccgagtcagcggttggactcatgtttgccaatggcaatgttggccccattctcggcgacggaaaagaagtcgacacattcatgacacaggacgctggcttcacatggcgcgaggtgaagaaaggcgattggacatggtcgtttggggaccaaggttccattatcgtgcttgcaccaaggcatgcgaagaccaagacggtctcctattcgtacgatcgtggcatcacatgggatgagaagcagatttccgactcagaagtcaccattacagatatcactaccctacgatctggatcttcccgcaatttcatcgtttggggaaacaaaggagatggcctattcacagtcaatctcgacttctccggcgtgagggacaagctatgtattcatgatgaaaaggacgccgaaaaatccgattacgagctttggtctccgcagcatccgatgtctgcgaacggctgcttatttggtcacaaaaaccagtacctgcggaagaaaaccgatcgcgtctgttacaatgatatgaagcttcagaatgcctacaaagtggagaattgcgaatgtgagagggcggatttcgagtgcgattataactttgagatggacagccacggtcagtgtagacttgtcgacggcctcgagcctgctgatccggccaagatctgccgggccaatgcagacgcaagagagtattgggaacccagtggctttcgtcgcatcccactaaccacgtgccgaggcggcgtggaaatggataaaacccgggaaccccatccatgccccggccacgaggaagaattcgggaggaaacatggtgcgtcgggtgtagccatattcttcgcagtcatcataccctttgcctttgccgcactcgtaggttggtgggtttataacaattggcaaggcaagtttggccagattcgtctgggcgagcagagtagcctggacagcgatgcgccctgggtgaaatacccggtcattgctatttcagccatcgttgccttagtaggcacactgccactcgtcgcctcgagcgtctggcgaaccataggctctgtcttcggcagattcgcgcaccaagacgatggcggtcgttacagttggctacgttcccgcggaccgcgaagatttacaacaagagatagctttgctcggggtcgaggcgattatgccatcgtcgatgaagacgagggtgagcttctgggcgatgacagcgacgatgatgtctaa

SEQ ID NO: 19057 - protein, 1454 aa, Muscodor strobelii
  misc_feature: SGI Peptide ID NO. 566401
  misc_feature (15)..(1454): NCBI GI: 116207100 Blast Desc: CHGG_02843 [Chaetomium globosum CBS 148.51] gi|88183440|gb|EAQ90908.1| CHGG_02843 [Chaetomium globosum CBS 148.51]
  misc_feature (27)..(1454): NCBI GI: 145611298 Blast Desc: MGG_00506 [Magnaporthe grisea 70-15] gi|145018597|gb|EDK02876.1| MGG_00506 [Magnaporthe grisea 70-15]
  misc_feature (31)..(1454): NCBI GI: 85118436 Blast Desc: NCU02669 [Neurospora crassa OR74A] gi|28927251|gb|EAA36206.1| conserved [Neurospora crassa OR74A] gi|38567185|emb|CAE76478.1| related to carboxypeptidase Y-sorting
  misc_feature (18)..(1454): NCBI GI: 261357449 Blast Desc: vacuolar protein sorting/targeting protein PEP1 [Verticillium albo-atrum VaMs.102]
  misc_feature (21)..(1454): NCBI GI: 256735197 Blast Desc: NECHADRAFT_30652 [Nectria haematococca mpVI 77-13-4]
  misc_feature (18)..(1454): NCBI GI: 46107464 Blast Desc: FG00615.1 [Gibberella zeae PH-1]
  misc_feature (90)..(1454): NCBI GI: 154308727 Blast Desc: BC1G_07786 [Botryotinia fuckeliana B05.10] gi|150852737|gb|EDN27929.1| BC1G_07786 [Botryotinia fuckeliana B05.10]
  misc_feature (17)..(1377): NCBI GI: 156050611 Blast Desc: SS1G_07893 [Sclerotinia sclerotiorum 1980] gi|154692293|gb|EDN92031.1| SS1G_07893 [Sclerotinia sclerotiorum 1980]
  misc_feature (27)..(1447): NCBI GI: 261203327 Blast Desc: vacuolar protein sorting protein [Ajellomyces dermatitidis SLH14081] gi|239586662|gb|EEQ69305.1| vacuolar protein sorting protein [Ajellomyces dermatitidis SLH14081]
  misc_feature (27)..(1447): NCBI GI: 239608300 Blast Desc: vacuolar protein sorting protein [Ajellomyces dermatitidis ER-3]
MRPSRPLSPPWPSAALLLLAALLWAGFAGAKSEPSIVVTPFQSAPGIPSYFPDSNAVLLQETGPSRAVWRSADGGVHWAKVEGIDHDAAVALVMHEHDPARAYVLTLGNKHWKTHDRGETWQPFLTGAYLSDFVETWGSWMVFHAQDPDKILFTGMECEGFFCEEFVMYTTDGFGSVDLLRRATQGCSWAKTSASFTTGQPDLDASRVMCIVKAGYFADQSENRLFMSDNYFQPAEASGQLQEKEVNLNGFSPVQGVVRIVEAKKYLLAATTSRATAEMALFVTDDAQTWHRAIFPQDHPIIENAYTVLESTNYSIQIDVRTNKRTSSPMGTLLTSNSNGTYFTRNIEHTNRDTTAIVDFEKVTGIQGIFLVNQVDNWEKVEADGATKKIKTVITFDDGRTFEPIKTGDEEIHLHSVTELNNVGPLFTSPAPGLVMGNGNSGDHLQDYWSSHLYVSDDAGKTWLKGPDGPHKYEFGDQGSILLAVQHSKEADVREVKYSLDHGQNWVPIKLPGDLSIAPGVLVTTQDSTSLKFLLTAQNAAGDAAFSVISIDFEGLHEDTCKKGDMEDWFARKGEDGKPSCIMGHTQQYLRRKKDAKCFIKHEFQEALPEPSPCQCSDLDFECDFNFARDGAECKPIGPILAPEGACRGDNPDETFKGTSGWRRIPGNDCAGGVKKDEQREWNMSHKGEIAITHDHGKKWAAVKELKGQEIREIVTHPYVKDMAFFITAKDKVYYTTDRGKSVDFFEPRDPAARDRPLAFHPNRPDWLIWHGKRCPESKPCYVEATISIDRGFTWNILKRYVGKCEFTGSNAYSFRPKTQIVCSARAHEDDDPEGNPLQLFYTDEFPKEEFNMTLNNVKDFATMNEFIVVATEDPDNGTLSALASIDGKKYADAHFPFGFKVPHRNAYTVLDSSTHAVNLFVATETENNRQYGSILKSNSNGTSYVMSISGVNCDDGYFVDFEKMLGLEGVAVVNTVVNRDSDSEPKTLQSRISHNDGAQWSFIPPPVQDSEGKPYACSSKSGDEGCALHIHGYTERPDRRKTYSSESAVGLMFANGNVGPILGDGKEVDTFMTQDAGFTWREVKKGDWTWSFGDQGSIIVLAPRHAKTKTVSYSYDRGITWDEKQISDSEVTITDITTLRSGSSRNFIVWGNKGDGLFTVNLDFSGVRDKLCIHDEKDAEKSDYELWSPQHPMSANGCLFGHKNQYLRKKTDRVCYNDMKLQNAYKVENCECERADFECDYNFEMDSHGQCRLVDGLEPADPAKICRANADAREYWEPSGFRRIPLTTCRGGVEMDKTREPHPCPGHEEEFGRKHGASGVAIFFAVIIPFAFAALVGWWVYNNWQGKFGQIRLGEQSSLDSDAPWVKYPVIAISAIVALVGTLPLVASSVWRTIGSVFGRFAHQDDGGRYSWLRSRGPRRFTTRDSFARGRGDYAIVDEDEGELLGDDSDDDV

SEQ ID NO: 19058 - DNA, 6549 bp, Muscodor strobelii
  misc_feature: SGI EST ID NO. CUFF.44791.0
  misc_feature: Variant of the nucleotide sequence at SEQ ID NO 19056
ccgagagtggtcgcgacaggctgcgacgcaggaacgggcggaaggggtggatgttgccaagtcaaagctgaactgacgacagcctgtgctggccatgacccattacgtgtatgtatgtacttgatgtatgtatctgtctaactacgggaataccacatcgtcgtgtcgtaatccgtaatcttcatcgttatctgcatctgccaccgcccgagccagcctcgtccgcttgcttttcctcgaggtgtcatcattccacccgcgactccagctgcagcggcctcttgcttcgctgtctgcaacgtgcacgctgccgccgtcccttctccatctctgcctcatcgcctgcctactgcctactacctaccgcccgcctacacgtcacctccacctccacatcctgctgtgccatcgccgactcttccgccgagctacctcaggccattcctgcggccgtggggagcttcctgtcttctggaccgaataatatgctatgatcgcctcgtcgctcgcccgccacccgtagcaacatgaggccctcgagaccgctctcgcctccgtggccgtcggctgcgctcctcctgctcgccgccctgctctgggcgggctttgccggcgccaagtccgagcccagcatcgtcgtcaccccgttccaatccgccccgggcatccccagctacttccccgactccaatgccgtcctgctgcaggagaccggcccgtctcgcgcggtctggcgctctgccgacggcggagtccactgggccaaggtcgagggcatcgaccacgacgccgccgtcgccctcgtcatgcacgaacacgaccccgcgcgcgcctacgtcctgaccctcggcaacaagcactggaagacccacgaccgcggagagacctggcagcccttcctcaccggcgcctacctcagcgacttcgtcgagacctggggcagctggatggtcttccacgcccaggacccggacaagatcctcttcaccggcatggagtgcgagggcttcttctgcgaggagttcgtcatgtacaccaccgacggcttcggctccgtcgacctcctgcgccgcgccacccagggctgctcgtgggccaagacctcggcgagcttcaccaccggacagcccgacctggacgcctcccgcgtcatgtgcatcgtgaaggccggctacttcgccgaccagtccgagaaccgcctcttcatgtcagacaactacttccagcccgccgaggccagcggccagctgcaagaaaaggaggtcaacctcaacggcttcagccccgtccagggtgttgtccggatcgtcgaggccaagaagtatctcctggccgccaccacgtcgcgtgccaccgccgagatggctctcttcgtcaccgacgacgcccagacctggcaccgcgccatcttcccgcaagaccaccccatcatagaaaatgcgtacacggtcctggagagcacaaactacagcatccagatcgatgtgcgcaccaacaagcgcacgtctagccccatggggaccttgctcaccagcaattccaatggcacctactttacccggaacatagagcacaccaatcgcgacacgaccgccatcgtcgactttgagaaggtcacgggcatccagggcatcttcctagtcaatcaggtggacaactgggagaaagtggaggcagatggtgctacgaagaagattaagaccgtcattacctttgacgatggcagaaccttcgagcccatcaagaccggcgatgaagagatacacctgcattccgtcacggagctgaacaatgtcggtcctctcttcacgagcccagccccaggcctcgtcatgggcaatggcaactcgggggatcatctacaagactactggagttctcatctctatgtatctgacgatgcaggaaagacgtggctgaaaggacctgatggcccgcacaagtacgaatttggtgatcaaggatccatcttactggctgttcagcacagcaaggaggccgacgtgcgtgaagtcaagtactcacttgatcacggtcagaactgggtgccgatcaagctgcctggtgatctcagcatcgcacccggggttctcgtgacgacacaagactcgacgagcctaaagttcttgctcacggcccaaaatgcagcgggcgatgcagcgttcagtgttatttccatcgactttgaaggattacatgaagacacgtgtaagaagggcgacatggaagactggttcgcgcggaaaggtgaggatggcaagcctagttgtataatgggccatacccagcaataccttcggcgcaagaaggatgccaaatgtttcatcaaacacgagtttcaggaagcactccccgaaccttctccctgccaatgctccgatctcgacttcgagtgcgacttcaacttcgccagggacggggcggaatgcaagccaataggcccgattctcgcccccgagggtgcttgccgaggtgataacccggacgaaactttcaagggcacatcaggctggcggcgtatccctggaaacgactgtgcaggtggtgtgaagaaggacgagcagagagagtggaagtgctcggatgccaaggcaccccgactaaaggcagtggcaagattgacgtggagcttacatcctttaaagggcagttcgactggttcgaaaagcattacctagaacgcggcgaagttagcagttcggacgatgagacaatcattgcctggccccaaagtatgtcccataagggtgagatcgctatcacgcatgatcatggcaagaaatgggctgcagtaaaggaattgaagggccaagaaatacgagagatcgtaacgcatccttatgtcaaagacatggcattcttcatcacggcgaaagacaaggtctactatacaacagataggggtaagagcgtggatttcttcgagccacgtgatccagcggcgagggaccggccgctcgcttttcatcctaatcggccggactggcttatatggcatggcaaaagatgtcctgaatccaaaccctgctacgtcgaagctacgatctccattgaccgcggcttcacctggaacattctcaagcgatacgtgggcaagtgtgagttcacaggctcgaacgcatatagtttccgccccaagacacagattgtttgctctgccagagctcatgaggatgacgatccagaaggcaatccgctccaactattctacacggatgaattccccaaggaggagttcaacatgacgctgaacaacgtgaaagactttgccaccatgaatgaattcatcgttgtggcaaccgaggatccagacaacggtacccttagtgctcttgccagtatcgacggcaagaagtacgccgatgcgcatttcccgttcggtttcaaagtacctcatcgaaatgcatacactgtgcttgattcgtcaacccatgcggtcaatctcttcgtcgccacagagaccgaaaataatcgtcagtatggctctatcttaaagagcaactcgaatgggacatcgtatgtgatgagcatctcgggtgtgaactgcgacgatggatacttcgttgatttcgagaaaatgctggggctggagggcgttgcggtcgtgaacaccgtcgtcaaccgggacagcgattccgaaccgaaaacgctgcagtccagaatcagtcacaacgatggtgcgcagtggtcttttatcccgcctccagtccaggattcggaaggcaagccatacgcttgctcgagtaaatcaggcgacgagggttgtgccctccatatacatggttacactgagcgacctgaccgtcgcaaaacctattcatccgagtcagcggttggactcatgtttgccaatggcaatgttggccccattctcggcgacggaaaagaagtcgacacattcatgacacaggacgctggcttcacatggcgcgaggtgaagaaaggcgattggacatggtcgtttggggaccaaggttccattatcgtgcttgcaccaaggcatgcgaagaccaagacggtctcctattcgtacgatcgtggcatcacatgggatgagaagcagatttccgactcagaagtcaccattacagatatcactaccctacgatctggatcttcccgcaatttcatcgtttggggaaacaaaggagatggcctattcacagtcaatctcgacttctccggcgtgagggacaagctatgtattcatgatgaaaaggacgccgaaaaatccgattacgagctttggtctccgcagcatccgatgtctgcgaacggctgcttatttggtcacaaaaaccagtacctgcggaagaaaaccgatcgcgtctgttacaatgatatgaagcttcagaatgcctacaaagtggagaattgcgaatgtgagagggcggatttcgagtgcgattataactttgagatggacagccacggtcagtgtagacttgtcgacggcctcgagcctgctgatccggccaagatctgccgggccaatgcagacgcaagagagtattgggaacccagtggctttcgtcgcatcccactaaccacgtgccgaggcggcgtggaaatggataaaacccgggaaccccatccatgccccggccacgaggaagaattcgggaggaaacatggtgcgtcgggtgtagccatattcttcgcagtcatcataccctttgcctttgccgcactcgtaggttggtgggtttataacaattggcaaggcaagtttggccagattcgtctgggcgagcagagtagcctggacagcgatgcgccctgggtgaaatacccggtcattgctatttcagccatcgttgccttagtaggcacactgccactcgtcgcctcgagcgtctggcgaaccataggctctgtcttcggcagattcgcgcaccaagacgatggcggtcgttacagttggctacgttcccgcggaccgcgaagatttacaacaagagatagctttgctcggggtcgaggcgattatgccatcgtcgatgaagacgagggtgagcttctgggcgatgacagcgacgatgatgtctaaagactaatgtttgcgtttaaaatgcattgtttttcacattttacaagatgacgatcccaggtcatcttctttcccactcgcagaccattcatgcatgtcctaacagcaagctgtggaggatccagaccttatcgggtagagcggtttcttcgtttgtcctttctggctatgtagagaaatgtatattgagataatattgagatacatacagtatgtcgtcggcaactcagatttaatctcgcggtgatcaggccgttacgaagctatcgcatagagtttgacgcgatgtgttcgatctgcttgaaaactaaagctaattcgaccataatcacccaacagtcgtccgcgtatccgtgactggctgccaaaaaccaaatacatcatgtagatagatagaggtacgtagcgtcttagatgtgggagcaaaacattgctggcagacgtttgcaccacgacagagtttcttggtgagctaaactaaccaattccaaattaccagttttcaatcgcgacaccggtgcccttgatataggacacgaaatctcgacctgcgaatatatcacggattacttatcgcaacgcgcatgctaaacgcggaccgcacctgaggcattcgtaaacacgaatgttgggcgtcccgagcggcccgcgtttccactgccgccgtgtgtgaacggattcttcacagtttaccaacaatcacccatcattgtagatgggcactttgaagttgggtggtaagcgggaagttccgctattcttaaagatgagacagggagagacactggcgacggatctgtcatgcgatgtatctatgtcgttgagaattcagagcagggtacctctgggaatatcagagaaaccaacccccgcgctacatacttgggcatgtcatcggttaaagagctgtgggcgcatgatgagctacgagacatatccggaaatcgagaagcaagaagagatgcgccgagtactccatccaccttccacggtaatgatattcatgaacatggccggctacagactccatccaaccgatttggctttttttttttttgaagagctgggagccagagtcgatacatgacaaatctaatcccgagctctgacttaagtcgcgtgaagccagcgacaacgccgcgaacggatgaccattgactgcgacgcatgccaacgcgatcgacttgcgcaagaacaggagaaaaagttggatgcgtcgctcattggggtatacttgcagcagaaaatagaacaacgagatgccgatagcacggaaagacagaacgctgcgagtggatgtgtggagggcttgtcgcttgctcagcgccggcgcacgcgggcccagaggaagcgtttggccctgccggccgatgaggcgtgcacttcttggtctatgtcggcaaagaacctggccatggtctcgcgggttgcatcgtgggtgccgggggacgggtcgggcgtgttggagcgcgagtgcagggaccgggaggagcgctctg

SEQ ID NO: 19059 - DNA, 1782 bp, Muscodor strobelii
  misc_feature: SGI cDNA ID NO. 566402
  misc_feature: Encodes the peptide sequence at SEQ ID NO 19060
atggcgttggcagccttgtacagccagtttctggctgccccagatgcctccaaactcgctgacaatgcctccctcaactacatcaccaccaccaccgccttcactggcgccgtcaacatcgtcgagcacctgaccgccacggcccgacaggtcaagaagaagaaggaatccccactgtctctggtccatggcgacagcgccatcgccctcgagatggacaccactctcgagtttgtcacatctggcgcatcgtacctgccagccctcgacgacaacttccttgctgaccgcaccgtctccctgcccattttgcacctagtcacgtatgacgagcagggcaagattctcaatatacgtcagagctgggaccagggcgctttgctcaagcagctcgacatcattggcaagaccggtcgcaactggcccatccgcgacagcaaagatcaaatccgcatgatcgagaattgcgtcaagtctgttgctggcgatgtcgttgcttcacactcacagcaagccatgcctgaccgttcccgtgcaaagcccaccaacgctatgcgcgatccacatgcttcgctgtctctcttcgaggctcgcgatgcccaggagacgctggcgtccatcatctctcctcggggtggtgtcaagccacgtcagcgagacttcgccgaaatcctcggcgacgagccagatgattacatgcctgcctctcccagcgcaggtcgtggtcgttctgactcgccaaacaaggccattgcgccccgtggaggcgctaagcctcgtcagcgtgatttcgccgagatcttgggagacgagcctgtcaacgttgaagatgcagagcgcgaacactccgcctccccgggccagccagtggcgcccaaggctggtgggagcaagaagttccaacccagtcgcttgttcgggactgaggatgaccagatcccaagcagtccgcccgacgacatcaaatctccagaccgtttctatcgccctcaccccaccaaatacagccatttcgagtttggagatggttcagatccgagtgatgcgccagcgcctgttgagccgaccccaagcaagaccaagcattcgagccagtggaagtttgacgattttgtcactccagccaagatccaacctggcaaggcttatcgccagcaagaggtgcattggcagaccggcgaggacgatgagcccatctcacacgaggccgcgcagggcaaactccggcccgatgcagaagtccacttcgaatttgctgatgatggaccatcaccagcgcccgccgaccgccgtccggtgcgtccgcgtggcgccacacacaattctggtctaggtctttacgaaaacaatctgtatgatgagacaggcgcagcccctgatccgacagaggcatcgaagcctctgggtgccatcaccaatctgaaggatcgagggagatacttcgactcccaatgggctatgactgacaatccttcgcctgataagtctgagggcaaggccactatcagtgatgatcgcaagaaagctgtcaaaatgatggagtccaactggtctgctaacggcgattctcccgtgcagaaagaaaacaaacgagttgcgccgaaaaatagtaaggcgggcgacgacaggggcatcgctgttgggggcgatgggatgggtggaaataaaggctcttcacgcaattggatctttggcgacgatgaggatgccgaaccccctaagtcgatccctggccgaaagcctcctgctgctaaatcaggtggcttcaactgggatttctag

SEQ ID NO: 19060 - protein, 593 aa, Muscodor strobelii
  misc_feature: SGI Peptide ID NO. 566402
  misc_feature (1)..(593): NCBI GI: 39977471 Blast Desc: MGG_11061 [Magnaporthe grisea 70-15] gi|145021618|gb|EDK05747.1| MGG_11061 [Magnaporthe grisea 70-15]
  misc_feature (1)..(593): NCBI GI: 116181862 Blast Desc: CHGG_01559 [Chaetomium globosum CBS 148.51] gi|88185856|gb|EAQ93324.1| CHGG_01559 [Chaetomium globosum CBS 148.51]
  misc_feature (1)..(593): NCBI GI: 171696024 Blast Desc: protein product [Podospora anserina] gi|170948254|emb|CAP60418.1| protein product [Podospora anserina]
  misc_feature (3)..(589): NCBI GI: 46107462 Blast Desc: FG00614.1 [Gibberella zeae PH-1]
  misc_feature (1)..(593): NCBI GI: 154308862 Blast Desc: BC1G_07959 [Botryotinia fuckeliana B05.10] gi|150852585|gb|EDN27777.1| BC1G_07959 [Botryotinia fuckeliana B05.10]
  misc_feature (1)..(593): NCBI GI: 156062640 Blast Desc: SS1G_01436 [Sclerotinia sclerotiorum 1980] gi|154696772|gb|EDN96510.1| SS1G_01436 [Sclerotinia sclerotiorum 1980]
  misc_feature (1)..(593): NCBI GI: 85114423 Blast Desc: NCU09259 [Neurospora crassa OR74A] gi|28926485|gb|EAA35458.1| conserved [Neurospora crassa OR74A]
  misc_feature (1)..(593): NCBI GI: 38567011 Blast Desc: conserved [Neurospora crassa]
  misc_feature (3)..(593): NCBI GI: 256734479 Blast Desc: NECHADRAFT_74790 [Nectria haematococca mpVI 77-13-4]
  misc_feature (1)..(593): NCBI GI: 261357488 Blast Desc: conserved [Verticillium albo-atrum VaMs.102]
MALAALYSQFLAAPDASKLADNASLNYITTTTAFTGAVNIVEHLTATARQVKKKKESPLSLVHGDSAIALEMDTTLEFVTSGASYLPALDDNFLADRTVSLPILHLVTYDEQGKILNIRQSWDQGALLKQLDIIGKTGRNWPIRDSKDQIRMIENCVKSVAGDVVASHSQQAMPDRSRAKPTNAMRDPHASLSLFEARDAQETLASIISPRGGVKPRQRDFAEILGDEPDDYMPASPSAGRGRSDSPNKAIAPRGGAKPRQRDFAEILGDEPVNVEDAEREHSASPGQPVAPKAGGSKKFQPSRLFGTEDDQIPSSPPDDIKSPDRFYRPHPTKYSHFEFGDGSDPSDAPAPVEPTPSKTKHSSQWKFDDFVTPAKIQPGKAYRQQEVHWQTGEDDEPISHEAAQGKLRPDAEVHFEFADDGPSPAPADRRPVRPRGATHNSGLGLYENNLYDETGAAPDPTEASKPLGAITNLKDRGRYFDSQWAMTDNPSPDKSEGKATISDDRKKAVKMMESNWSANGDSPVQKENKRVAPKNSKAGDDRGIAVGGDGMGGNKGSSRNWIFGDDEDAEPPKSIPGRKPPAAKSGGFNWDF

SEQ ID NO: 19061 - DNA, 4178 bp, Muscodor strobelii
  misc_feature: SGI EST ID NO. CUFF.45830.0
  misc_feature: Variant of the nucleotide sequence at SEQ ID NO 19059
gcttgaacacattgagcgcgttgcccctgatcagaaattgatcgcagatgggcttggctggctcggctcgacctctgctctctgttgtgccgtacctgcaactttagtctgtggccaacgggaccaccctcgcgtcgtttccctgcgccttgcccaagttcctctaccttgactctttgtctaaatatccgttgccgtacctgcatctactgcatacacggagacacacacccactcacccacttacactacacgaccctctctcgcgcgtgtaaacaaaacctcattctcgtccttgtttggcgcatcttccttgcacctggggaaacatttcaagtctgccacgattgcgtgctccatcccatctcattctttgccttctctctttccctcaccggtagccacatctgctcagcgcaagcagcatctttactatggcgttggcagccttgtacagccagtttctggctgccccagatgcctccaaactcgctgacaatgcctccctcaactacatcaccaccaccaccgccttcactggcgccgtcaacatcgtcgagcacctgaccgccacggcccgacaggtcaagaagaagaaggaatccccactgtctctggtccatggcgacagcgccatcgccctcgagatggacaccactctcgagtttgtcacatctggcgcatcgtacctgccagccctcgacgacaacttccttgctgaccgcaccgtctccctgcccattttgcacctagtcacgtatgacgagcagggcaagattctcaatatacgtcagagctgggaccagggcgctttgctcaagcagctcgacatcattggcaagaccggtcgcaactggcccatccgcgacagcaaagatcaaatccgcatgatcgagaattgcgtcaagtctgttgctggcgatgtcgttgcttcacactcacagcaagccatgcctgaccgttcccgtgcaaagcccaccaacgctatgcgcgatccacatgcttcgctgtctctcttcgaggctcgcgatgcccaggagacgctggcgtccatcatctctcctcggggtggtgtcaagccacgtcagcgagacttcgccgaaatcctcggcgacgagccagatgattacatgcctgcctctcccagcgcaggtcgtggtcgttctgactcgccaaacaaggccattgcgccccgtggaggcgctaagcctcgtcagcgtgatttcgccgagatcttgggagacgagcctgtcaacgttgaagatgcagagcgcgaacactccgcctccccgggccagccagtggcgcccaaggctggtgggagcaagaagttccaacccagtcgcttgttcgggactgaggatgaccagatcccaagcagtccgcccgacgacatcaaatctccagaccgtttctatcgccctcaccccaccaaatacagccatttcgagtttggagatggttcagatccgagtgatgcgccagcgcctgttgagccgaccccaagcaagaccaagcattcgagccagtggaagtttgacgattttgtcactccagccaagatccaacctggcaaggcttatcgccagcaagaggtgcattggcagaccggcgaggacgatgagcccatctcacacgaggccgcgcagggcaaactccggcccgatgcagaagtccacttcgaatttgctgatgatggaccatcaccagcgcccgccgaccgccgtccggtgcgtccgcgtggcgccacacacaattctggtctaggtctttacgaaaacaatctgtatgatgagacaggcgcagcccctgatccgacagaggcatcgaagcctctgggtgccatcaccaatctgaaggatcgagggagatacttcgactcccaatgggctatgactgacaatccttcgcctgataagtctgagggcaaggccactatcagtgatgatcgcaagaaagctgtcaaaatgatggagtccaactggtctgctaacggcgattctcccgtgcagaaagaaaacaaacgagttgcgccgaaaaatagtaaggcgggcgacgacaggggcatcgctgttgggggcgatgggatgggtggaaataaaggctcttcacgcaattggatctttggcgacgatgaggatgccgaaccccctaagtcgatccctggccgaaagcctcctgctgctaaatcaggtggcttcaactgggatttctaggcgacccggggggccacattgcgctaaagcatcgatgcagataggcgcgtcaacttccgtcttcgcaatgaagactgtataccactacgccgttcatgagtcacgagcatatgtttgttccctccatgcagttctctacccatttgtgttagtcactggtggctgtctaatgaatcagcctattgtcgtcttgtgtggcatagcatgaattgccacaagctgtttggagtttgacatatgaccaaaactggaaggggctcagaatgattacaagggcatcgagcgagggattggattgcaaacttcttatgagaaacgaccgacgaggcgtaatgaaacacacgatacaatatgcgcaggtggttcactcccatgttttgttattgaacttgtacaatcgggcccgcatgtatataccttttggggctccaaaattacgtgttgtttctgtctgtctgatgagagatatggcttcgatatgcagttgctgtactatgagaaagttgccagaaaaaatacgatgtatcctacagaacaccaatacccgtttgtctatcgaaaccgcaactagggttgtccacgaggttgtactcagacaggcattgaacggtgttttccaagagagagcgatatgtacacaatgctacaaagaacttgtcatggaactctattgcatcgaaaaaactgaacccaaacaaaaagttaagtactagaacgccttgctcgagagaattcacaatggaaaaaacagagacccgttcgcctaggggttcatcatccgtcatacttggtatcctcacacatccaaaaaatcataacgccgtaagcaaccaaaacaagcgcgtgatcatgacaagccaagtgttgccaggaacaagcggtgtctcgtctgggataagccccaaatgcatcatttaacagagccatttgtacatcttcttccacatgggccacgtcctcttctctatcctctcctgtgctacgaggatcgggagattgaaatcgcggcgtcccgtatccacatccatctcggcgacgcgcacaaaagtggtcttgtgccagaaatagtgcgcgaagaaaaagaagaggatgacgggcgccgccaagtagacgaggaagaaactcttgacgatggccaacgaggacatgtgctcatagcccacgggccaagcgccaatccaaaactgggccacgaggatgagtatgttgatgagcagcccaagataagagccaaggactcccacttgagaggtaaaggccagctcagacacgctgtgtccgttgtaggcccatgcttgtctaaaccggatgtgcgcgaggcatatggaagaccacgtcaggatagaggagagcccagatatggccaccagccagtcgagcacctcgctctcctctttcagatcggcaagataggctagcagacccacagaagacgcggtgatgatggcaaccaggggacggccgcgccgatctacgtaggacaggattgagggtgcttggctctgatcggccaacgcggcgagtgtccgcgaggacccgaacacggatgaattgccaacagagaggacggcgatcaggatgaccacgttcatgaccgagggcagaatctctatgccggcgttctcaatggcgatgacgaaaggagaggccatggtcggcatatactggtcactcaaaagcctcctatcggtgtaaggcacgagaagccccacaagcgtcagggccaccacgtaaaataacgtgatgcgccagaagacttgcttgatagcggtgggcagagacttgcgtgggttagcggtttcggcagcagcgagaccaacaagctcggtgccagagaaggcaaaggcggccgtaacgaagacgctacacagtcccttgaagccgttgcgaaaggcaccagggtctctccagtagaggccgccgatgtatccgcctccttgtactccacctacgttgagtacg

SEQ ID NO: 19062 - DNA, 1830 bp, Muscodor strobelii
  misc_feature: SGI cDNA ID NO. 566403
  misc_feature: Encodes the peptide sequence at SEQ ID NO 19063
atgccgtcgtcatacagcagccgcgacatcgagatgagcgtcatcaaggagggctcgctggcgccggcgagcagcttcacgatgcgcgagcccctgtacgacgacgaggagtcgcggccgggcgtcttcagccgcatcatcgacggcttccgtcgcgatcccacgcagcagatcacgcccaaggaccccctcaacgagctgcacgccgccgaggctgcccacctgtaccgcccgctcttccgcaacccctatccgccccattactacgacctgcgccaggcgacgctgcacacggcccagtcgcatctggcccgcaagctcaagggccgccacctgcagatgattgccattggcggatccatcggcacggggctgttcgtttcctccggccgcgccctctcctccggcgggcccgcctccgtcctcatcgcctacctcatcatcggcatcatgctgtactgcaccgtccaggccctcggcgagctcgccgtctccttccccgtcgccggctccttctctgcctactcgacgcgctttctccacccctcctggggggtttgccatgggctggaatggctgattgccctccccctcgaggtcatctccgcttccatcgtcaccacattctggaactcgggtctgcaaaaggccattttcgtcaccgtcttcctcaccttcgtcatcaccatcaacctctttggtgtcaaaggttatggcgaggccgaattccttttcgctatcatcaaggtcattgccgttatcgctttcatcctcttagggatcgtactcaacgtaggtggagtacaaggaggcggatacatcggcggcctctactggagagaccctggtgcctttcgcaacggcttcaagggactgtgtagcgtcttcgttacggccgcctttgccttctctggcaccgagcttgttggtctcgctgctgccgaaaccgctaacccacgcaagtctctgcccaccgctatcaagcaagtcttctggcgcatcacgttattttacgtggtggccctgacgcttgtggggcttctcgtgccttacaccgataggaggcttttgagtgaccagtatatgccgaccatggcctctcctttcgtcatcgccattgagaacgccggcatagagattctgccctcggtcatgaacgtggtcatcctgatcgccgtcctctctgttggcaattcatccgtgttcgggtcctcgcggacactcgccgcgttggccgatcagagccaagcaccctcaatcctgtcctacgtagatcggcgcggccgtcccctggttgccatcatcaccgcgtcttctgtgggtctgctagcctatcttgccgatctgaaagaggagagcgaggtgctcgactggctggtggccatatctgggctctcctctatcctgacgtggtcttccatatgcctcgcgcacatccggtttagacaagcatgggcctacaacggacacagcgtgtctgagctggcctttacctctcaagtgggagtccttggctcttatcttgggctgctcatcaacatactcatcctcgtggcccagttttggattggcgcttggcccgtgggctatgagcacatgtcctcgttggccatcgtcaagagtttcttcctcgtctacttggcggcgcccgtcatcctcttctttttcttcgcgcactatttctggcacaagaccacttttgtgcgcgtcgccgagatggatgtggatacgggacgccgcgatttcaatctcccgatcctcgtagcacaggagaggatagagaagaggacgtggcccatgtggaagaagatgtacaaatggctctgttaa

SEQ ID NO: 19063 - protein, 609 aa, Muscodor strobelii
  misc_feature: SGI Peptide ID NO. 566403
  misc_feature (111)..(572): Pfam Id: PF00324 Pfam Desc: Amino acid permease
  misc_feature (9)..(609): NCBI GI: 46107460 Blast Desc: FG00613.1 [Gibberella zeae PH-1]
  misc_feature (19)..(609): NCBI GI: 116181860 Blast Desc: CHGG_01558 [Chaetomium globosum CBS 148.51] gi|88185855|gb|EAQ93323.1| CHGG_01558 [Chaetomium globosum CBS 148.51]
  misc_feature (6)..(609): NCBI GI: 39977473 Blast Desc: MGG_11062 [Magnaporthe grisea 70-15] gi|145021617|gb|EDK05746.1| MGG_11062 [Magnaporthe grisea 70-15]
  misc_feature (1)..(609): NCBI GI: 242775513 Blast Desc: amino acid permease (Gap1), [Talaromyces stipitatus ATCC 10500] gi|218722278|gb|EED21696.1| amino acid permease (Gap1), [Talaromyces stipitatus ATCC 10500]
  misc_feature (41)..(609): NCBI GI: 85095443 Blast Desc: general amino-acid permease GAP1 [Neurospora crassa OR74A] gi|28921549|gb|EAA30854.1| general amino-acid permease GAP1 [Neurospora crassa OR74A]
  misc_feature (19)..(609): NCBI GI: 164427725 Blast Desc: general amino-acid permease GAP1 [Neurospora crassa OR74A] gi|157071860|gb|EAA35042.2| general amino-acid permease GAP1 [Neurospora crassa OR74A]
  misc_feature (23)..(609): NCBI GI: 212532419 Blast Desc: amino acid permease (Gap1), [Penicillium marneffei ATCC 18224] gi|210071730|gb|EEA25819.1| amino acid permease (Gap1), [Penicillium marneffei ATCC 18224]
  misc_feature (34)..(609): NCBI GI: 154275870 Blast Desc: general amino-acid permease GAP1 [Ajellomyces capsulatus NAm1] gi|150413853|gb|EDN09218.1| general amino-acid permease GAP1 [Ajellomyces capsulatus NAm1]
  misc_feature (100)..(609): NCBI GI: 156057565 Blast Desc: SS1G_04514 [Sclerotinia sclerotiorum 1980] gi|154702299|gb|EDO02038.1| SS1G_04514 [Sclerotinia sclerotiorum 1980]
  misc_feature (10)..(609): NCBI GI: 169765514 Blast Desc: [Aspergillus oryzae RIB40] gi|238482071|ref|XP_002372274.1| amino acid permease (Gap1), [Aspergillus flavus NRRL3357] gi|83765083|dbj|BAE55226.1| protein
MPSSYSSRDIEMSVIKEGSLAPASSFTMREPLYDDEESRPGVFSRIIDGFRRDPTQQITPKDPLNELHAAEAAHLYRPLFRNPYPPHYYDLRQATLHTAQSHLARKLKGRHLQMIAIGGSIGTGLFVSSGRALSSGGPASVLIAYLIIGIMLYCTVQALGELAVSFPVAGSFSAYSTRFLHPSWGVCHGLEWLIALPLEVISASIVTTFWNSGLQKAIFVTVFLTFVITINLFGVKGYGEAEFLFAIIKVIAVIAFILLGIVLNVGGVQGGGYIGGLYWRDPGAFRNGFKGLCSVFVTAAFAFSGTELVGLAAAETANPRKSLPTAIKQVFWRITLFYVVALTLVGLLVPYTDRRLLSDQYMPTMASPFVIAIENAGIEILPSVMNVVILIAVLSVGNSSVFGSSRTLAALADQSQAPSILSYVDRRGRPLVAIITASSVGLLAYLADLKEESEVLDWLVAISGLSSILTWSSICLAHIRFRQAWAYNGHSVSELAFTSQVGVLGSYLGLLINILILVAQFWIGAWPVGYEHMSSLAIVKSFFLVYLAAPVILFFFFAHYFWHKTTFVRVAEMDVDTGRRDFNLPILVAQERIEKRTWPMWKKMYKWLC

SEQ ID NO: 19064 - DNA, 10170 bp, Muscodor strobelii
  misc_feature: SGI EST ID NO. CUFF.45831.2
  misc_feature: Variant of the nucleotide sequence at SEQ ID NO 19062
ccagaagcgccagcgcgacgaagaagaagacgaagaccaggacgacagtgacgaggatgttgccatggaggaggaaagcgacgacgaatgaggcccgcaaggaggcccggtcgaagaggcggggaacgatgtcaaggatgcgatgtcaaggatggatggctctggcaccgtcgtcgttcatttgcaaggatgggctacgatctgctgcggcgcgagcgatatgcggcgcgtggatgcgagtgcttcaggtctggcccgtcgtggccatctcggtcggaatactcaagcccacgcaggcaccgaccaggccgatccagaccatgaggtagtcgtctttggagcactggaagggagccatggcgtcgcccagcaggcaggggtggacgaagaaggagggcaggcccgtgatgggatggtgctgatgccgatcatgttagcctgtgattttctaaggtagagcagaatgcgaaccccttgccgcgatgctcgcgattagtcatgctgcacaggtgaacagaagcagcgagatctggagggaagggggcagagaccggagagaaggagaagggcagcctacgtcgatggagatggcaccgatagggccctggcggcgcagagcgtcggtaaagtggggcggaacgaggcggcggaagacggtgtcgatgtcgaggggcgactcctggatgggcagatggtgcaggctgaaccagagacatggcatgcggtaggtggggtgcaggtgaatctcgtacaggacgtagctggagcgcaggcggctccgggtgcgggtgtgttggtggacaacgtgcgcgtcggtctcctcggcggccagcatggcggtgtcgacggccatgtcctggttgtcgtcttgcgagtcggcgagggagacgctgtcgaggcgggcggccagcaggctgtcgacggggctgtcgcgcaggggcgtggcgatctgcaggaaggtgagcaggtggccggcggcgttgggggaggtgtcgagggcgtggtgcaggtcgaggcgccagtgctggcgaagggccccgagggtggcctggcggtaccgtctgtcgaggaagtggcagacttcggcaaactcgtcgggggagaggtatgggtagccgtcgtaagtggagctgttgtggagtgacatggaaatggccatggctgcaacggcgacgacgaccgcgacaggcggcgaagactcgtcgatggtgtcgatggtggggtgaacagctcaggggatcggggggatgagggacggaagggcttcccgctgtcgtggagaaagctgttgagttgccagtagctgtcacgacgatttagcgcttgatgagcacaaggtctggctacctatatcaagcgcatgttgctgagttgtacgttgttgtgggttgttgtattttggctggccgcaaatgctctggatgttacatatgcccatcaagatttctgggtgcatgtacctcttagagacctacctagctacggtacctaaggtaaggtgttgtcaatttctaatgggaggggcagttacccagaggccaccccgcaccgcaattgggatcgtgtgctttgggcatgacactcaacgtgaatatacagctaaggtatgtagaatgtacctaccgtgcatccgtacctgtctccatgtgtatgtccaattggaacctgcatttgcatgtgggtagaacgcaaagatgcgtcgtaacggcgcccgcgagcagagcatggggagccgggtttgcaagggtccagggtagtaggtccgaggccgaatcgagatatggcgacctgttgtctgttcaaggttgtccgttgtctcttccagtgttcccgccaacactttctggatctagacgactttccttgccattcgctcccaacacccgccgtcgactgtacctagcttgacttcgcgacaccagggccatgccatccgccctgctcgtgtagcgcgctcgaccctccttccctcctgctctgccgggcgtcgtggccgccgagctgtgctgctcctgtgctgctccgtcatgtcgacatcgtgaccccatccgcatccatcttcgtcgacgtcttgcccgcctccgccatggccttctccgtccccaaaaacgtcccctccttcagcaacccccagcgcatggtcgaggaccacatctggggcaacacggccgtcgctcgcggcccccgagccaagggcggcatcctcgacggtgtccaggaccgcctgtttgacaaccgcaatgccctgcccatgtacaaggacaagccctacgcctacccgccctctcaccgtcaccgcccgctctggaggcggaagcgctcgctgctggccctgctgctgctgctgtccctgctctactacttcttgtaccgccgtgctgaccgcccgcatcgcgaccccgccgcctcggcctcctcctcctggacttcgtggctcacatccacgtccggcgcctcggcccctgccgactggcccggccgccagcagcgtgtcgtcgaggtcttcgagctgagctgggacgcatactcccagtatgcctggggctatgacgagttccaccccgtctcccgcagaggcaagcagatggcccccaagggcatgggctggatcatcgtcgatgccctcgacaccatgattctcatgaacctcacctcccgcgtcgcccacgcccgcgactggatttcccactctctcacctgggaccaggatcaggacgtcagcaccttcgagaccaccatccgcatgctcggtgggctccttgcggcccactatctgtccaacgagtacccacagctcgccgccttgagcgacgatgattctggcgcccccggcgaggacctgtatctggaaaaggcccgagacctcgccgaccacctcatgcccgctttcgactcggactccggcgttccctacgccagtgtcaatctgggcaaatttaaggggatccccgcccacgacgttggtggctcctcgtccaccgccgaaacgactaccttgcagctcgaattcaagtatctcgccaagctgacgggcgagaaggatttctgggacaaggccgagaaggtcatggaggtcgtggacggcaacatggccgagggcggcctcgtccccatttacatcaacgccaacagcggcaagttctacggcgagaacattcggctgggaagccggggcgactcatattacgaatatcttatcaagcaatacttgcaaacaaacaagaaggaacccatctacctggacatgtgggatgaaagtttgcagggcgtgcgggaccatctcattacatacacggagccatcggggtttaccatcattggcgagaggccgagcggattgtcggcggccctgttgcccaagatggatcatctcgtgtgcttcatgcccggcaccatcgccctggccgcgacaggcggattgacggaagcagaggccaagaaacagccgggctggtcgaagaagaatgaggcagacatgcagctcgcccgcgagctgatgcagacgtgctggggcatgtacaggtggatggcgacgggcctggccgctgagatcacctacttcaacattgccgatccgccgccgtcccagtcagccccgcatcacccgcccgccgaattcgacgaggatccggacgcgacctggcgcaaagactacactgtgcatgcgatggacgtgcacaatctacagaggcccgagacggtagagtctcttttttacatgtggcgaattaccggcgacgccaagtatcgcgaatggggttgggacatgttcaaagcgttcatgaaccacacggccgtggcggacggaggcggcttcacgagtctcgggaatgcgaacaaagtgcctcccgatacgcgcgacaatatggaaagtttctggctggccgagactttgaaatactttttcctcttgtttgggtcaaacgatgttctgccattggacaagatcgtaattaatacggaagcgcacccccttccacggttcgacatgggccaactgttctcaactggatggaagcgcaagccaaggcaaggggggagtgaaacagcagctgagtcatgaggtcttgcccgagggtcgtcgttctaagcgagataacttgtgcagcttgtaatgtgcgattgatagtatggctgtcacagcagggtcgaaagagcaaggctgcgagatgaaagcgcccagttcacttcagcttcgtctctgagaaacgctgcgggaaccgacgtgtgtgatggacagacaacgacgacgctcaggcagacgagaaagcagatcgatcgagtgcatatacatgacagactaacaagatgtgtggcgaaggcttatcaatgtgcaataatgcagtgtagcgataggatgggtcgtgaaaatagagtacaagtcgagtcgcgatgaagttgggttctggccatgtggaatgtgttgtacagtatatatcttcttacacatcttgaattcgcagccaatgccatcgtggctcgcacaacggaacagggggtgtgtacaggcagtctcaacttgctcaattgataagtccatgcacgacaacagacagtgtctcagtactatagcagtcgtctgactgattagccattgagaggaatcgtagggcgggttttgtttttgaaatccccaatactcttatcaagacatggagccgagtccgagcattaaggtagccaagcgtgccaagcgatcggggtctgcctctctcgaaccgtgcagcagacggtagaccgtaggtagtaggacttgaggcgcaggtaattgtagtagtaagatgcttggtcttcagctcggcccactcagacggtccagtccatgtcggacatgttcccaccgcgggagagcgtcgaatggcagggttgataagattgatttgtgtacagcacggcgcccgcggctggggtgcggcgtcgagtttcaacttccaacttccaacaccctcatcctctcgcctcagcgccgacctacgacagtggcgaggatatgcgcagggcaccactgcgccaacagcctctggtgttactgccgtcggcgcgcgccgtctcgacgtactgatactgatatcgacaacttgacatcgaacatcgaacagcgcatggtcgcccgccgcccgccatgccgtcgtcatacagcagccgcgacatcgagatgagcgtcatcaaggagggctcgctggcgccggcgagcagcttcacgatgcgcgagcccctgtacgacgacgaggagtcgcggccgggcgtcttcagccgcatcatcgacggcttccgtcgcgatcccacgcagcagatcacgcccaaggaccccctcaacgagctgcacgccgccgaggctgcccacctgtaccgcccgctcttccgcaacccctatccgccccattactacgacctgcgccaggcgacgctgcacacggcccagtcgcatctggcccgcaagctcaagggccgccacctgcagatgattgccattggcggatccatcggcacggggctgttcgtttcctccggccgcgccctctcctccggcgggcccgcctccgtcctcatcgcctacctcatcatcggcatcatgctgtactgcaccgtccaggccctcggcgagctcgccgtctccttccccgtcgccggctccttctctgcctactcgacgcgctttctccacccctcctggggggtttgccatgggctggaattacgctctgcagtggctgattgccctccccctcgaggtcatctccgcttccatcgtcaccacattctggaactcgggtctgcaaaaggccattttcgtcaccgtcttcctcaccttcgtcatcaccatcaacctctttggtgtcaaaggttatggcgaggccgaattccttttcgctatcatcaaggtcattgccgttatcgctttcatcctcttagggatcgtactcaacgtaggtggagtacaaggaggcggatacatcggcggcctctactggagagaccctggtgcctttcgcaacggcttcaagggactgtgtagcgtcttcgttacggccgcctttgccttctctggcaccgagcttgttggtctcgctgctgccgaaaccgctaacccacgcaagtctctgcccaccgctatcaagcaagtcttctggcgcatcacgttattttacgtggtggccctgacgcttgtggggcttctcgtgccttacaccgataggaggcttttgagtgaccagtatatgccgaccatggcctctcctttcgtcatcgccattgagaacgccggcatagagattctgccctcggtcatgaacgtggtcatcctgatcgccgtcctctctgttggcaattcatccgtgttcgggtcctcgcggacactcgccgcgttggccgatcagagccaagcaccctcaatcctgtcctacgtagatcggcgcggccgtcccctggttgccatcatcaccgcgtcttctgtgggtctgctagcctatcttgccgatctgaaagaggagagcgaggtgctcgactggctggtggccatatctgggctctcctctatcctgacgtggtcttccatatgcctcgcgcacatccggtttagacaagcatgggcctacaacggacacagcgtgtctgagctggcctttacctctcaagtgggagtccttggctcttatcttgggctgctcatcaacatactcatcctcgtggcccagttttggattggcgcttggcccgtgggctatgagcacatgtcctcgttggccatcgtcaagagtttcttcctcgtctacttggcggcgcccgtcatcctcttctttttcttcgcgcactatttctggcacaagaccacttttgtgcgcgtcgccgagatggatgtggatacgggacgccgcgatttcaatctcccgatcctcgtagcacaggagaggatagagaagaggacgtggcccatgtggaagaagatgtacaaatggctctgttaaatgatgcatttggggcttatcccagacgagacaccgcttgttcctggcaacacttggcttgtcatgatcacgcgcttgttttggttgcttacggcgttatgattttttggatgtgtgaggataccaagtatgacggatgatgaacccctaggcgaacgggtctctgttttttccattgtgaattctctcgagcaaggcgttctagtacttaactttttgtttgggttcagttttttcgatgcaatagagttccatgacaagttctttgtagcattgtgtacatatcgctctctcttggaaaacaccgttcaatgcctgtctgagtacaacctcgtggacaaccctagttgcggtttcgatagacaaacgggtattggtgttctgtaggatacatcgtattttttctggcaactttctcatagtacagcaactgcatatcgaagccatatctctcatcagacagacagaaacaacacgtaattttggagccccaaaaggtatatacatgcgggcccgattgtacaagttcaataacaaaacatgggagtgaaccacctgcgcatattgtatcgtgtgtttcattacgcctcgtcggtcgtttctcataagaagtttgcaatccaatccctcgctcgatgcccttgtaatcattctgagccccttccagttttggtcatatgtcaaactccaaacagcttgtggcaattcatgctatgccacacaagacgacaataggctgattcattagacagccaccagtgactaacacaaatgggtagagaactgcatggagggaacaaacatatgctcgtgactcatgaacggcgtagtggtatacagtcttcattgcgaagacggaagttgacgcgcctatctgcatcgatgctttagcgcaatgtggccccccgggtcgcctagaaatcccagttgaagccacctgatttagcagcaggaggctttcggccagggatcgacttagggggttcggcatcctcatcgtcgccaaagatccaattgcgtgaagagcctttatttccacccatcccatcgcccccaacagcgatgcccctgtcgtcgcccgccttactatttttcggcgcaactcgtttgttttctttctgcacgggagaatcgccgttagcagaccagttggactccatcattttgacagctttcttgcgatcatcactgatagtggccttgccctcagacttatcaggcgaaggattgtcagtcatagcccattgggagtcgaagtatctccctcgatccttcagattggtgatggcacccagaggcttcgatgcctctgtcggatcaggggctgcgcctgtctcatcatacagattgttttcgtaaagacctagaccagaattgtgtgtggcgccacgcggacgcaccggacggcggtcggcgggcgctggtgatggtccatcatcagcaaattcgaagtggacttctgcatcgggccggagtttgccctgcgcggcctcgtgtgagatgggctcatcgtcctcgccggtctgccaatgcacctcttgctggcgataagccttgccaggttggatcttggctggagtgacaaaatcgtcaaacttccactggctcgaatgcttggtcttgcttggggtcggctcaacaggcgctggcgcatcactcggatctgaaccatctccaaactcgaaatggctgtatttggtggggtgagggcgatagaaacggtctggagatttgatgtcgtcgggcggactgcttgggatctggtcatcctcagtcccgaacaagcgactgggttggaacttcttgctcccaccagccttgggcgccactggctggcccggggaggcggagtgttcgcgctctgcatcttcaacgttgacaggctcgtctcccaagatctcggcgaaatcacgctgacgaggcttagcgcctccacggggcgcaatggccttgtttggcgagtcagaacgaccacgacctgcgctgggagaggcaggcatgtaatcatctggctcgtcgccgaggatttcggcgaagtctcgctgacgtggcttgacaccaccccgaggagagatgatggacgccagcgtctcctgggcatcgcgagcctcgaagagagacagcgaagcatgtggatcgcgcatagcgttggtgggctttgcacgggaacggtcaggcatggcttgctgtgagtgtgaagcaacgacatcgccagcaacagacttgacgcaattctcgatcatgcggatttgatctttgctgtcgcggatgggccagttgcgaccggtcttgccaatgatgtcgagctgcttgagcaaagcgccctggtcccagctctgacgtatattgagaatcttgccctgctcgtcatacgtgactaggtgcaactagagtcgggtcagtcagcgggaaacacgggcacaacaggaataagcacggccgagggcgggtaagagacgcacaatgggcagggagacggtgcggtcagcaaggaagttgtcgtcgagggctggcaggtacgatgcgccagatgtgacaaactcgagagtggtgtccatctcgagggcgatggcgctgtcgccatggaccagagacagtggggattccttcttcttcttgacctgtcgggccgtggcggtcaggtgctcgacgatgttgacggcgccagtgaaggcggtggtggtggtgatgtagttgagggaggcattgtcagcgagtttggaggcatctggggcagccagaaactggctgtacaaggctgccaacgccatagtaaagatgctgcttgcgctgagcagatgtggctaccggtgagggaaagagagaaggcaaagaatgagatgggatggagcacgcaatcgtggcagacttgaaatgtttccccaggtgcaaggaagatgcgccaaacaaggacgagaatgaggttttgtttacacgcgcgagagagggtcgtgtagtgtaagtgggtgagtgggtgtgtgtctccgtgtatgcagtagatgcaggtacggcaacggatatttagacaaagagtcaaggtagaggaacttgggcaaggcgcagggaaacgacgcgagggtggtcccgttggccacagactaaagttgcaggtacggcacaacagagagcagaggtcgagccgagccagccaagcccatctgcgatcaatttctgatcaggggcaacgcgctcaatgtgttcaagc

SEQ ID NO: 19065 - DNA, 1977 bp, Muscodor strobelii
  misc_feature: SGI cDNA ID NO. 566404
  misc_feature: Reduced expression when VOC is produced
  misc_feature: Encodes the peptide sequence at SEQ ID NO 19066
atggccttctccgtccccaaaaacgtcccctccttcagcaacccccagcgcatggtcgaggaccacatctggggcaacacggccgtcgctcgcggcccccgagccaagggcggcatcctcgacggtgtccaggaccgcctgtttgacaaccgcaatgccctgcccatgtacaaggacaagccctacgcctacccgccctctcaccgtcaccgcccgctctggaggcggaagcgctcgctgctggccctgctgctgctgctgtccctgctctactacttcttgtaccgccgtgctgaccgcccgcatcgcgaccccgccgcctcggcctcctcctcctggacttcgtggctcacatccacgtccggcgcctcggcccctgccgactggcccggccgccagcagcgtgtcgtcgaggtcttcgagctgagctgggacgcatactcccagtatgcctggggctatgacgagttccaccccgtctcccgcagaggcaagcagatggcccccaagggcatgggctggatcatcgtcgatgccctcgacaccatgattctcatgaacctcacctcccgcgtcgcccacgcccgcgactggatttcccactctctcacctgggaccaggatcaggacgtcagcaccttcgagaccaccatccgcatgctcggtgggctccttgcggcccactatctgtccaacgagtacccacagctcgccgccttgagcgacgatgattctggcgcccccggcgaggacctgtatctggaaaaggcccgagacctcgccgaccacctcatgcccgctttcgactcggactccggcgttccctacgccagtgtcaatctgggcaaatttaaggggatccccgcccacgacgttggtggctcctcgtccaccgccgaaacgactaccttgcagctcgaattcaagtatctcgccaagctgacgggcgagaaggatttctgggacaaggccgagaaggtcatggaggtcgtggacggcaacatggccgagggcggcctcgtccccatttacatcaacgccaacagcggcaagttctacggcgagaacattcggctgggaagccggggcgactcatattacgaatatcttatcaagcaatacttgcaaacaaacaagaaggaacccatctacctggacatgtgggatgaaagtttgcagggcgtgcgggaccatctcattacatacacggagccatcggggtttaccatcattggcgagaggccgagcggattgtcggcggccctgttgcccaagatggatcatctcgtgtgcttcatgcccggcaccatcgccctggccgcgacaggcggattgacggaagcagaggccaagaaacagccgggctggtcgaagaagaatgaggcagacatgcagctcgcccgcgagctgatgcagacgtgctggggcatgtacaggtggatggcgacgggcctggccgctgagatcacctacttcaacattgccgatccgccgccgtcccagtcagccccgcatcacccgcccgccgaattcgacgaggatccggacgcgacctggcgcaaagactacactgtgcatgcgatggacgtgcacaatctacagaggcccgagacggtagagtctcttttttacatgtggcgaattaccggcgacgccaagtatcgcgaatggggttgggacatgttcaaagcgttcatgaaccacacggccgtggcggacggaggcggcttcacgagtctcgggaatgcgaacaaagtgcctcccgatacgcgcgacaatatggaaagtttctggctggccgagactttgaaatactttttcctcttgtttgggtcaaacgatgttctgccattggacaagatcgtaattaatacggaagcgcacccccttccacggttcgacatgggccaactgttctcaactggatggaagcgcaagccaaggcaaggggggagtgaaacagcagctgagtcatga

SEQ ID NO: 19066 - protein, 658 aa, Muscodor strobelii
  misc_feature: SGI Peptide ID NO. 566404
  misc_feature (139)..(632): Pfam Id: PF01532 Pfam Desc: Glycosyl hydrolase family 47
  misc_feature (2)..(648): NCBI GI: 171696028 Blast Desc: protein product [Podospora anserina] gi|170948256|emb|CAP60420.1| protein product [Podospora anserina]
  misc_feature (2)..(658): NCBI GI: 85112104 Blast Desc: mannosyl-oligosaccharide 1,2-alpha-mannosidase [Neurospora crassa OR74A] gi|28926048|gb|EAA35037.1| mannosyl-oligosaccharide 1,2-alpha-mannosidase [Neurospora crassa
  misc_feature (1)..(655): NCBI GI: 46107458 Blast Desc: FG00612.1 [Gibberella zeae PH-1]
  misc_feature (2)..(657): NCBI GI: 154323990 Blast Desc: BC1G_00394 [Botryotinia fuckeliana B05.10] gi|150842623|gb|EDN17816.1| BC1G_00394 [Botryotinia fuckeliana B05.10]
  misc_feature (3)..(648): NCBI GI: 156057563 Blast Desc: SS1G_04513 [Sclerotinia sclerotiorum 1980] gi|154702298|gb|EDO02037.1| SS1G_04513 [Sclerotinia sclerotiorum 1980]
  misc_feature (56)..(653): NCBI GI: 256735199 Blast Desc: NECHADRAFT_105814 [Nectria haematococca mpVI 77-13-4]
  misc_feature (153)..(648): NCBI GI: 116181858 Blast Desc: CHGG_01557 [Chaetomium globosum CBS 148.51] gi|88185854|gb|EAQ93322.1| CHGG_01557 [Chaetomium globosum CBS 148.51]
  misc_feature (1)..(657): NCBI GI: 145614722 Blast Desc: MGG_11408 [Magnaporthe grisea 70-15] gi|145021616|gb|EDK05745.1| MGG_11408 [Magnaporthe grisea 70-15]
  misc_feature (1)..(646): NCBI GI: 119185238 Blast Desc: CIMG_07325 [Coccidioides immitis RS]
  misc_feature (1)..(646): NCBI GI: 240106586 Blast Desc: endoplasmic reticulum mannosyl-oligosaccharide 1,2-alpha-mannosidase, [Coccidioides posadasii C735 delta SOWgp]
  misc_feature (127)..(658): SWISSPROT Homolog: EC 3.2.1.113 Mannosyl-oligosaccharide 1,2-alpha-mannosidase
  misc_feature: Useful for introducing or modulating the production of volatile compounds
MAFSVPKNVPSFSNPQRMVEDHIWGNTAVARGPRAKGGILDGVQDRLFDNRNALPMYKDKPYAYPPSHRHRPLWRRKRSLLALLLLLSLLYYFLYRRADRPHRDPAASASSSWTSWLTSTSGASAPADWPGRQQRVVEVFELSWDAYSQYAWGYDEFHPVSRRGKQMAPKGMGWIIVDALDTMILMNLTSRVAHARDWISHSLTWDQDQDVSTFETTIRMLGGLLAAHYLSNEYPQLAALSDDDSGAPGEDLYLEKARDLADHLMPAFDSDSGVPYASVNLGKFKGIPAHDVGGSSSTAETTTLQLEFKYLAKLTGEKDFWDKAEKVMEVVDGNMAEGGLVPIYINANSGKFYGENIRLGSRGDSYYEYLIKQYLQTNKKEPIYLDMWDESLQGVRDHLITYTEPSGFTIIGERPSGLSAALLPKMDHLVCFMPGTIALAATGGLTEAEAKKQPGWSKKNEADMQLARELMQTCWGMYRWMATGLAAEITYFNIADPPPSQSAPHHPPAEFDEDPDATWRKDYTVHAMDVHNLQRPETVESLFYMWRITGDAKYREWGWDMFKAFMNHTAVADGGGFTSLGNANKVPPDTRDNMESFWLAETLKYFFLLFGSNDVLPLDKIVINTEAHPLPRFDMGQLFSTGWKRKPRQGGSETAAES

SEQ ID NO: 19067 - DNA, 10170 bp, Muscodor strobelii; identical to SEQ ID NO: 19064
  misc_feature: SGI EST ID NO. CUFF.45831.2
  misc_feature: Variant of the nucleotide sequence at SEQ ID NO 19065

SEQ ID NO: 19068 - DNA, 756 bp, Muscodor strobelii
  misc_feature: SGI cDNA ID NO. 566405
  misc_feature: Encodes the peptide sequence at SEQ ID NO 19069
atggccatttccatgtcactccacaacagctccacttacgacggctacccatacctctcccccgacgagtttgccgaagtctgccacttcctcgacagacggtaccgccaggccaccctcggggcccttcgccagcactggcgcctcgacctgcaccacgccctcgacacctcccccaacgccgccggccacctgctcaccttcctgcagatcgccacgcccctgcgcgacagccccgtcgacagcctgctggccgcccgcctcgacagcgtctccctcgccgactcgcaagacgacaaccaggacatggccgtcgacaccgccatgctggccgccgaggagaccgacgcgcacgttgtccaccaacacacccgcacccggagccgcctgcgctccagctacgtcctgtacgagattcacctgcaccccacctaccgcatgccatgtctctggttcagcctgcaccatctgcccatccaggagtcgcccctcgacatcgacaccgtcttccgccgcctcgttccgccccactttaccgacgctctgcgccgccagggccctatcggtgccatctccatcgaccaccatcccatcacgggcctgccctccttcttcgtccacccctgcctgctgggcgacgccatggctcccttccagtgctccaaagacgactacctcatggtctggatcggcctggtcggtgcctgcgtgggcttgagtattccgaccgagatggccacgacgggccagacctga

SEQ ID NO: 19069 - protein, 251 aa, Muscodor strobelii
  misc_feature: SGI Peptide ID NO. 566405
  misc_feature (127)..(247): Pfam Id: PF03987 Pfam Desc: Autophagocytosis associated protein, C-terminal domain
  misc_feature (7)..(231): NCBI GI: 261357485 Blast Desc: conserved [Verticillium albo-atrum VaMs.102]
  misc_feature (12)..(239): NCBI GI: 46107456 Blast Desc: FG00611.1 [Gibberella zeae PH-1]
  misc_feature (7)..(194): NCBI GI: 171696030 Blast Desc: protein product [Podospora anserina] gi|170948257|emb|CAP60421.1| protein product [Podospora anserina]
  misc_feature (13)..(246): NCBI GI: 154323988 Blast Desc: BC1G_00393 [Botryotinia fuckeliana B05.10] gi|150842622|gb|EDN17815.1| BC1G_00393 [Botryotinia fuckeliana B05.10]
  misc_feature (16)..(194): NCBI GI: 144601743 Blast Desc: [Ophiostoma piceae]
  misc_feature (16)..(194): NCBI GI: 85112106 Blast Desc: NCU02779 [Neurospora crassa OR74A] gi|28926049|gb|EAA35038.1| NCU02779 [Neurospora crassa OR74A]
  misc_feature (7)..(214): NCBI GI: 116181856 Blast Desc: CHGG_01556 [Chaetomium globosum CBS 148.51] gi|88185853|gb|EAQ93321.1| CHGG_01556 [Chaetomium globosum CBS 148.51]
  misc_feature (107)..(251): NCBI GI: 226292457 Blast Desc: PADG_03961 [Paracoccidioides brasiliensis Pb18]
  misc_feature (11)..(245): NCBI GI: 240273175 Blast Desc: conserved [Ajellomyces capsulatus H143]
  misc_feature (107)..(251): NCBI GI: 225680764 Blast Desc: [Paracoccidioides brasiliensis Pb03]
MAISMSLHNSSTYDGYPYLSPDEFAEVCHFLDRRYRQATLGALRQHWRLDLHHALDTSPNAAGHLLTFLQIATPLRDSPVDSLLAARLDSVSLADSQDDNQDMAVDTAMLAAEETDAHVVHQHTRTRSRLRSSYVLYEIHLHPTYRMPCLWFSLHHLPIQESPLDIDTVFRRLVPPHFTDALRRQGPIGAISIDHHPITGLPSFFVHPCLLGDAMAPFQCSKDDYLMVWIGLVGACVGLSIPTEMATTGQT

SEQ ID NO: 19070 - DNA, 2409 bp, Muscodor strobelii
  misc_feature: SGI cDNA ID NO. 566406
  misc_feature: Reduced expression when VOC is produced
  misc_feature: Encodes the peptide sequence at SEQ ID NO 19071
atgtctgccattagacgagctgtagcttgcaatgccgtcgctatcacgcggacacgatgctcaacccaaattagaggcgcccgcgtaacccctataacaagatctcaattccgagcctacaccgcatccgcctcccaacggcaatatgcctttcattcgcagctcgagaatacacctaatgccgacattctcctctcatcgcagaagcccgccgctccgaccaatcctcagactcttacggaaaagatagtacagaaatactccgttggtcttgcgcctgggaagaaagtcaaggctggtgactatgtcacactcaagccgcatcactgcatgacacatggtatgcacaaaatcagatattggccggtagcaaccaagttcatggatattggtgcttcgaagattcacgataatcagcagattgtcatgacattagatcacgacgttcagaacaaatcagaaggcaatttgaagaagtatcgacttattgaggagtttgccgccaagcacggagtcacattttaccctgcgggtcggggtattggccatcaaatcatggtcgaagaaggctacgcctggccggggacagttactgttgcaagtgacagtcattctaatatgtacggtggcatatccagtcttggaacacctgttgtcagaacggatgcagctagcatatgggctaccggtcgaacatggtggcaagtccctcctatcgccaaaatcacattgaccggcatacttcctccgggttgttctggtaaagatgtcatcgttgcgctttgcggccttttcaaccaagatgaggtattgaatcacgccatcgagtttgccggctcagagcaaacaatggccagtatcccaattgagtacatacaccccggcagtccctctccttgcgcgtccgtcgctaatattgttctcagcgaccgcctgaccattgccaacatgacgacagagtggggtgctttgagcggattgttccctgttgatgatatgcttatctcctggtatcgtgcgaaagcaacaatgtcagccgtttctgatagcgccaataaggcccgtctcaaccatgagcgcgtcaacgagatcgatcagaaccgcctggctgctgacgctggcgcgacctatgccaaggagctatatctaaacctgtctaccctctctccctttgtcgctggccccaactctgttaaggtcgctacacctttgaagaatctggaatctgaggacatcgcactcaataaagcatatctagtctcatgcaccaactcaagagcaagtgatatcgcttccgccgcccgtgtcttccgccaggcagttaaagatgggaagcctgctcaaattgcacctggtgtcaaattctacatcgctgcggcctctctacccgagcaacaaattgccgaggaggctggcgactggcaggtgttgcttgactcgggcgccgaaccgcttcctgccggttgtggaccttgcattggcctgggaacgggtttgttggaacccggtgaggttggaatctcagccagtaaccgtaacttcaaaggccgcatgggctctacggcagccaaggcctatcttgcttctcccgagatcgttgctgcaagtgctctccaaggcaagattgccggtcctggctggtatcagaagcccgatggtgtcgagaaagttatcattggcgaaggcagtggcgaccacgtcgcagataaagctcgttcaattgaagacgctctggacagcttgattgggatggccgacagcatgatcgccactgccgaggggactggcgaacagtcctcctccgttgcagctgctgaagaggaaacacttactgaagtccttccgggattccccgagaagattgaaggggaaattgttttttgcgatggtgataacatcaacactgatggcatctatcctggcaagtacacttatcaagacgacgttaccaaagacaagatggcggaagtatgcatggagaactacgacaccgagttccgcaacattgccaaggccggcgacgtattggtcacgggttacaacttcggctgtggctcctcccgcgagcaagccgctaccgctattctagctaagcagattcctctagtggttgcaggctccttcggcaacatcttcagccgcaatagtatcaacaatgcgcttatgggcgttgaagttcctcgtctcgttcaacggctccgcgagacgtacaagaacgacaacgaaaagccattgacacgtcgtacgggatggaagctgctttgggatgtcaggcgatccaaggttgttgttactgagaagggaggcgagtcttgggagcagaaggtcggtgagttgccgccgaacgttcaggacatcatcgctagaggggggcttgaaaaatgggtcaagactcagattgcggcgtaa

SEQ ID NO: 19071 - protein, 802 aa, Muscodor strobelii
  misc_feature: SGI Peptide ID NO. 566406
  misc_feature (78)..(540): Pfam Id: PF00330 Pfam Desc: Aconitase family (aconitate hydratase)
  misc_feature (593)..(729): Pfam Id: PF00694 Pfam Desc: Aconitase C-terminal domain
  misc_feature (410)..(540): Pfam Id: PF00330 Pfam Desc: Aconitase family (aconitate hydratase)
  misc_feature (145)..(280): Pfam Id: PF00330 Pfam Desc: Aconitase family (aconitate hydratase)
  misc_feature (303)..(395): Pfam Id: PF00330 Pfam Desc: Aconitase family (aconitate hydratase)
  misc_feature (616)..(729): Pfam Id: PF00694 Pfam Desc: Aconitase C-terminal domain
  misc_feature (1)..(802): NCBI GI: 46138869 Blast Desc: FG10949.1 [Gibberella zeae PH-1] gi|110810416|sp|Q4HVQ9.1|LYS4_GIBZE RecName: Full=Homoaconitase, mitochondrial; AltName: Full=Homoaconitate hydratase; Flags:
  misc_feature (1)..(802): NCBI GI: 171693005 Blast Desc: protein product [Podospora anserina] gi|170946451|emb|CAP73252.1| protein product [Podospora anserina]
  misc_feature (17)..(802): NCBI GI: 145602518 Blast Desc: MGG_04842 [Magnaporthe grisea 70-15] gi|145010934|gb|EDJ95590.1| MGG_04842 [Magnaporthe grisea 70-15]
  misc_feature (4)..(802): NCBI GI: 85091303 Blast Desc: homoaconitase, mitochondrial precursor [Neurospora crassa OR74A] gi|74629440|sp|Q870W1.1|LYS4_NEUCR RecName: Full=Homoaconitase, mitochondrial; AltName: Full=Homoaconitate
  misc_feature (34)..(801): NCBI GI: 154294950 Blast Desc: BC1G_13341 [Botryotinia fuckeliana B05.10] gi|150844470|gb|EDN19663.1| BC1G_13341 [Botryotinia fuckeliana B05.10]
  misc_feature (34)..(800): NCBI GI: 156066031 Blast Desc: SS1G_01026 [Sclerotinia sclerotiorum 1980] gi|154691885|gb|EDN91623.1| SS1G_01026 [Sclerotinia sclerotiorum 1980]
  misc_feature (2)..(801): NCBI GI: 116205489 Blast Desc: CHGG_10628 [Chaetomium globosum CBS 148.51] gi|110810415|sp|Q2GN26.1|LYS4_CHAGB RecName: Full=Homoaconitase, mitochondrial; AltName: Full=Homoaconitate hydratase; Flags: CBS
  misc_feature (5)..(801): NCBI GI: 238842908 Blast Desc: homoaconitase [Microsporum canis CBS 113480]
  misc_feature (34)..(800): NCBI GI: 212546253 Blast Desc: homoaconitase LysF [Penicillium marneffei ATCC 18224] gi|210064800|gb|EEA18895.1| homoaconitase LysF [Penicillium marneffei ATCC 18224]
  misc_feature (35)..(801): NCBI GI: 239608925 Blast Desc: homoaconitase [Ajellomyces dermatitidis ER-3]
  misc_feature (1)..(802): SWISSPROT Homolog: EC 4.2.1.36 Homoaconitate hydratase
  misc_feature: Useful for introducing or modulating the production of volatile compounds
MSAIRRAVACNAVAITRTRCSTQIRGARVTPITRSQFRAYTASASQRQYAFHSQLENTPNADILLSSQKPAAPTNPQTLTEKIVQKYSVGLAPGKKVKAGDYVTLKPHHCMTHGMHKIRYWPVATKFMDIGASKIHDNQQIVMTLDHDVQNKSEGNLKKYRLIEEFAAKHGVTFYPAGRGIGHQIMVEEGYAWPGTVTVASDSHSNMYGGISSLGTPVVRTDAASIWATGRTWWQVPPIAKITLTGILPPGCSGKDVIVALCGLFNQDEVLNHAIEFAGSEQTMASIPIEYIHPGSPSPCASVANIVLSDRLTIANMTTEWGALSGLFPVDDMLISWYRAKATMSAVSDSANKARLNHERVNEIDQNRLAADAGATYAKELYLNLSTLSPFVAGPNSVKVATPLKNLESEDIALNKAYLVSCTNSRASDIASAARVFRQAVKDGKPAQIAPGVKFYIAAASLPEQQIAEEAGDWQVLLDSGAEPLPAGCGPCIGLGTGLLEPGEVGISASNRNFKGRMGSTAAKAYLASPEIVAASALQGKIAGPGWYQKPDGVEKVIIGEGSGDHVADKARSIEDALDSLIGMADSMIATAEGTGEQSSSVAAAEEETLTEVLPGFPEKIEGEIVFCDGDNINTDGIYPGKYTYQDDVTKDKMAEVCMENYDTEFRNIAKAGDVLVTGYNFGCGSSREQAATAILAKQIPLVVAGSFGNIFSRNSINNALMGVEVPRLVQRLRETYKNDNEKPLTRRTGWKLLWDVRRSKVVVTEKGGESWEQKVGELPPNVQDIIARGGLEKWVKTQIAA

SEQ ID NO: 19072 - DNA, 2265 bp, Muscodor strobelii
  misc_feature: SGI EST ID NO. CUFF.44710.0
  misc_feature: Variant of the nucleotide sequence at SEQ ID NO 19070
ataacagttggccggtagcaaccaagttcatggatattggtgcttcgaagattcacgataatcagcagattgtcatgacattagatcacgacgttcagaacaaatcagaaggcaatttgaagaagtatcgacttattgaggagtttgccgccaagcacggagtcacattttaccctgcgggtcggggtattggccatcaaatcatggtcgaagaaggctacgcctggccggggacagttactgttgcaagtgacagtcattctaatatgtacggtggcatatccagtcttggaacacctgttgtcagaacggatgcagctagcatatgggctaccggtcgaacatggtggcaagtccctcctatcgccaaaatcacattgaccggcatacttcctccgggttgttctggtaaagatgtcatcgttgcgctttgcggccttttcaaccaagatgaggtattgaatcacgccatcgagtttgccggctcagagcaaacaatggccagtatcccaattgacgaccgcctgaccattgccaacatgacgacagagtggggtgctttgagcggattgttccctgttgatgatatgcttatctcctggtatcgtgcgaaagcaacaatgtcagccgtttctgatagcgccaataaggcccgtctcaaccatgagcgcgtcaacgagatcgatcagaaccgcctggctgctgacgctggcgcgacctatgccaaggagctatatctaaacctgtctaccctctctccctttgtcgctggccccaactctgttaaggtcgctacacctttgaagaatctggaatctgaggacatcgcactcaataaagcatatctagtctcatgcaccaactcaagagcaagtgatatcgcttccgccgcccgtgtcttccgccaggcagttaaagatgggaagcctgctcaaattgcacctggtgtcaaattctacatcgctgcggcctctctacccgagcaacaaattgccgaggaggctggcgactggcaggtgttgcttgactcgggcgccgaaccgcttcctgccggttgtggaccttgcattggcctgggaacgggtttgttggaacccggtgaggttggaatctcagccagtaaccgtaacttcaaaggccgcatgggctctacggcagccaaggcctatcttgcttctcccgagatcgttgctgcaagtgctctccaaggcaagattgccggtcctggctggtatcagaagcccgatggtgtcgagaaagttatcattggcgaaggcagtggcgaccacgtcgcagataaagctcgttcaattgaagacgctctggacagcttgattgggatggccgacagcatgatcgccactgccgaggggactggcgaacagtcctcctccgttgcagctgctgaagaggaaacacttactgaagtccttccgggattccccgagaagattgaaggggaaattgttttttgcgatggtgataacatcaacactgatggcatctatcctggcaagtacacttatcaagacgacgttaccaaagacaagatggcggaagtatgcatggagaactacgacaccgagttccgcaacattgccaaggccggcgacgtattggtcacgggttacaacttcggctgtggctcctcccgcgagcaagccgctaccgctattctagctaagcagattcctctagtggttgcaggctccttcggcaacatcttcagccgcaatagtatcaacaatgcgcttatgggcgttgaagttcctcgtctcgttcaacggctccgcgagacgtacaagaacgacaacgaaaagccattgacacgtcgtacgggatggaagctgctttgggatgtcaggcgatccaaggttgttgttactgagaagggaggcgagtcttgggagcagaaggtcggtgagttgccgccgaacgttcaggacatcatcgctagaggggggcttgaaaaatgggtcaagactcagattgcggcgtaaaagtaagtgttgacgaggttgtgtggcgccctggttgtataccttttgtttagtattttagtttcggcaaagagaaaagaaaagagttagtagaggctgttgtgtcggaagaccagtaatgacgttgttcctggcgacattttgaaacgccagagaattagacagaccaattcgaagagacacgaatattcgagaaggctcatcgctcgatggtaacacttacgagcggaggacaagtggaatattgagtgcttacattgaggga

SEQ ID NO: 19073 - DNA, 261 bp, Muscodor strobelii
  misc_feature: SGI cDNA ID NO. 566407
  misc_feature: Encodes the peptide sequence at SEQ ID NO 19074
atggatggactatcagctgcagccagcggcattgctgttgtatccgtcgctttccaactgctcgaacaatgtattaagctccgcgacttctgggaatctgtccgcgatgcgccggaggaagtgaccatcatctccaacgacctcagtctcctctcggctatcctcgaagatatagatcgcaatggcgagatgtcccccgctatcacgatgggtcttatctcttgcaaggctaagattcgagttcgcatgacctctctttaa

SEQ ID NO: 19074 - protein, 86 aa, Muscodor strobelii
  misc_feature: SGI Peptide ID NO. 566407
  misc_feature (11)..(79): NCBI GI: 169619207 Blast Desc: SNOG_12798 [Phaeosphaeria nodorum SN15] gi|111058478|gb|EAT79598.1| SNOG_12798 [Phaeosphaeria nodorum SN15]
  misc_feature (1)..(55): NCBI GI: 156049013 Blast Desc: [Sclerotinia sclerotiorum 1980] gi|154692612|gb|EDN92350.1| [Sclerotinia sclerotiorum 1980]
  misc_feature (1)..(55): NCBI GI: 154317148 Blast Desc: [Botryotinia fuckeliana B05.10] gi|150844893|gb|EDN20086.1| [Botryotinia fuckeliana B05.10]
  misc_feature (1)..(66): NCBI GI: 154317146 Blast Desc: [Botryotinia fuckeliana B05.10] gi|150844892|gb|EDN20085.1| [Botryotinia fuckeliana B05.10]
  misc_feature (1)..(61): NCBI GI: 212526518 Blast Desc: kinesin light chain, [Penicillium marneffei ATCC 18224] gi|210072814|gb|EEA26901.1| kinesin light chain, [Penicillium marneffei ATCC 18224]
  misc_feature (1)..(68): NCBI GI: 154318556 Blast Desc: [Botryotinia fuckeliana B05.10] gi|150857797|gb|EDN32989.1| [Botryotinia fuckeliana B05.10]
  misc_feature (2)..(81): NCBI GI: 154295105 Blast Desc: [Botryotinia fuckeliana B05.10] gi|150844457|gb|EDN19650.1| [Botryotinia fuckeliana B05.10]
  misc_feature (1)..(54): NCBI GI: 156049017 Blast Desc: [Sclerotinia sclerotiorum 1980] gi|154692614|gb|EDN92352.1| [Sclerotinia sclerotiorum 1980]
  misc_feature (8)..(76): NCBI GI: 156050379 Blast Desc: [Sclerotinia sclerotiorum 1980] gi|154692177|gb|EDN91915.1| [Sclerotinia sclerotiorum 1980]
MDGLSAAASGIAVVSVAFQLLEQCIKLRDFWESVRDAPEEVTIISNDLSLLSAILEDIDRNGEMSPAITMGLISCKAKIRVRMTSL

SEQ ID NO: 19075 - DNA, 414 bp, Muscodor strobelii
  misc_feature: SGI cDNA ID NO. 566408
  misc_feature: Encodes the peptide sequence at SEQ ID NO 19076
atgcatggcgagtctgccgagggcgagatgagtgatgtctatgcctatggttgtgccttccacggtcgttacgttcttcagaagagtcctcgcggcgaagtgccgggggtctcggtgcgtcttggtgccctcccctcagtgtcgggccagcaggcagtgcttgaccgctatggtggcccggaaatgtatcgcgacggaggccataagcagctgatccagctgacaggttggattcgtcggaggcgtcagagtcatctgagctttcgggttcacttgcagggttttgaattctcactcttcggtctcggcgatgatgacgacagtggtgatggcaatggtgatgtcgatgatgatggcggtgccgatggggagagtgtgattctgatcgtgatcgatgatgtcgcgatgtcatga

SEQ ID NO: 19076 - protein, 137 aa, Muscodor strobelii
  misc_feature: SGI Peptide ID NO. 566408
MHGESAEGEMSDVYAYGCAFHGRYVLQKSPRGEVPGVSVRLGALPSVSGQQAVLDRYGGPEMYRDGGHKQLIQLTGWIRRRRQSHLSFRVHLQGFEFSLFGLGDDDDSGDGNGDVDDDGGADGESVILIVIDDVAMS

SEQ ID NO: 19077 - DNA, 1086 bp, Muscodor strobelii
  misc_feature: SGI cDNA ID NO. 566409
  misc_feature: Encodes the peptide sequence at SEQ ID NO 19078
atgtctaaatacgaccagtatgagggtttccaggtggaggcccccgagacgtacactacgtttgtgaagaggaagttcgacaccaagccgtttgaggaccacgacgttgagatcaagatcgagtgctgcggtgtctgcagcagcgacgttcacaccatcagcggtggatggggagaccagaagtttcccctggctgtgggccacgagatcgtcggaaaggccatccgggttggcgacaaggtcaccaatgttaaggtcggtgaccgcgttggtgttggcgcacagagttggtcctgcttagactgccgccaatgcaagaacaacaacgagacctactgccttaagcagatggatacttatggcgctacctggcccgagactggcatcgtcactcagggtggatactcttctcatgtgcgaactcacgaacactgggtattcccaattcccgagtcgattcccagcgagctcgcagcccccatgctgtgcgctggtattactctatacagccctctggttcgcaacggcgcaggaccaggcaagaaggtggctatcgttggtcttggtggccttggacactttggtctgctttgggcaaaggctcttggcgccgaaacctgggtgatctctcgctcacatgcaaaggaagaagatgcgaagaagatgggtgccgacggcttcctggccacacaagacaaagactggaacaagccacaccagatgactttcgacttgattatcagcacctccaacaactttggtgaagggttcgaccttgacggatatttgtctctgctcgatgttcacggcaagttcatctgcacaggtgtccccgaagactcaacgcttaagatgtcaactggcacgctatggcccaacggctgcatgatcggcacttctcatcttggtagccgacgggagatgttggccatgttgaagttggctgccgataagggaattaagtcctgggtagagactattcctatcagcgcagagggtcttaagactgcagttcagagattacagaagactgacgtcagatatcggttcaccatggtggactacgacaaagaattcggtgcttaa

SEQ ID NO: 19078 - protein, 361 aa, Muscodor strobelii
  misc_feature: SGI Peptide ID NO. 566409
  misc_feature (33)..(149): Pfam Id: PF08240 Pfam Desc: Alcohol dehydrogenase GroES-like domain
  misc_feature (179)..(317): Pfam Id: PF00107 Pfam Desc: Zinc-binding dehydrogenase
  misc_feature (1)..(361): NCBI GI: 116208718 Blast Desc: CHGG_03652 [Chaetomium globosum CBS 148.51] gi|88184249|gb|EAQ91717.1| CHGG_03652 [Chaetomium globosum CBS 148.51]
  misc_feature (1)..(361): NCBI GI: 171685218 Blast Desc: protein product [Podospora anserina] gi|170942570|emb|CAP68222.1| protein product [Podospora anserina]
  misc_feature (1)..(360): NCBI GI: 119491504 Blast Desc: oxidoreductase, zinc-binding [Neosartorya fischeri NRRL 181] gi|119411433|gb|EAW21376.1| oxidoreductase, zinc-binding [Neosartorya fischeri NRRL 181]
  misc_feature (1)..(360): NCBI GI: 121705848 Blast Desc: oxidoreductase, zinc-binding [Aspergillus clavatus NRRL 1] gi|119399333|gb|EAW09761.1| oxidoreductase, zinc-binding [Aspergillus clavatus NRRL 1]
  misc_feature (1)..(361): NCBI GI: 85086693 Blast Desc: NCU11179 [Neurospora crassa OR74A] gi|28918826|gb|EAA28495.1| conserved [Neurospora crassa OR74A]
  misc_feature (1)..(361): NCBI GI: 154301946 Blast Desc: BC1G_10210 [Botryotinia fuckeliana B05.10] gi|150855602|gb|EDN30794.1| BC1G_10210 [Botryotinia fuckeliana B05.10]
  misc_feature (1)..(360): NCBI GI: 156051456 Blast Desc: SS1G_07135 [Sclerotinia sclerotiorum 1980] gi|154704913|gb|EDO04652.1| SS1G_07135 [Sclerotinia sclerotiorum 1980]
  misc_feature (1)..(360): NCBI GI: 259486204 Blast Desc: TPA: oxidoreductase, zinc-binding (AFU_orthologue; AFUA_3G11900) [Aspergillus nidulans FGSC A4]
  misc_feature (1)..(360): NCBI GI: 115396546 Blast Desc: NADP-dependent alcohol dehydrogenase VI [Aspergillus terreus NIH2624] gi|114193481|gb|EAU35181.1| NADP-dependent alcohol dehydrogenase VI [Aspergillus terreus NIH2624]
  misc_feature (1)..(359): NCBI GI: 169770849 Blast Desc: [Aspergillus oryzae RIB40] gi|238486676|ref|XP_002374576.1| oxidoreductase, zinc-binding [Aspergillus flavus NRRL3357] gi|83767753|dbj|BAE57892.1| protein
  misc_feature (1)..(359): SWISSPROT Homolog: EC 1.1.1.2 Alcohol dehydrogenase (NADP(+))
MSKYDQYEGFQVEAPETYTTFVKRKFDTKPFEDHDVEIKIECCGVCSSDVHTISGGWGDQKFPLAVGHEIVGKAIRVGDKVTNVKVGDRVGVGAQSWSCLDCRQCKNNNETYCLKQMDTYGATWPETGIVTQGGYSSHVRTHEHWVFPIPESIPSELAAPMLCAGITLYSPLVRNGAGPGKKVAIVGLGGLGHFGLLWAKALGAETWVISRSHAKEEDAKKMGADGFLATQDKDWNKPHQMTFDLIISTSNNFGEGFDLDGYLSLLDVHGKFICTGVPEDSTLKMSTGTLWPNGCMIGTSHLGSRREMLAMLKLAADKGIKSWVETIPISAEGLKTAVQRLQKTDVRYRFTMVDYDKEFGA

SEQ ID NO: 19079 - DNA, 2863 bp, Muscodor strobelii
  misc_feature: SGI EST ID NO. CUFF.44756.0
  misc_feature: Variant of the nucleotide sequence at SEQ ID NO 19077
cgagccgatacgatggatagtgggccttcagctagggatgaaaacttcaacgccgccaatcgaaaaccatgccaagcggcagccgagataagtgtcaatcggtagattgagtagcgcgtgggcgctgcataaacgtgttctgaacgtgtcgtcggcgtgggacacgccgcctatccttgtcgccgcgctccaatcatcccggtgactaagagcttggctaaatagtggactcatctccatgagctccaagcttcatcccaccttactacgtgggcttggagaggagaaacgtgaatcgcgatgcggggttgcgttggccattattcgcttcgaccggaaagaaatgcgacaaatgcggaacacagactcgcgatacccctcgcgaaactgcgaattcgctcaatttttattatgtgttgagaatcttcacttgcttgcccctcgctctgagcttctttccgctttccataccccgaattgagtacaccgtctacaaccaaagccgtattcatcatcatgtctaaatacgaccagtatgagggtttccaggtggaggcccccgagacgtacactacgtttgtgaagaggaagttcgacaccaagccgtttgaggaccacgacgttgagatcaagatcgagtgctgcggtgtctgcagcagcgacgttcacaccatcagcggtggatggggagaccagaagtttcccctggctgtgggccacgagatcgtcggaaaggccatccgggttggcgacaaggtcaccaatgttaaggtcggtgaccgcgttggtgttggcgcacagagttggtcctgcttagactgccgccaatgcaagaacaacaacgagacctactgccttaagcagatggatacttatggcgctacctggcccgagactggcatcgtcactcagggtggatactcttctcatgtgcgaactcacgaacactgggtattcccaattcccgagtcgattcccagcgagctcgcagcccccatgctgtgcgctggtattactctatacagccctctggttcgcaacggcgcaggaccaggcaagaaggtggctatcgttggtcttggtggccttggacactttggtctgctttgggcaaaggctcttggcgccgaaacctgggtgatctctcgctcacatgcaaaggaagaagatgcgaagaagatgggtgccgacggcttcctggccacacaagacaaagactggaacaagccacaccagatgactttcgacttgattatcagcacctccaacaactttggtgaagggttcgaccttgacggatatttgtctctgctcgatgttcacggcaagttcatctgcacaggtgtccccgaagactcaacgcttaagatgtcaactggcacgctatggcccaacggctgcatgatcggcacttctcatcttggtagccgacgggagatgttggccatgttgaagttggctgccgataagggaattaagtcctgggtagagactattcctatcagcgcagagggtcttaagactgcagttcagagattacagaagactgacgtcagatatcggttcaccatggtggactacgacaaagaattcggtgcttaacagcgaccgtcatctcatagttagatcgcactatagagggggatgaaacggatttcatgtgctaaaactagggtggtaaatcaaaccaattaaaaatgtattgaatataccgaatgtgtgtctatcgttgcttttagaagtctagcatcatgggtcgtcgatgacgacaatgtacctccttggttcgttataatactcataaggcgacctgtgtctactaccgtgatgtccgtgatgtccaacattgtattggtaagcctgataatgatcatgatttcttctcggccgatgacctctgtcatgagatgcatggcgagtctgccgagggcgagatgagtgatgtctatgcctatggttgtgccttccacggtcgttacgttcttcagaagagtcctcgcggcgaagtgccgggggtctcggtgcgtcttggtgccctcccctcagtgtcgggccagcaggcagtgcttgaccgctatggtggcccggaaatgtatcgcgacggaggccatgtgggtcggatcccgagccgggacctgagatcgcatattgaaatgtcccgtctggattcgggcgtgcttgccattgaaaccttccgttttgacttagtactggggcggaccagaccgggggaggcatctgaggctgaggttgaacgatgacaacatcagaagcagctgatccagctgacaggttggattcgtcggaggcgtcagagtcatctgagctttcgggttcacttgcagggttttgaattctcactcttcggtctcggcgatgatgacgacagtggtgatggcaatggtgatgtcgatgatgatggcggtgccgatggggagagtgtgattctgatcgtgatcgatgatgtcgcgatgtcatgacgtctgtggtagtctgctggacggataagaagacctttatgatgcagaataatgacccaggtgtatgctcgatcaagcgggtcataaattttgaaatgtttgtgatcgcgtctggaaattgtgctcctctcgagacttgggaatgcagtttagggaataatccatcctgattcaggtgtggatggctttgatggaatactgatataacacggcgcgtagcttttctcgaagatagtttctttcacttgcccctgagtgaccaatctgacgattgagccatcatgtcgaacatggcactgaaagggaggacctgaagaagtctacggtgtacagtagttcatgcaagccgttaagccgttgggtttgcagtttttatatagcgc

SEQ ID NO: 19080 - DNA, 999 bp, Muscodor strobelii
  misc_feature: SGI cDNA ID NO. 566410
  misc_feature: Encodes the peptide sequence at SEQ ID NO 19081
atgtcagaaccgatacgaactgttcttgtgactggcgccactggcttcattggtgctcatgtagtcgatcagctgttgagtcgaggactcaaagtgcgcggtgcaactcggacactcgctaagggtaacgcgatggtcgaggcccgtccacagtttgcctcttcacttgactttgttgagattgatgactttgagaaccctggtcggctcgatgaggctgtcaaaggcgtcgatgccgtgattcacgttgctagtcccctaagctacgacacgaaagacaacgagaaagaacttataatcccggcaataaatggtgtaaaaggcattctcgaagcgtcggtgaacagcgacgtaaagcgaattgtgatgacctcatcttttgcatccgtgatgaatgccgaccgcaaggaatcatcgtatttcttatatacagagaacgattggaatccgatcacatacgaagaggccacagcttcgacaacaccggcacacattgcgtatcgcggtgctaagaagttcgccgagaaagccgcatgggactttttacgagaccagaagcctaactttgaccttgtcacaatatgtccatcgatgactttcggacctgtagtacatccgatatcaagcccgagtcaactaaatgagaccaatgccatgctatggagggtatcccaaggagagcctttagcaacggctagggtaccaaactggattgacgttcgcgatctagcgaaggtccacgtagaggctctccttcggccagaggctggtggtaaacgattcctcccttggggttcagagagattttcctacgatctcgctgcacaaataatggaggataacttcgagtgggccaagggacaggtgaaacgtgaggagcagcacccagatgcatcctacggggttgatggtgagactactgccaacatgttaggtcttcaatacacgagatttaaagatacgatagtagactttataaaccagatatcggaattatag

SEQ ID NO: 19081 - protein, 332 aa, Muscodor strobelii
  misc_feature: SGI Peptide ID NO. 566410
  misc_feature (9)..(291): Pfam Id: PF01073 Pfam Desc: 3-beta hydroxysteroid dehydrogenase/isomerase family
  misc_feature (8)..(274): Pfam Id: PF01370 Pfam Desc: NAD dependent epimerase/dehydratase family
  misc_feature (10)..(278): Pfam Id: PF07993 Pfam Desc: Male sterility protein
  misc_feature (9)..(31): Pfam Id: PF01073 Pfam Desc: 3-beta hydroxysteroid dehydrogenase/isomerase family
  misc_feature (69)..(132): Pfam Id: PF01073 Pfam Desc: 3-beta hydroxysteroid dehydrogenase/isomerase family
  misc_feature (6)..(29): Pfam Id: PF00106 Pfam Desc: short chain dehydrogenase
  misc_feature (8)..(84): Pfam Id: PF01370 Pfam Desc: NAD dependent epimerase/dehydratase family
  misc_feature (10)..(28): Pfam Id: PF07993 Pfam Desc: Male sterility protein
  misc_feature (8)..(33): Pfam Id: PF05368 Pfam Desc: NmrA-like family
  misc_feature (8)..(86): Pfam Id: PF03435 Pfam Desc: Saccharopine dehydrogenase
  misc_feature (1)..(332): NCBI GI: 116203067 Blast Desc: CHGG_09418 [Chaetomium globosum CBS 148.51] gi|88177936|gb|EAQ85404.1| CHGG_09418 [Chaetomium globosum CBS 148.51]
  misc_feature (1)..(332): NCBI GI: 261359909 Blast Desc: 3-beta hydroxysteroid dehydrogenase/isomerase family protein [Verticillium albo-atrum VaMs.102]
  misc_feature (3)..(328): NCBI GI: 256724977 Blast Desc: NECHADRAFT_91452 [Nectria haematococca mpVI 77-13-4]
  misc_feature (5)..(332): NCBI GI: 255939338 Blast Desc: Pc16g00130 [Penicillium chrysogenum Wisconsin 54-1255] gi|211585061|emb|CAP92683.1| Pc16g00130 [Penicillium chrysogenum Wisconsin 54-1255]
  misc_feature (1)..(329): NCBI GI: 212540710 Blast Desc: 3-beta hydroxysteroid dehydrogenase/isomerase family protein [Penicillium marneffei ATCC 18224] gi|210067809|gb|EEA21901.1| 3-beta hydroxysteroid family protein
  misc_feature (5)..(328): NCBI GI: 67516967 Blast Desc: AN0765.2 [Aspergillus nidulans FGSC A4] gi|40746251|gb|EAA65407.1| AN0765.2 [Aspergillus nidulans FGSC A4] gi|259488957|tpe|CBF88830.1| TPA: 3-beta hydroxysteroid FGSC
  misc_feature (5)..(328): NCBI GI: 242792338 Blast Desc: 3-beta hydroxysteroid dehydrogenase/isomerase family protein [Talaromyces stipitatus ATCC 10500] gi|218718520|gb|EED17940.1| 3-beta hydroxysteroid family protein
  misc_feature (5)..(308): NCBI GI: 115437476 Blast Desc: conserved [Aspergillus terreus NIH2624] gi|114188635|gb|EAU30335.1| conserved [Aspergillus terreus NIH2624]
  misc_feature (1)..(329): NCBI GI: 242800992 Blast Desc: NAD dependent epimerase/dehydratase, [Talaromyces stipitatus ATCC 10500] gi|218717025|gb|EED16446.1| NAD dependent epimerase/dehydratase, [Talaromyces stipitatus ATCC 10500]
  misc_feature (8)..(332): NCBI GI: 255938496 Blast Desc: Pc14g00230 [Penicillium chrysogenum Wisconsin 54-1255] gi|211584639|emb|CAP74164.1| Pc14g00230 [Penicillium chrysogenum Wisconsin 54-1255]
  misc_feature (7)..(329): SWISSPROT Homolog: EC 1.1.1.283 Methylglyoxal reductase (NADPH-dependent)
MSEPIRTVLVTGATGFIGAHVVDQLLSRGLKVRGATRTLAKGNAMVEARPQFASSLDFVEIDDFENPGRLDEAVKGVDAVIHVASPLSYDTKDNEKELIIPAINGVKGILEASVNSDVKRIVMTSSFASVMNADRKESSYFLYTENDWNPITYEEATASTTPAHIAYRGAKKFAEKAAWDFLRDQKPNFDLVTICPSMTFGPVVHPISSPSQLNETNAMLWRVSQGEPLATARVPNWIDVRDLAKVHVEALLRPEAGGKRFLPWGSERFSYDLAAQIMEDNFEWAKGQVKREEQHPDASYGVDGETTANMLGLQYTRFKDTIVDFINQISEL

SEQ ID NO: 19082 - DNA, 1410 bp, Muscodor strobelii
  misc_feature: SGI EST ID NO. CUFF.44755.1
  misc_feature: Variant of the nucleotide sequence at SEQ ID NO 19080
ttcgcacatgagaagagtatccaccctgagtgacgatgccagtctcgggccaggtagcgccataagtatccatctgcttaaggcagtaggtctcgttgttgttcttgcattggcggcagtctaagcaggaccaactctgtgcgccaacaccaacgcggtcaccgaccttaacattggtgaccttgtcgccaacccggatggcctttccgacgatctctgtatcgcgcattaataaaaggctcacgtcacccacccagattgttcttagattcttctcgactcaccgtggcccacagccaggggaaacttctggtctccccatccaccgctgatggtgtgaacgtcgctgctgcagacaccgcagcactcgatcttgatctcaacgtcgtggtcctcaaacggcttggtgtcgaacttcctcttcacaaacgtagtgtacgtctcgggggcctccacctggaaaccctcatactggtcgtatttagacatgatgatgaatacggctttggttgtagacggtgtactcaattcggggtatggaaagcggaaagaagctcagagcgaggggcaagcaagtgaagattctcaacacataataaaaattgagcgaattcgcagtttcgcgaggggtatcgcgagtctgtgttccgcatttgtcgcatttctttccggtcgaagcgaataatggccaacgcaaccccgcatcgcgattcacgtttctcctctccaagcccacgtagtaaggtgggatgaagcttggagctcatggagatgagtccactatttagccaagctcttagtcaccgggatgattggagcgcggcgacaaggataggcggcgtgtcccacgccgacgacacgttcagaacacgtttatgcagcgcccacgcgctactcaatctaccgattgacacttatctcggctgccgcttggcatggttttcgattggcggcgttgaagttttcatccctagctgaaggcccactatccatcgtatcggctcggcttttcaactccaccaatccgatagcgtagacaccctacttaagtacaagcataagtaactacttgatcgggaagaggactattggcacatggtattagatggacagtgaccagcatcctagctctgctatcgataggtctggccaccatgtcagaaccgatacgaactgttcttgtgactggcgccactggcttcattggtgctcatgtagtcgatcagctgttgagtcgaggactcaaagtgcgcggtgcaactcggacactcgctaagggtaacgcgatggtcgaggcccgtccacagtttgcctcttcacttgactttgttgagattgatgactttgagaaccctggtcggctcgatgaggctgtcaaaggcgtcgatgccgtgattcacgttgctagtg

SEQ ID NO: 19083 - DNA, 1611 bp, Muscodor strobelii
  misc_feature: SGI cDNA ID NO. 566411
  misc_feature: Encodes the peptide sequence at SEQ ID NO 19084
atgtctgaccaaagtccttcatattctactgaagccaagcccaagcttccctcggaagaagcagagcacttcgagactcctagcgcgagcaaggttgtcaacttcgtcaccgataactcccacgaggtgtccaacgatgctaattggacgttctggcaaacagtcagaaactactggcatgcgatggccatctgcttcggctgcgacaagatgcccggcaatattgtcgcattagagggtttcatcgagcaattcggtacctacagtgaggcgaagggcaaatacgctctcgatccgcaacacgttgctctctggggtgctgtctacgctgcctcgctcatcttcattctcctcatcggcaattggcccgttgaccgctttggccgtcgacctgctctctgggctgtgcagggcttcatgatcgttgctgctcttatcgagattttcgcaacgaactggacccattggcttgctgccaaaatcctcaatggattttcagtcggtgtgaatcagatgagcgcgaccacatatatctccgaaattgcgccaacaaaggctcgaggtgctgctcttggcttctatcagctattctgggctcttggatcattcggctgtgccatcgccttgcaacttgtttcacagttggggcctgagaaatggaggaatgcagtctattcccaatgggtttttgtcggaatcgccatcgtcgtccttcttttcatgcctgagaccccgcgcttctacgcgcaaaggggccatcacgagaggtcaaagaagatcatgaagcggatctatggctctgtccctggatttgatcttgaacatgagtactctatcatccttaaggagattgaagacggaaagatgctgtccaagagccaagagggtgttaccttgttggactgcttccgcgggaccaatcttcgtcggactattgtttcccttgtacctttcaataaccagatctgggatggtgctccggttatcttcatctacactgcctacttcttccagttggcgggcattgcgaagccattcattgccacccttgtcgttaatactgtgcttgtcgtctttgttgccatcagcttctatactactgatcgcattggacggcgtcccttgttggtatatgtcggtgccttcatggtcccgctgctgtttattctgggtggtatcttgaagttgccgaaaacaacttctactggtgccgctttgatcgccgtctctgctgtctgggtcgctgcgtactcatcgtccgctggtcctctgggcttcactttccttgccgactgctctaccgccgtgctgagagctaagaccgccaatgtgggcgcgcttgccttcgcgcttttctcgctcatcactacatactcgacgcctatcatgttgagttccccgaacttcggcgtctctgcgacgctgtttttcttcggtgccactgctgcagttttcgtcgtcatcatgtggtatgtcatacctgagactaagaaccgatcttaccttgagcttgatgaaatgtttgagctccgcattcctacaaggaagttcactacatatgaaacatctgtggaccgtgccaggaaggcgacaatgggtgttgcggtctaa

SEQ ID NO: 19084 - protein, 536 aa, Muscodor strobelii
  misc_feature: SGI Peptide ID NO. 566411
  misc_feature (59)..(460): Pfam Id: PF07690 Pfam Desc: Major Facilitator Superfamily
  misc_feature (62)..(508): Pfam Id: PF00083 Pfam Desc: Sugar (and other) transporter
  misc_feature (107)..(460): Pfam Id: PF07690 Pfam Desc: Major Facilitator Superfamily
  misc_feature (124)..(508): Pfam Id: PF00083 Pfam Desc: Sugar (and other) transporter
  misc_feature (18)..(533): NCBI GI: 256723994 Blast Desc: NECHADRAFT_86296 [Nectria haematococca mpVI 77-13-4]
  misc_feature (73)..(536): NCBI GI: 261354195 Blast Desc: sugar transporter [Verticillium albo-atrum VaMs.102]
  misc_feature (73)..(523): NCBI GI: 256727794 Blast Desc: NECHADRAFT_45922 [Nectria haematococca mpVI 77-13-4]
  misc_feature (61)..(525): NCBI GI: 58264312 Blast Desc: sugar transporter [Cryptococcus neoformans var. neoformans JEC21] gi|134107646|ref|XP_777434.1| CNBB0080 [Cryptococcus neoformans var. neoformans B-3501A] CNBB0080 var.
  misc_feature (2)..(529): NCBI GI: 256724243 Blast Desc: NECHADRAFT_53594 [Nectria haematococca mpVI 77-13-4]
  misc_feature (5)..(522): NCBI GI: 256720612 Blast Desc: NECHADRAFT_85476 [Nectria haematococca mpVI 77-13-4]
  misc_feature (51)..(532): NCBI GI: 256724763 Blast Desc: NECHADRAFT_48371 [Nectria haematococca mpVI 77-13-4]
  misc_feature (3)..(526): NCBI GI: 256719891 Blast Desc: NECHADRAFT_56685 [Nectria haematococca mpVI 77-13-4]
  misc_feature (52)..(525): NCBI GI: 256721871 Blast Desc: NECHADRAFT_54550 [Nectria haematococca mpVI 77-13-4]
  misc_feature (62)..(527): NCBI GI: 256728263 Blast Desc: NECHADRAFT_87876 [Nectria haematococca mpVI 77-13-4]
MSDQSPSYSTEAKPKLPSEEAEHFETPSASKVVNFVTDNSHEVSNDANWTFWQTVRNYWHAMAICFGCDKMPGNIVALEGFIEQFGTYSEAKGKYALDPQHVALWGAVYAASLIFILLIGNWPVDRFGRRPALWAVQGFMIVAALIEIFATNWTHWLAAKILNGFSVGVNQMSATTYISEIAPTKARGAALGFYQLFWALGSFGCAIALQLVSQLGPEKWRNAVYSQWVFVGIAIVVLLFMPETPRFYAQRGHHERSKKIMKRIYGSVPGFDLEHEYSIILKEIEDGKMLSKSQEGVTLLDCFRGTNLRRTIVSLVPFNNQIWDGAPVIFIYTAYFFQLAGIAKPFIATLVVNTVLVVFVAISFYTTDRIGRRPLLVYVGAFMVPLLFILGGILKLPKTTSTGAALIAVSAVWVAAYSSSAGPLGFTFLADCSTAVLRAKTANVGALAFALFSLITTYSTPIMLSSPNFGVSATLFFFGATAAVFVVIMWYVIPETKNRSYLELDEMFELRIPTRKFTTYETSVDRARKATMGVAV

SEQ ID NO: 19085 - DNA, 969 bp, Muscodor strobelii
  misc_feature: SGI cDNA ID NO. 566412
  misc_feature: Encodes the peptide sequence at SEQ ID NO 19086
atgccgtctgcaactgacgctcctgtggttctccggctctcggatgaggagcgcgacacgggcgttcttagcgaccatcatctctatgacgcagtcgaagctttcttcaacgatggatttgtcgttctcgagaatgctgtacgggaagagttgattgacaagttgaatgagagaatgcttgtcgacacagacaagcttctagcaggcgagggcttgtcgcactatgccccgctgaacggaaaggtggccgagaagggtgccaaagccggcggaaatctttcccaggtaccaccgctagaaaaggaatggttatcgccggagatctttgccaacaagcacgccgcccaagtcatttcgtccattctcggcccacagcccgaagttcatttcattcgctctaacacgctccttaataacgatgatcgccaacgcgtccactctgacatgcgcttcgagcaccctacacaccccttcgctattacacagaatgtgtgtctatgcgactgtgggccagaaaacggaatgacagagctgtggctcggcacacagaataccggggtagaaatccgaccgcagctgggagagcctttcattgaagaatcagtagtagaagagagaagaaagatcagaccaccactgtatccccacgtcaagaaagggtctatccttgtaagagatttgcgactatggcacgccggcatgccgaatcccaccgacaatgtcagaattctcctaactatcaactattatgcaaagtggttcaagaacggtgctctcgtcagcttccccgagtcgctccgctcccacgttgcgggactagagaagtatgccgacattaagatcgccgcaacatacgagcccgacgagggttttaattatttaagtagtaaatttagcaacaacttcagctctatgcttcatcctgaagtttgggagaagatagctcatgtaaagacggcaaagggttag

SEQ ID NO: 19086 - protein, 322 aa, Muscodor strobelii
  misc_feature: SGI Peptide ID NO. 566412
  misc_feature (33)..(244): Pfam Id: PF05721 Pfam Desc: Phytanoyl-CoA dioxygenase (PhyH)
  misc_feature (4)..(302): NCBI GI: 134114496 Blast Desc: CNBH0030 [Cryptococcus neoformans var. neoformans B-3501A] gi|50256710|gb|EAL19431.1| CNBH0030 [Cryptococcus neoformans var. neoformans B-3501A]
  misc_feature (4)..(302): NCBI GI: 58271198 Blast Desc: [Cryptococcus neoformans var. neoformans JEC21] gi|57229014|gb|AAW45448.1| expressed protein [Cryptococcus neoformans var. neoformans JEC21]
  misc_feature (2)..(302): NCBI GI: 189205983 Blast Desc: phytanoyl-CoA dioxygenase family protein [Pyrenophora tritici-repentis Pt-1C-BFP] gi|187975419|gb|EDU42045.1| phytanoyl-CoA dioxygenase family protein [Pyrenophora Pt-1C-BFP]
  misc_feature (4)..(302): NCBI GI: 119467047 Blast Desc: phytanoyl-CoA dioxygenase, [Neosartorya fischeri NRRL 181] gi|119405482|gb|EAW15433.1| phytanoyl-CoA dioxygenase, [Neosartorya fischeri NRRL 181]
  misc_feature (3)..(303): NCBI GI: 242801539 Blast Desc: phytanoyl-CoA dioxygenase family protein [Talaromyces stipitatus ATCC 10500] gi|218717133|gb|EED16554.1| phytanoyl-CoA dioxygenase family protein [Talaromyces stipitatus ATCC 10500]
  misc_feature (5)..(302): NCBI GI: 169610882 Blast Desc: SNOG_08549 [Phaeosphaeria nodorum SN15] gi|111062597|gb|EAT83717.1| SNOG_08549 [Phaeosphaeria nodorum SN15]
  misc_feature (1)..(303): NCBI GI: 115383854 Blast Desc: conserved [Aspergillus terreus NIH2624] gi|114196166|gb|EAU37866.1| conserved [Aspergillus terreus NIH2624]
  misc_feature (3)..(302): NCBI GI: 169785817 Blast Desc: [Aspergillus oryzae RIB40] gi|238506719|ref|XP_002384561.1| conserved [Aspergillus flavus NRRL3357] gi|83776117|dbj|BAE66236.1| protein product oryzae]
  misc_feature (9)..(303): NCBI GI: 145240539 Blast Desc: An08g08010 [Aspergillus niger] gi|134077438|emb|CAK45692.1| protein product [Aspergillus niger]
  misc_feature (6)..(302): NCBI GI: 212540532 Blast Desc: phytanoyl-CoA dioxygenase family protein [Penicillium marneffei ATCC 18224] gi|210067720|gb|EEA21812.1| phytanoyl-CoA dioxygenase family protein [Penicillium marneffei ATCC 18224]
MPSATDAPVVLRLSDEERDTGVLSDHHLYDAVEAFFNDGFVVLENAVREELIDKLNERMLVDTDKLLAGEGLSHYAPLNGKVAEKGAKAGGNLSQVPPLEKEWLSPEIFANKHAAQVISSILGPQPEVHFIRSNTLLNNDDRQRVHSDMRFEHPTHPFAITQNVCLCDCGPENGMTELWLGTQNTGVEIRPQLGEPFIEESVVEERRKIRPPLYPHVKKGSILVRDLRLWHAGMPNPTDNVRILLTINYYAKWFKNGALVSFPESLRSHVAGLEKYADIKIAATYEPDEGFNYLSSKFSNNFSSMLHPEVWEKIAHVKTAKG

SEQ ID NO: 19087 - DNA, 382 bp, Muscodor strobelii
  misc_feature: SGI EST ID NO. CUFF.44730.0
  misc_feature: Variant of the nucleotide sequence at SEQ ID NO 19085
caccccttcgctattacacagaatgtgtgtctatgcgactgtgggccagaaaacggaatgacagagctgtggctcggcacacagaataccggggtagaaatccgaccgcagctgggagagcctttcattgaagaatcagtagtagaagagagaagaaagatcagaccaccactgtatccccacgtcaagaaagggtctatccttgtaagagatttgcgactatggcacgccggcatgccgaatcccaccgacaatgtcagaattctcctaactatcaactattatgcaaagtggttcaagaacggtgctctcgtcagcttccccgagtcgctccgctcccacgttgcgggactagagaagtatgccgacattaagatcgccg

SEQ ID NO: 19088 - DNA, 1869 bp, Muscodor strobelii
  misc_feature: SGI cDNA ID NO. 566413
  misc_feature: Encodes the peptide sequence at SEQ ID NO 19089
atggaacctgcgccaactaccgacgagaggaatggcgaggacaatccattgggatcatcgcaagtacagctccgccgcacacgcaaatttccgcgatcgaaagccggttgtctcacttgcaagcgacgcaaggtcaaatgcgatgagtcgcagccaaggtgctcgcattgcgagcggctcaacatgccatgcaaatggcagcccgcgtccaatggaaatggggaaagtagggctgctggaacagcaggtagaagtccgttgatgcggactccagcgcttgcatctttcagtctagccggttctccggatgctgcttcttttcagtctcagccccatccgggcggcgttgaagtcttcgactacgcgagcttcgtgtggagcggtagtgatgtatggccactgccaacagtcgacatcggccaaaatatcagtctagatccacatccgatgaatctagattatgacacccaatcccaaacccccaggggaacaccacaggcagctcaggtcgactcaagtcgcaccctgccgttgcaccctcgcgatacgtctgaggcctcaatcgtgtcggataagaccccgcagactaatcaggaatttgaaggccaagaaacaccagagaatctagacttaatccaatatttcatccacgcagtaacacctccgatactgtcggaagttgaagcccaaaagaactggatcacaatgcgtaagatcttgatgaagatggccggagattctaggatggtccgatgggccatcttggctttctcaaacgtgatgctgtgtcgtcgagatggtgattggatggcaagtcaacaaaatcattatgggaacgccgttgctgaggtagctgcatacgatcaagatactccagcattggttcaacatagttctcgacgcgagaaattgcttgccacacttttcttcctaagctacgtcgacatactagaggcgcgaattgaagatgcccatcgacatctcaaacgagcttacactatcttccagcaagggcacaaagatggctttgttccagtagagaaacagttactactctggctccgcctgcttgacgcgcggaccgtccctgctggtggtgaaggtttgttcttgtccgaagacaacgagggactcctgcttcaaacctccccggctagttacaatggggaagacttggctaaggatgattacgacgacggcgatatcgaagatgaaatattccaagtactataccagcctggatacatattcttccaaaaggtacaaagcttcgtcggtcgcattgctaagatcgacccgtggcatcgctcgcgagggagcgttgaggacgaaaccgaggttatgggtaaggctgcagctattgctgccgatctcagaactttatatgagcaacggccctctttcatcgatgtcgctgtcacaggaaaacttgctgctcctcacatttcagcgaacttggcattcacgatcacgagggcattcaggacgtatctaacaaactactatgctagtaaaatccacttgcacagagtggcatataaacccttcccacttactgcagaaacactggacgcaatggatcacatccggcgtttgactaaactcatcgctgagggccttgatggagatgatccgatgcctatcaatatgctttggccgttgttattactggggacagaagaacaggatctggacactcgggcatggataaagacacatatgttacgcatggagaaaatcgcgagtcatgcgaggatcactgcgcaggtccttgaggaagtgcaaaatcgccaggatgcctcgaaggtgagagttgatattggcttggttatgcgcgagacattcaatctacgatttgctgtcgtttga

SEQ ID NO: 19089 - protein, 622 aa, Muscodor strobelii
  misc_feature: SGI Peptide ID NO. 566413
  misc_feature (35)..(72): Pfam Id: PF00172 Pfam Desc: Fungal Zn(2)-Cys(6) binuclear cluster domain
  misc_feature (28)..(622): NCBI GI: 46110361 Blast Desc: FG02062.1 [Gibberella zeae PH-1]
  misc_feature (3)..(622): NCBI GI: 261361020 Blast Desc: conserved [Verticillium albo-atrum VaMs.102]
  misc_feature (26)..(622): NCBI GI: 256728588 Blast Desc: [Nectria haematococca mpVI 77-13-4]
  misc_feature (40)..(622): NCBI GI: 145607589 Blast Desc: MGG_10417 [Magnaporthe grisea 70-15] gi|145015112|gb|EDJ99680.1| MGG_10417 [Magnaporthe grisea 70-15]
  misc_feature (29)..(622): NCBI GI: 242793322 Blast Desc: C6 finger domain protein, [Talaromyces stipitatus ATCC 10500] gi|218718726|gb|EED18146.1| C6 finger domain protein, [Talaromyces stipitatus ATCC 10500]
  misc_feature (29)..(622): NCBI GI: 212535504 Blast Desc: C6 finger domain protein, [Penicillium marneffei ATCC 18224] gi|210070307|gb|EEA24397.1| C6 finger domain protein, [Penicillium marneffei ATCC 18224]
  misc_feature (135)..(622): NCBI GI: 189205415 Blast Desc: conserved [Pyrenophora tritici-repentis Pt-1C-BFP] gi|187975135|gb|EDU41761.1| conserved [Pyrenophora tritici-repentis Pt-1C-BFP]
  misc_feature (25)..(622): NCBI GI: 255946586 Blast Desc: Pc22g00120 [Penicillium chrysogenum Wisconsin 54-1255] gi|211591077|emb|CAP97300.1| Pc22g00120 [Penicillium chrysogenum Wisconsin 54-1255]
  misc_feature (28)..(622): NCBI GI: 119478588 Blast Desc: C6 finger domain protein, [Neosartorya fischeri NRRL 181] gi|119407550|gb|EAW17499.1| C6 finger domain protein, [Neosartorya fischeri NRRL 181]
  misc_feature (211)..(622): NCBI GI: 169601952 Blast Desc: SNOG_03852 [Phaeosphaeria nodorum SN15] gi|111067937|gb|EAT89057.1| SNOG_03852 [Phaeosphaeria nodorum SN15]
MEPAPTTDERNGEDNPLGSSQVQLRRTRKFPRSKAGCLTCKRRKVKCDESQPRCSHCERLNMPCKWQPASNGNGESRAAGTAGRSPLMRTPALASFSLAGSPDAASFQSQPHPGGVEVFDYASFVWSGSDVWPLPTVDIGQNISLDPHPMNLDYDTQSQTPRGTPQAAQVDSSRTLPLHPRDTSEASIVSDKTPQTNQEFEGQETPENLDLIQYFIHAVTPPILSEVEAQKNWITMRKILMKMAGDSRMVRWAILAFSNVMLCRRDGDWMASQQNHYGNAVAEVAAYDQDTPALVQHSSRREKLLATLFFLSYVDILEARIEDAHRHLKRAYTIFQQGHKDGFVPVEKQLLLWLRLLDARTVPAGGEGLFLSEDNEGLLLQTSPASYNGEDLAKDDYDDGDIEDEIFQVLYQPGYIFFQKVQSFVGRIAKIDPWHRSRGSVEDETEVMGKAAAIAADLRTLYEQRPSFIDVAVTGKLAAPHISANLAFTITRAFRTYLTNYYASKIHLHRVAYKPFPLTAETLDAMDHIRRLTKLIAEGLDGDDPMPINMLWPLLLLGTEEQDLDTRAWIKTHMLRMEKIASHARITAQVLEEVQNRQDASKVRVDIGLVMRETFNLRFAVV

SEQ ID NO: 19090 - DNA, 2914 bp, Muscodor strobelii
  misc_feature: SGI EST ID NO. CUFF.44733.0
  misc_feature: Variant of the nucleotide sequence at SEQ ID NO 19088
ccatccgggcggcgttgaagtcttcgactacgcgagcttcgtgtggagcggtagtgatgtatggccactgccaacagtcgacatcggccaaaatatcagtctagatccacatccgatgaatctagattatgacacccaatcccaaacccccaggggaacaccacaggcagctcaggtcgactcaagtcgcaccctgccgttgcaccctcgcgatacgtctgaggcctcaatcgtgtcggataagaccccgcagactaatcaggaatttgaaggccaagaaacaccagagaatctagacttaatccaatatttcatccacgcagtaacacctccgatactgtcggaagttgaagcccaaaagaactggatcacaatgcgtaagatcttgatgaagatggccggagattctaggatggtccgatgggccatcttggctttctcaaacgtgatgctgtgtcgtcgagatggtgattggatggcaagtcaacaaaatcattatgggaacgccgttgctgaggtagctgcatacgatcaagatactccagcattggttcaacatagttctcgacgcgagaaattgcttgccacacttttcttcctaagctacgtcgacatactagaggcgcgaattgaagatgcccatcgacatctcaaacgagcttacactatcttccagcaagggcacaaagatggctttgttccagtagagaaacagttactactctggctccgcctgcttgacgcgcggaccgtccctgctggtggtgaaggtttgttcttgtccgaagacaacgagggactcctgcttcaaacctccccggctagttacaatggggaagacttggctaaggatgattacgacgacggcgatatcgaagatgaaatattccaagtactataccagcctggatacatattcttccaaaaggtacaaagcttcgtcggtcgcattgctaagatcgacccgtggcatcgctcgcgagggagcgttgaggacgaaaccgaggttatgggtaaggctgcagctattgctgccgatctcagaactttatatgagcaacggccctctttcatcgatgtcgctgtcacaggaaaacttgctgctcctcacatttcagcgaacttggcattcacgatcacgagggcattcaggacgtatctaacaaactactatgctagtaaaatccacttgcacagagtggcatataaacccttcccacttactgcagaaacactggacgcaatggatcacatccggcgtttgactaaactcatcgctgagggccttgatggagatgatccgatgcctatcaatatgctttggccgttgttattactggggacagaagaacaggatctggacactcgggcatggataaagacacatatgttacgcatggagaaaatcgcgagtcatgcgaggatcactgcgcaggtccttgaggaagtgcaaaatcgccaggatgcctcgaaggtgagagttgatattggcttggttatgcgcgagacattcaatctacgatttgctgtcgtttgaaattttggctgaccatcaagcttgaaataagtcgtatgcagccttaaactccaacaaaatgtttcccaagtcattgttaggtctatcgattgacattgtattattggtcctggaggatgcttcggtttgggctccttgagaactggtgaaccatgtgcctcacaaaggacttatgcgctcaagttccgtacccagcgtcaatattccggatgatgagccacaagatcttcttggagttcttctcgtgtcttttcgagccctttgtcacattttcactttctttctctcggtattcgtcttccacttcgcgtcgcccctcctcgatctttcgtagcctcttgtctagcttgccaccatcctttctactacgcgccttctcttcctttctctcaagttttgccaaatctttttctctatgctctctagccttctcgtcatgtttctgctgttttccatagtctttttgatctcttttggcaactttatcctcaccccgccggcgttctctctcagatgccttcgtgtgccattttccaaggagacttgtgtctgtgttgttgatctccggtaaagaatccacttccagatgcgcaatccaaggctctaagccgcgaagccaacgttggcctgcacgtgtcgcggtgctctgctcatgctctaaagggtccagtaattgcggttcactgcgaatcctcccactagcgtccaatactggtatccctgcgatttgcgcgagcgcgtcaagctttgctgtctcaactttgagtccacgcggcccaaaaagctcttcgttagccttgctcaagtatctatcgctcgttaccttggatgtgacgcctgcgccaactttcgcagccaggctgacggcacctccaacaatctgagcagttcctaaaggtacaaagccaaccagatcgcctgcaagtgcaagaagctggagcggtgggctctgcactgcaacgcgattaaggccatctagaaactctatgaaacgctctcgcgaaattccgaagccctcgagatctggtgggtaggctcgaaggaacggggagcctattaatggtgcagtagctgggactgcgacaggcttccgcaagcgcgaactatggctatgagactggggttgtggtcgctgtgcactatcctgcagtactgtttgctgtcgcacatcatgtgtagtgtatgcaggcggcgggtcttgattctgattatggcatgttcagttagtcgaagtgccctgaaatatagggtctaagcgtcgtcacacggaactcacgtcgtgtttgtacatttgctctaagtctcccgctcagtccaaaatcagaaagatgcaggttgggttctatacagaatattttcatttgcaatagaaatgcg

SEQ ID NO: 19091 - DNA, 1041 bp, Muscodor strobelii
  misc_feature: SGI cDNA ID NO. 566414
  misc_feature: Encodes the peptide sequence at SEQ ID NO 19092
atgtacaaacacgacaatcaagacccgccgcctgcatacactacacatgatgtgcgacagcaaacagtactgcaggatagtgcacagcgaccacaaccccagtctcatagccatagttcgcgcttgcggaagcctgtcgcagtcccagctactgcaccattaataggctccccgttccttcgagcctacccaccagatctcgagggcttcggaatttcgcgagagcgtttcatagagtttctagatggccttaatcgcgttgcagtgcagagcccaccgctccagcttcttgcacttgcaggcgatctggttggctttgtacctttaggaactgctcagattgttggaggtgccgtcagcctggctgcgaaagttggcgcaggcgtcacatccaaggtaacgagcgatagatacttgagcaaggctaacgaagagctttttgggccgcgtggactcaaagttgagacagcaaagcttgacgcgctcgcgcaaatcgcagggataccagtattggacgctagtgggaggattcgcagtgaaccgcaattactggaccctttagagcatgagcagagcaccgcgacacgtgcaggccaacgttggcttcgcggcttagagccttggattgcgcatctggaagtggattctttaccggagatcaacaacacagacacaagtctccttggaaaatggcacacgaaggcatctgagagagaacgccggcggggtgaggataaagttgccaaaagagatcaaaaagactatggaaaacagcagaaacatgacgagaaggctagagagcatagagaaaaagatttggcaaaacttgagagaaaggaagagaaggcgcgtagtagaaaggatggtggcaagctagacaagaggctacgaaagatcgaggaggggcgacgcgaagtggaagacgaataccgagagaaagaaagtgaaaatgtgacaaagggctcgaaaagacacgagaagaactccaagaagatcttgtggctcatcatccggaatattgacgctgggtacggaacttga

SEQ ID NO: 19092 - protein, 346 aa, Muscodor strobelii
  misc_feature: SGI Peptide ID NO. 566414
  misc_feature (42)..(343): NCBI GI: 169603103 Blast Desc: SNOG_04559 [Phaeosphaeria nodorum SN15] gi|111067199|gb|EAT88319.1| SNOG_04559 [Phaeosphaeria nodorum SN15]
  misc_feature (5)..(218): NCBI GI: 212546915 Blast Desc: conserved [Penicillium marneffei ATCC 18224] gi|210065131|gb|EEA19226.1| conserved [Penicillium marneffei ATCC 18224]
  misc_feature (5)..(218): NCBI GI: 115391745 Blast Desc: conserved [Aspergillus terreus NIH2624] gi|114194301|gb|EAU36001.1| conserved [Aspergillus terreus NIH2624]
  misc_feature (8)..(218): NCBI GI: 255953621 Blast Desc: Pc21g05170 [Penicillium chrysogenum Wisconsin 54-1255] gi|211589274|emb|CAP95414.1| Pc21g05170 [Penicillium chrysogenum Wisconsin 54-1255]
  misc_feature (5)..(218): NCBI GI: 242822119 Blast Desc: conserved [Talaromyces stipitatus ATCC 10500] gi|218712739|gb|EED12164.1| conserved [Talaromyces stipitatus ATCC 10500]
  misc_feature (25)..(340): NCBI GI: 154315952 Blast Desc: BC1G_04548 [Botryotinia fuckeliana B05.10] gi|150846944|gb|EDN22137.1| BC1G_04548 [Botryotinia fuckeliana B05.10]
  misc_feature (20)..(332): NCBI GI: 164662206 Blast Desc: MGL_0818 [Malassezia globosa CBS 7966] gi|159106127|gb|EDP45011.1| MGL_0818 [Malassezia globosa CBS 7966]
  misc_feature (37)..(341): NCBI GI: 169868060 Blast Desc: [Coprinopsis cinerea okayama7#130] gi|116498350|gb|EAU81245.1| [Coprinopsis cinerea okayama7#130]
  misc_feature (6)..(345): NCBI GI: 169764989 Blast Desc: [Aspergillus oryzae RIB40] gi|83764820|dbj|BAE54964.1| protein product [Aspergillus oryzae]
  misc_feature (44)..(267): NCBI GI: 115433300 Blast Desc: [Aspergillus terreus NIH2624] gi|114189639|gb|EAU31339.1| [Aspergillus terreus NIH2624]
MYKHDNQDPPPAYTTHDVRQQTVLQDSAQRPQPQSHSHSSRLRKPVAVPATAPLIGSPFLRAYPPDLEGFGISRERFIEFLDGLNRVAVQSPPLQLLALAGDLVGFVPLGTAQIVGGAVSLAAKVGAGVTSKVTSDRYLSKANEELFGPRGLKVETAKLDALAQIAGIPVLDASGRIRSEPQLLDPLEHEQSTATRAGQRWLRGLEPWIAHLEVDSLPEINNTDTSLLGKWHTKASERERRRGEDKVAKRDQKDYGKQQKHDEKAREHREKDLAKLERKEEKARSRKDGGKLDKRLRKIEEGRREVEDEYREKESENVTKGSKRHEKNSKKILWLIIRNIDAGYGT

SEQ ID NO: 19093 - DNA, 2700 bp, Muscodor strobelii
  misc_feature: SGI EST ID NO. CUFF.44734.1
  misc_feature: Variant of the nucleotide sequence at SEQ ID NO 19091
cgcatttctattgcaaatgaaaatattctgtatagaacccaacctgcatctttctgattttggactgagcgggagacttagagcaaatgtacaaacacgacaatcaagacccgccgcctgcatacactacacatgatgtgcgacagcaaacagtactgcaggatagtgcacagcgaccacaaccccagtctcatagccatagttcgcgcttgcggaagcctgtcgcagtcccagctactgcaccattaataggctccccgttccttcgagcctacccaccagatctcgagggcttcggaatttcgcgagagcgtttcatagagtttctagatggccttaatcgcgttgcagtgcagagcccaccgctccagcttcttgcacttgcaggcgatctggttggctttgtacctttaggaactgctcagattgttggaggtgccgtcagcctggctgcgaaagttggcgcaggcgtcacatccaaggtaacgagcgatagatacttgagcaaggctaacgaagagctttttgggccgcgtggactcaaagttgagacagcaaagcttgacgcgctcgcgcaaatcgcagggataccagtattggacgctagtgggaggattcgcagtgaaccgcaattactggaccctttagagcatgagcagagcaccgcgacacgtgcaggccaacgttggcttcgcggcttagagccttggattgcgcatctggaagtggattctttaccggagatcaacaacacagacacaagtctccttggaaaatggcacacgaaggcatctgagagagaacgccggcggggtgaggataaagttgccaaaagagatcaaaaagactatggaaaacagcagaaacatgacgagaaggctagagagcatagagaaaaagatttggcaaaacttgagagaaaggaagagaaggcgcgtagtagaaaggatggtggcaagctagacaagaggctacgaaagatcgaggaggggcgacgcgaagtggaagacgaataccgagagaaagaaagtgaaaatgtgacaaagggctcgaaaagacacgagaagaactccaagaagatcttgtggctcatcatccggaatattgacgctgggtacggaacttgagcgcataagtcctttgtgaggcacatggttcaccagttctcaaggagcccaaaccgaagcatcctccaggaccaataatacaatgtcaatcgatagacctaacaatgacttgggaaacattttgttggagtttaaggctgcatacgacttatttcaagcttgatggtcagccaaaatttcaaacgacagcaaatcgtagattgaatgtctcgcgcataaccaagccaatatcaactctcaccttcgaggcatcctggcgattttgcacttcctcaaggacctgcgcagtgatcctcgcatgactcgcgattttctccatgcgtaacatatgtgtctttatccatgcccgagtgtccagatcctgttcttctgtccccagtaataacaacggccaaagcatattgataggcatcggatcatctccatcaaggccctcagcgatgagtttagtcaaacgccggatgtgatccattgcgtccagtgtttctgcagtaagtgggaagggtttatatgccactctgtgcaagtggattttactagcatagtagtttgttagatacgtcctgaatgccctcgtgatcgtgaatgccaagttcgctgaaatgtgaggagcagcaagttttcctgtgacagcgacatcgatgaaagagggccgttgctcatataaagttctgagatcggcagcaatagctgcagccttacccataacctcggtttcgtcctcaacgctccctcgcgagcgatgccacgggtcgatcttagcaatgcgaccgacgaagctttgtaccttttggaagaatatgtatccaggctggtatagtacttggaatatttcatcttcgatatcgccgtcgtcgtaatcatccttagccaagtcttccccattgtaactagccggggaggtttgaagcaggagtccctcgttgtcttcggacaagaacaaaccttcaccaccagcagggacggtccgcgcgtcaagcaggcggagccagagtagtaactgtttctctactggaacaaagccatctttgtgcccttgctggaagatagtgtaagctcgtttgagatgtcgatgggcatcttcaattcgcgcctctagtatgtcgacgtagcttaggaagaaaagtgtggcaagcaatttctcgcgtcgagaactatgttgaaccaatgctggagtatcttgatcgtatgcagctacctcagcaacggcgttcccataatgattttgttgacttgccatccaatcaccatctcgacgacacagcatcacgtttgagaaagccaagatggcccatcggaccatcctagaatctccggccatcttcatcaagatcttacgcattgtgatccagttcttttgggcttcaacttccgacagtatcggaggtgttactgcgtggatgaaatattggattaagtctagattctctggtgtttcttggccttcaaattcctgattagtctgcggggtcttatccgacacgattgaggcctcagacgtatcgcgagggtgcaacggcagggtgcgacttgagtcgacctgagctgcctgtggtgttcccctgggggtttg

SEQ ID NO: 19094 - DNA, 1440 bp, Muscodor strobelii
  misc_feature: SGI cDNA ID NO. 566415
  misc_feature: Encodes the peptide sequence at SEQ ID NO 19095
atgcggggtttgctaacattggccgctattttgtcgactgttgggggggctgcactagaccggggctctccaggagtggacgttgaattatatcccagggatggccagcgaaatatcaaccccgacgcccaactaaaaatcacgtttctatccccgccgtcagtaggctcatcgggcaaaatcaacgtctatgactcgaaagacaagtcgctcgttgattccctagatttgtcaattccgttctctccaagtccctacggtaatgggtctaccaaagcgaactatactgatacgacaaagtatcaaaccaatatcataggcggcttggacttctacttttacccaattatcgtgaggaacaatacggcgacaatttacttgcacaacaacaagcttacatacggacgcacctatctggttgaaattgagccaagcgtgctgcacttagcaaatggtgcattcagtgggttcacctcagacaaaccatggaggttttcgacgaaagctcagggtccaagagcagggtcgaccactgtcatagtagcagcagatggctctggcgacttcaatacggttcaaggtgccatcgattgggcacccgcgaaccccaccaagcgcacaaccatctacatcagaaacggcaactatgaagaattggtattcttgcagtacaagaccaatttgaccattcgcggtcagaatcgcgaaaagaccatcgttggatatcccaacaacagcgctttcaacccaccaaatcgacaaggtccctcacgccgacctgcgttctctttccgtagagtctccgacttgcaactcagtagcttcaccatcaacaactactacccaggacaagccgaagcgcttctcgttgacggcatgaggatcgtgctcgatcatatgatactcaatggagctggcgatgccttaacaacgtacggcactatttacgctacagacagtaaactgacaggcacaggggatactgttttgggttatggaagcgtgtattggcttcgtagcacaattgaatcatacggtgcggtgacttggacacgaacggttcaaggaattcatggcaacatcctcgtggatagcaccattgttggactagatggtaacgcaaccttcgcgcgtctacctgataacacgggaggcgtgatggataactggccgtacgctgaaatggtacttatcaatacgaagaccagcggaattagcccggatggttggggccctgtgcaagggcctccctttgatagtagtcgtgtaaagttttgggagttcaacacgatggatctagaaggtcgaccgactgatttgtctcagagacttaatatttctaggcagctgacattgccgagagataagcatattatcgctgagtacaggaatccggtcaatattctcggaggatggcagcctatagtattgaaagcttga

SEQ ID NO: 19095 - protein, 479 aa, Muscodor strobelii
  misc_feature: SGI Peptide ID NO. 566415
  misc_feature (178)..(360): Pfam Id: PF01095 Pfam Desc: Pectinesterase
  misc_feature (178)..(240): Pfam Id: PF01095 Pfam Desc: Pectinesterase
  misc_feature (30)..(476): NCBI GI: 269922177 Blast Desc: Pectinesterase [Brevundimonas subvibrioides ATCC 15264] gi|269143768|gb|EEZ70188.1| Pectinesterase [Brevundimonas subvibrioides ATCC 15264]
  misc_feature (1)..(475): NCBI GI: 224538756 Blast Desc: BACCELL_03651 [Bacteroides cellulosilyticus DSM 14838] gi|224519648|gb|EEF88753.1| BACCELL_03651 [Bacteroides cellulosilyticus DSM 14838]
  misc_feature (26)..(474): NCBI GI: 150004357 Blast Desc: carbohydrate esterase family 8 protein [Bacteroides vulgatus ATCC 8482] gi|149932781|gb|ABR39479.1| carbohydrate esterase family 8 [Bacteroides vulgatus ATCC 8482]
  misc_feature (26)..(474): NCBI GI: 212693746 Blast Desc: BACDOR_03267 [Bacteroides dorei DSM 17855] gi|212663635|gb|EEB24209.1| BACDOR_03267 [Bacteroides dorei DSM 17855]
  misc_feature (26)..(474): NCBI GI: 265754947 Blast Desc: carbohydrate esterase family 8 protein [Bacteroides sp. 3_1_33FAA] gi|263234558|gb|EEZ20137.1| carbohydrate esterase family 8 protein [Bacteroides sp. 3_1_33FAA]
  misc_feature (26)..(474): NCBI GI: 237709271 Blast Desc: carbohydrate esterase family 8 protein [Bacteroides sp. 9_1_42FAA] gi|229456656|gb|EEO62377.1| carbohydrate esterase family 8 protein [Bacteroides sp. 9_1_42FAA]
  misc_feature (26)..(474): NCBI GI: 237724497 Blast Desc: carbohydrate esterase family 8 protein [Bacteroides sp. D4] gi|229437056|gb|EEO47133.1| carbohydrate esterase family 8 protein [Bacteroides sp. D4]
  misc_feature (4)..(477): NCBI GI: 86141773 Blast Desc: pectinesterase precursor [Leeuwenhoekiella blandensis MED217] gi|85831336|gb|EAQ49792.1| pectinesterase precursor [Leeuwenhoekiella blandensis MED217]
  misc_feature (38)..(474): NCBI GI: 196228359 Blast Desc: Pectinesterase [Chthoniobacter flavus Ellin428] gi|196227762|gb|EDY22265.1| Pectinesterase [Chthoniobacter flavus Ellin428]
  misc_feature (179)..(347): NCBI GI: 255594091 Blast Desc: pectinesterase, [Ricinus communis] gi|223521179|gb|EEF26368.1| pectinesterase, [Ricinus communis]
  misc_feature (177)..(451): SWISSPROT Homolog: EC 3.1.1.11 Pectinesterase
MRGLLTLAAILSTVGGAALDRGSPGVDVELYPRDGQRNINPDAQLKITFLSPPSVGSSGKINVYDSKDKSLVDSLDLSIPFSPSPYGNGSTKANYTDTTKYQTNIIGGLDFYFYPIIVRNNTATIYLHNNKLTYGRTYLVEIEPSVLHLANGAFSGFTSDKPWRFSTKAQGPRAGSTTVIVAADGSGDFNTVQGAIDWAPANPTKRTTIYIRNGNYEELVFLQYKTNLTIRGQNREKTIVGYPNNSAFNPPNRQGPSRRPAFSFRRVSDLQLSSFTINNYYPGQAEALLVDGMRIVLDHMILNGAGDALTTYGTIYATDSKLTGTGDTVLGYGSVYWLRSTIESYGAVTWTRTVQGIHGNILVDSTIVGLDGNATFARLPDNTGGVMDNWPYAEMVLINTKTSGISPDGWGPVQGPPFDSSRVKFWEFNTMDLEGRPTDLSQRLNISRQLTLPRDKHIIAEYRNPVNILGGWQPIVLKA

SEQ ID NO: 19096 - DNA, 265 bp, Muscodor strobelii
  misc_feature: SGI EST ID NO. CUFF.44746.0
  misc_feature: Variant of the nucleotide sequence at SEQ ID NO 19094
ctgtgcaagggcctccctttgatagtagtcgtgtaaagttttgggagttcaacacgatggatctagaaggtcgaccgactgatttgtctcagagacttaatatttctaggcagctgacattgccgagagataagcatattatcgctgagtacaggaatccggtcaatattctcggaggatggcagcctatagtattgaaagcttgaacatcttgatttaaacttagcatgtaatatgtctcactaggaattggacaatgtcttgc

SEQ ID NO: 19097 - DNA, 1092 bp, Muscodor strobelii
  misc_feature: SGI cDNA ID NO. 566416
  misc_feature: Encodes the peptide sequence at SEQ ID NO 19098
atggacgccatcttccaacaacacgaagcaaactatcacccaaatgcctaccatgcgccgcccgagaataaaccgggtaatactaagctgcgcacaacgaaactagtcttgcaggttgtgtcgatagtcttctcgatcgccgccattggtctctccgccgctgttgcgacgggcgaagtcagacaattcgtgctgttatggattataccccaatcagccgtcgctattatatggggattctcagagcttctgactctgtactcacatgggtggcagcgtggtgttcacgtcggagcacacgtggcgttgaatctgcttctatggctaggttttacagtcggcctgggtctaactggtctgacactaaagcaagatctcatgtacaaccgtactttctacgactggactgaggaagcggccttttactaccaaccagacttcttagctaagctcgaagccacgatcttcttcctttcggttttagatcttctgcacttcgtgctcttcgtaattgcttgcgtcgagatctccagacgaaatagcgcgaaatcagcgccggtcaccgtagcatcgaataacgcgtattatgatactacaccaatgcgtcccatgtacccgcaggagccacgaaactattacacggctactccaccgcgagttgcgacgccacagcacgttcattcccaagagtcctcgccgcaacccatgcgacaacctgttcaggagcctgtgcgacaaaccgcgagtgtacagccacttacacagcaaccgatgcaacaaacttcacaataccccataatacctcctcctgcgcagccacaatcctacttcccctcacaacaacaatcctacttcccatcacagcaatcatatcaggcataccagcctcaccagatgtacgagcctcagcactataatgagccaatacaacagcagcctcagcctacagagctgccggcacacgcagactccaagatggaagacattcctgtatcacctgtctcagatggtggatatcaattaggatataatcagccctgggatatgccgagtcatccttatagcaaggagtataatccgaactatccgtga

SEQ ID NO: 19098 - protein, 363 aa, Muscodor strobelii
  misc_feature: SGI Peptide ID NO. 566416
  misc_feature (33)..(215): NCBI GI: 46116312 Blast Desc: FG03998.1 [Gibberella zeae PH-1]
  misc_feature (2)..(188): NCBI GI: 85082505 Blast Desc: NCU04518 [Neurospora crassa OR74A] gi|28918010|gb|EAA27693.1| NCU04518 [Neurospora crassa OR74A]
  misc_feature (31)..(180): NCBI GI: 171677774 Blast Desc: protein product [Podospora anserina] gi|170936955|emb|CAP61614.1| protein product [Podospora anserina]
  misc_feature (33)..(196): NCBI GI: 256723132 Blast Desc: NECHADRAFT_94095 [Nectria haematococca mpVI 77-13-4]
  misc_feature (65)..(180): NCBI GI: 145611794 Blast Desc: [Magnaporthe grisea 70-15] gi|145019044|gb|EDK03323.1| [Magnaporthe grisea 70-15]
  misc_feature (30)..(200): NCBI GI: 261352923 Blast Desc: VDBG_01460 [Verticillium albo-atrum VaMs.102]
  misc_feature (28)..(104): NCBI GI: 116201319 Blast Desc: [Chaetomium globosum CBS 148.51] gi|88177062|gb|EAQ84530.1| [Chaetomium globosum CBS 148.51]
MDAIFQQHEANYHPNAYHAPPENKPGNTKLRTTKLVLQVVSIVFSIAAIGLSAAVATGEVRQFVLLWIIPQSAVAIIWGFSELLTLYSHGWQRGVHVGAHVALNLLLWLGFTVGLGLTGLTLKQDLMYNRTFYDWTEEAAFYYQPDFLAKLEATIFFLSVLDLLHFVLFVIACVEISRRNSAKSAPVTVASNNAYYDTTPMRPMYPQEPRNYYTATPPRVATPQHVHSQESSPQPMRQPVQEPVRQTASVQPLTQQPMQQTSQYPIIPPPAQPQSYFPSQQQSYFPSQQSYQAYQPHQMYEPQHYNEPIQQQPQPTELPAHADSKMEDIPVSPVSDGGYQLGYNQPWDMPSHPYSKEYNPNYP

SEQ ID NO: 19099 - DNA, 1277 bp, Muscodor strobelii
  misc_feature: SGI EST ID NO. CUFF.44753.0
  misc_feature: Variant of the nucleotide sequence at SEQ ID NO 19097
ttctcatgagcgatgattttgggggaatgtgagaaaattcacgccttacacaacgacaacccctggccaataagtgcgcgagagcgatcaagtcacaatggacgccatcttccaacaacacgaagcaaactatcacccaaatgcctaccatgcgccgcccgagaataaaccgggtaatactaagctgcgcacaacgaaactagtcttgcaggttgtgtcgatagtcttctcgatcgccgccattggtctctccgccgctgttgcgacgggcgaagtcagacaattcgtgctgttatggattataccccaatcagccgtcgctattatatggggattctcagagcttctgactctgtactcacatgggtggcagcgtggtgttcacgtcggagcacacgtggcgttgaatctgcttctatggctaggttttacagtcggcctgggtctaactggtctgacactaaagcaagatctcatgtacaaccgtactttctacgactggactgaggaagcggccttttactaccaaccagacttcttagctaagctcgaagccacgatcttcttcctttcggttttagatcttctgcacttcgtgctcttcgtaattgcttgcgtcgagatctccagacgaaatagcgcgaaatcagcgccggtcaccgtagcatcgaataacgcgtattatgatactacaccaatgcgtcccatgtacccgcaggagccacgaaactattacacggctactccaccgcgagttgcgacgccacagcacgttcattcccaagagtcctcgccgcaacccatgcgacaacctgttcaggagcctgtgcgacaaaccgcgagtgtacagccacttacacagcaaccgatgcaacaaacttcacaataccccataatacctcctcctgcgcagccacaatcctacttcccctcacaacaacaatcctacttcccatcacagcaatcatatcaggcataccagcctcaccagatgtacgagcctcagcactataatgagccaatacaacagcagcctcagcctacagagctgccggcacacgcagactccaagatggaagacattcctgtatcacctgtctcagatggtggatatcaattaggatataatcagccctgggatatgccgagtcatccttatagcaaggagtataatccgaactatccgtgagagtgaaacgagaggggaataaacgagtgtatataatgcttttaatttgtacatagatttgcgatgataccccaatgatagatttttg

SEQ ID NO: 19100 - DNA, 164 bp, Muscodor strobelii
  misc_feature: SGI cDNA ID NO. 566417
  misc_feature: Reduced expression when VOC is produced
  misc_feature: Encodes the peptide sequence at SEQ ID NO 19101
atggctcccgtcgatcgccaagacatcattgccagcaacaaatccctccgcctcatcaagaatgaactggagagcctagttgagaagggcgtcatcgacgaccacgtcttcgacagcatcctcaacatgctgcccgccgagtcgtccctgtccggcgtgcccac

SEQ ID NO: 19101 - protein, 54 aa, Muscodor strobelii
  misc_feature: SGI Peptide ID NO. 566417
  misc_feature (1)..(51): NCBI GI: 85074937 Blast Desc: NCU00696 [Neurospora crassa OR74A] gi|28927649|gb|EAA36600.1| [Neurospora crassa OR74A]
  misc_feature (1)..(50): NCBI GI: 149210225 Blast Desc: MGCH7_ch7g590 [Magnaporthe grisea 70-15] gi|86196545|gb|EAQ71183.1| MGCH7_ch7g590 [Magnaporthe grisea 70-15]
  misc_feature (5)..(52): NCBI GI: 256734201 Blast Desc: NECHADRAFT_67619 [Nectria haematococca mpVI 77-13-4]
  misc_feature (1)..(50): NCBI GI: 39970737 Blast Desc: MGG_02835 [Magnaporthe grisea 70-15] gi|145017350|gb|EDK01713.1| MGG_02835 [Magnaporthe grisea 70-15]
  misc_feature (5)..(52): NCBI GI: 46129330 Blast Desc: FG08850.1 [Gibberella zeae PH-1]
  misc_feature (1)..(51): NCBI GI: 171684475 Blast Desc: protein product [Podospora anserina] gi|170942198|emb|CAP67850.1| protein product [Podospora anserina]
  misc_feature (10)..(52): NCBI GI: 261352158 Blast Desc: conserved [Verticillium albo-atrum VaMs.102]
  misc_feature: Useful for introducing or modulating the production of volatile compounds
MAPVDRQDIIASNKSLRLIKNELESLVEKGVIDDHVFDSILNMLPAESSLSGVP

SEQ ID NO: 19102 - DNA, 610 bp, Muscodor strobelii
  misc_feature: SGI EST ID NO. CUFF.44865.0
  misc_feature: Variant of the nucleotide sequence at SEQ ID NO 19100
gggcaatccattgagaattgggacccttggatgaatggggaaggtggggttgactccgccactctggacgtgcaacactgtactattcttactaacaacgacgggcgactatctatgggccatttcccacgtgcatcttacagtccctaccacgcctaccatctcggccatcatcctcaaacgacatctatctcatctacggtcttcaatcgacagcaacccactacatcgacctagctccgccgaaccatctgcgcacccagcgacgttccgctcaccaccttgttctgtcccacggtcgattgcattcgttgtcaattgatatagtttgccggcgcatcagtgcgaacaaccagattgtggcttcggctatactgccgccttatcgctcgactcgccgtatagactgctcagccatctcgtcaagagagacgtccagccgccaagatggctcccgtcgatcgccaagacatcattgccagcaacaaatccctccgcctcatcaagaatgaactggagagcctagttgagaagggcgtcatcgacgaccacgtcttcgacagcatcctcaacatgctgcccgccgagtcgtccctgtccggcgtgccca

SEQ ID NO: 19103 - DNA, 1668 bp, Muscodor strobelii
  misc_feature: SGI cDNA ID NO. 566418
  misc_feature: Encodes the peptide sequence at SEQ ID NO 19104
atgtctgccgtcagtcggaccctccgaacggcctcgaggcaactgcgagtccgctctgcagcccctctggccgctgccaatgcacgcgctgttggcccctcgttattagcccagcactcctccaccacctctttctcctccccgtcccaccacagcttttccacctcggccgccagaatgtcctccgcacccgcaccctcgcagcagaagggctacgacccggagatcaaggacatcgccgactacgttgccaagcccatcgactctgagcttgccttcgacacggcgcgatgggtgttcctcgacacccttggctgcggtcttgagggcctgcgcttcaaggagtgcaccaagctgctgggccccatcgtccccggcaccgtcgtccccaacggcgtcaaggtgcccggcaccgacttcgtcctcgaccccgtcaacggcgccttcaacatcggcgccatgatccgctggctcgactacaacgactgctggctggccgccgagtgggggcacccctcggacaacctgggcgccatcctcgccgtcgccgactgggtcaaccgcaccaacaaggccggcggcaaccttgcgggcggcaagatcttcaccatccgcgacgtgctcgagggcatgatcaaggcccacgagatccagggctgcctggccctgctcaactcgtacaacaaggtcggcctcgaccacgtcgtgctcgtcaaggtggcctcgaccgccgtcgtctcccacatgctcggcctcagcgaatcccagatcgccgacgccgtcacccaggcctgggtcgacgggcagagcttgcgcacgtaccgccactcgcctaacaccatgtcgcgcaagtcttgggcggccggcgatgcctgccagcgcgccgtcaacctggctcttaaggtcatgaagggcgagcccggcgtgcccacagttctgtcggcccccgtgtggggcttctatgatgttctgttcaaaggcaacaagttcgagttccagcgcccctacggcagctacgtgatggagaatgtgctgttcaaggtgtcgtacccggccgagttccactcgcagacggccgtggaggcgtcgtcgaagatcttccagcagctcaaggacatgggcaagtcggcagccgacatcaagggcgtcacgtgccggacgcacgaggcctgcatccgcatcatcgacaagcagttcaagccgatggacaactttgccgaccgtgaccactgcatccagtacatgtgctcggtgatgctggtgttcgggcgcctcgaggccaccgactacacggacggcggcgaggctgcgacgtcgccgctggtcgagtcgctgcggcagaagatcaagtgtgtggaggacccgcagttcacggccgactaccacgacccttcgctccgaacgatctcgaacgcattgacggtggagctcaacgacggcacggtcttggaggaggtcgtagtggaggcacctctgggtcaccgtctccggcgcgaggaggccaagccgcacatcctggccaagtacaagcgccacctgggtcctcacttctcggaggcgcaggtcaaggagctggtagacctgggcatggacggcaagaagctggaggccatgtcagtggatgagtacgtggacaagtacgcggtagagaagagccagtttgtatga

SEQ ID NO: 19104 - protein, 555 aa, Muscodor strobelii
  misc_feature: SGI Peptide ID NO. 566418
  misc_feature (73)..(541): Pfam Id: PF03972 Pfam Desc: MmgE/PrpD family
  misc_feature (1)..(555): NCBI GI: 46129332 Blast Desc: FG08851.1 [Gibberella zeae PH-1]
  misc_feature (1)..(555): NCBI GI: 171684473 Blast Desc: protein product [Podospora anserina] gi|170942197|emb|CAP67849.1| protein product [Podospora anserina]
  misc_feature (1)..(554): NCBI GI: 85074905 Blast Desc: 2-methylcitrate dehydratase [Neurospora crassa OR74A] gi|28927633|gb|EAA36584.1| 2-methylcitrate dehydratase [Neurospora crassa OR74A]
  misc_feature (1)..(555): NCBI GI: 154300078 Blast Desc: BC1G_11228 [Botryotinia fuckeliana B05.10] gi|150856841|gb|EDN32033.1| BC1G_11228 [Botryotinia fuckeliana B05.10]
  misc_feature (1)..(555): NCBI GI: 156055550 Blast Desc: SS1G_05127 [Sclerotinia sclerotiorum 1980] gi|154702911|gb|EDO02650.1| SS1G_05127 [Sclerotinia sclerotiorum 1980]
  misc_feature (1)..(555): NCBI GI: 39970739 Blast Desc: conserved [Magnaporthe grisea 70-15] gi|149210227|ref|XP_001522488.1| MGCH7_ch7g591 [Magnaporthe grisea 70-15] gi|86196546|gb|EAQ71184.1| MGCH7_ch7g591 grisea
  misc_feature (9)..(554): NCBI GI: 240111787 Blast Desc: 2-methylcitrate dehydratase, [Coccidioides posadasii C735 delta SOWgp]
  misc_feature (52)..(554): NCBI GI: 119173257 Blast Desc: CIMG_10136 [Coccidioides immitis RS]
  misc_feature (46)..(554): NCBI GI: 225683836 Blast Desc: 2-methylcitrate dehydratase [Paracoccidioides brasiliensis Pb03]
  misc_feature (1)..(554): NCBI GI: 225561044 Blast Desc: 2-methylcitrate dehydratase [Ajellomyces capsulatus G186AR] gi|240280399|gb|EER43903.1| 2-methylcitrate dehydratase [Ajellomyces capsulatus H143]
  misc_feature (72)..(549): SWISSPROT Homolog: EC 4.2.1.79 2-methylcitrate dehydratase
MSAVSRTLRTASRQLRVRSAAPLAAANARAVGPSLLAQHSSTTSFSSPSHHSFSTSAARMSSAPAPSQQKGYDPEIKDIADYVAKPIDSELAFDTARWVFLDTLGCGLEGLRFKECTKLLGPIVPGTVVPNGVKVPGTDFVLDPVNGAFNIGAMIRWLDYNDCWLAAEWGHPSDNLGAILAVADWVNRTNKAGGNLAGGKIFTIRDVLEGMIKAHEIQGCLALLNSYNKVGLDHVVLVKVASTAVVSHMLGLSESQIADAVTQAWVDGQSLRTYRHSPNTMSRKSWAAGDACQRAVNLALKVMKGEPGVPTVLSAPVWGFYDVLFKGNKFEFQRPYGSYVMENVLFKVSYPAEFHSQTAVEASSKIFQQLKDMGKSAADIKGVTCRTHEACIRIIDKQFKPMDNFADRDHCIQYMCSVMLVFGRLEATDYTDGGEAATSPLVESLRQKIKCVEDPQFTADYHDPSLRTISNALTVELNDGTVLEEVVVEAPLGHRLRREEAKPHILAKYKRHLGPHFSEAQVKELVDLGMDGKKLEAMSVDEYVDKYAVEKSQFV

SEQ ID NO: 19105 - DNA, 2218 bp, Muscodor strobelii
  misc_feature: SGI EST ID NO. CUFF.45019.0
  misc_feature: Variant of the nucleotide sequence at SEQ ID NO 19103
cgagcatcaccgtcagaaagctgcagggaacgggatcagattaggaataatccatacagcttttcttgactacccgcagccggagctgtgccgaccaattgagttgttcaattggcctgccggcttcttcttttctctattccctcgccttgccttcttttttattcttcccgtcccatctttcccgttctctctgtccatcttccccagcagccacgacgagcgagagagtgtgtgtgcacgagtaaaagaagtagaagagcagagcttgtctatcacctgccggacccgtgaagaccagcagagtagttggcacacatacagtcaacaatgtctgccgtcagtcggaccctccgaacggcctcgaggcaactgcgagtccgctctgcagcccctctggccgctgccaatgcacgcgctgttggcccctcgttattagcccagcactcctccaccacctctttctcctccccgtcccaccacagcttttccacctcggccgccagaatgtcctccgcacccgcaccctcgcagcagaagggctacgacccggagatcaaggacatcgccgactacgttgccaagcccatcgactctgagcttgccttcgacacggcgcgatgggtgttcctcgacacccttggctgcggtcttgagggcctgcgcttcaaggagtgcaccaagctgctgggccccatcgtccccggcaccgtcgtccccaacggcgtcaaggtgcccggcaccgacttcgtcctcgaccccgtcaacggcgccttcaacatcggcgccatgatccgctggctcgactacaacgactgctggctggccgccgagtgggggcacccctcggacaacctgggcgccatcctcgccgtcgccgactgggtcaaccgcaccaacaaggccggcggcaaccttgcgggcggcaagatcttcaccatccgcgacgtgctcgagggcatgatcaaggcccacgagatccagggctgcctggccctgctcaactcgtacaacaaggtcggcctcgaccacgtcgtgctcgtcaaggtggcctcgaccgccgtcgtctcccacatgctcggcctcagcgaatcccagatcgccgacgccgtcacccaggcctgggtcgacgggcagagcttgcgcacgtaccgccactcgcctaacaccatgtcgcgcaagtcttgggcggccggcgatgcctgccagcgcgccgtcaacctggctcttaaggtcatgaagggcgagcccggcgtgcccacagttctgtcggcccccgtgtggggcttctatgatgttctgttcaaaggcaacaagttcgagttccagcgcccctacggcagctacgtgatggagaatgtgctgttcaaggtgtcgtacccggccgagttccactcgcagacggccgtggaggcgtcgtcgaagatcttccagcagctcaaggacatgggcaagtcggcagccgacatcaagggcgtcacgtgccggacgcacgaggcctgcatccgcatcatcgacaagcagttcaagccgatggacaactttgccgaccgtgaccactgcatccagtacatgtgctcggtgatgctggtgttcgggcgcctcgaggccaccgactacacggacggcggcgaggctgcgacgtcgccgctggtcgagtcgctgcggcagaagatcaagtgtgtggaggacccgcagttcacggccgactaccacgacccttcgctccgaacgatctcgaacgcattgacggtggagctcaacgacggcacggtcttggaggaggtcgtagtggaggcacctctgggtcaccgtctccggcgcgaggaggccaagccgcacatcctggccaagtacaagcgccacctgggtcctcacttctcggaggcgcaggtcaaggagctggtagacctgggcatggacggcaagaagctggaggccatgtcagtggatgagtacgtggacaagtacgcggtagagaagagccagtttgtatgagttttgatacctcgtagggagctagatcttacataactttttcatctacgtgtatagattacgggttggcaatgtatctgcatactagcacaggtgtggatgcgatggttgactcgatggaagagtgatagaaatgggacaataatgagagtgagagagataataaaaccctgtatatcacagcttgaggcccagtatctcgttgtagcagtgatgtttc

SEQ ID NO: 19106 - DNA, 648 bp, Muscodor strobelii
  misc_feature: SGI cDNA ID NO. 566419
  misc_feature: Encodes the peptide sequence at SEQ ID NO 19107
atggagaatgtgctgttcaaggtgtcgtacccggccgagttccactcgcagacggccgtggaggcgtcgtcgaagatcttccagcagctcaaggacatgggcaagtcggcagccgacatcaagggcgtcacgtgccggacgcacgaggcctgcatccgcatcatcgacaagcagttcaagccgatggacaactttgccgaccgtgaccactgcatccagtacatgtgctcggtgatgctggtgttcgggcgcctcgaggccaccgactacacggacggcggcgaggctgcgacgtcgccgctggtcgagtcgctgcggcagaagatcaagtgtgtggaggacccgcagttcacggccgactaccacgacccttcgctccgaacgatctcgaacgcattgacggtggagctcaacgacggcacggtcttggaggaggtcgtagtggaggcacctctgggtcaccgtctccggcgcgaggaggccaagccgcacatcctggccaagtacaagcgccacctgggtcctcacttctcggaggcgcaggtcaaggagctggtagacctgggcatggacggcaagaagctggaggccatgtcagtggatgagtacgtggacaagtacgcggtagagaagagccagtttgtatga

SEQ ID NO: 19107 - protein, 215 aa, Muscodor strobelii
  misc_feature: SGI Peptide ID NO. 566419
  misc_feature (1)..(201): Pfam Id: PF03972 Pfam Desc: MmgE/PrpD family
  misc_feature (1)..(215): NCBI GI: 46129332 Blast Desc: FG08851.1 [Gibberella zeae PH-1]
  misc_feature (1)..(215): NCBI GI: 256734203 Blast Desc: [Nectria haematococca mpVI 77-13-4]
  misc_feature (1)..(215): NCBI GI: 156055550 Blast Desc: SS1G_05127 [Sclerotinia sclerotiorum 1980] gi|154702911|gb|EDO02650.1| SS1G_05127 [Sclerotinia sclerotiorum 1980]
  misc_feature (1)..(215): NCBI GI: 154300078 Blast Desc: BC1G_11228 [Botryotinia fuckeliana B05.10] gi|150856841|gb|EDN32033.1| BC1G_11228 [Botryotinia fuckeliana B05.10]
  misc_feature (1)..(215): NCBI GI: 171684473 Blast Desc: protein product [Podospora anserina] gi|170942197|emb|CAP67849.1| protein product [Podospora anserina]
  misc_feature (1)..(214): NCBI GI: 85074905 Blast Desc: 2-methylcitrate dehydratase [Neurospora crassa OR74A] gi|28927633|gb|EAA36584.1| 2-methylcitrate dehydratase [Neurospora crassa OR74A]
  misc_feature (1)..(215): NCBI GI: 39970739 Blast Desc: conserved [Magnaporthe grisea 70-15] gi|149210227|ref|XP_001522488.1| MGCH7_ch7g591 [Magnaporthe grisea 70-15] gi|86196546|gb|EAQ71184.1| MGCH7_ch7g591 grisea
  misc_feature (1)..(215): NCBI GI: 261352159 Blast Desc: 2-methylcitrate dehydratase [Verticillium albo-atrum VaMs.102]
  misc_feature (1)..(214): NCBI GI: 240111787 Blast Desc: 2-methylcitrate dehydratase, [Coccidioides posadasii C735 delta SOWgp]
  misc_feature (1)..(214): NCBI GI: 119173257 Blast Desc: CIMG_10136 [Coccidioides immitis RS]
  misc_feature (1)..(209): SWISSPROT Homolog: EC 4.2.1.79 2-methylcitrate dehydratase
MENVLFKVSYPAEFHSQTAVEASSKIFQQLKDMGKSAADIKGVTCRTHEACIRIIDKQFKPMDNFADRDHCIQYMCSVMLVFGRLEATDYTDGGEAATSPLVESLRQKIKCVEDPQFTADYHDPSLRTISNALTVELNDGTVLEEVVVEAPLGHRLRREEAKPHILAKYKRHLGPHFSEAQVKELVDLGMDGKKLEAMSVDEYVDKYAVEKSQFV

SEQ ID NO: 19108 - DNA, 2218 bp, Muscodor strobelii; identical to SEQ ID NO: 19105
  misc_feature: SGI EST ID NO. CUFF.45019.0
  misc_feature: Variant of the nucleotide sequence at SEQ ID NO 19106

SEQ ID NO: 19109 - DNA, 834 bp, Muscodor strobelii
  misc_feature: SGI cDNA ID NO. 566420
  misc_feature: Encodes the peptide sequence at SEQ ID NO 19110
atggttggcccacgtaataaccttcgaggatcccttgagaatatgtctttatcttcgtcttcgaactcaaatcgcttgggcgagccatcatcctcagattccgattctgatgctggagacaacgcaacatttacacctgctgaccttgacgtgatgcaacagatgcacgccgagaagagcattgaactggccaatcaggccatagtcgcaacaaatatggcagaggctcggaaagcggttgttgaccacagcgctcaggcaagcgctgatctactcgatctggaaagacgtgagaacgccatttaccgtcagggttatagcggcatatttgagggagaagtttttgctcggcgagagaaatatcgacacgagctttggaacaacatgtcagagtcacagggccgtaatgcctatggcactgactcagataatgtgcgccttgaatttcgaagatctgttctcaaggctgagcagcgaaatgttgatatcttattccgtaacattgaggagatccacagcagaattcaacgtcttcgcatcgcaactaaccgctcacgagttcttgacagtaataccaagaatgcggtgctcaatgctgtaggtatgtgtgaaggacctttcaatatggtgctgcagacgcgggacctcattaataataatctcagagatatcgaaagcgagattccgatgggcgtgcctagccagtctgcatccgacaacacaggcagcaattcagcacaggtcgctgctgatgatgcagaagattctttatatgacacaattgagaaggaatgggcggtaattgatagaaaatcatggcccgattcgccataa

SEQ ID NO: 19110 - protein, 277 aa, Muscodor strobelii
  misc_feature: SGI Peptide ID NO. 566420
MVGPRNNLRGSLENMSLSSSSNSNRLGEPSSSDSDSDAGDNATFTPADLDVMQQMHAEKSIELANQAIVATNMAEARKAVVDHSAQASADLLDLERRENAIYRQGYSGIFEGEVFARREKYRHELWNNMSESQGRNAYGTDSDNVRLEFRRSVLKAEQRNVDILFRNIEEIHSRIQRLRIATNRSRVLDSNTKNAVLNAVGMCEGPFNMVLQTRDLINNNLRDIESEIPMGVPSQSASDNTGSNSAQVAADDAEDSLYDTIEKEWAVIDRKSWPDSP

SEQ ID NO: 19111 - DNA, 163 bp, Muscodor strobelii
  misc_feature: SGI EST ID NO. CUFF.44762.0
  misc_feature: Variant of the nucleotide sequence at SEQ ID NO 19109
ccgattctgatgctggagacaacgcaacatttacacctgctgaccttgacgtgatgcaacagatgcacgccgagaagagcattgaactggccaatcaggccatagtcgcaacaaatatggcagaggctcggaaagcggttgttgaccacagcgctcaggcaag

SEQ ID NO: 19112 - DNA, 2403 bp, Muscodor strobelii
  misc_feature: SGI cDNA ID NO. 566421
  misc_feature: Reduced expression when VOC is produced
  misc_feature: Encodes the peptide sequence at SEQ ID NO 19113
atgccgagcttcaactttcgcaagcgcaatgccgccgccgaggatgcgcccacaaagagcaattcgagtggcgaggtcgaggcctctggggctgaggctctgaacgttcttaaggacttcgagcatcagcatcaccttgatcccaatctacccatggaagaagttaaagccgtcgacgctgccctggcagcaggcaacgccgagaaagcagcggacatcgaggtcaccttactcgaggacaatagcccgtatcctgaggtccgtgccgctgtgcgcaactacgatgttgacctccccgtcaataccattcgagcctgggtaatcggtttgatcctctgtaccgttggttctggtgtgaacatgttgttttcgctccgaaacccctcggttacagtcacaacctttgtcatccagctgattgcctatcccatcggtttgttgtgggatttgatcttccctgaccgtgtatttaatgtcatgggtctcaaatttaacttcaagcctggcaaattcaacttcaaggagcacgttatcatcgtcgtcatgtccaatgcggcttacggtggtggtgttttgtacgctacagatgtacttctggcacagatcaaatggtacgatcagaatttcggatgggggttccagattttgtttggtatcacgacactttgcactggctacggtcttgcagggttgactcgacgattcttggtctggccggcggctatgatctggccaagtgacttggtcaatgccactttattctatacccttcatgatcacgctccctcagacccagccaagactaacggctggagtgtgggccgataccgatactttctctacgtcttcactggcgcgttcgtctggtatttcttcccgggctggatcttccaagggttgtcttactttaatttcatctgctgggccgcaccgagtagtgttatcgtcaacaagctctttggaggactcacaggttacggcatcctacccacaacctttgactggactgtcgtctctggatatgctttgtcccccttgattccgccaacttttgctatcgcaaacactgttgccggcgttatcattttcttcttcttggtatcggctggactacacttttctggcgtctggtatgccgactacttcgttgtgcaatcatccagcgctttcgataacacgggagctgtatacaacacaactcgaatcctgactgctgacaagcttctcgatgtggaggcataccataattattcccccctcttcctatccacgcaatatgctctgtgctacggtctcagctttgctgccgttgccgctgtcgttgttcacgtgattctgtaccatgggcctcagattaagattcagttccagctggctcgcaaccaagaagatgatgtacacatgcgcctaatgaagaaatataaggatgctccggattggtggtatctgaccttattcgtcatcatgcttggtttatcttttgccgttgttgcggcatggcccactaacttccctgcctgggcctatgtggtttgcatcatcattcccattgtctggactttgcccatcggtataattcaagccatcacgaataatcagctcggtctgaacgtgattactgaatttattgttggatacctgcttcctggtcacccgatcgccatgatgatgttcaagaactacggatacctcgctatgtcgcaagctctctacttcgcccaggatctcaagcttggccactacatgaaagtcccaccccgtcccatgttctgggcgcaactcgttgcctccgtctggtccgccattgtacagattgccgtcatgaactgggctctcggaaacatcgagaatgtgtgcgagcccgaccaagctaacagctatacctgccccggtgggcgtgtcttcttcaccgcgtccatcatctggggtctcattggccctgctcgtctcttcagcggtaatgcgatttactcttcactgcagtggttctggcttgtcggtggtgttacccctatcatcacttggttcctcgcccgtcgctaccccaagtctatcgctcgctacatcaacacccctcttctgttcggtggcgctggctatatcccacctgctaccgtctacacctacctctgctggggcactatcggtctcactttcaactggttcattaagaggaagtggaacggatggtggatgcagtacaactatacgacctccgctgccctcgactctggtctcatcgtgtcgactgttattgttttcttcaccttgtacctcactcaggctacgccaccacaatggtatggaaatattggtgtctatgagactttagatcagcaggctgcggctatcaagagcttcgttgctgctggcgagaccttcgggcccacgagctggccataa

SEQ ID NO: 19113 - protein, 800 aa, Muscodor strobelii
  misc_feature: SGI Peptide ID NO. 566421
  misc_feature (100)..(757): Pfam Id: PF03169 Pfam Desc: OPT oligopeptide transporter protein
  misc_feature (6)..(799): NCBI GI: 46128583 Blast Desc: FG08669.1 [Gibberella zeae PH-1]
  misc_feature (6)..(799): NCBI GI: 256734131 Blast Desc: [Nectria haematococca mpVI 77-13-4]
  misc_feature (6)..(800): NCBI GI: 171680083 Blast Desc: protein product [Podospora anserina] gi|170939668|emb|CAP64894.1| protein product [Podospora anserina]
  misc_feature (8)..(785): NCBI GI: 116193201 Blast Desc: CHGG_06318 [Chaetomium globosum CBS 148.51] gi|88182231|gb|EAQ89699.1| CHGG_06318 [Chaetomium globosum CBS 148.51]
  misc_feature (6)..(800): NCBI GI: 85113749 Blast Desc: NCU03171 [Neurospora crassa OR74A] gi|28926364|gb|EAA35341.1| NCU03171 [Neurospora crassa OR74A] gi|38567246|emb|CAE76537.1| isp4 protein [Neurospora crassa]
  misc_feature (3)..(796): NCBI GI: 156049297 Blast Desc: SS1G_08355 [Sclerotinia sclerotiorum 1980] gi|154692754|gb|EDN92492.1| SS1G_08355 [Sclerotinia sclerotiorum 1980]
  misc_feature (8)..(799): NCBI GI: 121716448 Blast Desc: small oligopeptide transporter, OPT family [Aspergillus clavatus NRRL 1] gi|119403968|gb|EAW14385.1| small oligopeptide transporter, OPT family [Aspergillus clavatus NRRL
  misc_feature (14)..(799): NCBI GI: 238488721 Blast Desc: small oligopeptide transporter, OPT family [Aspergillus flavus NRRL3357] gi|220697986|gb|EED54326.1| small oligopeptide transporter, OPT family [Aspergillus flavus
  misc_feature (14)..(800): NCBI GI: 169762902 Blast Desc: [Aspergillus oryzae RIB40] gi|83770379|dbj|BAE60512.1| protein product [Aspergillus oryzae]
  misc_feature (9)..(799): NCBI GI: 71002356 Blast Desc: small oligopeptide transporter, OPT family [Aspergillus fumigatus Af293] gi|66853497|gb|EAL93821.1| small oligopeptide transporter, OPT family [Aspergillus fumigatus small
  misc_feature: Useful for introducing or modulating the production of volatile compounds
MPSFNFRKRNAAAEDAPTKSNSSGEVEASGAEALNVLKDFEHQHHLDPNLPMEEVKAVDAALAAGNAEKAADIEVTLLEDNSPYPEVRAAVRNYDVDLPVNTIRAWVIGLILCTVGSGVNMLFSLRNPSVTVTTFVIQLIAYPIGLLWDLIFPDRVFNVMGLKFNFKPGKFNFKEHVIIVVMSNAAYGGGVLYATDVLLAQIKWYDQNFGWGFQILFGITTLCTGYGLAGLTRRFLVWPAAMIWPSDLVNATLFYTLHDHAPSDPAKTNGWSVGRYRYFLYVFTGAFVWYFFPGWIFQGLSYFNFICWAAPSSVIVNKLFGGLTGYGILPTTFDWTVVSGYALSPLIPPTFAIANTVAGVIIFFFLVSAGLHFSGVWYADYFVVQSSSAFDNTGAVYNTTRILTADKLLDVEAYHNYSPLFLSTQYALCYGLSFAAVAAVVVHVILYHGPQIKIQFQLARNQEDDVHMRLMKKYKDAPDWWYLTLFVIMLGLSFAVVAAWPTNFPAWAYVVCIIIPIVWTLPIGIIQAITNNQLGLNVITEFIVGYLLPGHPIAMMMFKNYGYLAMSQALYFAQDLKLGHYMKVPPRPMFWAQLVASVWSAIVQIAVMNWALGNIENVCEPDQANSYTCPGGRVFFTASIIWGLIGPARLFSGNAIYSSLQWFWLVGGVTPIITWFLARRYPKSIARYINTPLLFGGAGYIPPATVYTYLCWGTIGLTFNWFIKRKWNGWWMQYNYTTSAALDSGLIVSTVIVFFTLYLTQATPPQWYGNIGVYETLDQQAAAIKSFVAAGETFGPTSWP

SEQ ID NO: 19114 - DNA, 3813 bp, Muscodor strobelii
  misc_feature: SGI EST ID NO. CUFF.44872.0
  misc_feature: Variant of the nucleotide sequence at SEQ ID NO 19112
cggaactcctttgaacttgacgggagtcggctacgccgccaagacctgcaactttgcaagcaattccagtttcatgatatcgtgatttcaatgttcctacaaccgccaaccacgcgaaccaacgagcttagatagccatggtagcttctactagatgggaagcaaacccttgatccgcccaggtgaccatcgcaagtcaccgaggctgtcgatgctgtgatttgctcagaaaacgggctgattccgagcatcaagcactcaatctcggcggatctcgcgcattgtctcgagatccccctcaacaaggtaggtagaaagcaccaaaagcgacggcggcaattatcgccacagagatgggagccgatcagccttctgcatacgggatggtctgctactatcatgctggcgagcttggggcccaatttagccactggacctgcggggagggtctctcctttattccgttacgggcaacgaatataccacgtcgatccatgtacgaattagacgtttctctggtcccgtctttgcatctcctctatcccatacatcctttacaattggtcgagatggtgaaccatatactcgactgggggtcgatcctcttcttagtagcattccagggcatccctcgacctgctactcaccctaccactatggtatcgcaagtgtgcgtactgtacaagcagcgagtaaggatgatattgctatctactgctatttctcgcccacatgtttgtgctcggttgcatatccagacacggcatagaggcccgatctagcatgggatggtgggcagatggcgggtactttgccatcttatgcttgtcttgatatcgttcacttgcatgtctagtaactaaaaagcagcatttccctatttattgtatttgttgttagtacccagcatatgtgtatctctctatattaaagaaccatggtaccacccactacccttgccgtctctttttgatcttgcttcctcttctcctctcatgggacaagctcagactctaccctcgatcgagttgaagttggcctcatttattcctgccaaaagcttctcgtgaagtctcaccatgccgagcttcaactttcgcaagcgcaatgccgccgccgaggatgcgcccacaaagagcaattcgagtggcgaggtcgaggcctctggggctgaggctctgaacgttcttaaggacttcgagcatcagcatcaccttgatcccaatctacccatggaagaagttaaagccgtcgacgctgccctggcagcaggcaacgccgagaaagcagcggacatcgaggtcaccttactcgaggacaatagcccgtatcctgaggtccgtgccgctgtgcgcaactacgatgttgacctccccgtcaataccattcgagcctgggtaatcggtttgatcctctgtaccgttggttctggtgtgaacatgttgttttcgctccgaaacccctcggttacagtcacaacctttgtcatccagctgattgcctatcccatcggtttgttgtgggatttgatcttccctgaccgtgtatttaatgtcatgggtctcaaatttaacttcaagcctggcaaattcaacttcaaggagcacgttatcatcgtcgtcatgtccaatgcggcttacggtggtggtgttttgtacgctacagatgtacttctggcacagatcaaatggtacgatcagaatttcggatgggggttccagattttgtttggtatcacgacactttgcactggctacggtcttgcagggttgactcgacgattcttggtctggccggcggctatgatctggccaagtgacttggtcaatgccactttattctatacccttcatgatcacgctccctcagacccagccaagactaacggctggagtgtgggccgataccgatactttctctacgtcttcactggcgcgttcgtctggtatttcttcccgggctggatcttccaagggttgtcttactttaatttcatctgctgggccgcaccgagtagtgttatcgtcaacaagctctttggaggactcacaggttacggcatcctacccacaacctttgactggactgtcgtctctggatatgctttgtcccccttgattccgccaacttttgctatcgcaaacactgttgccggcgttatcattttcttcttcttggtatcggctggactacacttttctggcgtctggtatgccgactacttcgttgtgcaatcatccagcgctttcgataacacgggagctgtatacaacacaactcgaatcctgactgctgacaagcttctcgatgtggaggcataccataattattcccccctcttcctatccacgcaatatgctctgtgctacggtctcagctttgctgccgttgccgctgtcgttgttcacgtgattctgtaccatgggcctcagattaagattcagttccagctggctcgcaaccaagaaggtaagcatcacaatttaagcgcaaaacggtccagttctgctttgtcgtcggtagcttacctgctgttttacagatgatgtacacatgcgcctaatgaagaaatataaggatgctccggattggtggtatctgaccttattcgtcatcatgcttggtttatcttttgccgttgttgcggcatggcccactaacttccctgcctgggcctatgtggtttgcatcatcattcccattgtctggactttgcccatcggtataattcaagccatcacgaataatcagctcggtctgaacgtgattactgaatttattgttggatacctgcttcctggtcacccgatcgccatgatgatgttcaagaactacggatacctcgctatgtcgcaagctctctacttcgcccaggatctcaagcttggccactacatgaaagtcccaccccgtcccatgttctgggcgcaactcgttgcctccgtctggtccgccattgtacagattgccgtcatgaactgggctctcggaaacatcgagaatgtgtgcgagcccgaccaagctaacagctatacctgccccggtgggcgtgtcttcttcaccgcgtccatcatctggggtctcattggccctgctcgtctcttcagcggtaatgcgatttactcttcactgcagtggttctggcttgtcggtggtgttacccctatcatcacttggttcctcgcccgtcgctaccccaagtctatcgctcgctacatcaacacccctcttctgttcggtggcgctggctatatcccacctgctaccgtctacacctacctctgctggggcactatcggtctcactttcaactggttcattaagaggaagtggaacggatggtggatgcagtacaactatacgacctccgctgccctcgactctggtctcatcgtgtcgactgttattgttttcttcaccttgtacctcactcaggctacgccaccacaatggtatggaaatattggtgtctatgagactttagatcagcaggctgcggctatcaagagcttcgttgctgctggcgagaccttcgggcccacgagctggccataaatgggagaccatttgtggaaagatcggaggctgaactagggcggtgcttagcgcacatcttggatagaaataagtatcaagtctacacataattaaaagaaattcaaacaaataacatgtcttgcatgtgcgtcccgtggccaattacacttcatacccttccgccttcgttgtggtcccatcttggcagtcggtagccgcgtggtgcagtgcttttcagtccgcaagacaagcctcatcgtttaagacgtatgtata

SEQ ID NO: 19115 - DNA, 714 bp, Muscodor strobelii
  misc_feature: SGI cDNA ID NO. 566422
  misc_feature: Encodes the peptide sequence at SEQ ID NO 19116
atggtcaagctctcagcctccagcccgccatggcagtggagtcttgacgttagctccttcctagtcctgctgggcgaacacgagaagctcagcttccgccgggccaggaaacgattgactgatatcctgtctctcgcacctgtctcgggaacatgcgagtactaccactacgaaggcgagaatccgcgaaacagcatcacaggaagccactacaacgtggcttcgtttagtagctggggtccggcgaaagctcctggtggtggcattgatgatttaaacaatccagggcgcattaagcctgatcttgtggcacctggcgcgcatatttactcggcaagatctcgagcaccagatatcaagcttaacaaggtgttcaaggaacaaaatgtcttcgactttatcggtgtcacaccgcaggtagacacgaataagtatatgttcctctccggaacaagtcatgcaactccgctcgtggcaggatgtgctgctgtcatttccgaagccttgttgcccactatgactgacccgcggccactcgcctcagtgatcaaagctattctcttaaacaacaccatcgatctgtctaaaggtcgtgaaaacaaccgagggccgcctgtgaggcctcctcctaatggcgcacaagggtatggcttagttgacgtccaggctaccctcgaaaacatcaaaaaccacggatcaaggaaagtaatttag

SEQ ID NO: 19116 - protein, 237 aa, Muscodor strobelii
  misc_feature: SGI Peptide ID NO. 566422
  misc_feature (99)..(217): Pfam Id: PF00082 Pfam Desc: Subtilase family
  misc_feature (73)..(225): NCBI GI: 212537297 Blast Desc: subtilisin, [Penicillium marneffei ATCC 18224] gi|210068546|gb|EEA22637.1| subtilisin, [Penicillium marneffei ATCC 18224]
  misc_feature (72)..(229): NCBI GI: 46139417 Blast Desc: FG11223.1 [Gibberella zeae PH-1]
  misc_feature (73)..(225): NCBI GI: 258571237 Blast Desc: [Uncinocarpus reesii 1704] gi|237904692|gb|EEP79093.1| [Uncinocarpus reesii 1704]
  misc_feature (40)..(225): NCBI GI: 258569166 Blast Desc: [Uncinocarpus reesii 1704] gi|237906773|gb|EEP81174.1| [Uncinocarpus reesii 1704]
  misc_feature (73)..(225): NCBI GI: 261202672 Blast Desc: kp-43 peptidase/serine peptidase [Ajellomyces dermatitidis SLH14081] gi|239590647|gb|EEQ73228.1| kp-43 peptidase/serine peptidase [Ajellomyces dermatitidis SLH14081]
  misc_feature (73)..(225): NCBI GI: 239612372 Blast Desc: kp-43 peptidase/serine peptidase [Ajellomyces dermatitidis ER-3]
  misc_feature (73)..(221): NCBI GI: 226281253 Blast Desc: peptidase S8 and S53 [Paracoccidioides brasiliensis Pb01]
  misc_feature (73)..(221): NCBI GI: 226294243 Blast Desc: kp-43 peptidase, serine peptidase merops family s08 [Paracoccidioides brasiliensis Pb18]
  misc_feature (73)..(221): NCBI GI: 225684933 Blast Desc: subtilisin [Paracoccidioides brasiliensis Pb03]
  misc_feature (64)..(221): NCBI GI: 238490156 Blast Desc: subtilisin, [Aspergillus flavus NRRL3357] gi|220696728|gb|EED53069.1| subtilisin, [Aspergillus flavus NRRL3357]
MVKLSASSPPWQWSLDVSSFLVLLGEHEKLSFRRARKRLTDILSLAPVSGTCEYYHYEGENPRNSITGSHYNVASFSSWGPAKAPGGGIDDLNNPGRIKPDLVAPGAHIYSARSRAPDIKLNKVFKEQNVFDFIGVTPQVDTNKYMFLSGTSHATPLVAGCAAVISEALLPTMTDPRPLASVIKAILLNNTIDLSKGRENNRGPPVRPPPNGAQGYGLVDVQATLENIKNHGSRKVI

SEQ ID NO: 19117 - DNA, 975 bp, Muscodor strobelii
  misc_feature: SGI cDNA ID NO. 566423
  misc_feature: Encodes the peptide sequence at SEQ ID NO 19118
tacacgcaatggccgcgactcactgtgatcaccactcccaagaacaaatactcccgcacgactggtggaaaaggtgacacggtctttgaggagcagtcatggattttatccgacggactcgaagcggcaaacctggctaactggcaagctgacggtacgaaagtgcgaaaagcttggcgagttccagtgactgattgggagacggggagtttggtcgtcaaaggagtctccgttggaactgtcgctgacatcgggccatccttcgagcggatcgattctcgatacgagatacaagccatgcttcgacacctaggcaacggtctaaagctaccgagtccgtatggacaagactcctcgctcgcgtggctactggcatttgttgctggtaaaataggagggaagctggctggagacaacgccattgctcctttccacgtgttccttgccgtattagtgatggagttagaggggcagtatatctcttgcaagatacaagcatgtgatacagaggctgagctcatgctgcgtaacaatctcgaagagaccgagaggttggtcagggagctcagcgcagggtcatcaaaccaaggcgtggttccaacgtgggaggatgtgcagcgttcaatcgacatcagcaaagtggaagacgaagaccatgtagactatgcggagaagacaagaatggactcggacatgaactacatacgtcagaggtttgcggaggtgtaccagggaaggaagatattcaggacggcggatggccactggggcgtcacaacggagcatgtccaacagggcgaccatgtctacgtgctggtgggtgccgatgtgccatacattcttagggattcattaagtagctcggagaaagctatcggtggggaatggaaactaataggagaagcctacgtgcatggtatcatgcatggggaggctgtagagcatggccgcatcgtggatgtgagactgatttga

SEQ ID NO: 19118 - protein, 324 aa, Muscodor strobelii
  misc_feature: SGI Peptide ID NO. 566423
  misc_feature (95)..(311): NCBI GI: 156043030 Blast Desc: SS1G_11315 [Sclerotinia sclerotiorum 1980] gi|154695699|gb|EDN95437.1| SS1G_11315 [Sclerotinia sclerotiorum 1980]
  misc_feature (136)..(314): NCBI GI: 154313282 Blast Desc: BC1G_05338 [Botryotinia fuckeliana B05.10] gi|150849407|gb|EDN24600.1| BC1G_05338 [Botryotinia fuckeliana B05.10]
  misc_feature (185)..(317): NCBI GI: 169768446 Blast Desc: [Aspergillus oryzae RIB40] gi|83766551|dbj|BAE56691.1| protein product [Aspergillus oryzae]
  misc_feature (230)..(313): NCBI GI: 261353850 Blast Desc: conserved [Verticillium albo-atrum VaMs.102]
  misc_feature (224)..(324): NCBI GI: 156043026 Blast Desc: SS1G_11313 [Sclerotinia sclerotiorum 1980] gi|154695697|gb|EDN95435.1| SS1G_11313 [Sclerotinia sclerotiorum 1980]
  misc_feature (183)..(311): NCBI GI: 171678935 Blast Desc: protein product [Podospora anserina] gi|170937538|emb|CAP62196.1| protein product [Podospora anserina]
  misc_feature (48)..(316): NCBI GI: 256733829 Blast Desc: NECHADRAFT_77370 [Nectria haematococca mpVI 77-13-4]
  misc_feature (236)..(316): NCBI GI: 171677823 Blast Desc: protein product [Podospora anserina] gi|170936980|emb|CAP61638.1| protein product [Podospora anserina]
  misc_feature (246)..(315): NCBI GI: 171680414 Blast Desc: protein product [Podospora anserina] gi|170939834|emb|CAP65059.1| protein product [Podospora anserina]
  misc_feature (215)..(316): NCBI GI: 115389026 Blast Desc: [Aspergillus terreus NIH2624] gi|114194414|gb|EAU36114.1| [Aspergillus terreus NIH2624]
YTQWPRLTVITTPKNKYSRTTGGKGDTVFEEQSWILSDGLEAANLANWQADGTKVRKAWRVPVTDWETGSLVVKGVSVGTVADIGPSFERIDSRYEIQAMLRHLGNGLKLPSPYGQDSSLAWLLAFVAGKIGGKLAGDNAIAPFHVFLAVLVMELEGQYISCKIQACDTEAELMLRNNLEETERLVRELSAGSSNQGVVPTWEDVQRSIDISKVEDEDHVDYAEKTRMDSDMNYIRQRFAEVYQGRKIFRTADGHWGVTTEHVQQGDHVYVLVGADVPYILRDSLSSSEKAIGGEWKLIGEAYVHGIMHGEAVEHGRIVDVRLI

SEQ ID NO: 19119 - DNA, 431 bp, Muscodor strobelii
  misc_feature: SGI EST ID NO. CUFF.44784.0
  misc_feature: Variant of the nucleotide sequence at SEQ ID NO 19117
cgacggactcgaagcggcaaacctggctaactggcaagctgacggtacgaaagtgcgaaaagcttggcgagttccagtgactgattgggagacggggagtttggtcgtcaaaggagtctccgttggaactgtcgctgacatcgggccatccttcgagcggatcgattctcgatacgagatacaagccatgcttcgacacctaggcaacggtctaaagctaccgagtccgtatggacaagactcctcgctcgcgtggctactggcatttgttgctggtaaaataggagggaagctggctggagacaacgccattgctcctttccacgtgttccttgccgtattagtgatggagttagaggggcagtatatctcttgcaagatacaagcatgtgatacagaggctgagctcatgctgcgtaacaatctcgaag

SEQ ID NO: 19120 - DNA, 262 bp, Muscodor strobelii
  misc_feature: SGI cDNA ID NO. 566424
  misc_feature: Reduced expression when VOC is produced
  misc_feature: Encodes the peptide sequence at SEQ ID NO 19121
atgtacggcggtaactatggttatcccaataacgctgccggctcaccaccgtacaatggcggggccccacccccgggttctcagaactctgtgatgcagcctggctcggctcccaaccagatgatgtacaatcaccagcagtatcccatggggacccaatctttccctggcaatcccaatatgatgccgggtggaggtggaggccctgccggaatgatgcagaacaacggcatgccgcacatggcggctgccaatggccaaa

SEQ ID NO: 19121 - protein, 87 aa, Muscodor strobelii
  misc_feature: SGI Peptide ID NO. 566424
  misc_feature: Useful for introducing or modulating the production of volatile compounds
MYGGNYGYPNNAAGSPPYNGGAPPPGSQNSVMQPGSAPNQMMYNHQQYPMGTQSFPGNPNMMPGGGGGPAGMMQNNGMPHMAAANGQ

SEQ ID NO: 19122 - DNA, 1708 bp, Muscodor strobelii
  misc_feature: SGI EST ID NO. CUFF.44787.0
  misc_feature: Variant of the nucleotide sequence at SEQ ID NO 19120
gacggagcttacgcagcgccacaggctgcaacgccaccaattcatccagaccaacagatcgaggtgttcaattctcactgcaattcgtcgacaggaacccccgctcagcccgcctcatctcatcaggatcttctcgcatgatccagtacctcgatttcgtcgttccaatcccactgacacatgccgccttcaatgctacatcgcgacaggccgtttgccctaagacctgcattatcgctgccagtactttcgaggtacatctacgcttggatttcgacttgacccaaaccaagtcgggctaggaaacacgcagcatacaccacacactctcttcgctggcacacaaacatcgtcactgcttccacatacgagatatttgacatgtgctatcgtcccacaagccattctttttaagatatcaccggtccctcttaagtaccaggcgatccttgcgcatccttgcgcccgcgcacccgcgcttgctgcactgcgtaacgctgccggtctccgtccccgtccgcttacagtagcggtaatctcctcgtgtcctgtggtggcgacggcatccatcacaggttggcctgccaagtttcaactccattcacgtctctgcattccgaaacaacgctgcgttgacagtgaagaccctggcgtgtctgatcagagacgtaacttcacagcgactgggtagtacaccgcaagcacatgacttgcctgttcagtccaattcggcccaaacactagtgtctgtcattggccctacgaagccatcgtccagagtctatctttctcttcccgggactggcgcgacacctccgaacgtgcctggcattagtctcgccaaacacccccttcgctctctgaccgtgcgagtatctgtgcattactcgtggtcgtattacctaatttcctttctcgaagcagaagttcgaggctgagatcgaagcgagtcactaattgcggctctctgactagaagaggtgaaggctttcttgtctcctcgagcctcttctcccgtactaggtaattgagccaaaattgaaccaacatcaatcgaccactggtttgacctagtttgaccagctgtatctctgctgaggtgtgtgtgacgggtttgctcacttcctcttgctccgcgctcgagaatcgttgtttcgctggacagtgtctgcgagtgtctgcgaggaccgatctgatcgccgtaccccctgctcatttggattacacaccccacaacgcgcgcgacacacaccacctgcagagttttggtttggtcttgcttttgcccggtggacaaatcttatgagaatcggcccaaacgagtcccgtcccaaatctgcctgacctaccctcacccacgcccacgtcacgcccgcgcccacacacgcttgctttgcccagccctgccagctgtgcaccagcattcgtgaccgtttgtcgtgagatatgtacggcggtaactatggttatcccaataacgctgccggctcaccaccgtacaatggcggggccccacccccgggttctcagaactctgtgatgcagcctggctcggctcccaaccagatgatgtacaatcaccagcagtatcccatggggacccaatctttccctggcaatcccaatatgatgccgggtggaggtggaggccctgccggaatgatgcagaacaacggcatgccgcacatggcggctgccaatggccaaa

SEQ ID NO: 19123 - DNA, 1296 bp, Muscodor strobelii
  misc_feature: SGI cDNA ID NO. 566425
  misc_feature: Reduced expression when VOC is produced
  misc_feature: Encodes the peptide sequence at SEQ ID NO 19124
atgtgccaacaacataccgagggagaggttgacgctagccatctgcaggacccagaaacccaagacaatggaccggacgtttcccctgagcccttcccctgggatgctggtgtatttgatgcacattgccatccaacagacactatggcatcaattgattctatatctagcatgaaagcacgtgcgctaacagttatgtcaacacgctctcaagaccaagaactcgtttatgatgtggcctcgagatatggcgttcaagattttgagacattgttcttcccatcagccacatctaacgattcaagatctataataccatctttcggttggcacccatggttttcatatcaactgtacgatgataccagctcgaacccgacatttgacggaacaccagaaggaaaaatcgcacattatgataagatactggcgcctgcaccatctaaaaaagatgtatctttcactctgggtcttccagatcccaagcctctgtccgcctttctgaaggaaacacgttctcgcctagagaagtacccttttgctcttattggtgaagttggcatagacaaggcgtttcgtctaccaatggcttggacatcgacgcatgaggctcaacgggatgacggtctaacacctggaggccgagaaggacgacttctcagtccccatcgtgtacaaacggcacatcaagctacggtcttgggagctcagctcaaattagctggacaaatgggtcgagcggtcagcgtccatggtgttcaggcacatggactggtctatgatacaatagcggcaagttggaaagggcatgagaaggaagtgttgtcgcgtagacagaagcgtcgtattgctccaggcgcggaggacttcatgagtgattctgaatcggaatccgacgacgagtggaccaaagaattacccatcagaaaacccttggccagcgcatcgaaagatgccggtcctcaggaattcccgcctagaatatgtcttcactcgtacagcggatacgtcgaacagctgaaaatgtacctttctcccagtgtgcccgcaaaagtatacttttcgttctcagtcgcggtcaactgggctcacggaggaggtgagaaaaccgaagaagctatccaagccatcccagatgacagaatacttgtcgaaagtgatttgcacatagctggagaagagatggatcagtatctagaagaagtatgcagaagaatgtgccgtatcaaaggctgggatcttcgcgagggagtggagagattgggttcgaattggcgagagtttgtgtttgggtag

SEQ ID NO: 19124 - protein, 431 aa, Muscodor strobelii
  misc_feature: SGI Peptide ID NO. 566425
  misc_feature (39)..(431): Pfam Id: PF01026 Pfam Desc: TatD related DNase
  misc_feature (104)..(387): Pfam Id: PF01026 Pfam Desc: TatD related DNase
  misc_feature (13)..(431): NCBI GI: 171688490 Blast Desc: protein product [Podospora anserina] gi|170944207|emb|CAP70317.1| protein product [Podospora anserina]
  misc_feature (1)..(431): NCBI GI: 261352715 Blast Desc: Cut9-interacting protein scn1 [Verticillium albo-atrum VaMs.102]
  misc_feature (32)..(431): NCBI GI: 156063564 Blast Desc: SS1G_01900 [Sclerotinia sclerotiorum 1980] gi|154697234|gb|EDN96972.1| SS1G_01900 [Sclerotinia sclerotiorum 1980]
  misc_feature (31)..(431): NCBI GI: 46121867 Blast Desc: FG05311.1 [Gibberella zeae PH-1]
  misc_feature (30)..(431): NCBI GI: 256720927 Blast Desc: NECHADRAFT_96733 [Nectria haematococca mpVI 77-13-4]
  misc_feature (32)..(431): NCBI GI: 67527332 Blast Desc: AN4048.2 [Aspergillus nidulans FGSC A4] gi|40740329|gb|EAA59519.1| AN4048.2 [Aspergillus nidulans FGSC A4] gi|259481364|tpe|CBF74811.1| TPA: Cut9 interacting protein
  misc_feature (31)..(431): NCBI GI: 258565655 Blast Desc: conserved [Uncinocarpus reesii 1704] gi|237907273|gb|EEP81674.1| conserved [Uncinocarpus reesii 1704]
  misc_feature (30)..(431): NCBI GI: 85105257 Blast Desc: NCU05309 [Neurospora crassa OR74A] gi|28923508|gb|EAA32686.1| NCU05309 [Neurospora crassa OR74A]
  misc_feature (32)..(431): NCBI GI: 169771213 Blast Desc: [Aspergillus oryzae RIB40] gi|83767935|dbj|BAE58074.1| protein product [Aspergillus oryzae]
  misc_feature (31)..(431): NCBI GI: 240111039 Blast Desc: hydrolase, TatD family protein [Coccidioides posadasii C735 delta SOWgp]
  misc_feature: Useful for introducing or modulating the production of volatile compounds
MCQQHTEGEVDASHLQDPETQDNGPDVSPEPFPWDAGVFDAHCHPTDTMASIDSISSMKARALTVMSTRSQDQELVYDVASRYGVQDFETLFFPSATSNDSRSIIPSFGWHPWFSYQLYDDTSSNPTFDGTPEGKIAHYDKILAPAPSKKDVSFTLGLPDPKPLSAFLKETRSRLEKYPFALIGEVGIDKAFRLPMAWTSTHEAQRDDGLTPGGREGRLLSPHRVQTAHQATVLGAQLKLAGQMGRAVSVHGVQAHGLVYDTIAASWKGHEKEVLSRRQKRRIAPGAEDFMSDSESESDDEWTKELPIRKPLASASKDAGPQEFPPRICLHSYSGYVEQLKMYLSPSVPAKVYFSFSVAVNWAHGGGEKTEEAIQAIPDDRILVESDLHIAGEEMDQYLEEVCRRMCRIKGWDLREGVERLGSNWREFVFG

SEQ ID NO: 19125 - DNA, 6527 bp, Muscodor strobelii
  misc_feature: SGI EST ID NO. CUFF.45015.1
  misc_feature: Variant of the nucleotide sequence at SEQ ID NO 19123
tttagaatccctataacatatactcaagatttttctttatactaatgatattataaggctatactgatgtgcaattagatattgggacatgtgaatggttcgtttattttgacagtggcctgactggttagccaccccggacgagtgaatgtggcttggatttgctaagctgttataatcaggtctcgaatgatagacagcatcagatgctttacgaagactggtagatcttgatcgattttccattcaagcaacttttcatgaagtctaaccttttcatgtattcccaggtagaaagcgggaatatgagactattgctggtattaaagatcattccctactctgatggacatccacaagtttcaccgtcctggatatttgggcagtctcgacttgcaagacagtttgcggtcaatttctcccgttcttcacatcctgaaaagatttaatccatgatctccctgtccctacttactacaagtgatgcagatggcgctcttcctggtctcttgagtttgaagcggtgatgatcgatcgtccaccggttcacgccttttgagcatgaaacaccatgtcgaacaaagtcgaggaatagtcgtatataatagccgaaatgctaaaggcgagcagtaataccgaataaacatggaccccagcctaacgcccctattaaatgcaaactctgcaccactaaccccaaggtagactcaattatacacaggtgcgataccacctcctcaaagactcattcgtaagggtctacctcttcttgcccctgaacaagatgccaccaaccacaccagcagcgatcgcgacaccacttatgatcgcaacacccatgagaccctccttggtgaccttgtcatcgatcagcctgcgtagatcggcggcctgcagattggcgggctccttctcgacgagcaggtcgttgtagcgcctggcctcggcgtagtttccaagcttatagttgccgagggcgaggtagtataggcattcgcgacggcgctcgggggcgacgcggaagatctcggacaaaaggcggacgcccgtctgctggttgtttcggttattggatttgacgaggccctgagtgtcggcagtcgtcagtgttgtactcggaggacttgtgatcggatgagtggacatacccatgcgtagttgaactttgtctgtacgcctaccatgtcgccctccttctcgtattgcgcgcgcaggacttggagctcatcgtctctcagcgggctgtacctaggtgtcagttctaatggtcgatgaaaaagataaagccaaaggataagcttacgtttccgcatctacggcatctacgagacatgtagttagtacaagagttgacaagagaactaaaaagagtctggacatacgaggtagtgcagtcattgttcttgacaagctatctaggcagatgcacaaatcgaatgcgatgcagtattcggtgtaaagatgcgaaggattgtgtgtttaagatggattttgtttcgtttcgtttcgtaaagcaacgcgaggtacccaggtcaaggatgaataggtgcaggtggtttattagaagacaaagtggttgttagcggtcgaaggctgatgtcggaggtcgcaacttggttgtggcggaagcttgatcggtgcaaaagctccagagtccagggctggcagagctgcccgaggtggaggtcactagcacaatgccagcaatgacgcatcggtgggtcggaccccaactcgtcggctgcccttgtctacccactagcgattgtcgtcccggtgacaccctaccgtgttgtttttgcccattactgctttcggcctagacccgacagattgaagatcatctaaaccaccaccaccagtcgcgacgtagagtcattgctcattcaaacatcttcaagctctatacccaattgcccaacaacatcaacgcgccgtcaacatgttgctcgacgaagacccagcgacgctcatccaccacacgataaacaacttcaacacggcgcccgacaagatcgccatctcgcgcatccacgagaatctcgatctcctacaacaagagcgcgagcggcgcgttcgcgaagccgagaccgccctcaaaaagctctcccgccaactaaacacccaaaactcccaattccaagagttaacttcgacacactcctcctccgcccattcatcccaaatcgcaaccctcgacacacagaaattccgcatcgcgaagtcaacctccgacctcgagatggagacggagcgcttgtcctcccagctcgccgacctctccgcaaagctccaagagctcgagcttcagggtgtcgaaggcgccgataagcatgatttggtcaccgacgaagtgctgttgcggttgagcgtgtacagaagtttaggcattgatctggagagggatgagaaagatggtgagtttcggaaggccgtggttagaaatgataggaagggcgatgtgagcgtggtgaatatcgataagaagttctcccggttcttttatgcaaattatttctggcagacgctttgaggtgcgtctggagggaatggggagcgaggttaatgataatgaggcaatgagtgggaaatacatgttgttggagtacggagttacgataccacgatggaatatgtttgtaccgttggcttcatggccggagtcttgatggtgtccttgttcgtatgggagattcattatcattcttgaaattacaagtcatggtctcttctgacggaagccgacaagaccgaatattccgaaaacgccatcacgctcttcccttttccaataatgctattttacttggctgaaaccaacaaagctatatacgctcttgtatatccatttgacaacacgtctttgaaagatgtacacagccccatcacgtgccattaaacacagactttcttcaagtgcttcccatcataaagcgggaagtacccatcctcatctgctttggttaagcctggcggatggggtttgctaatcgtcggcgtcctcgatcttgagcgatttggagacgggatgaacttcacaccctcgggactgtttcctctggcgaagccgggagttgtaaaaagactcgtgcccgtcaatatggcaccgccgctgtgcgatcgaaagtgatggcgctgcggcacttccagtctcgagttcaggttgtaccactgttgctcctcggccgtgctcgtatccacgtccacgctgtccagtctccatccgcccacgccttcaaagtcgcggtctagacccacgctcggtgtaaggatcgagagatcgtcatatccgctgttcggagtgagcgagccgcttcctgagctactattccgtttccgccgcctccggtgtttgaatgttgctgcgtctggtgaggcaagtggagagctggtggctgacgatgtgggtgtcgtcggaaatgtccgctgtgatgcggcgtaccgggtttgtgctttatggcccagtaaaacatatcgcaaggtctccaacccgacgtcgaagtagaccaggaagagccggaggaataatacgaggaaggcgagaatggtggtgatgcccgcgcaaatggatagtggaagtgcgaccaggaacacgaaggggaagacgaagaacttgagtggattgaaagacagcatggctggaaatcgtgcggtgtgtctcagtgtctgttggggtctgttctgtcaatcgggactcagatgtcggttgcgctaatacgtctcgacgatgcctttacatggttactacgactgttgatctcgcggaggacgaggtcgcagcaatcgtgtcgcgatccgtccaaattattccgttcaaattcccgcgatagtattatgagaagagaattgagcaaagacactagaaaaattgaaaatggaacgagaatggtgcacagcaaagggagaagtcgggaaagattggaaagactaattcacagcgcagagctagaacacgggattcgggagtctaaacctcgagaatctttgaaatgaatcttgagtttattctcccaactcggctaccaatgacaggatagcctcgagaataagaggaacaattaactccgcgtaggagtagacttgatgaactctcgactcgactcattcctagccgacatgtgctgcgataagcttggttgttgaaagtggtgcgatatatgagatgccaagagcccgacgtccagagtgaacagtaggtttcacatgccgagagttcttgtcgacatgctgcgatctgcagatccagacagtggaagcgagaccaaacttcacactgtatgtgccgccaaattgtgcttgatagaggggcggaggattggtggggaggtgacaagatgaacctcatagaaagcattggatttggagaattcgagaccaagggaatgactcattcgctcgttgtgaatagaggtttaagaccaatctgctaatagagacgtgtgttcttaaagacatatttgaatctccgctcacccgttttttaaaagatctctgtgacattcagattgcaagtccctttcttttccctctgacgtcaacctaaataggacttccagtgtgccgcggaggacgaatattcatattattcaacttatttgtctagcacttttgagaagtgaacctttgactacaacaccgacacggccttgccttacgccagaatttctcgactatatacacccaaggtacctatcttaggcatctctgaaactggcttgcagcacactggactagttgcctcagctttgaagcagcctgcgagtttaagagtcttttgcgcataaaccttagctttctgacgcggtctagaccgctgacatcatatcattcctcttgagcctaatcggccttcatgcgacttcgattattctctaggctggaaatttcacaagctctgccctgaactagaatcttcaacgcctggcccgtattgggaccgatctcgacgcttgctcgtgtcacactttatcaccaatactagcgcaaatcttcagaccttctagaatgtgccaacaacataccgagggagaggttgacgctagccatctgcaggacccagaaacccaagacaatggaccggacgtttcccctgagcccttcccctgggatgctggtgtatttgatgcacattgccatccaacagacactatggcatcaattgattctatatctagcatgaaagcacgtgcgctaacagttatgtcaacacgctctcaagaccaagaactcgtttatgatgtggcctcgagatatggcgttcaagattttgagacattgttcttcccatcagccacatctaacgattcaagatctataataccatctttcggttggcacccatggttttcatatcaactgtacgatgataccagctcgaacccgacatttgacggaacaccagaaggaaaaatcgcacattatgataagatactggcgcctgcaccatctaaaaaagatgtatctttcactctgggtcttccagatcccaagcctctgtccgcctttctgaaggaaacacgttctcgcctagagaagtacccttttgctcttattggtgaagttggcatagacaaggcgtttcgtctaccaatggcttggacatcgacgcatgaggctcaacgggatgacggtctaacacctggaggccgagaaggacgacttctcagtccccatcgtgtacaaacggcacatcaagctacggtcttgggagctcagctcaaattagctggacaaatgggtcgagcggtcagcgtccatggtgttcaggcacatggactggtctatgatacaatagcggcaagttggaaagggcatgagaaggaagtgttgtcgcgtagacagaagcgtcgtattgctccaggcgcggaggacttcatgagtgattctgaatcggaatccgacgacgagtggaccaaagaattacccatcagaaaacccttggccagcgcatcgaaagatgccggtcctcaggaattcccgcctagaatatgtcttcactcgtacagcggatacgtcgaacagctgaaaatgtacctttctcccagtgtgcccgcaaaagtatacttttcgttctcagtcgcggtcaactgggctcacggaggaggtgagaaaaccgaagaagctatccaagccatcccagatgacagaatacttgtcgaaagtgatttgcacatagctggagaagagatggatcagtatctagaagaagtatgcagaagaatgtgccgtatcaaaggctgggatcttcgcgagggagtggagagattgggttcgaattggcgagagtttgtgtttgggtagtcgtgtacgttacacttccccgtaactcgcgctgacgggactttctccaaatggagccatttatgtgccatggactaaaattgaaagatatcccgcatttcttctccatcaacatgggatactacatgtaagtcggtagcaattcataacctatatgtcgctataagagatgcgtgtggggagctctgtcagtgattgatgcgccctatttattgaaggcatgttgt

SEQ ID NO: 19126 - DNA, 741 bp, Muscodor strobelii
  misc_feature: SGI cDNA ID NO. 566426
  misc_feature: Reduced expression when VOC is produced
  misc_feature: Encodes the peptide sequence at SEQ ID NO 19127
atgctgtctttcaatccactcaagttcttcgtcttccccttcgtgttcctggtcgcacttccactatccatttgcgcgggcatcaccaccattctcgccttcctcgtattattcctccggctcttcctggtctacttcgacgtcgggttggagaccttgcgatatgttttactgggccataaagcacaaacccggtacgccgcatcacagcggacatttccgacgacacccacatcgtcagccaccagctctccacttgcctcaccagacgcagcaacattcaaacaccggaggcggcggaaacggaatagtagctcaggaagcggctcgctcactccgaacagcggatatgacgatctctcgatccttacaccgagcgtgggtctagaccgcgactttgaaggcgtgggcggatggagactggacagcgtggacgtggatacgagcacggccgaggagcaacagtggtacaacctgaactcgagactggaagtgccgcagcgccatcactttcgatcgcacagcggcggtgccatattgacgggcacgagtctttttacaactcccggcttcgccagaggaaacagtcccgagggtgtgaagttcatcccgtctccaaatcgctcaagatcgaggacgccgacgattagcaaaccccatccgccaggcttaaccaaagcagatgaggatgggtacttcccgctttatgatgggaagcacttgaagaaagtctgtgtttaa

SEQ ID NO: 19127 - protein, 246 aa, Muscodor strobelii
  misc_feature: SGI Peptide ID NO. 566426
  misc_feature (1)..(234): NCBI GI: 261352714 Blast Desc: conserved [Verticillium albo-atrum VaMs.102]
  misc_feature (1)..(234): NCBI GI: 46121869 Blast Desc: FG05312.1 [Gibberella zeae PH-1]
  misc_feature (1)..(234): NCBI GI: 256720727 Blast Desc: NECHADRAFT_72258 [Nectria haematococca mpVI 77-13-4]
  misc_feature (11)..(215): NCBI GI: 156063566 Blast Desc: [Sclerotinia sclerotiorum 1980] gi|154697235|gb|EDN96973.1| [Sclerotinia sclerotiorum 1980]
  misc_feature (23)..(214): NCBI GI: 154296989 Blast Desc: [Botryotinia fuckeliana B05.10] gi|150843110|gb|EDN18303.1| [Botryotinia fuckeliana B05.10]
  misc_feature (1)..(189): NCBI GI: 171688488 Blast Desc: protein product [Podospora anserina] gi|170944206|emb|CAP70316.1| protein product [Podospora anserina]
  misc_feature (1)..(168): NCBI GI: 85105265 Blast Desc: NCU05311 [Neurospora crassa OR74A] gi|28923510|gb|EAA32688.1| [Neurospora crassa OR74A]
  misc_feature (4)..(234): NCBI GI: 189198501 Blast Desc: [Pyrenophora tritici-repentis Pt-1C-BFP] gi|187981536|gb|EDU48162.1| [Pyrenophora tritici-repentis Pt-1C-BFP]
  misc_feature (4)..(234): NCBI GI: 169605605 Blast Desc: SNOG_05827 [Phaeosphaeria nodorum SN15] gi|160706798|gb|EAT86891.2| SNOG_05827 [Phaeosphaeria nodorum SN15]
  misc_feature (9)..(175): NCBI GI: 242802333 Blast Desc: conserved [Talaromyces stipitatus ATCC 10500] gi|242802338|ref|XP_002483951.1| conserved [Talaromyces stipitatus ATCC 10500] gi|218717295|gb|EED16716.1| conserved ATCC
  misc_feature: Useful for introducing or modulating the production of volatile compounds
MLSFNPLKFFVFPFVFLVALPLSICAGITTILAFLVLFLRLFLVYFDVGLETLRYVLLGHKAQTRYAASQRTFPTTPTSSATSSPLASPDAATFKHRRRRKRNSSSGSGSLTPNSGYDDLSILTPSVGLDRDFEGVGGWRLDSVDVDTSTAEEQQWYNLNSRLEVPQRHHFRSHSGGAILTGTSLFTTPGFARGNSPEGVKFIPSPNRSRSRTPTISKPHPPGLTKADEDGYFPLYDGKHLKKVCV

SEQ ID NO: 19128 - DNA, 6419 bp, Muscodor strobelii
  misc_feature: SGI EST ID NO. CUFF.45014.0
  misc_feature: Variant of the nucleotide sequence at SEQ ID NO 19126
acaacatgccttcaataaatagggcgcatcaatcactgacagagctccccacacgcatctcttatagcgacatataggttatgaattgctaccgacttacatgtagtatcccatgttgatggagaagaaatgcgggatatctttcaattttagtccatggcacataaatggctccatttggagaaagtcccgtcagcgcgagttacggggaagtgtaacgtacacgactacccaaacacaaactctcgccaattcgaacccaatctctccactccctcgcgaagatcccagcctttgatacggcacattcttctgcatacttcttctagatactgatccatctcttctccagctatgtgcaaatcactttcgacaagtattctgtcatctgggatggcttggatagcttcttcggttttctcacctcctccgtgagcccagttgaccgcgactgagaacgaaaagtatacttttgcgggcacactgggagaaaggtacattttcagctgttcgacgtatccgctgtacgagtgaagacatattctaggcgggaattcctgaggaccggcatctttcgatgcgctggccaagggttttctgatgggtaattctttggtccactcgtcgtcggattccgattcagaatcactcatgaagtcctccgcgcctggagcaatacgacgcttctgtctacgcgacaacacttccttctcatgccctttccaacttgccgctattgtatcatagaccagtccatgtgcctgaacaccatggacgctgaccgctcgacccatttgtccagctaatttgagctgagctcccaagaccgtagcttgatgtgccgtttgtacacgatggggactgagaagtcgtccttctcggcctccaggtgttagaccgtcatcccgttgagcctcatgcgtcgatgtccaagccattggtagacgaaacgccttgtctatgccaacttcaccaataagagcaaaagggtacttctctaggcgagaacgtgtttccttcagaaaggcggacagaggcttgggatctggaagacccagagtgaaagatacatcttttttagatggtgcaggcgccagtatcttatcataatgtgcgatttttccttctggtgttccgtcaaatgtcgggttcgagctggtatcatcgtacagttgatatgaaaaccatgggtgccaaccgaaagatggtattatagatcttgaatcgttagatgtggctgatgggaagaacaatgtctcaaaatcttgaacgccatatctcgaggccacatcataaacgagttcttggtcttgagagcgtgttgacataactgttagcgcacgtgctttcatgctagatatagaatcaattgatgccatagtgtctgttggatggcaatgtgcatcaaatacaccagcatcccaggggaagggctcaggggaaacgtccggtccattgtcttgggtttctgggtcctgcagatggctagcgtcaacctctccctcggtatgttgttggcacattctagaaggtctgaagatttgcgctagtattggtgataaagtgtgacacgagcaagcgtcgagatcggtcccaatacgggccaggcgttgaagattctagttcagggcagagcttgtgaaatttccagcctagagaataatcgaagtcgcatgaaggccgattaggctcaagaggaatgatatgatgtcagcggtctagaccgcgtcagaaagctaaggtttatgcgcaaaagactcttaaactcgcaggctgcttcaaagctgaggcaactagtccagtgtgctgcaagccagtttcagagatgcctaagataggtaccttgggtgtatatagtcgagaaattctggcgtaaggcaaggccgtgtcggtgttgtagtcaaaggttcacttctcaaaagtgctagacaaataagttgaataatatgaatattcgtcctccgcggcacactggaagtcctatttaggttgacgtcagagggaaaagaaagggacttgcaatctgaatgtcacagagatcttttaaaaaacgggtgagcggagattcaaatatgtctttaagaacacacgtctctattagcagattggtcttaaacctctattcacaacgagcgaatgagtcattcccttggtctcgaattctccaaatccaatgctttctatgaggttcatcttgtcacctccccaccaatcctccgcccctctatcaagcacaatttggcggcacatacagtgtgaagtttggtctcgcttccactgtctggatctgcagatcgcagcatgtcgacaagaactctcggcatgtgaaacctactgttcactctggacgtcgggctcttggcatctcatatatcgcaccactttcaacaaccaagcttatcgcagcacatgtcggctaggaatgagtcgagtcgagagttcatcaagtctactcctacgcggagttaattgttcctcttattctcgaggctatcctgtcattggtagccgagttgggagaataaactcaagattcatttcaaagattctcgaggtttagactcccgaatcccgtgttctagctctgcgctgtgaattagtctttccaatctttcccgacttctccctttgctgtgcaccattctcgttccattttcaatttttctagtgtctttgctcaattctcttctcataatactatcgcgggaatttgaacggaataatttggacggatcgcgacacgattgctgcgacctcgtcctccgcgagatcaacagtcgtagtaaccatgtaaaggcatcgtcgagacgtattagcgcaaccgacatctgagtcccgattgacagaacagaccccaacagacactgagacacaccgcacgatttccagccatgctgtctttcaatccactcaagttcttcgtcttccccttcgtgttcctggtcgcacttccactatccatttgcgcgggcatcaccaccattctcgccttcctcgtattattcctccggctcttcctggtctacttcgacgtcgggttggagaccttgcgatatgttttactgggccataaagcacaaacccggtacgccgcatcacagcggacatttccgacgacacccacatcgtcagccaccagctctccacttgcctcaccagacgcagcaacattcaaacaccggaggcggcggaaacggaatagtagctcaggaagcggctcgctcactccgaacagcggatatgacgatctctcgatccttacaccgagcgtgggtctagaccgcgactttgaaggcgtgggcggatggagactggacagcgtggacgtggatacgagcacggccgaggagcaacagtggtacaacctgaactcgagactggaagtgccgcagcgccatcactttcgatcgcacagcggcggtgccatattgacgggcacgagtctttttacaactcccggcttcgccagaggaaacagtcccgagggtgtgaagttcatcccgtctccaaatcgctcaagatcgaggacgccgacgattagcaaaccccatccgccaggcttaaccaaagcagatgaggatgggtacttcccgctttatgatgggaagcacttgaagaaagtctgtgtttaatggcacgtgatggggctgtgtacatctttcaaagacgtgttgtcaaatggatatacaagagcgtatatagctttgttggtttcagccaagtaaaatagcattattggaaaagggaagagcgtgatggcgttttcggaatattcggtcttgtcggcttccgtcagaagagaccatgacttgtaatttcaagaatgataatgaatctcccatacgaacaaggacaccatcaagactccggccatgaagccaacggtacaaacatattccatcgtggtatcgtaactccgtactccaacaacatgtatttcccactcattgcctcattatcattaacctcgctccccattccctccagacgcacctcaaagcgtctgccagaaataatttgcataaaagaaccgggagaacttcttatcgatattcaccacgctcacatcgcccttcctatcatttctaaccacggccttccgaaactcaccatctttctcatccctctccagatcaatgcctaaacttctgtacacgctcaaccgcaacagcacttcgtcggtgaccaaatcatgcttatcggcgccttcgacaccctgaagctcgagctcttggagctttgcggagaggtcggcgagctgggaggacaagcgctccgtctccatctcgaggtcggaggttgacttcgcgatgcggaatttctgtgtgtcgagggttgcgatttgggatgaatgggcggaggaggagtgtgtcgaagttaactcttggaattgggagttttgggtgtttagttggcgggagagctctgggtacaataaatgttagcaacgtggtttttggtctgtagtttatcgtgtggtcagagagcaggagtacatacttttgagggcggtctcggcttcgcgaacgcgccgctcgcgctcttgttgtaggagatcgagattctcgtggatgcgcgagatggcgatcttgtcgggcgccgtgttgaagttgtttatcgtgtggtggatgagcgtcgctgggtcttcgtcgagcaacatgttgacggcgcgttgatgttgttgggcaattgggtatagagcttgaagatgtttgaatgagcaatgactctacgtcgcgactggtggtggtggtttagatgatcttcaatctgtcgggtctaggccgaaagcagtaatgggcaaaaacaacacggtagggtgtcaccgggacgacaatcgctagtgggtagacaagggcagccgacgagttggggtccgacccaccgatgcgtcattgctggcattgtgctagtgacctccacctcgggcagctctgccagccctggactctggagcttttgcaccgatcaagcttccgccacaaccaagttgcgacctccgacatcagccttcgaccgctaacaaccactttgtcttctaataaaccacctgcacctattcatccttgacctgggtacctcgcgttgctttacgaaacgaaacgaaacaaaatccatcttaaacacacaatccttcgcatctttacaccgaatactgcatcgcattcgatttgtgcatctgcctagatagcttgtcaagaacaatgactgcactacctcatgccgtagatgcggaaaccccgctgagagacgatgagctccaagtcctgcgcgcgcaatacgagaaggagggcgacatggtaggcgtacagacaaagttcaactacgcatggggcctcgtcaaatccaataaccgaaacaaccagcagacgggcgtccgccttttgtccgagatcttccgcgtcgcccccgagcgccgtcgcgaatgcctatactacctcgccctcggcaactataagcttggaaactacgccgaggccaggcgctacaacgacctgctcgtcgagaaggagcccgccaatctgcaggccgccgatctacgcaggctgatcgatgacaaggtcaccaaggagggtctcatgggtgttgcgatcataagtggtgtcgcgatcgctgctggtgtggttggtggcatcttgttcaggggcaagaagaggtagacccttacgaatgagtctttgaggaggtggtatcgcacctgtgtataattgagtctaccttggggttagtggtgcagagtttgcatttaataggggcgttaggctggggtccatgtttattcggtattactgctcgcctttagcatttcggctattatatacgactattcctcgactttgttcgacatggtgtttcatgctcaaaaggcgtgaaccggtggacgatcgatcatcaccgcttcaaactcaagagaccaggaagagcgccatctgcatcacttgtagtaagtagggacagggagatcatggattaaatcttttcaggatgtgaagaacgggagaaattgaccgcaaactgtcttgcaagtcgagactgcccaaatatccaggacggtgaaacttgtggatgtccatcagagtagggaatgatctttaataccagcaatagtctcatattcccgctttctacctgggaatacatgaaaaggttagacttcatgaaaagttgcttgaatggaaaatcgatcaagatctaccagtcttcgtaaagcatctgatgctgtctatcattcgagacctgattataacagcttagcaaatccaagccacattcactcgtccggggtggctaaccagtcaggccactgtcaaaataaacgaaccattcacatgtcccaatatctaattgcacatcagtatagccttataatatcattagtataaagaaaaatcttgagtatatgttatagggattctaaa

SEQ ID NO: 19129 - DNA, 591 bp, Muscodor strobelii
  misc_feature: SGI cDNA ID NO. 566427
  misc_feature: Reduced expression when VOC is produced
  misc_feature: Encodes the peptide sequence at SEQ ID NO 19130
atgttgctcgacgaagacccagcgacgctcatccaccacacgataaacaacttcaacacggcgcccgacaagatcgccatctcgcgcatccacgagaatctcgatctcctacaacaagagcgcgagcggcgcgttcgcgaagccgagaccgccctcaaaaagctctcccgccaactaaacacccaaaactcccaattccaagagttaacttcgacacactcctcctccgcccattcatcccaaatcgcaaccctcgacacacagaaattccgcatcgcgaagtcaacctccgacctcgagatggagacggagcgcttgtcctcccagctcgccgacctctccgcaaagctccaagagctcgagcttcagggtgtcgaaggcgccgataagcatgatttggtcaccgacgaagtgctgttgcggttgagcgtgtacagaagtttaggcattgatctggagagggatgagaaagatggtgagtttcggaaggccgtggttagaaatgataggaagggcgatgtgagcgtggtgaatatcgataagaagttctcccggttcttttatgcaaattatttctggcagacgctttga

SEQ ID NO: 19130 - protein, 196 aa, Muscodor strobelii
  misc_feature: SGI Peptide ID NO. 566427
  misc_feature (82)..(196): Pfam Id: PF08286 Pfam Desc: Spc24 subunit of Ndc80
  misc_feature (1)..(196): NCBI GI: 39975995 Blast Desc: MGG_06076 [Magnaporthe grisea 70-15] gi|145011636|gb|EDJ96292.1| MGG_06076 [Magnaporthe grisea 70-15]
  misc_feature (1)..(196): NCBI GI: 156063568 Blast Desc: SS1G_01902 [Sclerotinia sclerotiorum 1980] gi|154697236|gb|EDN96974.1| SS1G_01902 [Sclerotinia sclerotiorum 1980]
  misc_feature (1)..(196): NCBI GI: 154296991 Blast Desc: BC1G_12584 [Botryotinia fuckeliana B05.10] gi|150843111|gb|EDN18304.1| BC1G_12584 [Botryotinia fuckeliana B05.10]
  misc_feature (1)..(196): NCBI GI: 116196504 Blast Desc: CHGG_04850 [Chaetomium globosum CBS 148.51] gi|88180763|gb|EAQ88231.1| CHGG_04850 [Chaetomium globosum CBS 148.51]
  misc_feature (1)..(196): NCBI GI: 46121871 Blast Desc: FG05313.1 [Gibberella zeae PH-1] gi|110816425|sp|Q4IBU5.1|SPC24_GIBZE RecName: Full= kinetochore protein SPC24
  misc_feature (1)..(196): NCBI GI: 171688486 Blast Desc: protein product [Podospora anserina] gi|170944205|emb|CAP70315.1| protein product [Podospora anserina]
  misc_feature (1)..(196): NCBI GI: 256720928 Blast Desc: [Nectria haematococca mpVI 77-13-4]
  misc_feature (1)..(196): NCBI GI: 74616677 Blast Desc: [Nectria haematococca mpVI 77-13-4]
  misc_feature (1)..(196): NCBI GI: 110816423 Blast Desc: [Nectria haematococca mpVI 77-13-4]
  misc_feature (1)..(196): NCBI GI: 119481529 Blast Desc: NFIA_088520 [Neosartorya fischeri NRRL 181] gi|119408947|gb|EAW18896.1| conserved [Neosartorya fischeri NRRL 181]
  misc_feature: Useful for introducing or modulating the production of volatile compounds
MLLDEDPATLIHHTINNFNTAPDKIAISRIHENLDLLQQERERRVREAETALKKLSRQLNTQNSQFQELTSTHSSSAHSSQIATLDTQKFRIAKSTSDLEMETERLSSQLADLSAKLQELELQGVEGADKHDLVTDEVLLRLSVYRSLGIDLERDEKDGEFRKAVVRNDRKGDVSVVNIDKKFSRFFYANYFWQTL

SEQ ID NO: 19131 - DNA, 6527 bp, Muscodor strobelii; identical to SEQ ID NO: 19125
  misc_feature: SGI EST ID NO. CUFF.45015.1
  misc_feature: Variant of the nucleotide sequence at SEQ ID NO 19129

SEQ ID NO: 19132 - DNA, 462 bp, Muscodor strobelii
  misc_feature: SGI cDNA ID NO. 566428
  misc_feature: Encodes the peptide sequence at SEQ ID NO 19133
atgactgcactacctcatgccgtagatgcggaaacgtacagcccgctgagagacgatgagctccaagtcctgcgcgcgcaatacgagaaggagggcgacatggtaggcgtacagacaaagttcaactacgcatggggcctcgtcaaatccaataaccgaaacaaccagcagacgggcgtccgccttttgtccgagatcttccgcgtcgcccccgagcgccgtcgcgaatgcctatactacctcgccctcggcaactataagcttggaaactacgccgaggccaggcgctacaacgacctgctcgtcgagaaggagcccgccaatctgcaggccgccgatctacgcaggctgatcgatgacaaggtcaccaaggagggtctcatgggtgttgcgatcataagtggtgtcgcgatcgctgctggtgtggttggtggcatcttgttcaggggcaagaagaggtag

SEQ ID NO: 19133 - protein, 153 aa, Muscodor strobelii
  misc_feature: SGI Peptide ID NO. 566428
  misc_feature (1)..(153): NCBI GI: 171688484 Blast Desc: protein product [Podospora anserina] gi|170944204|emb|CAP70314.1| protein product [Podospora anserina]
  misc_feature (1)..(153): NCBI GI: 85105272 Blast Desc: NCU05313 [Neurospora crassa OR74A] gi|74616676|sp|Q7S8M1.1|FIS1_NEUCR RecName: Full=Mitochondria fission 1 protein gi|28923512|gb|EAA32690.1| conserved crassa
  misc_feature (3)..(153): NCBI GI: 156063570 Blast Desc: SS1G_01903 [Sclerotinia sclerotiorum 1980] gi|154697237|gb|EDN96975.1| SS1G_01903 [Sclerotinia sclerotiorum 1980]
  misc_feature (3)..(153): NCBI GI: 154296993 Blast Desc: BC1G_12585 [Botryotinia fuckeliana B05.10] gi|150843112|gb|EDN18305.1| BC1G_12585 [Botryotinia fuckeliana B05.10]
  misc_feature (4)..(153): NCBI GI: 169774607 Blast Desc: [Aspergillus oryzae RIB40] gi|238496817|ref|XP_002379644.1| mitochondrial membrane fission protein (Fis1), [Aspergillus flavus NRRL3357] RecName: fission 1
  misc_feature (2)..(153): NCBI GI: 67540110 Blast Desc: AN6225.2 [Aspergillus nidulans FGSC A4] gi|74627441|sp|Q5AZQ5.1|FIS1_EMENI RecName: Full=Mitochondria fission 1 protein gi|40738449|gb|EAA57639.1| AN6225.2 nidulans 1
  misc_feature (2)..(153): NCBI GI: 119190031 Blast Desc: CIMG_05063 [Coccidioides immitis RS] gi|240110997|gb|EER29150.1| Tetratricopeptide repeat containing protein [Coccidioides posadasii C735 delta SOWgp]
  misc_feature (2)..(153): NCBI GI: 39975997 Blast Desc: conserved [Magnaporthe grisea 70-15] gi|59802875|gb|AAX07651.1| [Magnaporthe grisea] gi|145011637|gb|EDJ96293.1| conserved [Magnaporthe grisea 70-15]
  misc_feature (2)..(153): NCBI GI: 145231775 Blast Desc: An02g02190 [Aspergillus niger] gi|134056265|emb|CAK96393.1| protein product [Aspergillus niger]
  misc_feature (7)..(153): NCBI GI: 121715994 Blast Desc: mitochondrial membrane fission protein (Fis1), [Aspergillus clavatus NRRL 1] gi|119403763|gb|EAW14180.1| mitochondrial membrane fission protein (Fis1), [Aspergillus NRRL
MTALPHAVDAETYSPLRDDELQVLRAQYEKEGDMVGVQTKFNYAWGLVKSNNRNNQQTGVRLLSEIFRVAPERRRECLYYLALGNYKLGNYAEARRYNDLLVEKEPANLQAADLRRLIDDKVTKEGLMGVAIISGVAIAAGVVGGILFRGKKR

SEQ ID NO: 19134 - DNA, 6419 bp, Muscodor strobelii; identical to SEQ ID NO: 19128
  misc_feature: SGI EST ID NO. CUFF.45014.0
  misc_feature: Variant of the nucleotide sequence at SEQ ID NO 19132

SEQ ID NO: 19135 - DNA, 456 bp, Muscodor strobelii
  misc_feature: SGI cDNA ID NO. 566429
  misc_feature: Reduced expression when VOC is produced
  misc_feature: Encodes the peptide sequence at SEQ ID NO 19136
atgactgcactacctcatgccgtagatgcggaaaccccgctgagagacgatgagctccaagtcctgcgcgcgcaatacgagaaggagggcgacatggtaggcgtacagacaaagttcaactacgcatggggcctcgtcaaatccaataaccgaaacaaccagcagacgggcgtccgccttttgtccgagatcttccgcgtcgcccccgagcgccgtcgcgaatgcctatactacctcgccctcggcaactataagcttggaaactacgccgaggccaggcgctacaacgacctgctcgtcgagaaggagcccgccaatctgcaggccgccgatctacgcaggctgatcgatgacaaggtcaccaaggagggtctcatgggtgttgcgatcataagtggtgtcgcgatcgctgctggtgtggttggtggcatcttgttcaggggcaagaagaggtag

SEQ ID NO: 19136 - protein, 151 aa, Muscodor strobelii
  misc_feature: SGI Peptide ID NO. 566429
  misc_feature (1)..(151): NCBI GI: 171688484 Blast Desc: protein product [Podospora anserina] gi|170944204|emb|CAP70314.1| protein product [Podospora anserina]
  misc_feature (1)..(151): NCBI GI: 85105272 Blast Desc: NCU05313 [Neurospora crassa OR74A] gi|74616676|sp|Q7S8M1.1|FIS1_NEUCR RecName: Full=Mitochondria fission 1 protein gi|28923512|gb|EAA32690.1| conserved crassa
  misc_feature (3)..(151): NCBI GI: 156063570 Blast Desc: SS1G_01903 [Sclerotinia sclerotiorum 1980] gi|154697237|gb|EDN96975.1| SS1G_01903 [Sclerotinia sclerotiorum 1980]
  misc_feature (3)..(151): NCBI GI: 154296993 Blast Desc: BC1G_12585 [Botryotinia fuckeliana B05.10] gi|150843112|gb|EDN18305.1| BC1G_12585 [Botryotinia fuckeliana B05.10]
  misc_feature (2)..(151): NCBI GI: 169774607 Blast Desc: [Aspergillus oryzae RIB40] gi|238496817|ref|XP_002379644.1| mitochondrial membrane fission protein (Fis1), [Aspergillus flavus NRRL3357] RecName: fission 1
  misc_feature (2)..(151): NCBI GI: 67540110 Blast Desc: AN6225.2 [Aspergillus nidulans FGSC A4] gi|74627441|sp|Q5AZQ5.1|FIS1_EMENI RecName: Full=Mitochondria fission 1 protein gi|40738449|gb|EAA57639.1| AN6225.2 nidulans 1
  misc_feature (2)..(151): NCBI GI: 119190031 Blast Desc: CIMG_05063 [Coccidioides immitis RS] gi|240110997|gb|EER29150.1| Tetratricopeptide repeat containing protein [Coccidioides posadasii C735 delta SOWgp]
  misc_feature (2)..(151): NCBI GI: 39975997 Blast Desc: conserved [Magnaporthe grisea 70-15] gi|59802875|gb|AAX07651.1| [Magnaporthe grisea] gi|145011637|gb|EDJ96293.1| conserved [Magnaporthe grisea 70-15]
  misc_feature (2)..(151): NCBI GI: 145231775 Blast Desc: An02g02190 [Aspergillus niger] gi|134056265|emb|CAK96393.1| protein product [Aspergillus niger]
  misc_feature (7)..(151): NCBI GI: 121715994 Blast Desc: mitochondrial membrane fission protein (Fis1), [Aspergillus clavatus NRRL 1] gi|119403763|gb|EAW14180.1| mitochondrial membrane fission protein (Fis1), [Aspergillus NRRL
  misc_feature: Useful for introducing or modulating the production of volatile compounds
MTALPHAVDAETPLRDDELQVLRAQYEKEGDMVGVQTKFNYAWGLVKSNNRNNQQTGVRLLSEIFRVAPERRRECLYYLALGNYKLGNYAEARRYNDLLVEKEPANLQAADLRRLIDDKVTKEGLMGVAIISGVAIAAGVVGGILFRGKKR

SEQ ID NO: 19137 - DNA, 6419 bp, Muscodor strobelii; identical to SEQ ID NO: 19128
  misc_feature: SGI EST ID NO. CUFF.45014.0
  misc_feature: Variant of the nucleotide sequence at SEQ ID NO 19135

SEQ ID NO: 19138 - DNA, 1539 bp, Muscodor strobelii
  misc_feature: SGI cDNA ID NO. 566430
  misc_feature: Reduced expression when VOC is produced
  misc_feature: Encodes the peptide sequence at SEQ ID NO 19139
atggcttcaagaagtcgtggccaccgcctggacctggctggcggtgaggtcgtcttctgccatgcctgcaacaacgaatggtaccgcaacgactacggtggcagcctgacctgcccggcatgccagaacgaggctacagagatcgttaccgaggacaacgaccccagaccagtcagcgacgaatcggattctgatcatggctatgaccactaccacgaccatgatcacgaccatcccttccctcttctccacagtcatagccatcgtcatcaccaccagcacgatgatgacgccgaccccgatgaggccgatatagaggagcacctgtacaacactcctggtggattcttcggccggcgcaccatcaaccgctccccgcagacaggagactacggccgccccggcgtccatacccagagcagcgacgacattatccgcagattcaccgagatgattgggagcataggaggccccaacacccctggtcgcactggagtcgttggccgatcaggacccgagactctctttggcaataatcatgacggcggacctcaggttattgcccggtcgtaccgcacgccaggtggtggcatggccagtttcaccatcaccaatgcgcccatgagagtcacaaacgcaggtcccgctgggcccaggcctggatttggcgcccgaggagccgaggatcccttccaaagtctgtttggtgaactctttggtcagataggccctcctgggtttcaacaaaatcgccaagaggcgcatggtccagctggtcaggttgagggacacgatgatgagggcaatgataacaatggtcccggccggccggtagatatggttactctcctcaatcagctggtagcatctatgatcaatccccatgcggcccatggcgacgcagtctactcacaagaagccctcgatcgcatcattacgaatctcatggaagccaatcctcagtccaacgcgcctgctccagctccccaagacgccatagcatcactaccaaagaaaaagctagacgaggcaatgttaggtgccgaaggaaagggcgagtgtactatctgcatcgacgacgttaaactaggagacgaggttatcgtgttaccctgcaagcactggttccacgaggagtgtgcgagtctctggcttaagcagcataattcctgccccgtctgtcgcgccgctatcgatggagatgccgcaggcaagccgcgtaattcagcacttactaataatacagatcagtcttcttcatccgcagccggtccatctaactcagcggagaggtcttcaggtcctgaacgaagacgcagttatctacggcacagagaggctcggcttgacgccatacgcaatagcgctgctgatggtagtcgccatccccgatttaccgattcgccggataggacgcgtaggagtaggacttcatcgccctcttcgcgtagcgagcagacgcgcgagagtcggcgaggctcgaacactggtggtggtggtttctccgggtggatcagggacaggtttagtgggagatga

SEQ ID NO: 19139 - protein, 512 aa, Muscodor strobelii
  misc_feature: SGI Peptide ID NO. 566430
  misc_feature (354)..(394): Pfam Id: PF00097 Pfam Desc: Zinc finger, C3HC4 type (RING finger)
  misc_feature (14)..(399): NCBI GI: 85105275 Blast Desc: NCU05314 [Neurospora crassa OR74A] gi|28923513|gb|EAA32691.1| NCU05314 [Neurospora crassa OR74A]
  misc_feature (13)..(399): NCBI GI: 39975973 Blast Desc: MGG_06087 [Magnaporthe grisea 70-15] gi|145011622|gb|EDJ96278.1| MGG_06087 [Magnaporthe grisea 70-15]
  misc_feature (3)..(510): NCBI GI: 261352719 Blast Desc: conserved [Verticillium albo-atrum VaMs.102]
  misc_feature (7)..(404): NCBI GI: 46110178 Blast Desc: FG01971.1 [Gibberella zeae PH-1]
  misc_feature (7)..(454): NCBI GI: 154296995 Blast Desc: BC1G_12586 [Botryotinia fuckeliana B05.10] gi|150843113|gb|EDN18306.1| BC1G_12586 [Botryotinia fuckeliana B05.10]
  misc_feature (13)..(429): NCBI GI: 171688482 Blast Desc: protein product [Podospora anserina] gi|170944203|emb|CAP70313.1| protein product [Podospora anserina]
  misc_feature (1)..(399): NCBI GI: 116196500 Blast Desc: CHGG_04848 [Chaetomium globosum CBS 148.51] gi|88180761|gb|EAQ88229.1| CHGG_04848 [Chaetomium globosum CBS 148.51]
  misc_feature (16)..(398): NCBI GI: 169605729 Blast Desc: SNOG_05890 [Phaeosphaeria nodorum SN15] gi|160706824|gb|EAT86954.2| SNOG_05890 [Phaeosphaeria nodorum SN15]
  misc_feature (91)..(399): NCBI GI: 256720945 Blast Desc: NECHADRAFT_85748 [Nectria haematococca mpVI 77-13-4]
  misc_feature (7)..(410): NCBI GI: 189198023 Blast Desc: zinc finger protein 364 [Pyrenophora tritici-repentis Pt-1C-BFP] gi|187981297|gb|EDU47923.1| zinc finger protein 364 [Pyrenophora tritici-repentis Pt-1C-BFP]
  misc_feature: Useful for introducing or modulating the production of volatile compounds
MASRSRGHRLDLAGGEVVFCHACNNEWYRNDYGGSLTCPACQNEATEIVTEDNDPRPVSDESDSDHGYDHYHDHDHDHPFPLLHSHSHRHHHQHDDDADPDEADIEEHLYNTPGGFFGRRTINRSPQTGDYGRPGVHTQSSDDIIRRFTEMIGSIGGPNTPGRTGVVGRSGPETLFGNNHDGGPQVIARSYRTPGGGMASFTITNAPMRVTNAGPAGPRPGFGARGAEDPFQSLFGELFGQIGPPGFQQNRQEAHGPAGQVEGHDDEGNDNNGPGRPVDMVTLLNQLVASMINPHAAHGDAVYSQEALDRIITNLMEANPQSNAPAPAPQDAIASLPKKKLDEAMLGAEGKGECTICIDDVKLGDEVIVLPCKHWFHEECASLWLKQHNSCPVCRAAIDGDAAGKPRNSALTNNTDQSSSSAAGPSNSAERSSGPERRRSYLRHREARLDAIRNSAADGSRHPRFTDSPDRTRRSRTSSPSSRSEQTRESRRGSNTGGGGFSGWIRDRFSGR

SEQ ID NO: 19140 - DNA, 3495 bp, Muscodor strobelii
  misc_feature: SGI EST ID NO. CUFF.44983.0
  misc_feature: Variant of the nucleotide sequence at SEQ ID NO 19138
attttgactcccgcctgccagtaagggtcctgaagtgccccgccgaagctggcagaggacatgacgaaagctgaaatgtacgattcatcccacatgtaccaatttgccaagggtccgccgaattgctaggcagcgtggtcaaagggtacaagacccagcagatacgtcagctaccaggtgtggtggaagtcgccgctacgatacaagcttgaatccgatgatgaatgagctgtgtgacttcatggtcgtttgactctgattgccaggctttcaggcgatcagctgtttgactccaagacgatgcctaggatcgcacttcttcacctttgagtattctatcccacccgaggtccagcccgtgtcatcttgtcatctcctacctcttcacacgcaccacaactcaatcacggcaacttccacgctcttccaccgcgttcttgctgtcgatataacccttccggacactccgcgacatcgctactccagccgtcagctccagctcacgacaacacgttgcgacgagacagggcgcgaccaatcaccactaataatccacccgattctgggctctgggcacattgggtcgcattggcccttttgtaagttcgtcttggtcaagctgtctatacctctgcacacccccagcgatggtcatggttgaatctccaaagtactcgtcactcttccgttgcaccgaatatcgcacatacatcagatattctgtaccttgcctttggctccaatctgcctgattcgaagaccatttcttgtgactgtgcctatttccttctgcgggccctgtctagatttcgatattcaccactctcgacaaacccaaccctttgttgccaacatccgtgttgggaaacttgcaccagcagtatgctacctttcccagcttgtctacatagtgcctgctgtatagcgcagtttgcgcccgggcgtcccactacttcaacagagtgtcaaatggattcaacgcaaacagaattactgacaacatgtctagtcaccagtcaccaggctgcagtacatcaaggtttcgcctgagtacagcctagtcaagcgttgcaagcttgtaacgcggattcatctggagaagtgccaagtcaagtcagccttgtccaaccgtctggacacctccgcatgaggcgttctctactccaactacacagctagcaactgccaacgaccagcaatatttctttgttcagtatcaactaccaaagtcaacaaggtccagttttatctccgaatgataccgcctcggtcgcctgatcctaaacaatatccattctcgcccaaccccacgcaaaacccagctgccagtacccagcaactccgtcactgtggctttccgagcgttgagaacggccggtctcgcactcggcatcggtctcactgccctccacgcctacaaccgatcccagcggccccccatggcttcaagaagtcgtggccaccgcctggacctggctggcggtgaggtcgtcttctgccatgcctgcaacaacgaatggtaccgcaacgactacggtggcagcctgacctgcccggcatgccagaacgaggctacagagatcgttaccgaggacaacgaccccagaccagtcagcgacgaatcggattctgatcatggctatgaccactaccacgaccatgatcacgaccatcccttccctcttctccacagtcatagccatcgtcatcaccaccagcacgatgatgacgccgaccccgatgaggccgatatagaggagcacctgtacaacactcctggtggattcttcggccggcgcaccatcaaccgctccccgcagacaggagactacggccgccccggcgtccatacccagagcagcgacgacattatccgcagattcaccgagatgattgggagcataggaggccccaacacccctggtcgcactggagtcgttggccgatcaggacccgagactctctttggcaataatcatgacggcggacctcaggttattgcccggtcgtaccgcacgccaggtggtggcatggccagtttcaccatcaccaatgcgcccatgagagtcacaaacgcaggtcccgctgggcccaggcctggatttggcgcccgaggagccgaggatcccttccaaagtctgtttggtgaactctttggtcagataggccctcctgggtttcaacaaaatcgccaagaggcgcatggtccagctggtcaggttgagggacacgatgatgagggcaatgataacaatggtcccggccggccggtagatatggttactctcctcaatcagctggtagcatctatgatcaatccccatgcggcccatggcgacgcagtctactcacaagaagccctcgatcgcatcattacgaatctcatggaagccaatcctcagtccaacgcgcctgctccagctccccaagacgccatagcatcactaccaaagaaaaagctagacgaggcaatgttaggtgccgaaggaaagggcgagtgtactatctgcatcgacgacgttaaactaggagacgaggttatcgtgttaccctgcaagcactggttccacgaggagtgtgcgagtctctggcttaagcagcataattcctgccccgtctgtcgcgccgctatcgatggagatgccgcaggcaagccgcgtaattcagcacttactaataatacagatcagtcttcttcatccgcagccggtccatctaactcagcggagaggtcttcaggtcctgaacgaagacgcagttatctacggcacagagaggctcggcttgacgccatacgcaatagcgctgctgatggtagtcgccatccccgatttaccgattcgccggataggacgcgtaggagtaggacttcatcgccctcttcgcgtagcgagcagacgcgcgagagtcggcgaggctcgaacactggtggtggtggtttctccgggtggatcagggacaggtttagtgggagatgatctatccttcatggcatactcacgatccgggattagctatggctctcccctagaaatgctagcatgactgcggcaaccgttcgcatgtttcggatgcttcatgctactgatgatcaacctcctgcctgtggagtgcgaatggcagtaatgaagtcagcacagaggcataatttgtacgtatagaagagatatcgcatagagcaagtggccttttgacgacggatctggttttactaggctaggccaagcccaccgtggatagctaagggcagctgaagcactaggggcaaaacggagaattcgaggatgggaagagcatggcgccgaaacaaccctttaatatgattcacgtagacagagctgaggaataaaaggctcgtgatgactgcttcattgcacattgtgtttcttgaattcatatggcatgcttcatgtagaatatgatatgcctgtgtggattatgggttagtagatgtgtagatgcggttacagggtaacctctatgaggcgcgttgcg

SEQ ID NO: 19141 - DNA, 5064 bp, Muscodor strobelii
  misc_feature: SGI cDNA ID NO. 566431
  misc_feature: Encodes the peptide sequence at SEQ ID NO 19142
atggactcggacatgatggacgaagattccgtcttcggtgatgacttcaagaacgaagacgactccgatgctttctctcctgaacccaaacccaaggcaaaggctccggccaagaaggccgccgctgctgcaaagcccaagaagatggtccagacgaccctgaaacccacaaaggccgctcccaagaagcgcgccaaaaccgccagcgacgatgaggacgacggcgtcgacggcgacttctccaccacgcccccgagcgccaagaagcagaagaaggcccccgcgcccaagaagtccggcggcaagccccttggcgagatccagaacgacagcatgctgctcgacgacgccccagacccctcccccaagccccagcccaaggccaagggcaagcccaagacggccaccgagacgtaccagaagctgtcccagctcgagcacatcctcgtccgccccgacacctacatcggctccgtcgagcgcaccgagcagcccatgtgggtcttcaacaaggagacgaaactcatggagtaccgccccaaggtcagcttcgtccccggcctctacaagatcttcgacgagatcctcgtcaacgccgccgacaacaagcagcgcgacgccagcatgacgcagatgaaggtcaccatcaatcgccaagagggctgggtcgaggtcgagaacaacggcaagggcatccccgtcgtcatgcacgagaaggagaaggtctacatccccgagatgatcttcggccacctgctggccggctccaacttcgacgacaacgaggagaagacggtcggcggccgcaacggctacggcgccaagctgtgcaacgtcttcagcaccgagttcaccctcgagtgccaggactcggagcacggcaagcgctacaagcagacctggagcgacaacatgaccaagatgggcaaggccaagatatccagcagcggctccaaggacttcgtccgcgtcactttcaagcccgactgggccaagttcggcatgaccgagatcgacgacgacctcgagggcctcatgtaccgccgcgtctacgacatggccggcaccatcaagggtgtcaaggtcgtgctcaacgacgaacccctcaagctctccttcgccaagtactgcgagatgtatgctaaggccatcgctcgcgagcgcagcctggaggagggcgaggagcccaaggccaccgtcatcctcgaggactccaagggccacccccgctgggaggtgggcttcgccgtctccgatggcacctttcagcaggtctccttcgtcaactccatcgccacgacccagggcggcccgcacgtcaactacatcgcagaccagatctgcgagtctctgctcaaggtcttgaccaagaagaagaagggccactcgctcaaagccaatcacattcgaaaccacatcttcattttcgtcaactgtctcatcaacaaccccgccttcaactcgcagacgaaagagatgatgacgacgaaagcgagctcctggaagaagcctgagctcggatgtgagctatcggatggcttcctcaagaagattgcagcaaccgatgcaatcaccaacatcatgaactttgccgagcaaaaagccgacaagttattggccaagagtgacggaggcaagcgatcaagaatcagcaacgcgaagctcgtcgacgccaacttggcgggcactaaacacggatcagaatgtaccctcatcttaacagaaggtgattccgccaagagtttggcggtcgccggtcgagccatcctagaccccgaccgctacggtgtcttcccgctcagaggaaagatgctcaacgttcgcgatgcttccatcgaccagatatccaagaacgccgaaatccaaaacatcaagcagttcttgggtctgaaacacaagacacagtatactgataccaagagtctgcgatacggtcatttgatgatcatggccgatcaggatcacgatggtagccatatcaagggtctgctcatcaatttcctccaagtccaatatccttccctgttgaagatacccgatttcttccaagaattcatcacccctattgtcaaggtgtggcaggggcccaacccgaagaaacctcttaagatgaaatctttcttcacccagcctcaatacgaggagtggaaagaaagccacaaagcagaaatcaagaaatggcactccaagtactacaagggtctgggaacaagttccaatgaagatgctcaagtctatttcaacgacctggatcagcatcaaaagcatttcgataccatgaaagtcgaagaagcagacttgttcgaccttgctttctccaagaagaaggcagatgcccgtaaagaatggctgggcaactttgtcccgggcacgtactttgatcacggcggccagtctgtcatcagctacgatgactttgtcaacaaagagctcattcttttcagcatggcagataacatgcgatctattccctcgcttgtcgacgggctgaagcccggtcaacgcaaggtcatctacgcttgtctcaagcggaacctggtcaaggacaagaaggtcattgagttggctggttatgtctcggaacagactgcctatcatcacggtgaagtgtcactacaacagacaatcatcggcctcgctcagacgtttgttggttccaacaatgtcaactatctagagcccagtggaaacttcggttctcgtctggctggtggctccgatgctgccagcgcccgttacatccacacgcggctctctccgtttgcgcggcgtgtcttttctccattagatgagcccaatttggagcatctcgttgaagatggcaagaagatcgagcctaaagtctacgtccctgtcattcctatggtactggttaacggtgccgacggtattggcactggctggagtacttcgattcctaactatcatccactcgatatcatcaatggaattagacggcgcatgggccgtttggatagtagtgaggagaagcccttcgagacgatgacaccctggttcaagggctggaagggaaccgcagcgcctgctgaggtcaatcgctatcaattcaacggcatggcccacgtcgacgataacactaatgaagttatcatcacggagctaccaatccgcatgtggacagatgatttcaaggcaaagttagaagatatcattagagcagagaagagtccgtcattcatcaaagactacaaagagttcaatgaccacaacaatgtccatttcgagatccagatggatcccaaacacctcgaggcagcgttgaaaacgccagatggtcttctcgagaagttcaagctcgtcaaacaagtggcgacgtcgaacttagttgcgtttgacactactggaagaatccgcaagtacgaaaaggttgaggatatcttggaagagttctaccactaccgactccagatgtacaagaaacgcaaagctcattggcttggtgtcatcaagtcagatcacaagaaactgggcaatcaagccaggtttatccgagaaatcatggacaagaaactcgtggtgtacagaaagaagaaggcagtcatcgtcgaagagcttcgcgaggctaagtacgatgccttcgttaagactaccgaagcaaagacgaagtccgaggaagacgaagaaggagatgccgaagacggtgataatgacaacgcagacgacgactctcgtggatacgattatctcctctcgatgccaatttggtcattcactcaagagcgacttgagcgcctcaaagagcagatcagaaagaagcaggaagaatacgatgagctcgaagccaaatccgagaaagatctatggtgtcaagatttggacgactttgaagtagcttgggaggctcagctcaagctcgatgccgaaattactaccggtattcgacgaaggagtcgtgctctgaagaagaagggaggaggtcgcggtcgtaagcccaagggcgatgacgacttcatgccgaccgttgcccgttctaagcccgcggcaaaagctgcccctaagcctgccaaaccagagaaaattgttgaacagaaaatcaaacctaccacagcatcttcattcgctcgcaaattcggccagctagacggcggagatgattcggatcctttctcagatgacgactttgctgctctcaagaccaagcccgtcaagaaagagaagccatcgcttgatgattccgagagcgaggctcccgcgcctgctcgaagcaagcgagctgcagccaccaaggccaaagcctgggttgtcgacgatgacgatgatgaagatatggaaagcgatgacgacgacaagatgcttggagatgttggcgctctcgtcaagggcatcggtggcagcaacaacgagacttccgacaagactagtcgcgtcagcttatacgccatgtcccggccggagagcagccacggtgaatctacagctctcaaagtgaagaacaagccatcgaaggcctttaattttgatgaatttgatagcaacgatgaaaccaactacgagatgcttgccaagtcgacgcctcacaagacagctgctcgaaatgatgatctcgacagcttcttgtctgacgatgaccttcctgctgccaagattgccagcaagcccaaagcatctgcttcttcatcggccgagctaaagccaaaacccaaacccgttgccgcagcaccggctgccaaggcaggtggacgtggtcgacctgctggtgccaagatcaaggcaaaagaagctcctgccaagaaggcggcagcggcaaaaacaactcaactttcgcccgcagccaaggcgtatgccgcaaagaaatccaagccagccgccaaaaaggacgatttcgacatgagtgatgatgatgataacgacgatgaccttgtcatggcagacgaacccgactcgcctcctcgaccagcggcacgaggtagacctggacgtgctgcggctgccaagaagaaacccgtctacatcgttgacgatgaagatgaagacgaggatgaagacgaagacatgcaggcggatgagccaagcgatgactttgctatggacgatagcgaatga

SEQ ID NO: 19142 - protein, 1687 aa, Muscodor strobelii
  misc_feature: SGI Peptide ID NO. 566431
  misc_feature (376)..(546): Pfam Id: PF00204 Pfam Desc: DNA gyrase B
  misc_feature (821)..(1291): Pfam Id: PF00521 Pfam Desc: DNA gyrase/topoisomerase IV, subunit A
  misc_feature (183)..(331): Pfam Id: PF02518 Pfam Desc: Histidine kinase-, DNA gyrase B-, and HSP90-like ATPase
  misc_feature (376)..(497): Pfam Id: PF00204 Pfam Desc: DNA gyrase B
  misc_feature (821)..(1012): Pfam Id: PF00521 Pfam Desc: DNA gyrase/topoisomerase IV, subunit A
  misc_feature (1038)..(1291): Pfam Id: PF00521 Pfam Desc: DNA gyrase/topoisomerase IV, subunit A
  misc_feature (15)..(1687): NCBI GI: 256727548 Blast Desc: NECHADRAFT_33819 [Nectria haematococca mpVI 77-13-4]
  misc_feature (6)..(1687): NCBI GI: 46136571 Blast Desc: FG09801.1 [Gibberella zeae PH-1]
  misc_feature (4)..(1579): NCBI GI: 39975823 Blast Desc: MGG_06162 [Magnaporthe grisea 70-15] gi|145011529|gb|EDJ96185.1| MGG_06162 [Magnaporthe grisea 70-15]
  misc_feature (1)..(1660): NCBI GI: 116194666 Blast Desc: CHGG_03931 [Chaetomium globosum CBS 148.51] gi|88179844|gb|EAQ87312.1| CHGG_03931 [Chaetomium globosum CBS 148.51]
  misc_feature (50)..(1664): NCBI GI: 154297045 Blast Desc: BC1G_12611 [Botryotinia fuckeliana B05.10] gi|150843138|gb|EDN18331.1| BC1G_12611 [Botryotinia fuckeliana B05.10]
  misc_feature (12)..(1680): NCBI GI: 261352455 Blast Desc: DNA topoisomerase [Verticillium albo-atrum VaMs.102]
  misc_feature (1)..(1305): NCBI GI: 156063624 Blast Desc: SS1G_01930 [Sclerotinia sclerotiorum 1980] gi|154697264|gb|EDN97002.1| SS1G_01930 [Sclerotinia sclerotiorum 1980]
  misc_feature (1)..(1430): NCBI GI: 171683279 Blast Desc: protein product [Podospora anserina] gi|170941599|emb|CAP67253.1| protein product [Podospora anserina]
  misc_feature (1)..(1326): NCBI GI: 164425154 Blast Desc: DNA topoisomerase 2 [Neurospora crassa OR74A] gi|157070812|gb|EAA33136.2| DNA topoisomerase 2 [Neurospora crassa OR74A]
  misc_feature (9)..(1621): NCBI GI: 240110741 Blast Desc: DNA topoisomerase II, [Coccidioides posadasii C735 delta SOWgp]
  misc_feature (135)..(1289): SWISSPROT Homolog: EC 5.99.1.3 DNA topoisomerase (ATP-hydrolyzing)
MDSDMMDEDSVFGDDFKNEDDSDAFSPEPKPKAKAPAKKAAAAAKPKKMVQTTLKPTKAAPKKRAKTASDDEDDGVDGDFSTTPPSAKKQKKAPAPKKSGGKPLGEIQNDSMLLDDAPDPSPKPQPKAKGKPKTATETYQKLSQLEHILVRPDTYIGSVERTEQPMWVFNKETKLMEYRPKVSFVPGLYKIFDEILVNAADNKQRDASMTQMKVTINRQEGWVEVENNGKGIPVVMHEKEKVYIPEMIFGHLLAGSNFDDNEEKTVGGRNGYGAKLCNVFSTEFTLECQDSEHGKRYKQTWSDNMTKMGKAKISSSGSKDFVRVTFKPDWAKFGMTEIDDDLEGLMYRRVYDMAGTIKGVKVVLNDEPLKLSFAKYCEMYAKAIARERSLEEGEEPKATVILEDSKGHPRWEVGFAVSDGTFQQVSFVNSIATTQGGPHVNYIADQICESLLKVLTKKKKGHSLKANHIRNHIFIFVNCLINNPAFNSQTKEMMTTKASSWKKPELGCELSDGFLKKIAATDAITNIMNFAEQKADKLLAKSDGGKRSRISNAKLVDANLAGTKHGSECTLILTEGDSAKSLAVAGRAILDPDRYGVFPLRGKMLNVRDASIDQISKNAEIQNIKQFLGLKHKTQYTDTKSLRYGHLMIMADQDHDGSHIKGLLINFLQVQYPSLLKIPDFFQEFITPIVKVWQGPNPKKPLKMKSFFTQPQYEEWKESHKAEIKKWHSKYYKGLGTSSNEDAQVYFNDLDQHQKHFDTMKVEEADLFDLAFSKKKADARKEWLGNFVPGTYFDHGGQSVISYDDFVNKELILFSMADNMRSIPSLVDGLKPGQRKVIYACLKRNLVKDKKVIELAGYVSEQTAYHHGEVSLQQTIIGLAQTFVGSNNVNYLEPSGNFGSRLAGGSDAASARYIHTRLSPFARRVFSPLDEPNLEHLVEDGKKIEPKVYVPVIPMVLVNGADGIGTGWSTSIPNYHPLDIINGIRRRMGRLDSSEEKPFETMTPWFKGWKGTAAPAEVNRYQFNGMAHVDDNTNEVIITELPIRMWTDDFKAKLEDIIRAEKSPSFIKDYKEFNDHNNVHFEIQMDPKHLEAALKTPDGLLEKFKLVKQVATSNLVAFDTTGRIRKYEKVEDILEEFYHYRLQMYKKRKAHWLGVIKSDHKKLGNQARFIREIMDKKLVVYRKKKAVIVEELREAKYDAFVKTTEAKTKSEEDEEGDAEDGDNDNADDDSRGYDYLLSMPIWSFTQERLERLKEQIRKKQEEYDELEAKSEKDLWCQDLDDFEVAWEAQLKLDAEITTGIRRRSRALKKKGGGRGRKPKGDDDFMPTVARSKPAAKAAPKPAKPEKIVEQKIKPTTASSFARKFGQLDGGDDSDPFSDDDFAALKTKPVKKEKPSLDDSESEAPAPARSKRAAATKAKAWVVDDDDDEDMESDDDDKMLGDVGALVKGIGGSNNETSDKTSRVSLYAMSRPESSHGESTALKVKNKPSKAFNFDEFDSNDETNYEMLAKSTPHKTAARNDDLDSFLSDDDLPAAKIASKPKASASSSAELKPKPKPVAAAPAAKAGGRGRPAGAKIKAKEAPAKKAAAAKTTQLSPAAKAYAAKKSKPAAKKDDFDMSDDDDNDDDLVMADEPDSPPRPAARGRPGRAAAAKKKPVYIVDDEDEDEDEDEDMQADEPSDDFAMDDSE

SEQ ID NO: 19143 - DNA, 5986 bp, Muscodor strobelii
  misc_feature: SGI EST ID NO. CUFF.44798.0
  misc_feature: Variant of the nucleotide sequence at SEQ ID NO 19141
cacaacctcaagcccaaggccaaccaccaccaccaatccaccacccttcttggttaatccatcatccgtcacatcgcatcctcctccttcaacaacaacagcattgtcgacacactcctttggacaactgctcctgccctcgccaatcgactcaccatcttcaatgcgcacgtttgtctgtctatctgtatccaaccaatccccgccggcgactgcatccctcctttcttttgctccaaggcggccgtctcaagcgtctacataagtacatagtccatcgcatcgcatcgtcaccgcttcaggcatcgactttctcttggacatcatccttgcagatcccgggcatcgctcacatcgcccatcatggactcggacatgatggacgaagattccgtcttcggtgatgacttcaagaacgaagacgactccgatgctttctctcctgaacccaaacccaaggcaaaggctccggccaagaaggccgccgctgctgcaaagcccaagaagatggtccagacgaccctgaaacccacaaaggccgctcccaagaagcgcgccaaaaccgccagcgacgatgaggacgacggcgtcgacggcgacttctccaccacgcccccgagcgccaagaagcagaagaaggcccccgcgcccaagaagtccggcggcaagccccttggcgagatccagaacgacagcatgctgctcgacgacgccccagacccctcccccaagccccagcccaaggccaagggcaagcccaagacggccaccgagacgtaccagaagctgtcccagctcgagcacatcctcgtccgccccgacacctacatcggctccgtcgagcgcaccgagcagcccatgtgggtcttcaacaaggagacgaaactcatggagtaccgccccaaggtcagcttcgtccccggcctctacaagatcttcgacgagatcctcgtcaacgccgccgacaacaagcagcgcgacgccagcatgacgcagatgaaggtcaccatcaatcgccaagagggctgggtcgaggtcgagaacaacggcaagggcatccccgtcgtcatgcacgagaaggagaaggtctacatccccgagatgatcttcggccacctgctggccggctccaacttcgacgacaacgaggagaagacggtcggcggccgcaacggctacggcgccaagctgtgcaacgtcttcagcaccgagttcaccctcgagtgccaggactcggagcacggcaagcgctacaagcagacctggagcgacaacatgaccaagatgggcaaggccaagatatccagcagcggctccaaggacttcgtccgcgtcactttcaagcccgactgggccaagttcggcatgaccgagatcgacgacgacctcgagggcctcatgtaccgccgcgtctacgacatggccggcaccatcaagggtgtcaaggtcgtgctcaacgacgaacccctcaagctctccttcgccaagtactgcgagatgtatgctaaggccatcgctcgcgagcgcagcctggaggagggcgaggagcccaaggccaccgtcatcctcgaggactccaagggccacccccgctgggaggtgggcttcgccgtctccgatggcacctttcagcaggtctccttcgtcaactccatcgccacgacccagggcggcccgcacgtcaactacatcgcagaccagatctgcgagtctctgctcaaggtcttgaccaagaagaagaagggccactcgctcaaagccaatcacattcgaaaccacatcttcattttcgtcaactgtctcatcaacaaccccgccttcaactcgcagacgaaagagatgatgacgacgaaagcgagctcctggaagaagcctgagctcggatgtgagctatcggatggcttcctcaagaagattgcagcaaccgatgcaatcaccaacatcatgaactttgccgagcaaaaagccgacaagttattggccaagagtgacggaggcaagcgatcaagaatcagcaacgcgaagctcgtcgacgccaacttggcgggcactaaacacggatcagaatgtaccctcatcttaacagaaggtgattccgccaagagtttggcggtcgccggtcgagccatcctagaccccgaccgctacggtgtcttcccgctcagaggaaagatgctcaacgttcgcgatgcttccatcgaccagatatccaagaacgccgaaatccaaaacatcaagcagttcttgggtctgaaacacaagacacagtatactgataccaagagtctgcgatacggtcatttgatgatcatggccgatcaggatcacgatggtagccatatcaagggtctgctcatcaatttcctccaagtccaatatccttccctgttgaagatacccgatttcttccaagaattcatcacccctattgtcaaggtgtggcaggggcccaacccgaagaaacctcttaagatgaaatctttcttcacccagcctcaatacgaggagtggaaagaaagccacaaagcagaaatcaagaaatggcactccaagtactacaagggtctgggaacaagttccaatgaagatgctcaagtctatttcaacgacctggatcagcatcaaaagcatttcgataccatgaaagtcgaagaagcagacttgttcgaccttgctttctccaagaagaaggcagatgcccgtaaagaatggctgggcaactttgtcccgggcacgtactttgatcacggcggccagtctgtcatcagctacgatgactttgtcaacaaagagctcattcttttcagcatggcagataacatgcgatctattccctcgcttgtcgacgggctgaagcccggtcaacgcaaggtcatctacgcttgtctcaagcggaacctggtcaaggacaagaaggtcattgagttggctggttatgtctcggaacagactgcctatcatcacggtgaagtgtcactacaacagacaatcatcggcctcgctcagacgtttgttggttccaacaatgtcaactatctagagcccagtggaaacttcggttctcgtctggctggtggctccgatgctgccagcgcccgttacatccacacgcggctctctccgtttgcgcggcgtgtcttttctccattagatgagcccaatttggagcatctcgttgaagatggcaagaagatcgagcctaaagtctacgtccctgtcattcctatggtactggttaacggtgccgacggtattggcactggctggagtacttcgattcctaactatcatccactcgatatcatcaatggaattagacggcgcatgggccgtttggatagtagtgaggagaagcccttcgagacgatgacaccctggttcaagggctggaagggaaccgcagcgcctgctgaggtcaatcgctatcaattcaacggcatggcccacgtcgacgataacactaatgaagttatcatcacggagctaccaatccgcatgtggacagatgatttcaaggcaaagttagaagatatcattagagcagagaagagtccgtcattcatcaaagactacaaagagttcaatgaccacaacaatgtccatttcgagatccagatggatcccaaacacctcgaggcagcgttgaaaacgccagatggtcttctcgagaagttcaagctcgtcaaacaagtggcgacgtcgaacttagttgcgtttgacactactggaagaatccgcaagtacgaaaaggttgaggatatcttggaagagttctaccactaccgactccagatgtacaagaaacgcaaagctcattggcttggtgtcatcaagtcagatcacaagaaactgggcaatcaagccaggtttatccgagaaatcatggacaagaaactcgtggtgtacagaaagaagaaggcagtcatcgtcgaagagcttcgcgaggctaagtacgatgccttcgttaagactaccgaagcaaagacgaagtccgaggaagacgaagaaggagatgccgaagacggtgataatgacaacgcagacgacgactctcgtggatacgattatctcctctcgatgccaatttggtcattcactcaagagcgacttgagcgcctcaaagagcagatcagaaagaagcaggaagaatacgatgagctcgaagccaaatccgagaaagatctatggtgtcaagatttggacgactttgaagtagcttgggaggctcagctcaagctcgatgccgaaattactaccggtattcgacgaaggagtcgtgctctgaagaagaagggaggaggtcgcggtcgtaagcccaagggcgatgacgacttcatgccgaccgttgcccgttctaagcccgcggcaaaagctgcccctaagcctgccaaaccagagaaaattgttgaacagaaaatcaaacctaccacagcatcttcattcgctcgcaaattcggccagctagacggcggagatgattcggatcctttctcagatgacgactttgctgctctcaagaccaagcccgtcaagaaagagaagccatcgcttgatgattccgagagcgaggctcccgcgcctgctcgaagcaagcgagctgcagccaccaaggccaaagcctgggttgtcgacgatgacgatgatgaagatatggaaagcgatgacgacgacaagatgcttggagatgttggcgctctcgtcaagggcatcggtggcagcaacaacgagacttccgacaagactagtcgcgtcagcttatacgccatgtcccggccggagagcagccacggtgaatctacagctctcaaagtgaagaacaagccatcgaaggcctttaattttgatgaatttgatagcaacgatgaaaccaactacgagatgcttgccaagtcgacgcctcacaagacagctgctcgaaatgatgatctcgacagcttcttgtctgacgatgaccttcctgctgccaagattgccagcaagcccaaagcatctgcttcttcatcggccgagctaaagccaaaacccaaacccgttgccgcagcaccggctgccaaggcaggtggacgtggtcgacctgctggtgccaagatcaaggcaaaagaagctcctgccaagaaggcggcagcggcaaaaacaactcaactttcgcccgcagccaaggcgtatgccgcaaagaaatccaagccagccgccaaaaaggacgatttcgacatgagtgatgatgatgataacgacgatgaccttgtcatggcagacgaacccgactcgcctcctcgaccagcggcacgaggtagacctggacgtgctgcggctgccaagaagaaacccgtctacatcgttgacgatgaagatgaagacgaggatgaagacgaagacatgcaggcggatgagccaagcgatgactttgctatggacgatagcgaatgaagtcatctgccaagcccacaacacattaagactatcgcttgatcactttggacatggttgctttccgagtttgggtcctacgaaaatcagcaacgtgagaaacatgaggggttgcaatatttgattttgctttttttgatatcccggtgtatgtataaagtaacgagacggaaaaaacatggatgaggtgtgcacactagaggccgcactcaggttgctggactgtatggactgtatgggtgtttgctcttctacctaggtgcttttagcctgaggatgtctgatgacgcgtggcttacactgtatggtttctatttctttgtagctcggcttgcctttagccagtgaatataataacgattcgtttcatgacaagagtgttctcgggattgttgatttgcgtggttattgtgttgttctgtcgaggctcctatgttggataacaaaacgccacccgacatgcctctggacatcgtgagaacacaatgatggtgtcataacagagagagagagacgcgattccgatgatgtggtttgttcctcgcccatcttattgagg

SEQ ID NO: 19144 - DNA, 441 bp, Muscodor strobelii
  misc_feature: SGI cDNA ID NO. 566432
  misc_feature: Reduced expression when VOC is produced
  misc_feature: Encodes the peptide sequence at SEQ ID NO 19145
aagtcgcccgaggccgctgccaacaccgaggctgtccaggagaagaagcaggtcgaggccgaactgttgaaggaggttaagcccgtcgaggcggcgggcgagtcctctaaggaggctgctgcccccgtggcgccccagacgaccatcgaagccccggcggccatcgagacccccgtggccaccgagaaccccgtcaaggctgtccctgctacgacggagaagccgacgacgtctgttgccgccgccaccacggagacacccacggccgaggccgctgcgtccggcgccaacgcgtcgaccgaccccgcgacccctgccaaatcatcaccgccatcgagcagcaaggcgaccgacagcccggccacggctgacaagaagaagaagaaccgactcagtgccatgttcggcaaggtcaaggccaagctttcccacaaggactag

SEQ ID NO: 19145 - protein, 146 aa, Muscodor strobelii
  misc_feature: SGI Peptide ID NO. 566432
  misc_feature (3)..(145): NCBI GI: 46136743 Blast Desc: FG09887.1 [Gibberella zeae PH-1]
  misc_feature (1)..(145): NCBI GI: 256731645 Blast Desc: NECHADRAFT_104398 [Nectria haematococca mpVI 77-13-4]
  misc_feature (1)..(135): NCBI GI: 39973733 Blast Desc: MGG_00987 [Magnaporthe grisea 70-15] gi|145018058|gb|EDK02337.1| MGG_00987 [Magnaporthe grisea 70-15]
  misc_feature (1)..(142): NCBI GI: 119187825 Blast Desc: CIMG_03960 [Coccidioides immitis RS]
  misc_feature (1)..(146): NCBI GI: 156043065 Blast Desc: SS1G_10535 [Sclerotinia sclerotiorum 1980] gi|154694923|gb|EDN94661.1| SS1G_10535 [Sclerotinia sclerotiorum 1980]
  misc_feature (2)..(145): NCBI GI: 169597417 Blast Desc: SNOG_01494 [Phaeosphaeria nodorum SN15] gi|111070023|gb|EAT91143.1| SNOG_01494 [Phaeosphaeria nodorum SN15]
  misc_feature (4)..(142): NCBI GI: 258576585 Blast Desc: [Uncinocarpus reesii 1704] gi|237902740|gb|EEP77141.1| [Uncinocarpus reesii 1704]
  misc_feature (1)..(142): NCBI GI: 255936939 Blast Desc: Pc13g10760 [Penicillium chrysogenum Wisconsin 54-1255] gi|211584116|emb|CAP92145.1| Pc13g10760 [Penicillium chrysogenum Wisconsin 54-1255]
  misc_feature (1)..(29): NCBI GI: 256731645 Blast Desc: NECHADRAFT_104398 [Nectria haematococca mpVI 77-13-4]
  misc_feature (1)..(143): NCBI GI: 116201595 Blast Desc: CHGG_08682 [Chaetomium globosum CBS 148.51] gi|88177200|gb|EAQ84668.1| CHGG_08682 [Chaetomium globosum CBS 148.51]
  misc_feature: Useful for introducing or modulating the production of volatile compounds
KSPEAAANTEAVQEKKQVEAELLKEVKPVEAAGESSKEAAAPVAPQTTIEAPAAIETPVATENPVKAVPATTEKPTTSVAAATTETPTAEAAASGANASTDPATPAKSSPPSSSKATDSPATADKKKKNRLSAMFGKVKAKLSHKD

SEQ ID NO: 19146 - DNA, 795 bp, Muscodor strobelii
  misc_feature: SGI cDNA ID NO. 566433
  misc_feature: Encodes the peptide sequence at SEQ ID NO 19147
atggcaatacatgaactcattttcggcgctgatctgttcaccaaggacaatgcgtttcattctgcgcaagacactaacccttggctcgacgtccttcgagagaagcggcatgttataagtatattgacactagtgtctctctaccggacgtcagaagcgcggcgccatgccgcctcgacgaacgtgtcagatacgaagagaccctctcgggcatcctcgcacatcgacgagctgtacaaaaagcgcatcttcaaacaatttggactgttcaactacacggctgagggagtggggcgggtgctcacagtctgcgagaagaagaggttcgtccgtccttgggtgtaccaagggagctgcagcgttgtggcgagattagccaaggacacatcagtccccctgctgcgaaaggatgattcttcattctacgcgcatagtctaccgacgggtcggacggcgccgaagagctttatggcgaagtgctatgagtctctgtaccacaagccagatgcgctgaacaagcggcacgagattgccgaggcggaggtgatctcggtcgtgaaggtggcgtaccgctgggtggtatatagctctgccctccaaggtgggccgggcgatggggtggtgatcggggcatcgggcgtcgagcagttcagacagagccttgagagcatcaggaaggggccgtcgagtgtgggcgcaacgactacggtcattgtgcaccaggccacgttcaaggcagatggcacactcaatcgttgggatgtcatcaagttgatcatgagtgataagttgtga

SEQ ID NO: 19147 - protein, 264 aa, Muscodor strobelii
  misc_feature: SGI Peptide ID NO. 566433
  misc_feature (43)..(254): NCBI GI: 255943257 Blast Desc: Pc18g05700 [Penicillium chrysogenum Wisconsin 54-1255] gi|211587130|emb|CAP94794.1| Pc18g05700 [Penicillium chrysogenum Wisconsin 54-1255]
  misc_feature (75)..(237): NCBI GI: 119499147 Blast Desc: aldehyde reductase (GliO), [Neosartorya fischeri NRRL 181] gi|119414495|gb|EAW24434.1| aldehyde reductase (GliO), [Neosartorya fischeri NRRL 181]
  misc_feature (75)..(254): NCBI GI: 159125936 Blast Desc: aldehyde reductase (GliO), [Aspergillus fumigatus A1163]
  misc_feature (75)..(254): NCBI GI: 70985268 Blast Desc: aldehyde reductase (GliO) [Aspergillus fumigatus Af293] gi|66845768|gb|EAL86102.1| aldehyde reductase (GliO), [Aspergillus fumigatus Af293]
  misc_feature (75)..(230): NCBI GI: 171679187 Blast Desc: protein product [Podospora anserina] gi|170937665|emb|CAP62323.1| protein product [Podospora anserina]
  misc_feature (75)..(228): NCBI GI: 255944591 Blast Desc: Pc20g05270 [Penicillium chrysogenum Wisconsin 54-1255] gi|211587798|emb|CAP85856.1| Pc20g05270 [Penicillium chrysogenum Wisconsin 54-1255]
  misc_feature (73)..(228): NCBI GI: 238508022 Blast Desc: aldehyde reductase (GliO), [Aspergillus flavus NRRL3357] gi|220688731|gb|EED45083.1| aldehyde reductase (GliO), [Aspergillus flavus NRRL3357]
  misc_feature (64)..(237): NCBI GI: 145604354 Blast Desc: MGG_08519 [Magnaporthe grisea 70-15] gi|145012361|gb|EDJ97017.1| MGG_08519 [Magnaporthe grisea 70-15]
  misc_feature (75)..(228): NCBI GI: 115443044 Blast Desc: conserved [Aspergillus terreus NIH2624] gi|114188198|gb|EAU29898.1| conserved [Aspergillus terreus NIH2624]
  misc_feature (73)..(252): NCBI GI: 39941150 Blast Desc: MGG_05487 [Magnaporthe grisea 70-15] gi|145022145|gb|EDK06165.1| MGG_05487 [Magnaporthe grisea 70-15]
MAIHELIFGADLFTKDNAFHSAQDTNPWLDVLREKRHVISILTLVSLYRTSEARRHAASTNVSDTKRPSRASSHIDELYKKRIFKQFGLFNYTAEGVGRVLTVCEKKRFVRPWVYQGSCSVVARLAKDTSVPLLRKDDSSFYAHSLPTGRTAPKSFMAKCYESLYHKPDALNKRHEIAEAEVISVVKVAYRWVVYSSALQGGPGDGVVIGASGVEQFRQSLESIRKGPSSVGATTTVIVHQATFKADGTLNRWDVIKLIMSDKL

SEQ ID NO: 19148 - DNA, 243 bp, Muscodor strobelii
  misc_feature: SGI cDNA ID NO. 566434
  misc_feature: Reduced expression when VOC is produced
  misc_feature: Encodes the peptide sequence at SEQ ID NO 19149
atgagctctggcggcccggctggcttgggaggcaagtcgctgtccgctccgacgtcgtacagcgcccagcagcagcacctctctgctcccccgcccagcttcgacgccagctcccggcgctccggcctgtcgagcccgtcgttctccgcctcagccgccccgcggaagggccaggcgacgaggaagcagcaccgcagccagcggaggcccggcctggatgatgaggacagcatggccgagatg

SEQ ID NO: 19149 - protein, 81 aa, Muscodor strobelii
  misc_feature: SGI Peptide ID NO. 566434
  misc_feature (9)..(81): NCBI GI: 261351906 Blast Desc: RING-15 protein [Verticillium albo-atrum VaMs.102]
  misc_feature (28)..(81): NCBI GI: 116201593 Blast Desc: CHGG_08681 [Chaetomium globosum CBS 148.51] gi|88177199|gb|EAQ84667.1| CHGG_08681 [Chaetomium globosum CBS 148.51]
  misc_feature (32)..(80): NCBI GI: 154304419 Blast Desc: BC1G_09085 [Botryotinia fuckeliana B05.10] gi|150854065|gb|EDN29257.1| BC1G_09085 [Botryotinia fuckeliana B05.10]
  misc_feature (54)..(81): NCBI GI: 256731646 Blast Desc: [Nectria haematococca mpVI 77-13-4]
  misc_feature: Useful for introducing or modulating the production of volatile compounds
MSSGGPAGLGGKSLSAPTSYSAQQQHLSAPPPSFDASSRRSGLSSPSFSASAAPRKGQATRKQHRSQRRPGLDDEDSMAEM

SEQ ID NO: 19150 - DNA, 2376 bp, Muscodor strobelii
  misc_feature: SGI EST ID NO. CUFF.44809.0
  misc_feature: Variant of the nucleotide sequence at SEQ ID NO 19148
gcttaatgaatcaaagatggcacatattctgttctcgctgcataatctgactctggaagaatcatatcgattgcacttcatttgcacttcatttattgaccaatgacttcatgatcaaacatggcacatgcgtacctatgatccctcgtcctcgagtcctcatcggtatactcactatcctgtccatcatggcaatacatgaactcattttcggcgctgatctgttcaccaaggacaatgcgtttcattctgcgcaagacactaacccttggctcgacgtccttcgagagaagcggcatgttataagtatattgacactagtgtctctctaccggacgtcagaagcgtatctgagccagttagaacttggatcgcgctttgccgttagaaccaagtttctaggcggcgccatgccgcctcgacgaacgtgtcagatacgaagagaccctctcgggcatcctcgcacatcgacgagctgtacaaaaagcgcatcttcaaacaatttggactgttcaactacacggctgagggagtggggcgggtgctcacagtctgcgagaagaagaggttcgtccgtccttgggtgtaccaagggagctgcagcgttgtggcgagattagccaaggacacatcagtccccctgctgcgaaaggatgattcttcattctacgcgcatagtctaccgacggtgggttcctggccaagacatagtaacaattctgagatcagacgttgcagggtcggacggcgccgaagagctttatggcgaagtgctatgagtctctgtaccacaagccagatgcgctgaacaagcggcacgagattgccgaggcggaggtgatctcggtcgtgaaggtggcgtaccgctgggtggtatatagctctgccctccaaggtgggccgggcgatggggtggtgatcggggcatcgggcgtcgagcagttcagacagagccttgagagcatcaggaaggggccgtcgagtgtgggcgcaacgactacggtcattgtgcaccaggccacgttcaaggcagatggcacactcaatcgttgggatgtcatcaagttgatcatgagtgataagttgtgagatggtgcaattagcatcaaactgtcataaagcaattagaattacatttctcctactatgaaatgaatgtcagtgagatgtgcaacaataagtcaatgtcataccgagagatgaattgggtactttctcatttatctatgtccgtcgcatgtcggtacgatagcttccatgatgaattccagattgacgatgatgatgaacgactgccactaccctgagatcagtgacaatcgtcattaagtcgtctgaaggtttctataaaaacgccatgttgaactacctacctaggtacatgtaggaattggcgaagtctaccttagtcagctgaagcgaggatagggacagtgcggtacgagtgatggctgacttcctgacttagccgatacaggctagggagatgtggctcaccgcagggcaagctggcggggacggtggtggatgttgccaatggcgtcggggagatggcgagactggaggaatgacgggtcgagccatgctttttgccccgctggcgagtgactcttctgcatcccatcctctacatacccgcactgcaccaccgcgctgctgctctgctctctccccccagcgtcgtcgggatgaggtaggtctgcggacgcctcccaacccgtcatagccagccattacaccacggcctagatcacagctttcatcgtcgccatccatcaccaccaccaggccgaggtgtacctgatgattcgtacttttcttttttttttcctttccgatttcttcccttgcagaattgactgagtgcgcattataccgatatattccctccatactgccctactgcccatctctccccgatacctccggcacagctcttatcccccacgctgcgtcacctcgtctcatcatccgccactgtctgcgtgttggtcaccttgtcgtcgttgtcgtcgtcgtcgtcttgaggcacgcacctgcgcggccatcatgagctctggcggcccggctggcttgggaggcaagtcgctgtccgctccgacgtcgtacagcgcccagcagcagcacctctctgctcccccgcccagcttcgacgccagctcccggcgctccggcctgtcgagcccgtcgttctccgcctcagccgccccgcggaagggccaggcgacgaggaagcagcaccgcagccagcggaggcccggcctggatgatgaggacagcatggccgagatggtaaggttccccccatcctcgaagccccggccctctctctacatcaaagatcaaggtgctgagtcgaggtgctgagtgctgagt

SEQ ID NO: 19151 - DNA, 1260 bp, Muscodor strobelii
  misc_feature: SGI cDNA ID NO. 566435
  misc_feature: Elevated expression when VOC is produced
  misc_feature: Encodes the peptide sequence at SEQ ID NO 19152
atggacactcagtcaacacaggaacgtgctgtagccgccttcccttgcaggctgaaagactatggacctctaaacgtcgccgaggctactacgaagctaaggcaaggcgagcagtgtatcaacggtgacggtacagttaactcaaatcctgttcgaacttacatcaacaggctcgctagtagttgtccagttgaggatgactattcggtagtagagctggatctgggcgatgccgagaagtggaagttttgggggttatacgatggtcacggtggccgggccacttccagacttttgagcgagactttctctctttgtattgaagccgagctgcgtaaattgccaattgaccatcttcgcgacagcaggcgggtgtctatcgcgtgtcaagatgcattccagaaattcgatgaagggttgcttgcggacgccttagatgcaatgtacaacgcagagtcgcacgcggaagcaatgtgtcgcatcgctccggcaaacgcaggctcctgcgctacagtggcactttttgaccctgtgtcatcgtatctccatgtcgcatgtgtcggagattctcgtgctgtacttggacgtagaagaggtggagaggaggatcactatataccaataacattgtccgaggatcagacaggctatagtcaaactgaaattgaccgcgtgacggcggaacatcccggagaggaacctattgaagctcaatcaggccgaatattaggatgcgctgtcacgcgaagttttggggatcttcgttggaagtggccggcgacagagatcgaaagatggcattctcagtattttggggaaccatgccttgacaattaccacatgccaccgtacatgatcgctgcgccagttgtcatcagcgagaaggtgaatgttggggactttatgatccttgctagcgatgggtattgggatcatatgagatctaatgacgatgcagtgcattgcatgaagctctggatcgacgctcgcaagaacaggaaattgactggggagggaagtagtgaatgcatttcagctgcggatatggaagggctatcgcgatcaaccgaaggatacgaatggggttggaagtgttgtcgtcaagatttcgtcactgaagaaagtaatgcagcaacacacttgatcaaaaatgcgctgggtggctcaaatcgggaccttttttgcagcgctttgagcatccaatgtgcagaatccaaagaagttcgcgatgatattaccgtcatggtggctcagttctga

SEQ ID NO: 19152 - protein, 419 aa, Muscodor strobelii
  misc_feature: SGI Peptide ID NO. 566435
  misc_feature (55)..(352): Pfam Id: PF00481 Pfam Desc: Protein phosphatase 2C
  misc_feature (76)..(313): Pfam Id: PF00481 Pfam Desc: Protein phosphatase 2C
  misc_feature (28)..(419): NCBI GI: 46116368 Blast Desc: FG04026.1 [Gibberella zeae PH-1]
  misc_feature (24)..(419): NCBI GI: 256723153 Blast Desc: NECHADRAFT_42636 [Nectria haematococca mpVI 77-13-4]
  misc_feature (24)..(419): NCBI GI: 121702415 Blast Desc: protein phophatase 2C family protein [Aspergillus clavatus NRRL 1] gi|119397615|gb|EAW08046.1| protein phophatase 2C family protein [Aspergillus clavatus NRRL 1]
  misc_feature (24)..(419): NCBI GI: 70991172 Blast Desc: protein phophatase 2C family protein [Aspergillus fumigatus Af293] gi|66848067|gb|EAL88397.1| protein phophatase 2C family protein [Aspergillus fumigatus Af293] protein phophatase
  misc_feature (24)..(419): NCBI GI: 154278511 Blast Desc: [Ajellomyces capsulatus NAm1] gi|150413654|gb|EDN09037.1| [Ajellomyces capsulatus NAm1]
  misc_feature (22)..(419): NCBI GI: 238837889 Blast Desc: phophatase 2C family protein [Microsporum canis CBS 113480]
  misc_feature (24)..(419): NCBI GI: 212528336 Blast Desc: protein phophatase 2C family protein [Penicillium marneffei ATCC 18224] gi|210073723|gb|EEA27810.1| protein phophatase 2C family protein [Penicillium marneffei ATCC 18224]
  misc_feature (24)..(419): NCBI GI: 240280157 Blast Desc: pyruvate dehydrogenase phosphatase [Ajellomyces capsulatus H143]
  misc_feature (24)..(419): NCBI GI: 169769064 Blast Desc: [Aspergillus oryzae RIB40] gi|83766860|dbj|BAE57000.1| protein product [Aspergillus oryzae]
  misc_feature (24)..(419): NCBI GI: 225560590 Blast Desc: pyruvate dehydrogenase phosphatase [Ajellomyces capsulatus G186AR]
  misc_feature (30)..(419): SWISSPROT Homolog: EC 3.1.3.16 Phosphoprotein phosphatase
  misc_feature: Useful for introducing or modulating the production of volatile compounds
MDTQSTQERAVAAFPCRLKDYGPLNVAEATTKLRQGEQCINGDGTVNSNPVRTYINRLASSCPVEDDYSVVELDLGDAEKWKFWGLYDGHGGRATSRLLSETFSLCIEAELRKLPIDHLRDSRRVSIACQDAFQKFDEGLLADALDAMYNAESHAEAMCRIAPANAGSCATVALFDPVSSYLHVACVGDSRAVLGRRRGGEEDHYIPITLSEDQTGYSQTEIDRVTAEHPGEEPIEAQSGRILGCAVTRSFGDLRWKWPATEIERWHSQYFGEPCLDNYHMPPYMIAAPVVISEKVNVGDFMILASDGYWDHMRSNDDAVHCMKLWIDARKNRKLTGEGSSECISAADMEGLSRSTEGYEWGWKCCRQDFVTEESNAATHLIKNALGGSNRDLFCSALSIQCAESKEVRDDITVMVAQF

SEQ ID NO: 19153 - DNA, 1815 bp, Muscodor strobelii
  misc_feature: SGI cDNA ID NO. 566436
  misc_feature: Encodes the peptide sequence at SEQ ID NO 19154
atgaaggcgtatgtgaaactcgcttcgtctgcgataaatttcaagcctcaaacccagctctacggtactaagtgtagccagctacaagccatactatggggccgcatagagaactggggtactgtgagagagcatttcggcaaccctagacttcccagaggagaagttggccatcgaattctcatcgacaatgcgacagagcagcgcatcgcaagggaacaaggacatgggaccacaacctggaattgggctgtcacgaagactgcagacgactcgaaagaccggctcatagaacttctcaaaaatacggtatgggggtttctgcctacgctcaatagccgcggcgcgcttggcgtcacgcattcgccagatacgacgatgaacgattatactttcatttcactttcaacggagatagcagagagactgaaggacacagcactctcgttagcagagcgctgcgagacacaggtcatgttttctatccttctcattcacgagctcatgcatgctatcttgatttctcgagagggtcctggcgatcgtaattatatcggtaatcgttgggatcgcaatgcgccacttgttgctgaaccgtatttaaatgcagctgggataaacgaagctggagcttttatggagcaagagttgtttggcggcttgtatagaacgtacccgtttctatctatgcagcattggaaggctggagggcgaccatttccgataatgctagcaagtgcaatgaaagcgtttcctgacggagatagtcctggcgacgcagtgtccactagccctttcaatgtggctggagctttaactactgtgcaccacatgccgctattatggcactcgagattgctatcggaagaattctggacccgacaagatcccaagagcaacaatttcttccatagatctgtttacttgtttagccagagtccaagtactaccgataatgaagggcctaagacatggcaacaaccgcgggtgcagatgtcgacatcgcaggatcgcgagattggggatcaacgattcaaggatgagtttgacgagcgacgattactgtggaagatagctcgcacgggttggtttgatgaggcacaagagtcgtggaataggagcccgtggcaaaaccaaaatgctcgggaaaggtaccaagagttcaccggcgcattcaaaaacagagatgagatactttgcgcaaatattgcttcgtctctggcattatcagtgaggtgggatagagatggcgcaagttatcatgccgacttactatcctccaatacgactatgaattgcaataactgggcttggcacatcttagggttattaatgatggcttcaatgcctattcggaagcaggcaagatctgaacaacgaacgagacaagaatggcgaacgttagagcctacaaatacgtctgcctctgctgggtacacagaggatgtgatcttcatagaccagccccgaccaatcgcttccacagccaaggctagtttcttctatcacggcgatgccggcactaattggcagtctatggcgccacgacatatcacccagcagaactatctagttgcagcaaaggcaatactgagtgatattagtcagagtggagcgatggtccactccgaagtatatgatgccttggtcagtctctatcacagcgtttccaaggctcgggcagaccttgaatatcttcatccgtctcgaggccttagtgagtggtctccgggatggagttttgaactaccagcatataatccgatactcaaggccttcaatgtcagtcagctggcatggataccgcgtaattga

SEQ ID NO: 19154 - protein, 604 aa, Muscodor strobelii
  misc_feature: SGI Peptide ID NO. 566436
MKAYVKLASSAINFKPQTQLYGTKCSQLQAILWGRIENWGTVREHFGNPRLPRGEVGHRILIDNATEQRIAREQGHGTTTWNWAVTKTADDSKDRLIELLKNTVWGFLPTLNSRGALGVTHSPDTTMNDYTFISLSTEIAERLKDTALSLAERCETQVMFSILLIHELMHAILISREGPGDRNYIGNRWDRNAPLVAEPYLNAAGINEAGAFMEQELFGGLYRTYPFLSMQHWKAGGRPFPIMLASAMKAFPDGDSPGDAVSTSPFNVAGALTTVHHMPLLWHSRLLSEEFWTRQDPKSNNFFHRSVYLFSQSPSTTDNEGPKTWQQPRVQMSTSQDREIGDQRFKDEFDERRLLWKIARTGWFDEAQESWNRSPWQNQNARERYQEFTGAFKNRDEILCANIASSLALSVRWDRDGASYHADLLSSNTTMNCNNWAWHILGLLMMASMPIRKQARSEQRTRQEWRTLEPTNTSASAGYTEDVIFIDQPRPIASTAKASFFYHGDAGTNWQSMAPRHITQQNYLVAAKAILSDISQSGAMVHSEVYDALVSLYHSVSKARADLEYLHPSRGLSEWSPGWSFELPAYNPILKAFNVSQLAWIPRN

SEQ ID NO: 19155 - DNA, 1133 bp, Muscodor strobelii
  misc_feature: SGI EST ID NO. CUFF.44827.0
  misc_feature: Variant of the nucleotide sequence at SEQ ID NO 19153
gccagctacaagccatactatggggccgcatagagaactggggtactgtgagagtaagcgagaataatcacctgcacctctaatagcgcgcaagccttgctccaattccaacggaaacaaccttgcaaccatcagagggtaaactcaagaatcgctcatttctgaccgcaatgatctaattaggagcatttcggcaaccctagacttcccagaggagaagttggccatcgaattctcatcgacaatgcgacagagcagcgcatcgcaagggaacaaggacatgggaccacaacctggaattgggctgtcacgaagactgcagacgactcgaaagaccggctcatagaacttctcaaaaatacggtatgggggtttctgcctacgctcaatagccgcggcgcgcttggcgtcacgcattcgccagatacgacgatgaacgattatactttcatttcactttcaacggagatagcagagagactgaaggacacagcactctcgttagcagagcgctgcgagacacaggtcatgttttctatccttctcattcacgagctcatgcatgctatcttgatttctcgagagggtcctggcgatcgtaattatatcggtaatcgttgggatcgcaatgcgccacttgttgctgaaccgtatttaaatgcagctgggataaacgaagctggagcttttatggagcaagagttgtttggcggcttgtatagaacgtacccgtttctatctatgcagcattggaaggctggagggcgaccatttccgataatgctagcaagtgcaatgaaagcgtttcctgacggagatagtcctggcgacgcagtgtccactagccctttcaatgtggctggagctttaactactgtgcaccacatgccgctattatggcactcgagattgctatcggaagaattctggacccgacaagatcccaagagcaacaatttcttccatagatctgtttacttgtttagccagagtccaagtactaccgataatgaagggcctaagacatggcaacaaccgcgggtgcagatgtcgacatcgcaggatcgcgagattggggatcaacgattcaaggatgagtttgacgagcgacgattactgtggaagatagctcg

SEQ ID NO: 19156 - DNA, 1143 bp, Muscodor strobelii
  misc_feature: SGI cDNA ID NO. 566437
  misc_feature: Encodes the peptide sequence at SEQ ID NO 19157
atgaaggcgtatgtgaaactcgcttcgtctgcgataaatttcaagcctcaaacccagctctacggtactaagtgtagccagctacaagccatactatggggccgcatagagaactggggtactgtgagagagcatttcggcaaccctagacttcccagaggagaagttggccatcgaattctcatcgacaatgcgacagagcagcgcatcgcaagggaacaaggacatgggaccacaacctggaattgggctgtcacgaagactgcagacgactcgaaagaccggctcatagaacttctcaaaaatacggtatgggggtttctgcctacgctcaatagccgcggcgcgcttggcgtcacgcattcgccagatacgacgatgaacgattatactttcatttcactttcaacggagatagcagagagactgaaggacacagcactctcgttagcagagcgctgcgagacacaggtcatgttttctatccttctcattcacgagctcatgcatgctatcttgatttctcgagagggtcctggcgatcgtaattatatcggtaatcgttgggatcgcaatgcgccacttgttgctgaaccgtatttaaatgcagctgggataaacgaagctggagcttttatggagcaagagttgtttggcggcttgtatagaacgtacccgtttctatctatgcagcattggaaggctggagggcgaccatttccgataatgctagcaagtgcaatgaaagcgtttcctgacggagatagtcctggcgacgcagtgtccactagccctttcaatgtggctggagctttaactactgtgcaccacatgccgctattatggcactcgagattgctatcggaagaattctggacccgacaagatcccaagagcaacaatttcttccatagatctgtttacttgtttagccagagtccaagtactaccgataatgaagggcctaagacatggcaacaaccgcgggtgcagatgtcgacatcgcaggatcgcgagattggggatcaacgattcaaggatgagtttgacgagcgacgattactgtggaagatagctcgcacgggttggtttgatgaggcacaagagtcgtggaataggagcccggtgagcatgatgctctaa

SEQ ID NO: 19157 - protein, 380 aa, Muscodor strobelii
  misc_feature: SGI Peptide ID NO. 566437
MKAYVKLASSAINFKPQTQLYGTKCSQLQAILWGRIENWGTVREHFGNPRLPRGEVGHRILIDNATEQRIAREQGHGTTTWNWAVTKTADDSKDRLIELLKNTVWGFLPTLNSRGALGVTHSPDTTMNDYTFISLSTEIAERLKDTALSLAERCETQVMFSILLIHELMHAILISREGPGDRNYIGNRWDRNAPLVAEPYLNAAGINEAGAFMEQELFGGLYRTYPFLSMQHWKAGGRPFPIMLASAMKAFPDGDSPGDAVSTSPFNVAGALTTVHHMPLLWHSRLLSEEFWTRQDPKSNNFFHRSVYLFSQSPSTTDNEGPKTWQQPRVQMSTSQDREIGDQRFKDEFDERRLLWKIARTGWFDEAQESWNRSPVSMML

SEQ ID NO: 19158 - DNA, 1133 bp, Muscodor strobelii; identical to SEQ ID NO: 19155
  misc_feature: SGI EST ID NO. CUFF.44827.0
  misc_feature: Variant of the nucleotide sequence at SEQ ID NO 19156

SEQ ID NO: 19159 - DNA, 567 bp, Muscodor strobelii
  misc_feature: SGI cDNA ID NO. 566438
  misc_feature: Reduced expression when VOC is produced
  misc_feature: Encodes the peptide sequence at SEQ ID NO 19160
atgttgctcaattcagtcttttgtttcacactggctgcggtagctgaggctagcattcttctccctggacattttcagccgcgagccactcagccaaacctcggcaacgtgactgttttcgcattcggagaggatatccctggggttcctctctatgctgcatctgatggccgcgcagttatatctgctttcgattcgaacaccactaacacattctcgaatgtgacttgggatctccaatccgatgccgaccacatggtcaaatttcgatacgcaaacggaacgtcgtttaacgctggcttctatgtagtcaccggttctgactctggtgctgttggtttctttacggactctgccagtggtggtcccaatttcacagctcccactggtgcgcagacaagcaacttttccacgacagacggctacctccaagtgatctcaaataatgccatcgtctcaaagttttgggctgtgcagacggacaatagttcctggtctatctattggagtcagaataaccgaccgcttgacaacagcacttctgtcacacttagatactcgccgtag

SEQ ID NO: 19160 - protein, 188 aa, Muscodor strobelii
  misc_feature: SGI Peptide ID NO. 566438
  misc_feature (33)..(185): NCBI GI: 212529678 Blast Desc: PMAA_032890 [Penicillium marneffei ATCC 18224] gi|210074394|gb|EEA28481.1| PMAA_032890 [Penicillium marneffei ATCC 18224]
  misc_feature: Useful for introducing or modulating the production of volatile compounds
MLLNSVFCFTLAAVAEASILLPGHFQPRATQPNLGNVTVFAFGEDIPGVPLYAASDGRAVISAFDSNTTNTFSNVTWDLQSDADHMVKFRYANGTSFNAGFYVVTGSDSGAVGFFTDSASGGPNFTAPTGAQTSNFSTTDGYLQVISNNAIVSKFWAVQTDNSSWSIYWSQNNRPLDNSTSVTLRYSP

SEQ ID NO: 19161 - DNA, 1196 bp, Muscodor strobelii
  misc_feature: SGI EST ID NO. CUFF.44834.0
  misc_feature: Variant of the nucleotide sequence at SEQ ID NO 19159
gcgtgtctggatcctagcatcatttgaatggtgttatgcaaaccccaatggcatacgattgggccaaacatgttgatttattgacgtatacccagctttagtttcaagcacagtcgtcatctactgaccgcgccactcggcgaatgatcagactgcagcccatgccgctatgttatagtgtccatttatacagcagtgattgcggttatatccaactgacaatcttggatggaataggccatcgcttcttaagctgtctgcttctttatcatttcgaagccctccaagagtagaaactcggatctcacgctcctcctgtttgacgcgattgtgtcatatccaataccaagtcaccatgttgctcaattcagtcttttgtttcacactggctgcggtagctgaggctagcattcttctccctggacattttcagccgcgagccactcagccaaacctcggcaacgtgactgttttcgcattcggagaggatatccctggggttcctctctatgctgcatctgatggccgcgcagttatatctgctttcgattcgaacaccactaacacattctcgaatgtgacttgggatctccaatccgatgccgaccacatggtcaaatttcgatacgcaaacggaacgtcgtttaacgctggcttctatgtagtcaccggttctgactctggtgctgttggtttctttacggactctgccagtggtggtcccaatttcacagctcccactggtgcgcagacaagcaacttttccacgacagacggctacctccaagtgatctcaaataatgccatcgtctcaaagttttgggctgtgcagacggacaatagttcctggtctatctattggagtcagaataaccgaccgcttgacaacagcacttctgtcacacttagatactcgccgtagggtgaccacataactttatgcagatgtgcagtggtcctagagcgtctggatcgtacttgtcgagtgtacaactggattgtcatcactgtagaaagttggcagcaatggaggagatgagctgcaatttcagctactcaagttaggggttggagttttgttatgtacaatctctcggtaacacaagcaacatcaacaatgctctacatttgtggaatgcataatgaccaccttgcttggataccgttcatagcccaacaataccaaccctgcaaag

SEQ ID NO: 19162 - DNA, 1704 bp, Muscodor strobelii
  misc_feature: SGI cDNA ID NO. 566439
  misc_feature: Encodes the peptide sequence at SEQ ID NO 19163
atgtatctaccaaattgcttggcgtttgccacgcttgccctatcttctttgcattccgccttggctgttccgagcaaccctcgtacgctctctaagagatgcactaattcggccgacgatcggtcctgctggggagactacgacatctcaaccaactactatgacactgttccggacactggcgtcactcgcgaatactggctaaacatcgaaaatggcacaattgcacctgatggccgtgagaaagtaggattgacggtgaatgggacatttcccggcccgacaatcatcgcggactggggtgatactgttgtcgtccatgttacaaacagtctcagcacgaacggaacgagcattcattggcacggtatacgccagctgaacaatagtgctcatgatggcgtcgctagtattactcagtgtccgattgcaccaggacagtcagcaacgtacacctggcaagcaactgaatatggaagtagttggtatcattcgcattggtatgttcaggcgtgggacggggttcttggtggcattgtgatcaacggaccggcgaccgcagactacgacgaggatcttggcatgcttttccttaatgattgggacataggaacagctgatcaaatcaatgctattgctgaagtccagggtcgcgttaccttggaaactggcttaatcaacggtacaaatacttatactgacgacgacgacgtcacaactggttcgcgttatagtacaacggttacttccgggacacgatatcgcattcgtgtcgtcaacgccgctgcagacgcccatttcaagttcagcattgataatcacaccttggaggtcattgctgcagacttcgttccgattgtgccgtacaccgccgacgccatctccattggaatgggtcagcgctacgacgtaatcgtcactgccaaccagactgtcgataactattggatccgagcaatcgcacaaactgcatgtaccgcaaatgacaacccggacaatatcttgggaattttcaattacgacggcgccacattgagtgacccaagctccactgcctttgatgatgcgaccgacgatgaaacctgtgtggacgaggacataagcaccctcgttccatatgttgccttaaatgctgggtccgaatactataacgacaccgatttcactgtccagctgccagcaacgacaactgtgttcaagtgggagatgggcccgacgtctttctataactactgggattatccaactctgcttcaggtacttgacggaaacgacacttggacctccgagcagaacattcaggagttccccgacgcggacacctggggactttggatcatcgagtcgtcaaatgccgtggcgcatcctatccatatgcatggccatgacttctatgttcttgctcaaggcaccggcagttatgattctgataccacgaccctacaactaactaacccacctcgtcgtgacaccgtgctacttccagcatctggatatgtcgtcattgctttctatacggataaccctggtgcttggcttgtgcactgtcatatcgcctggcatacctcggagggccttgcggtccaaatacttgagcgcgaatcagagatctccgcgctgacggatagcgattatgtcacggatacgtgtactgcttggaatgactatgtcggcgtgatcgcacagactgactcaggtatctga

SEQ ID NO: 19163 - protein, 567 aa, Muscodor strobelii
  misc_feature: SGI Peptide ID NO. 566439
  misc_feature (192)..(343): Pfam Id: PF00394 Pfam Desc: Multicopper oxidase
  misc_feature (409)..(536): Pfam Id: PF07731 Pfam Desc: Multicopper oxidase
  misc_feature (69)..(186): Pfam Id: PF07732 Pfam Desc: Multicopper oxidase
  misc_feature (1)..(567): NCBI GI: 212529680 Blast Desc: extracellular dihydrogeodin oxidase/laccase, [Penicillium marneffei ATCC 18224] gi|210074395|gb|EEA28482.1| extracellular dihydrogeodin oxidase/laccase, [Penicillium ATCC
  misc_feature (8)..(567): NCBI GI: 69047730 Blast Desc: laccase 3 [Cryphonectria parasitica]
  misc_feature (12)..(567): NCBI GI: 145236308 Blast Desc: protein product [Aspergillus niger] gi|134075254|emb|CAK44895.1| protein product [Aspergillus niger]
  misc_feature (16)..(567): NCBI GI: 39976573 Blast Desc: MGG_05790 [Magnaporthe grisea 70-15] gi|145011976|gb|EDJ96632.1| MGG_05790 [Magnaporthe grisea 70-15]
  misc_feature (8)..(567): NCBI GI: 189208153 Blast Desc: laccase-1 precursor [Pyrenophora tritici-repentis Pt-1C-BFP] gi|187976503|gb|EDU43129.1| laccase-1 precursor [Pyrenophora tritici-repentis Pt-1C-BFP]
  misc_feature (36)..(567): NCBI GI: 256726480 Blast Desc: NECHADRAFT_93139 [Nectria haematococca mpVI 77-13-4]
  misc_feature (30)..(567): NCBI GI: 46138179 Blast Desc: FG10604.1 [Gibberella zeae PH-1]
  misc_feature (36)..(567): NCBI GI: 154293446 Blast Desc: BC1G_14349 [Botryotinia fuckeliana B05.10] gi|150845330|gb|EDN20523.1| BC1G_14349 [Botryotinia fuckeliana B05.10]
  misc_feature (9)..(567): NCBI GI: 160332827 Blast Desc: laccase precursor [Helotiaceae sp. UHH 1-13-18-4]
  misc_feature (1)..(567): NCBI GI: 152013644 Blast Desc: Lcc4 [Fusarium oxysporum]
  misc_feature (24)..(567): SWISSPROT Homolog: EC 1.10.3.2 Laccase
MYLPNCLAFATLALSSLHSALAVPSNPRTLSKRCTNSADDRSCWGDYDISTNYYDTVPDTGVTREYWLNIENGTIAPDGREKVGLTVNGTFPGPTIIADWGDTVVVHVTNSLSTNGTSIHWHGIRQLNNSAHDGVASITQCPIAPGQSATYTWQATEYGSSWYHSHWYVQAWDGVLGGIVINGPATADYDEDLGMLFLNDWDIGTADQINAIAEVQGRVTLETGLINGTNTYTDDDDVTTGSRYSTTVTSGTRYRIRVVNAAADAHFKFSIDNHTLEVIAADFVPIVPYTADAISIGMGQRYDVIVTANQTVDNYWIRAIAQTACTANDNPDNILGIFNYDGATLSDPSSTAFDDATDDETCVDEDISTLVPYVALNAGSEYYNDTDFTVQLPATTTVFKWEMGPTSFYNYWDYPTLLQVLDGNDTWTSEQNIQEFPDADTWGLWIIESSNAVAHPIHMHGHDFYVLAQGTGSYDSDTTTLQLTNPPRRDTVLLPASGYVVIAFYTDNPGAWLVHCHIAWHTSEGLAVQILERESEISALTDSDYVTDTCTAWNDYVGVIAQTDSGI

SEQ ID NO: 19164 - DNA, 2451 bp, Muscodor strobelii
  misc_feature: SGI EST ID NO. CUFF.44845.0
  misc_feature: Variant of the nucleotide sequence at SEQ ID NO 19162
aatccatctgcccacaggagccgcgttacgcaaactgggtggccatctgtggcgaagcctcacgatgtcccttgttcgtcgtcgtcactactcgatggcttcttgtgccgttcaatctcaccatactatgccacacggcacagtaaaacgacaggcaacatgacgaatgaaattgcttttatagaactatcttctgccatcgttcatgtcatggaaaccaagtcgatcagtcctcactgcaggaaacgatacaagaggaccaattgtgtcggtcaacttagttgctatcctgtgtgattattattaccactcttacactctcctacattcactcgccttcgacacttctccatattcgcctttacccaaaatatgtatctaccaaattgcttggcgtttgccacgcttgccctatcttctttgcattccgccttggctgttccgagcaaccctcgtacgctctctaagagatgcactaattcggccgacgatcggtcctgctggggagactacgacatctcaaccaactactatgacactgttccggacactggcgtcactcgcgaatactggctaaacatcgaaaatggcacaattgcacctgatggccgtgagaaagtaggattgacggtgaatgggacatttcccggcccgacaatcatcgcggactggggtgatactgttgtcgtccatgttacaaacagtctcagcacgaacggaacgagcattcattggcacggtatacgccagctgaacaatagtgctcatgatggcgtcgctagtattactcagtgtccgattgcaccaggacagtcagcaacgtacacctggcaagcaactgaatatggaagtagttggtatcattcgcattggtatgttcaggcgtgggacggggttcttggtggcattgtgatcaacggaccggcgaccgcagactacgacgaggatcttggcatgcttttccttaatgattgggacataggaacagctgatcaaatcaatgctattgctgaagtccagggtcgcgttaccttggaaactggcttaatcaacggtacaaatacttatactgacgacgacgacgtcacaactggttcgcgttatagtacaacggttacttccgggacacgatatcgcattcgtgtcgtcaacgccgctgcagacgcccatttcaagttcagcattgataatcacaccttggaggtcattgctgcagacttcgttccgattgtgccgtacaccgccgacgccatctccattggaatgggtcagcgctacgacgtaatcgtcactgccaaccagactgtcgataactattggatccgagcaatcgcacaaactgcatgtaccgcaaatgacaacccggacaatatcttgggaattttcaattacgacggcgccacattgagtgacccaagctccactgcctttgatgatgcgaccgacgatgaaacctgtgtggacgaggacataagcaccctcgttccatatgttgccttaaatgctgggtccgaatactataacgacaccgatttcactgtccagctgccagcaacgacaactgtgttcaagtgggagatgggcccgacgtctttctataactactgggattatccaactctgcttcaggtacttgacggaaacgacacttggacctccgagcagaacattcaggagttccccgacgcggacacctggggactttggatcatcgagtcgtcaaatgccgtggcgcatcctatccatatgcatggccatgacttctatgttcttgctcaaggcaccggcagttatgattctgataccacgaccctacaactaactaacccacctcgtcgtgacaccgtgctacttccagcatctggatatgtcgtcattgctttctatacggataaccctggtgcttggcttgtgcactgtcatatcgcctggcatacctcggagggccttgcggtccaaatacttgagcgcgaatcagagatctccgcgctgacggatagcgattatgtcacggatacgtgtactgcttggaatgactatgtcggcgtgatcgcacagactgactcaggtatctgatccatcgtttggttcatgagcaagatagcgtcgaacggcgcttgttggtcttggtatttgttctgaggcgaaataaggtcggggcaggtagctagctggctatcatagtttggagtttaaggcgcaatatcgaaagtttctttgttaaaatgatgcgtaaagcaacacgtgtttaggaaattcttagcaccttatcttctctattcacttcgctggggacaatcggatcggtatctacctagggcatcgctactaacgaagatcaaggtatgacaagcttgctgatgagacaggtagtcttgtgccagcttccacagtgccacttacgaccttcattgtgtaggcaataagaaaacaaactaggtcttaggctgc

SEQ ID NO: 19165 - DNA, 3138 bp, Muscodor strobelii
  misc_feature: SGI cDNA ID NO. 566440
  misc_feature: Encodes the peptide sequence at SEQ ID NO 19166
atgtccttcaactcgttagaaagcctctccgatggagacatggtcctgttcaacaagtttggacgggggaagacagttgatgtgccattccaatttgttcaccatgccttcgaatacattgttgacaatcacccggaggcaattgcagctcggctcagcgatgacacaaccatcacgtactatgagttagagcagaggtccaatttcctctgcaccaaaataaccgcattgggcgtggggcaaggcgatagagtatgcattatcgtctctagatccatcgacctgctcgccgctatcatggcagtgctcaagtcaggagcacagtacatacctttggacggtggtgtcgtgtccgaagatgccctgcatcatatcctccaggatgccaatacgaaaatggtactctgccttagtaaatatcggcacaaagttttgcgtcacctcccaacacctgacactcctgtgcttgagctcgacacggcctcttatgacagaagcttgagttctaggaggccagccgtgaagatggagcttgatgccggagcttacgttatatacacatctggcacgactggaatgccgaaaggagttaacgtcatgcaccgaaacgtgactaacaatcttcttctcgagccggcgaatctccgtatcaccgtgggtacacgggtggcgcaggtactcaatatttccttcgacatggctgcgtgggagatacttgcgacactgatgaacggcgggactctggaaattcgaggctcggattggcgagagtgcttacgtcgtgtagacactgtgatcgcaacaccaaccatcatcgggggcttttcacaaactgactttcctaacatcaaaactatcgtcgtgggaggagaaccgtgtccggagtccgtggcagaggagtggtcccctcacaccaacttttggaatatttgcggtccgaccgagatcacaattctcaacacagcgcacttacataaacctgcgacccagttgacaattggcaaaccactgcccaacactaatgtttacatccttgacgacaatgagcagcctgttccagtaggtgcaccaggcctcatgtgggccggcggcgacagtgtgtcagccggttacattaatctgccagacttgacagcgaaaagattcaaacctgacaagtttgcccaaaagggcatgatgttcaacacaggagacctcggtcgctggactccggatggcgatttgatccctttaggtcgcaaggatgatcaagtcaaaatcaagggatttcgtgtcgaattagacggtgtttcaaccgccatcgagagcgttccgtcggtgaccaaggcgtgtgcattgctaatcaatggtgacctctggggcttctactcggcgccgggcccgatcgaggaagtgaatatcttgcagaccgtcggccggatccttccctactattctgtcccggttaaatggttgtacctggccgttgtgcccctgacagctaacggcaaatttgacaagcggcagctgctcgaccttgccacctataaggcccaacgaagcccgcaaagctctaccagtaccctatccgagagctcgagcgacactactgccatctccattccgtccattgagggcaatgaagtagggcacggcttgacgaccatcgctaagaaaaccgactgccgcgacttagtccttgctagcccagcggcagcagcagcgcctccgacccaagatgcagccgaaaaagggcaagctcttgtgatgaaggcggtaatgacagattcctcgtcatcgtcatcatctctggatttgaaagaacacgtgcagaagtacgagatgccggacaagaagggtttccacggggagagatggctgcggcatcggttcttctcactttaccggcgcttcttcacagtcgtcctcctgagcaacctagcggcgctggtagtggttcttgcaagaacggcggaccggggtacagtgccagtaccggacctggcgacggccgtggcggcaaacttattggttgcggtagcaatgcggcaagaccacgtggtcaacttcttgttctgggccgcaacgcgtgtgcctaccagcgcgccgctatgtattcgccgccagtgtgcgcgcatcttccacatcggcggtattcactcgggcgccgccgtctctgcgaccgtgtggtgggttgccttcacagcagtcgcaactcacaattatgtcagcaggaatatgatcttctccgtaaacttggcaaccgtcgtgctgagctatcttgtattagcgcttctggtagctatgcttgtcatggcgtacccgacgatccgtatcaagatgcacgaccagttcgaatggacccaccgcttcgcaggatggacagccactgcgttggtctgggcgcaccttgtagtcacagcagactcactgcgcgaccccagcaagcaaacactgggtgcgtcactcgcgcgcacgcccgcgttgtacctcttatctttggtgaccctaagcattgcacttccgtggctgcggctacgacgagtgcgcgtgacgccggagcctctgtcggctcacgcagtgcgactgcactttgatttcgatacgcctatcgcgggcaaggcgatccggatcagtgactcgccgctacgagagtggcacgcgttcgccaccatcgaccggccagggcaacccggctttagcattgtcgtctctaatgcaggcgactggacgaagcgccatattgtcactccgccccgcactatttggactcgcggcgtgctcgctagcggcgtgctgactatcgcgcccctgttcaagaaagtggttctcgtcgcgacaggctcaggtataggaccatgtctccccgtgatccttgaggcacgggtgccagcgcgcgtgctctggtcgacgccgcacccggccgagaccttcggtgctgagatcgtcgctgatgtactgcgtgccgacccgcacgcaatcatctggaatacgcgcacacagggcaagcccgatctactagcgttatcatatcaaatgtaccgagagagcggcgccgaggccgtctgcatcatttctaacaagaagctgacgcagcaactggtctatcggcttgaggctcgcggcattcctgcttttggcgccatttttgactcatag

SEQ ID NO: 19166 - protein, 1045 aa, Muscodor strobelii
  misc_feature: SGI Peptide ID NO. 566440
  misc_feature (59)..(445): Pfam Id: PF00501 Pfam Desc: AMP-binding enzyme
  misc_feature (2)..(1027): NCBI GI: 261353901 Blast Desc: surfactin synthetase subunit 3 [Verticillium albo-atrum VaMs.102]
  misc_feature (13)..(1045): NCBI GI: 46139559 Blast Desc: FG11294.1 [Gibberella zeae PH-1]
  misc_feature (2)..(1045): NCBI GI: 256725410 Blast Desc: NECHADRAFT_106273 [Nectria haematococca mpVI 77-13-4]
  misc_feature (2)..(1045): NCBI GI: 171691184 Blast Desc: protein product [Podospora anserina] gi|170945540|emb|CAP71652.1| protein product [Podospora anserina]
  misc_feature (3)..(1045): NCBI GI: 59876829 Blast Desc: nonribosomal peptide synthetase 12 [Cochliobolus heterostrophus]
  misc_feature (3)..(1045): NCBI GI: 189194267 Blast Desc: gramicidin S synthetase 1 [Pyrenophora tritici-repentis Pt-1C-BFP] gi|187979036|gb|EDU45662.1| gramicidin S synthetase 1 [Pyrenophora tritici-repentis
  misc_feature (1)..(1045): NCBI GI: 169860023 Blast Desc: CC1G_06235 [Coprinopsis cinerea okayama7#130] gi|116502324|gb|EAU85219.1| CC1G_06235 [Coprinopsis cinerea okayama7#130]
  misc_feature (6)..(1045): NCBI GI: 169860053 Blast Desc: CC1G_06250 [Coprinopsis cinerea okayama7#130] gi|116502339|gb|EAU85234.1| CC1G_06250 [Coprinopsis cinerea okayama7#130]
  misc_feature (2)..(1045): NCBI GI: 169858552 Blast Desc: CC1G_03009 [Coprinopsis cinerea okayama7#130] gi|116503091|gb|EAU85986.1| CC1G_03009 [Coprinopsis cinerea okayama7#130]
  misc_feature (3)..(1045): NCBI GI: 189191092 Blast Desc: tyrocidine synthetase 1 [Pyrenophora tritici-repentis Pt-1C-BFP] gi|187973491|gb|EDU40990.1| tyrocidine synthetase 1 [Pyrenophora tritici-repentis Pt-1C-BFP]
MSFNSLESLSDGDMVLFNKFGRGKTVDVPFQFVHHAFEYIVDNHPEAIAARLSDDTTITYYELEQRSNFLCTKITALGVGQGDRVCIIVSRSIDLLAAIMAVLKSGAQYIPLDGGVVSEDALHHILQDANTKMVLCLSKYRHKVLRHLPTPDTPVLELDTASYDRSLSSRRPAVKMELDAGAYVIYTSGTTGMPKGVNVMHRNVTNNLLLEPANLRITVGTRVAQVLNISFDMAAWEILATLMNGGTLEIRGSDWRECLRRVDTVIATPTIIGGFSQTDFPNIKTIVVGGEPCPESVAEEWSPHTNFWNICGPTEITILNTAHLHKPATQLTIGKPLPNTNVYILDDNEQPVPVGAPGLMWAGGDSVSAGYINLPDLTAKRFKPDKFAQKGMMFNTGDLGRWTPDGDLIPLGRKDDQVKIKGFRVELDGVSTAIESVPSVTKACALLINGDLWGFYSAPGPIEEVNILQTVGRILPYYSVPVKWLYLAVVPLTANGKFDKRQLLDLATYKAQRSPQSSTSTLSESSSDTTAISIPSIEGNEVGHGLTTIAKKTDCRDLVLASPAAAAAPPTQDAAEKGQALVMKAVMTDSSSSSSSLDLKEHVQKYEMPDKKGFHGERWLRHRFFSLYRRFFTVVLLSNLAALVVVLARTADRGTVPVPDLATAVAANLLVAVAMRQDHVVNFLFWAATRVPTSAPLCIRRQCARIFHIGGIHSGAAVSATVWWVAFTAVATHNYVSRNMIFSVNLATVVLSYLVLALLVAMLVMAYPTIRIKMHDQFEWTHRFAGWTATALVWAHLVVTADSLRDPSKQTLGASLARTPALYLLSLVTLSIALPWLRLRRVRVTPEPLSAHAVRLHFDFDTPIAGKAIRISDSPLREWHAFATIDRPGQPGFSIVVSNAGDWTKRHIVTPPRTIWTRGVLASGVLTIAPLFKKVVLVATGSGIGPCLPVILEARVPARVLWSTPHPAETFGAEIVADVLRADPHAIIWNTRTQGKPDLLALSYQMYRESGAEAVCIISNKKLTQQLVYRLEARGIPAFGAIFDS

SEQ ID NO: 19167 - DNA, 1610 bp, Muscodor strobelii
  misc_feature: SGI EST ID NO. CUFF.44852.0
  misc_feature: Variant of the nucleotide sequence at SEQ ID NO 19165
cagtcgcaactcacaattatgtcagcaggaatatgatcttctccgtaaacttggcaaccgtcgtgctgagctatcttgtattagcgcttctggtagctatgcttgtcatggcgtacccgacgatccgtatcaagatgcacgaccagttcgaatggacccaccgcttcgcaggatggacagccactgcgttggtctgggcgcaccttgtagtcacagcagactcactgcgcgaccccagcaagcaaacactgggtgcgtcactcgcgcgcacgcccgcgttgtacctcttatctttggtgaccctaagcattgcacttccgtggctgcggctacgacgagtgcgcgtgacgccggagcctctgtcggctcacgcagtgcgactgcactttgatttcgatacgcctatcgcgggcaaggcgatccggatcagtgactcgccgctacgagagtggcacgcgttcgccaccatcgaccggccagggcaacccggctttagcattgtcgtctctaatgcaggcgactggacgaagcgccatattgtcactccgccccgcactatttggactcgcggcgtgctcgctagcggcgtgctgactatcgcgcccctgttcaagaaagtggttctcgtcgcgacaggctcaggtataggaccatgtctccccgtgatccttgaggcacgggtgccagcgcgcgtgctctggtcgacgccgcacccggccgagaccttcggtgctgagatcgtcgctgatgtactgcgtgccgacccgcacgcaatcatctggaatacgcgcacacagggcaagcccgatctactagcgttatcatatcaaatgtaccgagagagcggcgccgaggccgtctgcatcatttctaacaagaagctgacgcagcaactggtctatcggcttgaggctcgcggcattcctgcttttggcgccatttttgactcatagagtgtcgtacagtgttttctggttccattcttgatccggatctggtttcttctgttttggttgagagttttgtaaaaagttacgggtttggagcaaaaggcgcagtgagagtgattttcctgaaccgagattgggataggcagactcgacccgatgtataatattgcattctcgataggtatagagcagagaagccgattcgatgttgaagtaggcacaaaatttagttaattcatgatacttaattggacacaaaggtgacctaggttagcaactgggaaacatcccgtattacttcgaagtgaatgtcacagcttgctcatgagtttaggtcggaagctagacatgagcgtcgataccaaaaggtagatgagcgcaaaagacgaacccttatgatacgctcttgagtttcatcgactgcatctctcataggcagtgagttttacccgtatcttcgcccgaattcactttaggcaaacatgaggagaaactgtcgatctgaatgtgtgtttgaagctctacttgactgtagaaatcgctgcttctgattcaactggccgatgacgcggcgacgagtgttgacgtcatggactagatgattggtgcaacccagactccagaaaagagggaaggtagccctccagggtaggatggtca

SEQ ID NO: 19168 - DNA, 900 bp, Muscodor strobelii
  misc_feature: SGI cDNA ID NO. 566441
  misc_feature: Encodes the peptide sequence at SEQ ID NO 19169
atggcgactgatgatgctcggccccccgtacctctcgctcgagcggaggctatcatctgtcagtccacaagctccgctccgcatggagcttccgcagttggccaaattggtacagacttcaagaatgtggtggttacggtcaaccaggagacagccgttgccaccctgcagttgtgcaggcccgagaagcgcaacgctctcacacaatctatgattgatgaaatccgcgcctgtttgaagtccctagactctgacaaaaatgtcagggctgtcgtattgactggcacggagaagggcgctttttgtgcgggcgtcgacatcaacgagcttgctcatctatcgacgctgcaggcgcacagcagaaggttcttagtcgatctgaacggagcctttgaaaccttctcgaaacccatcatcgccgctgtcgagggcctagctcttggcggtggattcgaaatcgcactagcttgtgacattatttacgccgcagacgatgcgcctttcgggctcccggaggtaagtattggcacgatacccggagctggcgggacgcaacgtcttgttgaagctctaggaaagcagaaggcgatggagttgatcttatcccggcaaactataagtggaaaagaactcgcacaacgagggctcgtgaaccgaagcttcggcaccaacgacgatatcatagaggaggccaagaaactagctgcaaaaatcgccagcttttctcagcctgttattcagatggcgaaacaagcgatcctacttgccgaggacaatactctctcctcgggaatggcggctgagaagctgctttactattcaaccttctcactcgaggacttcaaaatcggaacccaggccttcttagcgaagaagaagccaatcttcaagcatgcataa

SEQ ID NO: 19169 - protein, 299 aa, Muscodor strobelii
  misc_feature: SGI Peptide ID NO. 566441
  misc_feature (54)..(222): Pfam Id: PF00378 Pfam Desc: Enoyl-CoA hydratase/isomerase family
  misc_feature (38)..(299): NCBI GI: 46139561 Blast Desc: FG11295.1 [Gibberella zeae PH-1]
  misc_feature (40)..(299): NCBI GI: 256725285 Blast Desc: NECHADRAFT_83007 [Nectria haematococca mpVI 77-13-4]
  misc_feature (39)..(298): NCBI GI: 189194269 Blast Desc: enoyl-CoA hydratase [Pyrenophora tritici-repentis Pt-1C-BFP] gi|187979037|gb|EDU45663.1| enoyl-CoA hydratase [Pyrenophora tritici-repentis Pt-1C-BFP]
  misc_feature (72)..(298): NCBI GI: 261353900 Blast Desc: short chain enoyl-CoA hydratase [Verticillium albo-atrum VaMs.102]
  misc_feature (42)..(298): NCBI GI: 169602144 Blast Desc: SNOG_03951 [Phaeosphaeria nodorum SN15] gi|160706092|gb|EAT89156.2| SNOG_03951 [Phaeosphaeria nodorum SN15]
  misc_feature (40)..(254): NCBI GI: 171691182 Blast Desc: protein product [Podospora anserina] gi|170945539|emb|CAP71651.1| protein product [Podospora anserina]
  misc_feature (39)..(297): NCBI GI: 262108786 Blast Desc: enoyl-CoA hydratase, mitochondrial precursor [Phytophthora infestans T30-4]
  misc_feature (40)..(298): NCBI GI: 261335974 Blast Desc: enoyl-CoA hydratase precursor [Heliconius melpomene] gi|261335983|emb|CBH09263.1| enoyl-CoA hydratase [Heliconius melpomene]
  misc_feature (44)..(298): NCBI GI: 110773271 Blast Desc: : similar to CG6543-PA, isoform A [Apis mellifera]
  misc_feature (40)..(298): NCBI GI: 144898442 Blast Desc: enoyl-CoA hydratase/isomerase family protein [Magnetospirillum gryphiswaldense MSR-1]
  misc_feature (37)..(297): SWISSPROT Homolog: EC 4.2.1.17 Enoyl-CoA hydratase
MATDDARPPVPLARAEAIICQSTSSAPHGASAVGQIGTDFKNVVVTVNQETAVATLQLCRPEKRNALTQSMIDEIRACLKSLDSDKNVRAVVLTGTEKGAFCAGVDINELAHLSTLQAHSRRFLVDLNGAFETFSKPIIAAVEGLALGGGFEIALACDIIYAADDAPFGLPEVSIGTIPGAGGTQRLVEALGKQKAMELILSRQTISGKELAQRGLVNRSFGTNDDIIEEAKKLAAKIASFSQPVIQMAKQAILLAEDNTLSSGMAAEKLLYYSTFSLEDFKIGTQAFLAKKKPIFKHA

SEQ ID NO: 19170 - DNA, 1688 bp, Muscodor strobelii
  misc_feature: SGI EST ID NO. CUFF.44868.0
  misc_feature: Variant of the nucleotide sequence at SEQ ID NO 19168
agctaacgttggctatattggcttgatacttgttcttctccggtgcccttccgcttacattgccaaatcggtaagtattcgttttgggcacatggcattcgtgtaactcaatacccgccctcttccaacgactcttattagtattccttgttctgtatgtggctcagtaatacgaagttgcgtcaggctcgccggtcattgtgattatccgggacccattccctggccttggcggcccgttgtttgccacatcccgtcgttgagaccgaacaccaaaaagtccaagcggagcagtatgtatgatgatttcacacttatcgggttgtgcgtcggttctccacatatcatgtcgtttgccgcttcaggtaaagatttttcggcatgtgaagttgtgtttctagactcatagttctagccaccagggtcgtcgctttccggccttgacgaacttgacagaagacgcccatgttgtacgctacatgctcaaaatactccccagtcattccaaaggccacctcaagcgatggcgactgatgatgctcggccccccgtacctctcgctcgagcggaggctatcatctgtcagtccacaagctccgctccgcatggagcttccgcagttggccaaattggtacagacttcaagaatgtggtggttacggtcaaccaggagacagccgttgccaccctgcagttgtgcaggcccgagaagcgcaacgctctcacacaatctatgattgatgaaatccgcgcctgtttgaagtccctagactctgacaaaaatgtcagggctgtcgtattgactggcacggagaagggcgctttttgtgcgggcgtcgacatcaacgagcttgctcatctatcgacgctgcaggcgcacagcagaaggttcttagtcgatctgaacggagcctttgaaaccttctcgaaacccatcatcgccgctgtcgagggcctagctcttggcggtggattcgaaatcgcactagcttgtgacattatttacgccgcagacgatgcgcctttcgggctcccggaggtaagtattggcacgatacccggagctggcgggacgcaacgtcttgttgaagctctaggaaagcagaaggtaagctgtgctactggcaactaaaatgctgcgttgatggatacgtatgtttctatgtttgtggtggtctcaaatgattaattactgtcttcgtaggcgatggagttgatcttatcccggcaaactataagtggaaaagaactcgcacaacgagggctcgtgaaccgaagcttcggcaccaacgacgatatcatagaggaggccaagaaactagctgcaaaaatcgccagcttttctcagcctgttattcagatggcgaaacaagcgatcctacttgccgaggacaatactctctcctcgggaatggcggctgagaagctgctttactattcaaccttctcactcgaggacttcaaaatcggaacccaggccttcttagcgaagaagaagccaatcttcaagcatgcataaatcgttggaagagctcgaagcattatttgcctgttgtctgtaacctttgcaattctgcagtgataataatatgcttgaattgcacaacggccactctttgcaagactagatcttttcatgactactgattttccgtgaatccacatcagtacttcaaggctgctagccc

SEQ ID NO: 19171 - DNA, 1500 bp, Muscodor strobelii
  misc_feature: SGI cDNA ID NO. 566442
  misc_feature: Encodes the peptide sequence at SEQ ID NO 19172
atggttaacgccagatcatggttcgtggcggtcacggcgctgctagcgtctccagttgttacggcgagcgacaagctagtcttcgctcactttatgatcggaatcgttggcgaccgcgctgatactagctcgtacagatacgacatggagcgggcaatggaggcgggaatcgacgcatttgcactcaattgtggcacggacacatacacagaaacacaattggacctcgcatatcaagcagctgcagatatcggctttaaagtctttatatcattcgactttagctggtggaagattaatgacactgcaacgatcggtgaattcatcgctagatatggtgcgatggacgcgcaactgctagtggacggcaaggctttcgtgtcgtcgtatcacggcgatgggctggatgtcgatagtctgcgtacggcggtagcatcatcttcggagacaaaggactttgagatgtatttcgcgcctaatttctatcctccggaactaccttgggtcagcaatgccggtaatacttgggcgaacacgagcgacggcctcgatgctgcactcaattggtatgcttggcccaataacggaaacaacaaagctcctactccaggacataacctgactgttgagtacggagatgatgtgtacgtcaattggctcgagggtaagccgtatatggcccctgtatccggctggttcttcacgcactatgggcctgaagtgacgtactccaagaatttcgtgtttcccggtgacactctaatcttcgatcgcctttcgcacatgttagacctgcaaccccagttcttcgaattcgtaacttggaatgattatggcgagagtcattatatggccccgttagacagttcgcatggtgacgacggcaatagcaagtgggcactcggtatgccacatgaaggctggttggacttggcgaagccattcattaccgcttacaaagccggagcaagcaaagatgacatcgcggattatatcgaggaagagcagattatatactggtatcggcctaacccctccacgacggattgcgacttgacggacacgaccgccgggcgcatagcagacaatagctctggaaactacttcgaaggccggccaaatggatacgagtctcttgccgacgaattcttcgttgtgtccctactcaaagaagctggcactgtatcagtcagctcaggcaacaacacccgaaatttcgacgctccagcgggcgctaatatctttacggtacctatgggtctaggctctcagaccattgtgctttctcgtgataacgccgatgttttctcggctacgtcgcaaagagatattacgaataagtgccagtgtggcaactataactacaacgtgtacgttggcactgttcctgccaaggcctggggtgatctggatgcaaattcacaggcggcgctggccaccggtctcatcgctgatgtgtcgacatgttataccaattatacattcaagtttgaaggctga

SEQ ID NO: 19172 - protein, 499 aa, Muscodor strobelii
  misc_feature: SGI Peptide ID NO. 566442
  misc_feature (26)..(440): Pfam Id: PF03659 Pfam Desc: Glycosyl hydrolase family 71
  misc_feature (222)..(345): Pfam Id: PF03659 Pfam Desc: Glycosyl hydrolase family 71
  misc_feature (26)..(133): Pfam Id: PF03659 Pfam Desc: Glycosyl hydrolase family 71
  misc_feature (1)..(495): NCBI GI: 85091266 Blast Desc: NCU06010 [Neurospora crassa OR74A] gi|28920204|gb|EAA29582.1| NCU06010 [Neurospora crassa OR74A]
  misc_feature (21)..(489): NCBI GI: 164449641 Blast Desc: alpha-1,3-glucanase [Penicillium purpurogenum]
  misc_feature (22)..(489): NCBI GI: 242786665 Blast Desc: alpha-1,3-glucanase/mutanase, [Talaromyces stipitatus ATCC 10500] gi|218720998|gb|EED20417.1| alpha-1,3-glucanase/mutanase, [Talaromyces stipitatus ATCC 10500]
  misc_feature (22)..(492): NCBI GI: 145238584 Blast Desc: An07g08640 [Aspergillus niger] gi|134076430|emb|CAK39658.1| protein product [Aspergillus niger]
  misc_feature (8)..(489): NCBI GI: 6752866 Blast Desc: AF214481_1 mutanase [Penicillium purpurogenum]
  misc_feature (13)..(489): NCBI GI: 154313075 Blast Desc: BC1G_05539 [Botryotinia fuckeliana B05.10] gi|150849624|gb|EDN24817.1| BC1G_05539 [Botryotinia fuckeliana B05.10]
  misc_feature (21)..(489): NCBI GI: 6752864 Blast Desc: AF214480_1 mutanase [Cloning vector pMT1802]
  misc_feature (22)..(489): NCBI GI: 212543429 Blast Desc: alpha-1,3-glucanase/mutanase, [Penicillium marneffei ATCC 18224] gi|210066776|gb|EEA20869.1| alpha-1,3-glucanase/mutanase, [Penicillium marneffei ATCC 18224]
  misc_feature (21)..(492): NCBI GI: 119480007 Blast Desc: alpha-1,3-glucanase/mutanase, [Neosartorya fischeri NRRL 181] gi|119408186|gb|EAW18135.1| alpha-1,3-glucanase/mutanase, [Neosartorya fischeri NRRL 181]
  misc_feature (22)..(482): NCBI GI: 238487528 Blast Desc: glucan endo-1,3-alpha-glucosidase agn1 precursor, [Aspergillus flavus NRRL3357] gi|220699881|gb|EED56220.1| glucan endo-1,3-alpha-glucosidase agn1 precursor, [Aspergillus flavus
  misc_feature (20)..(462): SWISSPROT Homolog: EC 3.2.1.59 Glucan endo-1,3-alpha-glucosidase
MVNARSWFVAVTALLASPVVTASDKLVFAHFMIGIVGDRADTSSYRYDMERAMEAGIDAFALNCGTDTYTETQLDLAYQAAADIGFKVFISFDFSWWKINDTATIGEFIARYGAMDAQLLVDGKAFVSSYHGDGLDVDSLRTAVASSSETKDFEMYFAPNFYPPELPWVSNAGNTWANTSDGLDAALNWYAWPNNGNNKAPTPGHNLTVEYGDDVYVNWLEGKPYMAPVSGWFFTHYGPEVTYSKNFVFPGDTLIFDRLSHMLDLQPQFFEFVTWNDYGESHYMAPLDSSHGDDGNSKWALGMPHEGWLDLAKPFITAYKAGASKDDIADYIEEEQIIYWYRPNPSTTDCDLTDTTAGRIADNSSGNYFEGRPNGYESLADEFFVVSLLKEAGTVSVSSGNNTRNFDAPAGANIFTVPMGLGSQTIVLSRDNADVFSATSQRDITNKCQCGNYNYNVYVGTVPAKAWGDLDANSQAALATGLIADVSTCYTNYTFKFEG

SEQ ID NO: 19173 - DNA, 5032 bp, Muscodor strobelii
  misc_feature: SGI EST ID NO. CUFF.44973.0
  misc_feature: Variant of the nucleotide sequence at SEQ ID NO 19171
gcgagcgacaagctagtcttcgctcactttatgatcggaatcgttggcgaccgcgctgatactagctcgtacagatacgacatggagcgggcaatggaggcgggaatcgacgcatttgcactcaattgtggcacggacacatacacagaaacacaattggacctcgcatatcaagcagctgcagatatcggctttaaagtctttatatcattcgactttagctggtggaagattaatgacactgcaacgatcggtgaattcatcgctagatatggtgcgatggacgcgcaactgctagtggacggcaaggctttcgtgtcgtcgtatcacggcgatgggctggatgtcgatagtctgcgtacggcggtagcatcatcttcggagacaaaggactttgagatgtatttcgcgcctaatttctatcctccggaactaccttgggtcagcaatgccggtaatacttgggcgaacacgagcgacggcctcgatgctgcactcaattggtatgcttggcccaataacggaaacaacaaagctcctactccaggacataacctgactgttgagtacggagatgatgtgtacgtcaattggctcgagggtaagccgtatatggcccctgtatccggctggttcttcacgcactatgggcctgaagtgacgtactccaagaatttcgtgtttcccggtgacactctaatcttcgatcgcctttcgcacatgttagacctgcaaccccagttcttcgaattcgtaacttggaatgattatggcgagagtcattatatggccccgttagacagttcgcatggtgacgacggcaatagcaagtgggcactcggtatgccacatgaaggctggttggacttggcgaagccattcattaccgcttacaaagccggagcaagcaaagatgacatcgcggattatatcgaggaagagcagattatatactggtatcggcctaacccctccacgacggattgcgacttgacggacacgaccgccgggcgcatagcagacaatagctctggaaactacttcgaaggccggccaaatggatacgagtctcttgccgacgaattcttcgttgtgtccctactcaaagaagctggcactgtatcagtcagctcaggcaacaacacccgaaatttcgacgctccagcgggcgctaatatctttacggtacctatgggtctaggctctcagaccattgtgctttctcgtgataacgccgatgttttctcggctacgtcgcaaagagatattacgaataagtgccagtgtggcaactataactacaacgtgtacgttggcactgttcctgccaaggcctggggtgatctggatgcaaattcacaggcggcgctggccaccggtctcatcgctgatgtgtcgacatgttataccaattatacattcaagtttgaaggctgagctattaatacgatagacatagacttgctgagtccaaatatacaagcacggctcttttgctcgtttccgcgttgattgagtgaactgtcatcgtcattgtattatagacgttagttgacagtcctcgatcgatatcaaagcgttttcgcatcatgaccgaaggaaaatgaagccaaattattgcggagtaagtcatttctgcactcgagtctctaaatgtcctcgaactcaaatttcaccagcaagcagcatcttgtctcatgaccctttagatcaagaaggcgaatgaagctccatccgcggacgacgtatgcgagtcggatagcagtaacagccatgatcgggttctctgcgaagcttgcatcgttcttaacgaaaatgcgcaagaagacaagatcgttgtcatcgtactcccattccaatgtctgatcccagattggatctgttgggggtgaattgtcgcctctatgcatgaagccaagcttgtgatgcttgtaagtgtcagttttgcatttcttgtgctcgccgttagtatcgtccggcctgatcagagaacaggtcacgtatggcttgagcttttcagcctccgtatctggcggcaccggcacattcgatgcgcccgcgatgtgtagcagaagtttcttccggcggccggtgttcaattgtccattcccacccgcacgcaatgctggcggctttagtacatacccatctgttccgctgaataatgcttcattcaactgcatgctagcaccaaatgtttgccagttcattgcacagacttgagcaccaacgccccagaacggtacctgcgccagattcttggaggatatgcgcgttcccttcggaaaaacgcgcatcagatgcgcggagttatgtcgcgcaatcttctccctatggatcggcatcagagcagtgagccctgtctccgagacgttgataagatgatgcgccggaccatccttgagctggctctcgaaccacgaattgtctcttggcttgaccgactgcgcgtatacaccaagggccgcaagttctggaataatgcctcccttcttgactgctttctttcgcgctttgtaagccgctcgagcttgtttctcttcctcgtcctcgtcgcttgaagaatcgctcgaggaatcgctactgcttgtgtcttcctgttccttctctgtcacatttgacgggaagaaatattcaaccataacaacgattttagatcctaactctgcgagaataacgggatcgtcactaccttcctgttctctgtggcccttttctctaaccgctttgctcagtagccgatcaccccatacctctttcataatctccacaagtcgcatttgtcctttggccccacaatggttctcgagcgacagcataatgggggcagcgcgatagccttgacgatcaactgcttcggctgcctccttatcgactacattgcgcattgtctcacaaacggctctaaagggaatatgagacacgagtgtatagccatgcgtgacctttggctcttctttatcgtcttcattgtcccatgcatcgatctcaacgcatcgcgcccccgttgacagcgcgatctcgtacgctgaagctgaggacttgcctcgcaattgatgaccaatcagatacgtgttgtgactcgagctgatgaagtattcaggtaacggatgcgatcgatcagtcaattcaggtggaacttgaatgtgcggtttatcgagaagagcggacaaagcagggctgagcccgtcggagtctagcgcggcgtcttcctcgcgtacaacatgattgtgtactaggaacgacttcagcgcgtggctaatactgagttcttgtgacgtgacctttgtgcgacgtgcgctgtgtccaccaccggcgacggtttggttgtcgatttcttgacccgcatcttcatcatattgccctctcgacccgaatggtttcagctttgcaatgcctgaagtcagagaactgctcatgtttgggatgtggtggacggcacgttatctatctgaacatgcgtgcaacgaaaatatgtttgatacaaagagcgaggaatcttatatgatcgagttccaaaaagcgccgattcagctaaatcgtaaactgagttaaggatagttacaaaggtttgagctgacgagctgaattgaggggtgacgtgagatctcaaccccaccaagcccacattgaaatgtaaggacgaaacagtccaagccccccggcatttcggcacagccctaaacgcgtcagtgtcacggatccaacatgcatcactttcaattggcgttgctaattctcctaggactctggttgagtacttcgattccgatatgcagcagccatagcctatgctttctaccaagtcctttgtccgatgacctcattacgatcaggataatagcggctcgggtctcaataaagctgacgtcatcaaacgaccaactgcaccttgagcttgtcagctttaactatcttgtccttcatacccatcagctcaggcaagtcccaggtcaagtttacatatcttccaccaagccattctcggcgttccttcgtcaaatacaccaatgaatctcccacgagctcaggggtttcaacgaagactgcacggtgaaatgagcatgtaagctaagtcaaatgggggggagttggacttaccaggcacgagggcgtctgaaatgagcccatcgccacccttagccatatctgtcgggatgttaccaggatgaatcgcataggctacgatgccctgatcactggtctcggcgttaaggaattcagtaagtcgcaagactgcgagcttagatgtctgatatgcgctgagacccgggctgcgcaaatgcgcgcctacactgctgacagtgacgaatgtcctcaggccattagtctggagcataagtgggatcatggcacgcatgacgaggtatggacctttgacattgacagtcaccgtgtcccaccagtcatctggattagaggcggcaatgggatccctgctggaaaaaagaccggcgttgttgatcacgatgtcgatgcgcccgaaagcctcttcaatcttggccgcagcagcatcaacactctcgcggctagtgacatcgagttgaacttcgaggatcttcggttcaggctttccaacgctagcaacagcgtcacggattgctttggttgtctctgcgagattcgatcttgcgccaatggcaatcatcgatgcaccggcctttgcgtacgaaatgctgatgcccttgcctagacctctggtggcgccgctgatgaacacggccttcccgctcagatcaacatttgccgagtcaatagccgggtacgtgtcattgtgcacaaccgacgtagtgtcgtagtcgccttgtcaacagttagtccgttcctaacgtatctagctgttggatgtgggcgcatacctggtccctcaatggggttgaaagttcctcttggaggtggcattttgaaactatgacaacgatcgttttattcttcggttatggtactgggatgctctgtagaagtcaagtgattcttgaaaggggtgattaatagttggtcaaagatcagatagtgtcgtaggaagtggccg

SEQ ID NO: 19174 - DNA, 1770 bp, Muscodor strobelii
  misc_feature: SGI cDNA ID NO. 566443
  misc_feature: Encodes the peptide sequence at SEQ ID NO 19175
atgagcagttctctgacttcaggcattgcaaagctgaaaccattcgggtcgagagggcaatatgatgaagatgcgggtcaagaaatcgacaaccaaaccgtcgccggtggtggacacagcgcacgtcgcacaaaggtcacgtcacaagaactcagtattagccacgcgctgaagtcgttcctagtacacaatcatgttgtacgcgaggaagacgccgcgctagactccgacgggctcagccctgctttgtccgctcttctcgataaaccgcacattcaagttccacctgaattgactgatcgatcgcatccgttacctgaatacttcatcagctcgagtcacaacacgtatctgattggtcatcaattgcgaggcaagtcctcagcttcagcgtacgagatcgcgctgtcaacgggggcgcgatgcgttgagatcgatgcatgggacaatgaagacgataaagaagagccaaaggtcacgcatggctatacactcgtgtctcatattccctttagagccgtttgtgagacaatgcgcaatgtagtcgataaggaggcagccgaagcagttgatcgtcaaggctatcgcgctgcccccattatgctgtcgctcgagaaccattgtggggccaaaggacaaatgcgacttgtggagattatgaaagaggtatggggtgatcggctactgagcaaagcggttagagaaaagggccacagagaacaggaaggtagtgacgatcccgttattctcgcagagttaggatctaaaatcgttgttatggttgaatatttcttcccgtcaaatgtgacagagaaggaacaggaagacacaagcagtagcgattcctcgagcgattcttcaagcgacgaggacgaggaagagaaacaagctcgagcggcttacaaagcgcgaaagaaagcagtcaagaagggaggcattattccagaacttgcggcccttggtgtatacgcgcagtcggtcaagccaagagacaattcgtggttcgagagccagctcaaggatggtccggcgcatcatcttatcaacgtctcggagacagggctcactgctctgatgccgatccatagggagaagattgcgcgacataactccgcgcatctgatgcgcgtttttccgaagggaacgcgcatatcctccaagaatctggcgcaggtaccgttctggggcgttggtgctcaagtctgtgcaatgaactggcaaacatttggtgctagcatgcagttgaatgaagcattattcagcggaacagatgggtatgtactaaagccgccagcattgcgtgcgggtgggaatggacaattgaacaccggccgccggaagaaacttctgctacacatcgcgggcgcatcgaatgtgccggtgccgccagatacggaggctgaaaagctcaagccatacgtgacctgttctctgatcaggccggacgatactaacggcgagcacaagaaatgcaaaactgacacttacaagcatcacaagcttggcttcatgcatagaggcgacaattcacccccaacagatccaatctgggatcagacattggaatgggagtacgatgacaacgatcttgtcttcttgcgcattttcgttaagaacgatgcaagcttcgcagagaacccgatcatggctgttactgctatccgactcgcatacgtcgtccgcggatggagcttcattcgccttcttgatctaaagggtcatgagacaagatgctgcttgctggtgaaatttgagttcgaggacatttag

SEQ ID NO: 19175 - protein, 589 aa, Muscodor strobelii
  misc_feature: SGI Peptide ID NO. 566443
  misc_feature (101)..(263): Pfam Id: PF00388 Pfam Desc: Phosphatidylinositol-specific phospholipase C, X domain
  misc_feature (316)..(434): Pfam Id: PF00387 Pfam Desc: Phosphatidylinositol-specific phospholipase C, Y domain
  misc_feature (101)..(177): Pfam Id: PF00388 Pfam Desc: Phosphatidylinositol-specific phospholipase C, X domain
  misc_feature (3)..(589): NCBI GI: 169613627 Blast Desc: SNOG_09944 [Phaeosphaeria nodorum SN15] gi|111061159|gb|EAT82279.1| SNOG_09944 [Phaeosphaeria nodorum SN15]
  misc_feature (3)..(589): NCBI GI: 189199062 Blast Desc: 1-phosphatidylinositol-4,5-bisphosphate phosphodiesterase gamma 2 [Pyrenophora tritici-repentis Pt-1C-BFP] gi|187982967|gb|EDU48455.1| phosphodiesterase gamma 2
  misc_feature (1)..(589): NCBI GI: 256726695 Blast Desc: [Nectria haematococca mpVI 77-13-4]
  misc_feature (1)..(588): NCBI GI: 46121363 Blast Desc: FG05060.1 [Gibberella zeae PH-1]
  misc_feature (3)..(589): NCBI GI: 39975285 Blast Desc: MGG_00211 [Magnaporthe grisea 70-15] gi|145018927|gb|EDK03206.1| MGG_00211 [Magnaporthe grisea 70-15]
  misc_feature (5)..(589): NCBI GI: 171681226 Blast Desc: protein product [Podospora anserina] gi|170940571|emb|CAP65799.1| protein product [Podospora anserina]
  misc_feature (1)..(588): NCBI GI: 261361232 Blast Desc: 1-phosphatidylinositol-4,5-bisphosphate phosphodiesterase delta-1 [Verticillium albo-atrum VaMs.102]
  misc_feature (3)..(480): NCBI GI: 71006692 Blast Desc: UM01865.1 [Ustilago maydis 521] gi|46097513|gb|EAK82746.1| UM01865.1 [Ustilago maydis 521]
  misc_feature (3)..(426): NCBI GI: 116200347 Blast Desc: CHGG_08329 [Chaetomium globosum CBS 148.51] gi|88179608|gb|EAQ87076.1| CHGG_08329 [Chaetomium globosum CBS 148.51]
  misc_feature (3)..(425): NCBI GI: 164422862 Blast Desc: NCU11415 [Neurospora crassa OR74A] gi|157069852|gb|EDO64907.1| conserved [Neurospora crassa OR74A]
MSSSLTSGIAKLKPFGSRGQYDEDAGQEIDNQTVAGGGHSARRTKVTSQELSISHALKSFLVHNHVVREEDAALDSDGLSPALSALLDKPHIQVPPELTDRSHPLPEYFISSSHNTYLIGHQLRGKSSASAYEIALSTGARCVEIDAWDNEDDKEEPKVTHGYTLVSHIPFRAVCETMRNVVDKEAAEAVDRQGYRAAPIMLSLENHCGAKGQMRLVEIMKEVWGDRLLSKAVREKGHREQEGSDDPVILAELGSKIVVMVEYFFPSNVTEKEQEDTSSSDSSSDSSSDEDEEEKQARAAYKARKKAVKKGGIIPELAALGVYAQSVKPRDNSWFESQLKDGPAHHLINVSETGLTALMPIHREKIARHNSAHLMRVFPKGTRISSKNLAQVPFWGVGAQVCAMNWQTFGASMQLNEALFSGTDGYVLKPPALRAGGNGQLNTGRRKKLLLHIAGASNVPVPPDTEAEKLKPYVTCSLIRPDDTNGEHKKCKTDTYKHHKLGFMHRGDNSPPTDPIWDQTLEWEYDDNDLVFLRIFVKNDASFAENPIMAVTAIRLAYVVRGWSFIRLLDLKGHETRCCLLVKFEFEDI

SEQ ID NO: 19176 - DNA, 5001 bp, Muscodor strobelii
  misc_feature: SGI EST ID NO. CUFF.44974.2
  misc_feature: Variant of the nucleotide sequence at SEQ ID NO 19174
cggccacttcctacgacactatctgatctttgaccaactattaatcacccctttcaagaatcacttgacttctacagagcatcccagtaccataaccgaagaataaaacgatcgttgtcatagtttcaaaatgccacctccaagaggaactttcaaccccattgagggaccaggtatgcgcccacatccaacagctagatacgtgcgactacgacactacgtcggttgtgcacaatgacacgtacccggctattgactcggcaaatgttgatctgagcgggaaggccgtgttcatcagcggcgccaccagaggtctaggcaagggcatcagcatttcgtacgcaaaggccggtgcatcgatgattgccattggcgcaagatcgaatctcgcagagacaaccaaagcaatccgtgacgctgttgctagcgttggaaagcctgaaccgaagatcctcgaagttcaactcgatgtcactagccgcgagagtgttgatgctgctgcggccaagattgaagaggctttcgggcgcatcgacatcgtgatcaacaacgccggtcttttttccagcagggatcccattgccgcctctaatccagatgactggtgggacacggtgactgtcaatgtcaaaggtccatacctcgtcatgcgtgccatgatcccacttatgctccagactaatggcctgaggacattcgtcactgtcagcagtgtaggcgcgcatttgcgcagcccgggtctcagcgcatatcagacatctaagctcgcagtcttgcgacttactgaattccttaacgccgagaccagtgatcagggcatcgtagcctatgcgattcatcctggtaacatcccgacagatatggctaagggtggcgatgggctcatttcagacgccctcgtgcctggtaagtccaactcccccccatttgacttagcttacatgctcatttcaccgtgcagtcttcgttgaaacccctgagctcgtgggagattcattggtgtatttgacgaaggaacgccgagaatggcttggtggaagatatgtaaacttgacctgggacttgcctgagctgatgggtatgaaggacaagatagttaaagctgacaagctcaaggtgcagttggtcgtttgatgacgtcagctttattgagacccgagccgctattatcctgatcgtaatgaggtcatcggacaaaggacttggtagaaagcataggctatggctgctgcatatcggaatcgaagtactcaaccagagtcctaggagaattagcaacgccaattgaaagtgatgcatgttggatccgtgacactgacgcgtttagggctgtgccgaaatgccggggggcttggactgtttcgtccttacatttcaatgtgggcttggtggggttgagatctcacgtcacccctcaattcagctcgtcagctcaaacctttgtaactatccttaactcagtttacgatttagctgaatcggcgctttttggaactcgatcatataagattcctcgctctttgtatcaaacatattttcgttgcacgcatgttcagatagataacgtgccgtccaccacatcccaaacatgagcagttctctgacttcaggcattgcaaagctgaaaccattcgggtcgagagggcaatatgatgaagatgcgggtcaagaaatcgacaaccaaaccgtcgccggtggtggacacagcgcacgtcgcacaaaggtcacgtcacaagaactcagtattagccacgcgctgaagtcgttcctagtacacaatcatgttgtacgcgaggaagacgccgcgctagactccgacgggctcagccctgctttgtccgctcttctcgataaaccgcacattcaagttccacctgaattgactgatcgatcgcatccgttacctgaatacttcatcagctcgagtcacaacacgtatctgattggtcatcaattgcgaggcaagtcctcagcttcagcgtacgagatcgcgctgtcaacgggggcgcgatgcgttgagatcgatgcatgggacaatgaagacgataaagaagagccaaaggtcacgcatggctatacactcgtgtctcatattccctttagagccgtttgtgagacaatgcgcaatgtagtcgataaggaggcagccgaagcagttgatcgtcaaggctatcgcgctgcccccattatgctgtcgctcgagaaccattgtggggccaaaggacaaatgcgacttgtggagattatgaaagaggtatggggtgatcggctactgagcaaagcggttagagaaaagggccacagagaacaggaaggtagtgacgatcccgttattctcgcagagttaggatctaaaatcgttgttatggttgaatatttcttcccgtcaaatgtgacagagaaggaacaggaagacacaagcagtagcgattcctcgagcgattcttcaagcgacgaggacgaggaagagaaacaagctcgagcggcttacaaagcgcgaaagaaagcagtcaagaagggaggcattattccagaacttgcggcccttggtgtatacgcgcagtcggtcaagccaagagacaattcgtggttcgagagccagctcaaggatggtccggcgcatcatcttatcaacgtctcggagacagggctcactgctctgatgccgatccatagggagaagattgcgcgacataactccgcgcatctgatgcgcgtttttccgaagggaacgcgcatatcctccaagaatctggcgcaggtaccgttctggggcgttggtgctcaagtctgtgcaatgaactggcaaacatttggtgctagcatgcagttgaatgaagcattattcagcggaacagatgggtatgtactaaagccgccagcattgcgtgcgggtgggaatggacaattgaacaccggccgccggaagaaacttctgctacacatcgcgggcgcatcgaatgtgccggtgccgccagatacggaggctgaaaagctcaagccatacgtgacctgttctctgatcaggccggacgatactaacggcgagcacaagaaatgcaaaactgacacttacaagcatcacaagcttggcttcatgcatagaggcgacaattcacccccaacagatccaatctgggatcagacattggaatgggagtacgatgacaacgatcttgtcttcttgcgcattttcgttaagaacgatgcaagcttcgcagagaacccgatcatggctgttactgctatccgactcgcatacgtcgtccgcggatggagcttcattcgccttcttgatctaaagggtcatgagacaagatgctgcttgctggtgaaatttgagttcgaggacatttagagactcgagtgcagaaatgacttactccgcaataatttggcttcattttccttcggtcatgatgcgaaaacgctttgatatcgatcgaggactgtcaactaacgtctataatacaatgacgatgacagttcactcaatcaacgcggaaacgagcaaaagagccgtgcttgtatatttggactcagcaagtctatgtctatcgtattaatagctcagccttcaaacttgaatgtataattggtataacatgtcgacacatcagcgatgagaccggtggccagcgccgcctgtgaatttgcatccagatcaccccaggccttggcaggaacagtgccaacgtacacgttgtagttatagttgccacactggcacttattcgtaatatctctttgcgacgtagccgagaaaacatcggcgttatcacgagaaagcacaatggtctgagagcctagacccataggtaccgtaaagatattagcgcccgctggagcgtcgaaatttcgggtgttgttgcctgagctgactgatacagtgccagcttctttgagtagggacacaacgaagaattcgtcggcaagagactcgtatccatttggccggccttcgaagtagtttccagagctattgtctgctatgcgcccggcggtcgtgtccgtcaagtcgcaatccgtcgtggaggggttaggccgataccagtatataatctgctcttcctcgatataatccgcgatgtcatctttgcttgctccggctttgtaagcggtaatgaatggcttcgccaagtccaaccagccttcatgtggcataccgagtgcccacttgctattgccgtcgtcaccatgcgaactgtctaacggggccatataatgactctcgccataatcattccaagttacgaattcgaagaactggggttgcaggtctaacatgtgcgaaaggcgatcgaagattagagtgtcaccgggaaacacgaaattcttggagtacgtcacttcaggcccatagtgcgtgaagaaccagccggatacaggggccatatacggcttaccctcgagccaattgacgtacacatcatctccgtactcaacagtcaggttatgtcctggagtaggagctttgttgtttccgttattgggccaagcataccaattgagtgcagcatcgaggccgtcgctcgtgttcgcccaagtattaccggcattgctgacccaaggtagttccggaggatagaaattaggcgcgaaatacatctcaaagtcctttgtctccgaagatgatgctaccgccgtacgcagactatcgacatccagcccatcgccgtgatacgacgacacgaaagccttgccgtccactagcagttgcgcgtccatcgcaccatatctagcgatgaattcaccgatcgttgcagtgtcattaatcttccaccagctaaagtcgaatgatataaagactttaaagccgatatctgcagctgcttgatatgcgaggtccaattgtgtttctgtgtatgtgtccgtgccacaattgagtgcaaatgcgtcgattcccgcctccattgcccgctccatgtcgtatctgtacgagctagtatcagcgcggtcgccaacgattccgatctgtgtgaggggttagagaacatcaga

SEQ ID NO: 19177 - DNA, 1239 bp, Muscodor strobelii
  misc_feature: SGI cDNA ID NO. 566444
  misc_feature: Encodes the peptide sequence at SEQ ID NO 19178
atgcgcaatgtagtcgataaggaggcagccgaagcagttgatcgtcaaggctatcgcgctgcccccattatgctgtcgctcgagaaccattgtggggccaaaggacaaatgcgacttgtggagattatgaaagaggtatggggtgatcggctactgagcaaagcggttagagaaaagggccacagagaacaggaaggtagtgacgatcccgttattctcgcagagttaggatctaaaatcgttgttatggttgaatatttcttcccgtcaaatgtgacagagaaggaacaggaagacacaagcagtagcgattcctcgagcgattcttcaagcgacgaggacgaggaagagaaacaagctcgagcggcttacaaagcgcgaaagaaagcagtcaagaagggaggcattattccagaacttgcggcccttggtgtatacgcgcagtcggtcaagccaagagacaattcgtggttcgagagccagctcaaggatggtccggcgcatcatcttatcaacgtctcggagacagggctcactgctctgatgccgatccatagggagaagattgcgcgacataactccgcgcatctgatgcgcgtttttccgaagggaacgcgcatatcctccaagaatctggcgcaggtaccgttctggggcgttggtgctcaagtctgtgcaatgaactggcaaacatttggtgctagcatgcagttgaatgaagcattattcagcggaacagatgggtatgtactaaagccgccagcattgcgtgcgggtgggaatggacaattgaacaccggccgccggaagaaacttctgctacacatcgcgggcgcatcgaatgtgccggtgccgccagatacggaggctgaaaagctcaagccatacgtgacctgttctctgatcaggccggacgatactaacggcgagcacaagaaatgcaaaactgacacttacaagcatcacaagcttggcttcatgcatagaggcgacaattcacccccaacagatccaatctgggatcagacattggaatgggagtacgatgacaacgatcttgtcttcttgcgcattttcgttaagaacgatgcaagcttcgcagagaacccgatcatggctgttactgctatccgactcgcatacgtcgtccgcggatggagcttcattcgccttcttgatctaaagggtcatgagacaagatgctgcttgctggtgaaatttgagttcgaggacatttag

SEQ ID NO: 19178 - protein, 412 aa, Muscodor strobelii
  misc_feature: SGI Peptide ID NO. 566444
  misc_feature (139)..(257): Pfam Id: PF00387 Pfam Desc: Phosphatidylinositol-specific phospholipase C, Y domain
  misc_feature (1)..(412): NCBI GI: 169613627 Blast Desc: SNOG_09944 [Phaeosphaeria nodorum SN15] gi|111061159|gb|EAT82279.1| SNOG_09944 [Phaeosphaeria nodorum SN15]
  misc_feature (1)..(412): NCBI GI: 189199062 Blast Desc: 1-phosphatidylinositol-4,5-bisphosphate phosphodiesterase gamma 2 [Pyrenophora tritici-repentis Pt-1C-BFP] gi|187982967|gb|EDU48455.1| phosphodiesterase gamma 2
  misc_feature (1)..(412): NCBI GI: 256726695 Blast Desc: [Nectria haematococca mpVI 77-13-4]
  misc_feature (1)..(411): NCBI GI: 46121363 Blast Desc: FG05060.1 [Gibberella zeae PH-1]
  misc_feature (11)..(411): NCBI GI: 261361232 Blast Desc: 1-phosphatidylinositol-4,5-bisphosphate phosphodiesterase delta-1 [Verticillium albo-atrum VaMs.102]
  misc_feature (1)..(412): NCBI GI: 39975285 Blast Desc: MGG_00211 [Magnaporthe grisea 70-15] gi|145018927|gb|EDK03206.1| MGG_00211 [Magnaporthe grisea 70-15]
  misc_feature (1)..(412): NCBI GI: 171681226 Blast Desc: protein product [Podospora anserina] gi|170940571|emb|CAP65799.1| protein product [Podospora anserina]
  misc_feature (1)..(303): NCBI GI: 71006692 Blast Desc: UM01865.1 [Ustilago maydis 521] gi|46097513|gb|EAK82746.1| UM01865.1 [Ustilago maydis 521]
  misc_feature (1)..(249): NCBI GI: 116200347 Blast Desc: CHGG_08329 [Chaetomium globosum CBS 148.51] gi|88179608|gb|EAQ87076.1| CHGG_08329 [Chaetomium globosum CBS 148.51]
  misc_feature (21)..(248): NCBI GI: 164422862 Blast Desc: NCU11415 [Neurospora crassa OR74A] gi|157069852|gb|EDO64907.1| conserved [Neurospora crassa OR74A]
  misc_feature (136)..(411): SWISSPROT Homolog: EC 3.1.4.11 Phosphoinositide phospholipase C
MRNVVDKEAAEAVDRQGYRAAPIMLSLENHCGAKGQMRLVEIMKEVWGDRLLSKAVREKGHREQEGSDDPVILAELGSKIVVMVEYFFPSNVTEKEQEDTSSSDSSSDSSSDEDEEEKQARAAYKARKKAVKKGGIIPELAALGVYAQSVKPRDNSWFESQLKDGPAHHLINVSETGLTALMPIHREKIARHNSAHLMRVFPKGTRISSKNLAQVPFWGVGAQVCAMNWQTFGASMQLNEALFSGTDGYVLKPPALRAGGNGQLNTGRRKKLLLHIAGASNVPVPPDTEAEKLKPYVTCSLIRPDDTNGEHKKCKTDTYKHHKLGFMHRGDNSPPTDPIWDQTLEWEYDDNDLVFLRIFVKNDASFAENPIMAVTAIRLAYVVRGWSFIRLLDLKGHETRCCLLVKFEFEDI

SEQ ID NO: 19179 - DNA, 5001 bp, Muscodor strobelii; identical to SEQ ID NO: 19176
  misc_feature: SGI EST ID NO. CUFF.44974.2
  misc_feature: Variant of the nucleotide sequence at SEQ ID NO 19177

SEQ ID NO: 19180 - DNA, 918 bp, Muscodor strobelii
  misc_feature: SGI cDNA ID NO. 566445
  misc_feature: Encodes the peptide sequence at SEQ ID NO 19181
atgccacctccaagaggaactttcaaccccattgagggaccaggcgactacgacactacgtcggttgtgcacaatgacacgtacccggctattgactcggcaaatgttgatctgagcgggaaggccgtgttcatcagcggcgccaccagaggtctaggcaagggcatcagcatttcgtacgcaaaggccggtgcatcgatgattgccattggcgcaagatcgaatctcgcagagacaaccaaagcaatccgtgacgctgttgctagcgttggaaagcctgaaccgaagatcctcgaagttcaactcgatgtcactagccgcgagagtgttgatgctgctgcggccaagattgaagaggctttcgggcgcatcgacatcgtgatcaacaacgccggtcttttttccagcagggatcccattgccgcctctaatccagatgactggtgggacacggtgactgtcaatgtcaaaggtccatacctcgtcatgcgtgccatgatcccacttatgctccagactaatggcctgaggacattcgtcactgtcagcagtgtaggcgcgcatttgcgcagcccgggtctcagcgcatatcagacatctaagctcgcagtcttgcgacttactgaattccttaacgccgagaccagtgatcagggcatcgtagcctatgcgattcatcctggtaacatcccgacagatatggctaagggtggcgatgggctcatttcagacgccctcgtgcctgtcttcgttgaaacccctgagctcgtgggagattcattggtgtatttgacgaaggaacgccgagaatggcttggtggaagatatgtaaacttgacctgggacttgcctgagctgatgggtatgaaggacaagatagttaaagctgacaagctcaaggtgcagttggtcgtttga

SEQ ID NO: 19181 - protein, 305 aa, Muscodor strobelii
  misc_feature: SGI Peptide ID NO. 566445
  misc_feature (41)..(216): Pfam Id: PF00106 Pfam Desc: short chain dehydrogenase
  misc_feature (42)..(215): Pfam Id: PF08659 Pfam Desc: KR domain
  misc_feature (41)..(197): Pfam Id: PF00106 Pfam Desc: short chain dehydrogenase
  misc_feature (1)..(305): NCBI GI: 256723291 Blast Desc: NECHADRAFT_97166 [Nectria haematococca mpVI 77-13-4]
  misc_feature (1)..(303): NCBI GI: 46115636 Blast Desc: FG03660.1 [Gibberella zeae PH-1]
  misc_feature (1)..(304): NCBI GI: 212539229 Blast Desc: 2-(R)-hydroxypropyl-CoM dehydrogenase, [Penicillium marneffei ATCC 18224] gi|210069512|gb|EEA23603.1| 2-(R)-hydroxypropyl-CoM dehydrogenase, [Penicillium marneffei
  misc_feature (1)..(304): NCBI GI: 242760668 Blast Desc: short-chain type dehydrogenase, [Talaromyces stipitatus ATCC 10500] gi|218723233|gb|EED22650.1| short-chain type dehydrogenase, [Talaromyces stipitatus ATCC 10500]
  misc_feature (17)..(305): NCBI GI: 242778830 Blast Desc: oxidoreductase, short chain dehydrogenase/reductase family, [Talaromyces stipitatus ATCC 10500] gi|218722937|gb|EED22355.1| oxidoreductase, short chain family,
  misc_feature (1)..(294): NCBI GI: 115390222 Blast Desc: conserved [Aspergillus terreus NIH2624] gi|114195012|gb|EAU36712.1| conserved [Aspergillus terreus NIH2624]
  misc_feature (1)..(274): NCBI GI: 242823682 Blast Desc: 2,4-dienoyl-CoA reductase, [Talaromyces stipitatus ATCC 10500] gi|218713029|gb|EED12454.1| 2,4-dienoyl-CoA reductase, [Talaromyces stipitatus ATCC 10500]
  misc_feature (1)..(303): NCBI GI: 238845923 Blast Desc: 3-hydroxybutyrate dehydrogenase type 2 [Microsporum canis CBS 113480]
  misc_feature (8)..(305): NCBI GI: 156056737 Blast Desc: SS1G_04099 [Sclerotinia sclerotiorum 1980] gi|154701885|gb|EDO01624.1| SS1G_04099 [Sclerotinia sclerotiorum 1980]
  misc_feature (20)..(305): NCBI GI: 212533777 Blast Desc: oxidoreductase, short chain dehydrogenase/reductase family, [Penicillium marneffei ATCC 18224] gi|210072409|gb|EEA26498.1| oxidoreductase, short chain family,
  misc_feature (38)..(279): SWISSPROT Homolog: EC 1.1.1.100 3-oxoacyl-[acyl-carrier-protein] reductase
MPPPRGTFNPIEGPGDYDTTSVVHNDTYPAIDSANVDLSGKAVFISGATRGLGKGISISYAKAGASMIAIGARSNLAETTKAIRDAVASVGKPEPKILEVQLDVTSRESVDAAAAKIEEAFGRIDIVINNAGLFSSRDPIAASNPDDWWDTVTVNVKGPYLVMRAMIPLMLQTNGLRTFVTVSSVGAHLRSPGLSAYQTSKLAVLRLTEFLNAETSDQGIVAYAIHPGNIPTDMAKGGDGLISDALVPVFVETPELVGDSLVYLTKERREWLGGRYVNLTWDLPELMGMKDKIVKADKLKVQLVV

SEQ ID NO: 19182 - DNA, 5001 bp, Muscodor strobelii; identical to SEQ ID NO: 19176
  misc_feature: SGI EST ID NO. CUFF.44974.2
  misc_feature: Variant of the nucleotide sequence at SEQ ID NO 19180

SEQ ID NO: 19183 - DNA, 558 bp, Muscodor strobelii
  misc_feature: SGI cDNA ID NO. 566446
  misc_feature: Encodes the peptide sequence at SEQ ID NO 19184
atgggaatcgacatcgcccacaagaagacgcacgcgcgcgactcccatcgcaaggcccccaagagccccaacgtgtacctgaagcttctcgtcaagctctactcgtttcttgcccgccgtaccgacagccgcttcaaccgagtcatccttcgccgtctgttcatgagttccaccaatcgaccccccgtctcgctctcgcgaattgcccacaatctctcgggcgacgacaagcgcaccgtcgtcgtggtcggtcccgtcacggacgatgcccgcctcctcagcgtccccaagatgactgttgccgcgctgcgcttcacagccacggctcgcgcacgtgtcatttcgtccggcggtcgcgcccttactctcgaccaacttgccctcgagaagccaactggtgccgatacccttcttcttcgtggtcccaaaaatgcccgcgaggctgtgaagcacttcggctttggaccgcataagcacaagaagccttatgtcgaatccaagggtcgcaagtttcagaaggctcgtggacgccgccgatcgcgcgggttcaaggtttga

SEQ ID NO: 19184 - protein, 185 aa, Muscodor strobelii
  misc_feature: SGI Peptide ID NO. 566446
  misc_feature (12)..(183): Pfam Id: PF00828 Pfam Desc: Eukaryotic ribosomal protein L18
  misc_feature (1)..(185): NCBI GI: 154301020 Blast Desc: BC1G_10648 [Botryotinia fuckeliana B05.10] gi|150856396|gb|EDN31588.1| BC1G_10648 [Botryotinia fuckeliana B05.10]
  misc_feature (1)..(185): NCBI GI: 156043165 Blast Desc: SS1G_10585 [Sclerotinia sclerotiorum 1980] gi|154694973|gb|EDN94711.1| SS1G_10585 [Sclerotinia sclerotiorum 1980]
  misc_feature (1)..(185): NCBI GI: 39945004 Blast Desc: MGG_04484 [Magnaporthe grisea 70-15] gi|145011408|gb|EDJ96064.1| MGG_04484 [Magnaporthe grisea 70-15]
  misc_feature (1)..(185): NCBI GI: 85080614 Blast Desc: 60S ribosomal protein L18 [Neurospora crassa OR74A] gi|28917642|gb|EAA27337.1| 60S ribosomal protein L18 [Neurospora crassa OR74A]
  misc_feature (1)..(185): NCBI GI: 115385984 Blast Desc: 60S ribosomal protein L18 [Aspergillus terreus NIH2624] gi|114190531|gb|EAU32231.1| 60S ribosomal protein L18 [Aspergillus terreus NIH2624]
  misc_feature (1)..(185): NCBI GI: 255935923 Blast Desc: Pc13g05540 [Penicillium chrysogenum Wisconsin 54-1255] gi|211583608|emb|CAP91623.1| Pc13g05540 [Penicillium chrysogenum Wisconsin 54-1255]
  misc_feature (1)..(185): NCBI GI: 238493939 Blast Desc: 60S ribosomal protein L18 [Aspergillus flavus NRRL3357] gi|220696700|gb|EED53042.1| 60S ribosomal protein L18 [Aspergillus flavus NRRL3357]
  misc_feature (1)..(185): NCBI GI: 67539260 Blast Desc: AN5800.2 [Aspergillus nidulans FGSC A4] gi|40739119|gb|EAA58309.1| conserved [Aspergillus nidulans FGSC A4] gi|259480047|tpe|CBF70823.1| TPA: 60S ribosomal protein L18
  misc_feature (1)..(185): NCBI GI: 169784098 Blast Desc: [Aspergillus oryzae RIB40] gi|83775255|dbj|BAE65378.1| protein product [Aspergillus oryzae]
  misc_feature (1)..(185): NCBI GI: 46136701 Blast Desc: FG09866.1 [Gibberella zeae PH-1]
MGIDIAHKKTHARDSHRKAPKSPNVYLKLLVKLYSFLARRTDSRFNRVILRRLFMSSTNRPPVSLSRIAHNLSGDDKRTVVVVGPVTDDARLLSVPKMTVAALRFTATARARVISSGGRALTLDQLALEKPTGADTLLLRGPKNAREAVKHFGFGPHKHKKPYVESKGRKFQKARGRRRSRGFKV

SEQ ID NO: 19185 - DNA, 994 bp, Muscodor strobelii
  misc_feature: SGI EST ID NO. CUFF.44889.0
  misc_feature: Variant of the nucleotide sequence at SEQ ID NO 19183
tttagagtcgcatctcttgtgcttgccgcctcgctaggtatatgtaggcttttagcgcagagccgaaacgggccactcgcgtgcggtgcgacaaaaagagcggggtggctgtatatcgataaggactgccctaccacagttctatttcggcctcgaaatcccaaattgttcccctctgcatgttccaaccaccatcaacatcggaattcatcaccgtccggcaaagaccgcgtccgccacaatgggtaggtcaaccgccagaactgcttgaattgcttatatgtgcgagtggagtgatgatgcatcctctgcgaatccggcactcttccgctcccgagcttgtcttggtcgacgcggtgccatgatgagcacaccgatactgacctgagtctctcaggaatcgacatcgcccacaagaagacgcacgcgcgcgactcccatcgcaaggcccccaagagccccaacgtgtacctgaagcttctcgtcaagctctactcgtttcttgcccgccgtaccgacagccgcttcaaccgagtcatccttcgccgtctgttcatgagttccaccaatcgaccccccgtctcgctctcgcgaattgcccacaatctctcgggcgacgacaagcgcaccgtcgtcgtggtcggtcccgtcacggacgatgcccgcctcctcagcgtccccaagatgactgttgccgcgctgcgcttcacagccacggctcgcgcacgtgtcatttcgtccggcggtcgcgcccttactctcgaccaacttgccctcgagaagccaactggtgccgatacccttcttcttcgtggtcccaaaaatgcccgcgaggctgtgaagcacttcggctttggaccgcataagcacaagaagccttatgtcgaatccaagggtcgcaagtttcagaaggctcgtggacgccgccgatcgcgcgggttcaaggtttgaaccatctcgttggcatgaagtgtgggccagtatgtgggctagt

SEQ ID NO: 19186 - DNA, 5218 bp, Muscodor strobelii
  misc_feature: SGI cDNA ID NO. 566447
  misc_feature: Encodes the peptide sequence at SEQ ID NO 19187
atgctcaccgaggacccctacgtctttgacgcctcctttttcaacatcaacccacatgaggcagatgtgatagatccacaacaccgtcttcttctcgaaacagtgtacgaaggtttatcctcggctggacttcgagtagaggacctccaagggtcgtctaccgccgtctatgttggtatgatgcagcatgattttgctgatattaccaactatgaccttgacgccattcccacatacgccgctacgggaacatcggcatgtatcttgtctaacagagtatcttacttctttgactggcatggccctagcatgacgatcgacactgcttgtagctcgtcgttagtggcggtcgatcaagctgtgcagcaactccgcagcggctgcagcaccgttgccgttgccgctggcgccaatttgatcctagggccacacccattcatagtcgaaagcaaactccagatgctttcacctgacgggcgctcccgtatgtgggataaagacgctaatggttatgctcgaggcgaaggtgttgccgctgtcgtcttgaagacgctgagccaggctttgaaggatggcgatcccattgaatgcatcattcgcgaaagcggtgtgaaccaagacgggaaaaccgccggaatcactatgcccagtcattcagctcaaacagccctgattcgcgatacttacacgcgagctgggctggaccttaacgatccgactgaacgctgccagtatttcgaagctcacgggacaggtacccaagctggtgacccgcaagaagcggaagctatctcttctgctttctttggtgaccgacatcgagagtctagcgaagacccattatatgtcggtagtataaaaactatcatcggccacacagaaggaacggccggtattgcgggacttctcaaagcgtcactagcgatgcgaaaaggtgtcatacctcccaacttactgttcaacaacctcaatcctaaagtagcaccattctacaatgacttaaatctagtcacaaagctgatgccgtggccgaaattgcctgctggccagcctaaacgtgcgagtgtcaactcatttggattcggaggtacgaatgcacacgtgattttggagagtttcgaagagacaaaacacaaagcctcagccgcaggaagtctaccttgtctcatgccgttgactttgtccgctacaagcgaacaatcattgattgctacgatgagagacatatcgcagtatctggagaaacatccaaaccttcagcttggggatttggcatggacacttctgaagaagagatcgacgtttcccgttcgtcgagccattaccgggcagacggtcgaatccattcgggcttccttgaaacaggaggctgacttgatccagtcacagcccaagagtgtagccatctccgagctaaagggcaagcctagtatactaggcatcttcaccggacaaggtgctcaatgggctggcatgggcaaagtgttgatatctaccctaccgtatgccgaaacagtcattgatgagctagatgcatcgttgtctgccctaccgaaggaatacaaaccttcgtggtcactgaaggaacagcttatgttcgagggggaagcctcgaacgtaggtctcgctcagttttcccagcctctctgctgcgctgtccaaatcctcctcgtgaaactcatcaaggcaacgggtttgacgttcaaatcagtagttggtcacagttccggcgagatcgcatgtgcatacgcagctggattcatctcgtcatctcaagctattcgaattgcctaccttcgcggtttcacatcgggacacggatcctcgccgaacggatcacagggtgcaatgatggcagtaggcgcttccttagaggatgctcaagaactttgtgatctagaagtattcaacggccgcatcaacgttgcagcttcaaactcgcctaccagcgtgacgctctcgggcgacagggatgctctcctggaagcgcaagctatcctcgacgacgaatccaagttcgctcgtatgttgcttgtcgacaaagcgtatcattcacaccatatgcgtccctgcgcagttccctatgctgaagcattgaaggcttgtgggtgcgacacccctgagggtacattttctgagagcagcccagtctggctctcgtctgtgtatgatggcagagtcatgaggccgaaagatgtaaaggcagattactgggtggagaatcttgtttctcccgtcctgttctctcaagcagtcgagtcagctatgatcaaggtgtcccctctaaacctcgtgctcgaagtcggacctcatgcggctcttaagaacccctcgctagacaccatcgagaactgcacaactactagattgccatacacgagctttctagacaggaagaagaatgacgccggtgcgtttgcctttggcgtaggatacatctgggagaatttcggctccgccgctgtgaatgctgagcgattttacgatgagatcagccttgcgacaccgtcaaacgaaatttcaaagtccttgccatcatatcctttcgaccattcccgcgcctatagaaaggaatccaggcttctcaagacgtggctacggggaggaaagcggcctcaccttcttctaggcaagcttgcggcgcatagcacatcgtcaagaatgcaatggcagaattttatcaagcccacagatatggactggatagacgggcatgctcttcaaggccagactgtattccccggcgcgggatacgtcgtgatggctatggaaggcgcgatgcacattgcaggagaccatgatgtgaagcttctagaagtcttgggactaaagatcgacaaggccgtgacattcgaagacgagaacagcttggtggagttgaatctcacgatcacggtttcatcccctgcagtaaactcagaccgcatcctcctggacttcaccatcgactcttgtctggcgaaagagagtggcctgtctgcttcagcgagcgggcaggttgttgtcagcttgggagcaatcactaatgatgccttgcccatgtcccaaccggaaccccctcatctcaacaaggtcatcatcgattctttctacgggcaactagacgcaatcggatacggttataccaaggatttccgtggtatcacctctatgcgaagaggcgacagcaaatctagcggtactctgaattggccaacgttacaagacgatgatcggtatcttatcctacaccctgcaactctcgatgtggcattccaaacgttcatcggagcatactctgcccctagagatagacggctccggtctcttttggtgcctacacatatcgatcgcattgccctcaacccacaacttgctactctcgccaatgaagccgggagtgcagagttcttggcaacaagtgtggaggccggtagattcaaagtagggggtgacattgaagtattcataccaggtactcgatcaaccgtgctgactatcgaaggtcttggattcaagcccttctcaccgcccactgccgctgacgaccatttgttgttcaacgaatgggtgtggggacctcttacccctgatgagattctggatgacgagaagcatcgcgcttcgcagaggagcaaggacgtgacagttcacatggagcgcatcacttattactacgttcggacattcctgcgggacctcacgaaagaggatcgaaagaaagcagcaccccattatcattggcagatcaactggtgtgagcatgtcctcgccgaagcaaaagcgggtaatcattactgctttgatgcaagctgggacgaagatactgaagaagtgattctgggtatcatcaacagtaatctttaccacccacacgtccgcctcttgcaacgtgtgggcgaaaacatactatctgcattgcgagaagacaggaatgcattcgagattatggatcatgatggcctactgacagagttttacggctcgcctgagagttatggcgtagcataccgttacttcgaacagcttattgggcagataggccatcgttaccaaaacatggatatcctcgaaatcggcgcgggaactggcggtgcaactcggtacgccctgggtaaagacgagaataagctctcgttcgggagctacacgttcaccgatatctcttctggattcttcgaacaaggccgcaaagaatacgaggagtatcaagataagatgagtttccagactcttgatatccgccgtgatcccgaagagcaaagctatacgccgcattcgtatgatctcgtcatcgcgtccaatgttctccatgctacacctagtcttgaggcgacgctgtcaaacgtgcggaagctcctcaagcctggtggccagctggtcatcattgaggtcacacaccgcgagcactggcgtattggattcatctttggcatgttcgcggattggtgggctggagtagatgaaggccgagtgctggagcctttcgttcccatggaaaagtgggatgagataatgaggaagactggctttgcgggcattgagtctcgaacagccgatccggatcgcagaatctaccccaattccgtcttcagcacacatgcagtcagtcaggagtttgagctactgtcgtcgcccttgacctctgctcaaccagcagaatcatttgccccggtagtggtcgtcggcggaggttcatcacgaacatcgaagatggttaaagaattaaaagatctattgccacaccgatcgatgagtgtcattcaacgtctggaggacattcacgatgcagaaatcaacgagtccaaatcgtcttttgttgttgtttctgagctagataatgaggtgttcgttggactcgacgaggatagactagaagctatgcagcttatgttcgacttagcaagttcagtcctttgggtcacggaggatgcgtgggtgaagaatccaaatcaggcaatgaccgttggccttctccgctctcttcgccttgaatacatcgatgtcgagatgcaatgtcttgatgtcaaagagatcggaagtctagatacgaggctcatagcagaacaactacatcgagtcgaaaacggagcgccggggaaatcaagagacatcctatggacacgagaaccggagctcttcctcaatgctgaggacaggcttatcgttccgcgcctaaggccggatgtgtccaagaatgaccgactgaactcaagccgtcgaaccattctaaggcaag

SEQ ID NO: 19187 - protein, 1739 aa, Muscodor strobelii
  misc_feature: SGI Peptide ID NO. 566447
  misc_feature (481)..(824): Pfam Id: PF00698 Pfam Desc: Acyl transferase domain
  misc_feature (1)..(188): Pfam Id: PF00109 Pfam Desc: Beta-ketoacyl synthase, N-terminal domain
  misc_feature (196)..(321): Pfam Id: PF02801 Pfam Desc: Beta-ketoacyl synthase, C-terminal domain
  misc_feature (1350)..(1455): Pfam Id: PF08241 Pfam Desc: Methyltransferase domain
  misc_feature (1350)..(1453): Pfam Id: PF08242 Pfam Desc: Methyltransferase domain
  misc_feature (544)..(774): Pfam Id: PF00698 Pfam Desc: Acyl transferase domain
  misc_feature (481)..(516): Pfam Id: PF00698 Pfam Desc: Acyl transferase domain
  misc_feature (4)..(188): Pfam Id: PF00109 Pfam Desc: Beta-ketoacyl synthase, N-terminal domain
  misc_feature (1)..(1737): NCBI GI: 121714671 Blast Desc: polyketide synthase, [Aspergillus clavatus NRRL 1] gi|119403100|gb|EAW13520.1| polyketide synthase, [Aspergillus clavatus NRRL 1]
  misc_feature (1)..(1737): NCBI GI: 74275561 Blast Desc: polyketide synthase [Monascus pilosus]
  misc_feature (1)..(1736): NCBI GI: 115385433 Blast Desc: ATEG_09961 [Aspergillus terreus NIH2624] gi|114187710|gb|EAU29410.1| ATEG_09961 [Aspergillus terreus NIH2624]
  misc_feature (1)..(1736): NCBI GI: 143345081 Blast Desc: ATEG_09961 [Aspergillus terreus NIH2624] gi|114187710|gb|EAU29410.1| ATEG_09961 [Aspergillus terreus NIH2624]
  misc_feature (1)..(1736): NCBI GI: 62510842 Blast Desc: LNKS_ASPTE RecName: Full=Lovastatin nonaketide synthase; Short=LNKS gi|5106755|gb|AAD39830.1|AF151722_1 lovastatin nonaketide synthase [Aspergillus terreus]
  misc_feature (1)..(1737): NCBI GI: 53850461 Blast Desc: TPA: polyketide synthase [Magnaporthe grisea 70-15]
  misc_feature (1)..(1737): NCBI GI: 23574643 Blast Desc: polyketide synthase [Penicillium citrinum]
  misc_feature (146)..(1736): NCBI GI: 189212057 Blast Desc: lovastatin nonaketide synthase [Pyrenophora tritici-repentis Pt-1C-BFP] gi|187979554|gb|EDU46180.1| lovastatin nonaketide synthase [Pyrenophora tritici-repentis
  misc_feature (1)..(1739): NCBI GI: 242816091 Blast Desc: polyketide synthase, [Talaromyces stipitatus ATCC 10500] gi|218715040|gb|EED14463.1| polyketide synthase, [Talaromyces stipitatus ATCC 10500]
  misc_feature (1)..(1737): NCBI GI: 240109583 Blast Desc: polyketide synthase, [Coccidioides posadasii C735 delta SOWgp]
  misc_feature (1)..(1736): SWISSPROT Homolog: EC 2.3.1.161 Lovastatin nonaketide synthase
  misc_feature: Useful for fungicidal and/or biocontrol applications
MLTEDPYVFDASFFNINPHEADVIDPQHRLLLETVYEGLSSAGLRVEDLQGSSTAVYVGMMQHDFADITNYDLDAIPTYAATGTSACILSNRVSYFFDWHGPSMTIDTACSSSLVAVDQAVQQLRSGCSTVAVAAGANLILGPHPFIVESKLQMLSPDGRSRMWDKDANGYARGEGVAAVVLKTLSQALKDGDPIECIIRESGVNQDGKTAGITMPSHSAQTALIRDTYTRAGLDLNDPTERCQYFEAHGTGTQAGDPQEAEAISSAFFGDRHRESSEDPLYVGSIKTIIGHTEGTAGIAGLLKASLAMRKGVIPPNLLFNNLNPKVAPFYNDLNLVTKLMPWPKLPAGQPKRASVNSFGFGGTNAHVILESFEETKHKASAAGSLPCLMPLTLSATSEQSLIATMRDISQYLEKHPNLQLGDLAWTLLKKRSTFPVRRAITGQTVESIRASLKQEADLIQSQPKSVAISELKGKPSILGIFTGQGAQWAGMGKVLISTLPYAETVIDELDASLSALPKEYKPSWSLKEQLMFEGEASNVGLAQFSQPLCCAVQILLVKLIKATGLTFKSVVGHSSGEIACAYAAGFISSSQAIRIAYLRGFTSGHGSSPNGSQGAMMAVGASLEDAQELCDLEVFNGRINVAASNSPTSVTLSGDRDALLEAQAILDDESKFARMLLVDKAYHSHHMRPCAVPYAEALKACGCDTPEGTFSESSPVWLSSVYDGRVMRPKDVKADYWVENLVSPVLFSQAVESAMIKVSPLNLVLEVGPHAALKNPSLDTIENCTTTRLPYTSFLDRKKNDAGAFAFGVGYIWENFGSAAVNAERFYDEISLATPSNEISKSLPSYPFDHSRAYRKESRLLKTWLRGGKRPHLLLGKLAAHSTSSRMQWQNFIKPTDMDWIDGHALQGQTVFPGAGYVVMAMEGAMHIAGDHDVKLLEVLGLKIDKAVTFEDENSLVELNLTITVSSPAVNSDRILLDFTIDSCLAKESGLSASASGQVVVSLGAITNDALPMSQPEPPHLNKVIIDSFYGQLDAIGYGYTKDFRGITSMRRGDSKSSGTLNWPTLQDDDRYLILHPATLDVAFQTFIGAYSAPRDRRLRSLLVPTHIDRIALNPQLATLANEAGSAEFLATSVEAGRFKVGGDIEVFIPGTRSTVLTIEGLGFKPFSPPTAADDHLLFNEWVWGPLTPDEILDDEKHRASQRSKDVTVHMERITYYYVRTFLRDLTKEDRKKAAPHYHWQINWCEHVLAEAKAGNHYCFDASWDEDTEEVILGIINSNLYHPHVRLLQRVGENILSALREDRNAFEIMDHDGLLTEFYGSPESYGVAYRYFEQLIGQIGHRYQNMDILEIGAGTGGATRYALGKDENKLSFGSYTFTDISSGFFEQGRKEYEEYQDKMSFQTLDIRRDPEEQSYTPHSYDLVIASNVLHATPSLEATLSNVRKLLKPGGQLVIIEVTHREHWRIGFIFGMFADWWAGVDEGRVLEPFVPMEKWDEIMRKTGFAGIESRTADPDRRIYPNSVFSTHAVSQEFELLSSPLTSAQPAESFAPVVVVGGGSSRTSKMVKELKDLLPHRSMSVIQRLEDIHDAEINESKSSFVVVSELDNEVFVGLDEDRLEAMQLMFDLASSVLWVTEDAWVKNPNQAMTVGLLRSLRLEYIDVEMQCLDVKEIGSLDTRLIAEQLHRVENGAPGKSRDILWTREPELFLNAEDRLIVPRLRPDVSKNDRLNSSRRTILRQ

SEQ ID NO: 19188 - DNA, 735 bp, Muscodor strobelii
  misc_feature: SGI cDNA ID NO. 566448
  misc_feature: Encodes the peptide sequence at SEQ ID NO 19189
atgccctcaaaattagatccagtcgcaccggccaaggcactgctatgcttccacgggacaggttcttcgtccacagtattccgcatccaactcgccaaagttcgcgcagcacttcgtgatgagttcgagttcatagccgtggatgctccccatgaatgcgctgctggacccggtgtcttacctctctttgcgaacgctggtccattccactgctggtttggcaaccaagacgacccgaccattgaaggctcgcttccagagatcaacaacacagttcgcgaggcagtaacacgttgggaagagaccaagacgaaccccgatgccaaaattgtcggaatgctatcgttttccgagggagctcttgtgtcaacattgctcctctggcaacagcaactaggcaaagtgccttggctaccgaaaatgaactttgctgttcttatatgctgttatttccccaccgaagccaccgactacatgcttgccaatgctgctacggccttacaagaagagaatgcgtggattgacaccccaacgctgcacttacacggtcgacgtgacttctgtctagcgagatcgcgaaagctcgtcaagtttcactacaggtcgcctttcgccgacgtgttcgagttcaacggcggtcatcactgtcccaaccaagcgggtgagctggcagaaatatcaaaacgcattatcaaactctcacaagtgggaaaaagccaaacgagggacttatag

SEQ ID NO: 19189 - protein, 244 aa, Muscodor strobelii
  misc_feature: SGI Peptide ID NO. 566448
  misc_feature (10)..(236): NCBI GI: 121714669 Blast Desc: DUF341 domain protein [Aspergillus clavatus NRRL 1] gi|119403099|gb|EAW13519.1| DUF341 domain protein [Aspergillus clavatus NRRL 1]
  misc_feature (3)..(235): NCBI GI: 23574642 Blast Desc: oxidoreductase [Penicillium citrinum]
  misc_feature (10)..(235): NCBI GI: 145612894 Blast Desc: MGG_08360 [Magnaporthe grisea 70-15] gi|145019988|gb|EDK04216.1| MGG_08360 [Magnaporthe grisea 70-15]
  misc_feature (8)..(233): NCBI GI: 4959946 Blast Desc: [Aspergillus terreus]
  misc_feature (12)..(233): NCBI GI: 115385435 Blast Desc: ATEG_09962 [Aspergillus terreus NIH2624] gi|114187711|gb|EAU29411.1| ATEG_09962 [Aspergillus terreus NIH2624]
  misc_feature (7)..(233): NCBI GI: 74275564 Blast Desc: oxidoreductase [Monascus pilosus]
  misc_feature (10)..(233): NCBI GI: 145616300 Blast Desc: MGG_13559 [Magnaporthe grisea 70-15] gi|145010033|gb|EDJ94689.1| MGG_13559 [Magnaporthe grisea 70-15]
  misc_feature (14)..(242): NCBI GI: 46126847 Blast Desc: FG07801.1 [Gibberella zeae PH-1]
  misc_feature (14)..(234): NCBI GI: 169785309 Blast Desc: [Aspergillus oryzae RIB40] gi|83775863|dbj|BAE65982.1| protein product [Aspergillus oryzae]
  misc_feature (14)..(234): NCBI GI: 238506303 Blast Desc: conserved [Aspergillus flavus NRRL3357] gi|220689066|gb|EED45417.1| conserved [Aspergillus flavus NRRL3357]
MPSKLDPVAPAKALLCFHGTGSSSTVFRIQLAKVRAALRDEFEFIAVDAPHECAAGPGVLPLFANAGPFHCWFGNQDDPTIEGSLPEINNTVREAVTRWEETKTNPDAKIVGMLSFSEGALVSTLLLWQQQLGKVPWLPKMNFAVLICCYFPTEATDYMLANAATALQEENAWIDTPTLHLHGRRDFCLARSRKLVKFHYRSPFADVFEFNGGHHCPNQAGELAEISKRIIKLSQVGKSQTRDL

SEQ ID NO: 19190 - DNA, 199 bp, Muscodor strobelii
  misc_feature: SGI EST ID NO. CUFF.44925.0
  misc_feature: Variant of the nucleotide sequence at SEQ ID NO 19188
ttacaagaagagaatgcgtggattgacaccccaacgctgcacttacacggtcgacgtgacttctgtctagcgagatcgcgaaagctcgtcaagtttcactacaggtcgcctttcgccgacgtgttcgagttcaacggcggtcatcactgtcccaaccaagcgggtgagctggcagaaatatcaaaacgcattatcaaac

SEQ ID NO: 19191 - DNA, 1065 bp, Muscodor strobelii
  misc_feature: SGI cDNA ID NO. 566449
  misc_feature: Encodes the peptide sequence at SEQ ID NO 19192
atggcatcggcgcatgtactacccaactatcagaaagctgtggtgatcacagctgacgaaaagatagtagtctgggacgaggccccatgtccaatacctagtccagatcagatcatagtccagacccaagcggttgcaatcaatcctagcgattctaaaatgcgtggggcattcattacccccatgggcatcctgggaaccgattatgcaggcacggtcttggcagtgggatctgggatccgcgacgttaagataggagaccgtgtcgcgggtgcccaaaacgccatgcgggcggatgcacctgaacggggggccttctgtcagtacaacctcaccgcaggccaaatatggctgaagttgccagaaacgataagcactgaggcaggcgcttcatttggcgcgggtatcagcacagccggtattgctattcgattgcttggtctgccattgcctagctccccggcagcgaaaccagagactgtattagtctatggtgggagtactgctacaggcaccattgccatgcagctactaaaacttgcaaacatgataccgatcgccacttgctctcccaaaaacaacgatttggtcaaatcatacggcgcggtagaggtctttgactacagggacaaagactgctccgctcacattcgtgcatatacaaaaagcaacttgcgttacgctctagattgcataaccacggtggagtcaacttcggcctgttttgccgcgatcgggagagccggcggtaagtacgtatccctggacccttttgcgccacatgcagcatcgcgcaagatggtacaaactaattgggtcctcgggccgtccatttttggcgacggttccacgtggccggctccgtacggtcgagagcccgacgaggaacttagagcctacggcgccgaactctttgccgttgcgcaaaagctgttgaatgaaggcaaacttcgcaaccatccccttcatataatagaaggggggatggacgcggttgcgaagggtatcgaaacagtaagaagtggcaagatgtcgggacagaagcttgtgatcaagttaatatag

SEQ ID NO: 19192 - protein, 354 aa, Muscodor strobelii
  misc_feature: SGI Peptide ID NO. 566449
  misc_feature (35)..(108): Pfam Id: PF08240 Pfam Desc: Alcohol dehydrogenase GroES-like domain
  misc_feature (35)..(90): Pfam Id: PF08240 Pfam Desc: Alcohol dehydrogenase GroES-like domain
  misc_feature (157)..(249): Pfam Id: PF00107 Pfam Desc: Zinc-binding dehydrogenase
  misc_feature (3)..(354): NCBI GI: 121714667 Blast Desc: enoyl reductase, [Aspergillus clavatus NRRL 1] gi|119403098|gb|EAW13518.1| enoyl reductase, [Aspergillus clavatus NRRL 1]
  misc_feature (1)..(353): NCBI GI: 74275565 Blast Desc: dehydrogenase [Monascus pilosus]
  misc_feature (8)..(353): NCBI GI: 203282358 Blast Desc: dehydrogenase [Monascus pilosus]
  misc_feature (8)..(353): NCBI GI: 115385437 Blast Desc: ATEG_09963 [Aspergillus terreus NIH2624] gi|114187712|gb|EAU29412.1| ATEG_09963 [Aspergillus terreus NIH2624]
  misc_feature (8)..(353): NCBI GI: 4959947 Blast Desc: enoyl reductase [Aspergillus terreus]
  misc_feature (1)..(353): NCBI GI: 23574641 Blast Desc: enoyl reductase [Penicillium citrinum]
  misc_feature (8)..(353): NCBI GI: 226438361 Blast Desc: enoyl reductase [Penicillium citrinum]
  misc_feature (8)..(353): NCBI GI: 39942688 Blast Desc: MGG_03424 [Magnaporthe grisea 70-15] gi|145010034|gb|EDJ94690.1| MGG_03424 [Magnaporthe grisea 70-15]
  misc_feature (8)..(353): NCBI GI: 145612890 Blast Desc: MGG_08363 [Magnaporthe grisea 70-15] gi|145019985|gb|EDK04213.1| MGG_08363 [Magnaporthe grisea 70-15]
  misc_feature (7)..(353): NCBI GI: 145248361 Blast Desc: An13g02940 [Aspergillus niger] gi|134081180|emb|CAK41690.1| protein product [Aspergillus niger]
  misc_feature (1)..(210): SWISSPROT Homolog: EC 1.6.5.5 NADPH:quinone reductase
MASAHVLPNYQKAVVITADEKIVVWDEAPCPIPSPDQIIVQTQAVAINPSDSKMRGAFITPMGILGTDYAGTVLAVGSGIRDVKIGDRVAGAQNAMRADAPERGAFCQYNLTAGQIWLKLPETISTEAGASFGAGISTAGIAIRLLGLPLPSSPAAKPETVLVYGGSTATGTIAMQLLKLANMIPIATCSPKNNDLVKSYGAVEVFDYRDKDCSAHIRAYTKSNLRYALDCITTVESTSACFAAIGRAGGKYVSLDPFAPHAASRKMVQTNWVLGPSIFGDGSTWPAPYGREPDEELRAYGAELFAVAQKLLNEGKLRNHPLHIIEGGMDAVAKGIETVRSGKMSGQKLVIKLI

SEQ ID NO: 19193 - DNA, 923 bp, Muscodor strobelii
  misc_feature: SGI cDNA ID NO. 566450
  misc_feature: Reduced expression when VOC is produced
  misc_feature: Encodes the peptide sequence at SEQ ID NO 19194
atggcggcagcggcgtcatcggcgtcgtcaacgcgcgagggcgtcaaccccctgcgcccctactacatcccgcccaccatcggcgagcagacgcgaccgatgcccacctcgtcgtcgccctccagtgctccctcggcgggccgatacgcctccaaggcgcgcgacatgttccccgacctcgactacaaagaccacctcgacgacatcagcccctccaccatccagtccctcaagcacttcgtcgacgacctgctgtggaagtacacgtccgtgctcatggcccagcccttcgaggtcgccaagaccgtcctccaggcccggctgcaggacgacctcggcgccctgcacgccgatcccgtgcgcctcgacacacggcccgacataatactgagccctaggaactccgtgtatggcagctctatgtatggtgacatgggacatcgccctacacccacctcggctggagcagcagagtctgccaccgcgaatccgtggaacgcaccgcgctcgcgtgcccacgaccacgaccacgacgaccaccgctaccccgactactccgactcggaccccgacgagccctcgtacttcacctccaacgccccctacacgcccactccctctgcttctgcttcttcccgcgcgcggcgccggcgaccgtcaaccacaccgcccgagtcgcccaggatcaacgccaagggcgccgtgctcgcccaccagctcgtcctgcgccggcccgactccatcctcgacgtcgtctcgcagctgtgggccaaggagtcggcctggggcgtctggaaggccaccaacgccaccttcgtctacacggtgctgcagtcgctgctcgagaactggggccgcagcctgctgagcgccctgctcaacgtgcccgacctcggcgtcaaggatgacgtcgagcgcctcgt

SEQ ID NO: 19194 - protein, 307 aa, Muscodor strobelii
  misc_feature: SGI Peptide ID NO. 566450
  misc_feature (9)..(307): NCBI GI: 261357956 Blast Desc: mitochondrial fusion and transport protein Ugo1 [Verticillium albo-atrum VaMs.102]
  misc_feature (9)..(307): NCBI GI: 256731433 Blast Desc: [Nectria haematococca mpVI 77-13-4]
  misc_feature (14)..(307): NCBI GI: 171692955 Blast Desc: protein product [Podospora anserina] gi|170946426|emb|CAP73227.1| protein product [Podospora anserina]
  misc_feature (9)..(307): NCBI GI: 46123467 Blast Desc: FG06111.1 [Gibberella zeae PH-1]
  misc_feature (13)..(307): NCBI GI: 85089733 Blast Desc: NCU07793 [Neurospora crassa OR74A] gi|12718357|emb|CAC28592.1| conserved [Neurospora crassa] gi|28919404|gb|EAA28848.1| conserved [Neurospora crassa OR74A]
  misc_feature (9)..(307): NCBI GI: 39976217 Blast Desc: MGG_05965 [Magnaporthe grisea 70-15] gi|145011763|gb|EDJ96419.1| MGG_05965 [Magnaporthe grisea 70-15]
  misc_feature (13)..(307): NCBI GI: 116198877 Blast Desc: CHGG_07594 [Chaetomium globosum CBS 148.51] gi|88178873|gb|EAQ86341.1| CHGG_07594 [Chaetomium globosum CBS 148.51]
  misc_feature (9)..(300): NCBI GI: 189206982 Blast Desc: conserved [Pyrenophora tritici-repentis Pt-1C-BFP] gi|187975918|gb|EDU42544.1| conserved [Pyrenophora tritici-repentis Pt-1C-BFP]
  misc_feature (9)..(304): NCBI GI: 156059512 Blast Desc: SS1G_03768 [Sclerotinia sclerotiorum 1980] gi|154701555|gb|EDO01294.1| SS1G_03768 [Sclerotinia sclerotiorum 1980]
  misc_feature (9)..(300): NCBI GI: 154290874 Blast Desc: BC1G_15369 [Botryotinia fuckeliana B05.10] gi|150847188|gb|EDN22381.1| BC1G_15369 [Botryotinia fuckeliana B05.10]
  misc_feature: Useful for introducing or modulating the production of volatile compounds
MAAAASSASSTREGVNPLRPYYIPPTIGEQTRPMPTSSSPSSAPSAGRYASKARDMFPDLDYKDHLDDISPSTIQSLKHFVDDLLWKYTSVLMAQPFEVAKTVLQARLQDDLGALHADPVRLDTRPDIILSPRNSVYGSSMYGDMGHRPTPTSAGAAESATANPWNAPRSRAHDHDHDDHRYPDYSDSDPDEPSYFTSNAPYTPTPSASASSRARRRRPSTTPPESPRINAKGAVLAHQLVLRRPDSILDVVSQLWAKESAWGVWKATNATFVYTVLQSLLENWGRSLLSALLNVPDLGVKDDVERL

SEQ ID NO: 19195 - DNA, 1187 bp, Muscodor strobelii
  misc_feature: SGI EST ID NO. CUFF.44980.0
  misc_feature: Variant of the nucleotide sequence at SEQ ID NO 19193
atttgattaatctgaagattggcatccgcgctttcatgcgtctccccaaccagccccaattccatcctccacatcatcctcaccatactgcatacctaaactatacccagacatacgcctgattctcggtaccgattcacatctcctgcgcacacggccaccactagtacactgcggaccctgcatctcgaacccgctcgatgatgctttttcatcacttttcgtagagccgtcttcaactcccccgcctcgcaaaacagcggccatggcggcagcggcgtcatcggcgtcgtcaacgcgcgagggcgtcaaccccctgcgcccctactacatcccgcccaccatcggcgagcagacgcgaccgatgcccacctcgtcgtcgccctccagtgctccctcggcgggccgatacgcctccaaggcgcgcgacatgttccccgacctcgactacaaagaccacctcgacgacatcagcccctccaccatccagtccctcaagcacttcgtcgacgacctgctgtggaagtacacgtccgtgctcatggcccagcccttcgaggtcgccaagaccgtcctccaggcccggctgcaggacgacctcggcgccctgcacgccgatcccgtgcgcctcgacacacggcccgacataatactgagccctaggaactccgtgtatggcagctctatgtatggtgacatgggacatcgccctacacccacctcggctggagcagcagagtctgccaccgcgaatccgtggaacgcaccgcgctcgcgtgcccacgaccacgaccacgacgaccaccgctaccccgactactccgactcggaccccgacgagccctcgtacttcacctccaacgccccctacacgcccactccctctgcttctgcttcttcccgcgcgcggcgccggcgaccgtcaaccacaccgcccgagtcgcccaggatcaacgccaagggcgccgtgctcgcccaccagctcgtcctgcgccggcccgactccatcctcgacgtcgtctcgcagctgtgggccaaggagtcggcctggggcgtctggaaggccaccaacgccaccttcgtctacacggtgctgcagtcgctgctcgagaactggggccgcagcctgctgagcgccctgctcaacgtgcccgacctcggcgtcaaggatgacgtcgagcgcctcg

SEQ ID NO: 19196 - DNA, 597 bp, Muscodor strobelii
  misc_feature: SGI cDNA ID NO. 566451
  misc_feature: Reduced expression when VOC is produced
  misc_feature: Encodes the peptide sequence at SEQ ID NO 19197
atgtccgcgcccagattatttcgtcctgctatgcggcgcatacggcatgtctcgccacctactgcacacttgtacactactcctgccactgccattgcttcgaggccattgtcttcggcggcccgtcgacatatgccgccctctgctgctctcaccaacgccacctacacatcttcgaccgtccgggccttcagcacatctccgatccgcagccacggtcatataacaccccctaaacctggcgaagaactgtacgtaaccttcatcgacaaggaggaccgcgaacacaagatcgccgtctccaagggtgacaacctgctcgacatcgcccaggccaacgacctcgagatggaaggcgcctgcggggggtcttgcgcctgctccacctgccacgtcatcgtcctcgacgagcagtactacgataagatggccgagcccgaggacgacgagaacgacatgctcgacctcgccttcggcctcaccgagacctcccgcctcggctgccagatccacatgaccaaagagctcgacggcctgcgcgtcaagttgccctccatgacccgcaacctccaagcctccgacttcactcccaagtaa

SEQ ID NO: 19197 - protein, 198 aa, Muscodor strobelii
  misc_feature: SGI Peptide ID NO. 566451
  misc_feature (89)..(174): Pfam Id: PF00111 Pfam Desc: 2Fe-2S iron-sulfur cluster binding domain
  misc_feature (1)..(196): NCBI GI: 46123469 Blast Desc: FG06112.1 [Gibberella zeae PH-1]
  misc_feature (1)..(195): NCBI GI: 116198879 Blast Desc: CHGG_07595 [Chaetomium globosum CBS 148.51] gi|88178874|gb|EAQ86342.1| CHGG_07595 [Chaetomium globosum CBS 148.51]
  misc_feature (1)..(195): NCBI GI: 85089735 Blast Desc: NCU07794 [Neurospora crassa OR74A] gi|28919405|gb|EAA28849.1| NCU07794 [Neurospora crassa OR74A]
  misc_feature (19)..(195): NCBI GI: 156059510 Blast Desc: SS1G_03767 [Sclerotinia sclerotiorum 1980] gi|154701554|gb|EDO01293.1| SS1G_03767 [Sclerotinia sclerotiorum 1980]
  misc_feature (33)..(198): NCBI GI: 239612232 Blast Desc: 2Fe-2S iron-sulfur cluster binding domain-containing protein [Ajellomyces dermatitidis ER-3]
  misc_feature (33)..(198): NCBI GI: 261202388 Blast Desc: 2Fe-2S iron-sulfur cluster binding domain-containing protein [Ajellomyces dermatitidis SLH14081] gi|239590505|gb|EEQ73086.1| 2Fe-2S iron-sulfur cluster binding
  misc_feature (56)..(198): NCBI GI: 226287161 Blast Desc: conserved [Paracoccidioides brasiliensis Pb18]
  misc_feature (6)..(198): NCBI GI: 119498775 Blast Desc: 2Fe-2S iron-sulfur cluster binding domain protein [Neosartorya fischeri NRRL 181] gi|119414309|gb|EAW24248.1| 2Fe-2S iron-sulfur cluster binding domain protein [Neosartorya
  misc_feature (7)..(198): NCBI GI: 225557141 Blast Desc: 2Fe-2S iron-sulfur cluster binding domain-containing protein [Ajellomyces capsulatus G186AR] gi|240277687|gb|EER41195.1| 2Fe-2S iron-sulfur cluster binding
  misc_feature (62)..(198): NCBI GI: 154290872 Blast Desc: electron transfer protein [Botryotinia fuckeliana B05.10] gi|150847187|gb|EDN22380.1| electron transfer protein [Botryotinia fuckeliana B05.10]
  misc_feature: Useful for introducing or modulating the production of volatile compounds
MSAPRLFRPAMRRIRHVSPPTAHLYTTPATAIASRPLSSAARRHMPPSAALTNATYTSSTVRAFSTSPIRSHGHITPPKPGEELYVTFIDKEDREHKIAVSKGDNLLDIAQANDLEMEGACGGSCACSTCHVIVLDEQYYDKMAEPEDDENDMLDLAFGLTETSRLGCQIHMTKELDGLRVKLPSMTRNLQASDFTPK

SEQ ID NO: 19198 - DNA, 6084 bp, Muscodor strobelii
  misc_feature: SGI EST ID NO. CUFF.44986.0
  misc_feature: Variant of the nucleotide sequence at SEQ ID NO 19196
ttttctgttgcgtctctcagctcgtccaatcgtcgcatccgcattttgcatttcccactccgacaactttctctctcgagccctcccattgcagatcaccatcgttggctgttaattgactttgttgtccctactgcatggtccgctgcgtctgttaatctcaggcgcttcggctcattggccattatcggctcgagaccttggataaccgcgacaacaattgcgataggttggtttctcaccaacatcgaacctcgttgacacacatcggaccaacagttcaactctgcgatccaacagcttgtaccctcaacctgctgcccctttggcattgaccatttaatcccgatatcctctttctataccattcttattttttttgctcttgtcgaatcgaccccatctcgtccgaacacctccgtcatgtccgcgcccagattatttcgtcctgctatgcggcgcatacggcatgtctcgccacctactgcacacttgtacactactcctgccactgccattgcttcgaggccattgtcttcggcggcccgtcgacatatgccgccctctgctgctctcaccaacgccacctacacatcttcgaccgtccgggccttcagcacatctccgatccgcagccacggtcatataacaccccctaaacctggcgaagaactgtacgtaaccttcatcgacaaggaggaccgcgaacacaagatcgccgtctccaagggtgacaacctgctcgacatcgcccaggccaacgacctcgagatggaaggcgcctgcggggggtcttgcgcctgctccacctgccacgtcatcgtcctcgacgagcagtactacgataagatggccgagcccgaggacgacgagaacgacatgctcgacctcgccttcggcctcaccgagacctcccgcctcggctgccagatccacatgaccaaagagctcgacggcctgcgcgtcaagttgccctccatgacccgcaacctccaagcctccgacttcactcccaagtaacaataacaatacgtcccagtgagatatgtatgataaatgtagtagaagaggtgtggtcgctgttcgatgtactagcgagcaaggaagacgagtggaggagatgtccaggcgacaccgatagaagtaagccctgcggcatcacgacatagtgtatatcaagaggatatgatggaaccttgcatatatacatgtaccccttggcctgacatggcgccatactgtacaagtcacatgtaccataatcacgaaaaacgcaagaggaagaggaacctctgcatgagcatgagcatgaccatgaccatgagcatctcaaagcagccatacatagactcaactccaaagtggccgtggcctacacaacccggccccgtacatcatgcatacctcgtacgcaggtctatatatcccgtgcccatcgctgtttctgccgtgtccttcatgtctctcgtctcacgcttcctggagcccgcccttcttaagcttgccgccgccgcgggcgagggtgtcgaggaacgcctccttggtcatctcctgcaccttctccttgcgccgtgccaccccgacgatgccctcgccccgcgccctgccttcggcctcatgtgccttctcctgcgcctcacgcactgcacggaaccatacgatgactgtgaagcaatcctccagtgtcagtgtctatgattcatgacgattgcgtggacggagcaacgactcaaaggaagcgaggaaaaactagacactcaccacctttatgggccgtcttgcgcagccgcctctccgtctgcaggatctcgcccgtcgacgtgttctcgtccataccgcccatcatcacatccttgacccgccccttttcctgcgccagcagcttcttgtcgcgcctacagccaggccgaaagggattagcatgaagatgcgaggcagtgcatggtgtctgcatggataggtgggggaagatgaataaatcaggcaaaaagaacgcacagcagttttctggccttggcttctaggccggcgtccacgatctcacggctcgccttctgagcgtcgacactgcgggacaggatggcgtcgtgcttcttggcgttggagagccccgttgacaggatcttttggagggaggtagagaaagccgaggggtcgttgcgcttggacttttgtctcctggggccagcttctgcgctctcgtctgcatcttgatcgtcgcttatatcgtcgtcgtcttcatcctcatcctcattctcgtcatcatcctctccgctgtcactggcttggggtttccccgtagacttcttcttgggcaatgatttgacagatggcgcaattgtgctgacttgggcgtcagagtcagagtcggaggtgtgatcagaatcggagagagaggcaacatcgtcgactatggcgttgtcgaggtcgtcctcgtcgctgttgtactgcgatggcctcttctgcttcttggcgggcctctgttgattgaggccgtcgacgtgacttcgcttcttgagagaggcgccagccatagtgggcgagatgtgctgtgttgctaattgatcaattcttgagtggccgaatggtattcagatttgtcggaggggcgatgtactcggtatgaattggtgtccggtttgaggtggcgcgatgaggttgagatgttgtatgttgtagaccacaccagatggtcccgcccaaaaaaaagattggagctggatccttgagtgttatccgataagaagctttcccagtggttagtggggttgaggcaagcgtcggcgcattagcctagtcaaggcccgtggcgcgtcttagactcccttgactcccctcaattcccaatagtaggtcccaattacatctgcactctccgccgttgcgggtagattcccactggtgcggagtgcggggaagctctccaaaactcatgatgaaacataaggtacatggcacaacgaggcaaagaacggcagagcgcagagtggcacggattaccgttgacggaaagaatagctctcccattggctaataacaaggctggggaactcgaaattcttggaaaactacaggaacagctatacataagggtcccacgtcgcatctcttcaatctcccgtccttgcgtacgacctactactaaccttgcaccacttcactcgccgagactcgctgagcctcactcaagagtccagtactttaaatgaggaccggcccttctctcctgagctctggcatgtacacgtgtctcatctgtccttgctatgacccaatgacaccagcctgtgaccaacgctctgtaagatagaatcatcgtcatctctctctcccgagaaggggagatagatgcattgcccgccatgtcggcttcgtttgcacgcacacgactgagctcacatgtacgcttcacggcgttgacaagctctcgtccatacttgtcgacgccgtcctttcgcaacgctgctgtcgcgtactctcaagcctcatctcaatcctcacctaaatctttccgcaaaatcaaacaaaatgccccatccacagctccatccacatcgccggcgcatctgttgaatatcgacatcttgaaagcagggacaaccatcgctggcaagaacggcgacggttgggtcctcagcaacccggccgactctgaccagcaccatctggtctaccagattccagctgcatcaccgccagacttcgactcagactcaaactcagacctagactcggtgtatttccccaccaacctcgtcgccctccgcgacgcctgcgcgtgctctacctgtgtcgacgccgactcgggccagaagcgcttcgctaccgctgatgtgccagacgccctgcgcatcaaggacgccatctgcgccgacgacggcagtctgcacctcacctggaaccaagacttcttcaccggcgccgaccacccttcggtctactccccgcacctctggctgcgcgccaataactcgtggtcccgcgcgtggaaccagcaaaacccgaggcctcgcgcgtgggacctccaactctgggaccgtggcggcatgaccagcctcgcccccatctacgcctacgacgacttcgcccgcgacggcgcaccgtacgaggccgccctgcagaccctctacagatacggcctcgtcatcctccgcgacgtgccaccctccgagtctgccgtcgaggacgttgcctcccgcctcggcgagctgcagctcaccttgtacggcctcacctgggacgtcaagtccaagccgcgcgccgagaacgtcgcctacaccagcgcctacctcggcctgcaccaggacttgttgtacctgcagaatgtgccccgtctccaggtcctccactgtctccagaacacgtgcgacggcggcgagtccctcttctgcgacggccggcaccttggcaaccagctgcacatgctggtccagcgtgatcgcgacactatgcccatccattaccccatccgatatcactacaagaagaacggccaccactaccagtactcgcgtccggtctggaacaaaggattgctctggtggtctccgcccttccaggatccctaccagccatctttccttacccgagccaagacagccgagtggtacaagatggctcgcagcatcaagcacatgaccgaggatgatgccaacgtgtacgaatacaaaatgcagccgggcgagtgcgtcatattcgacaaccgccgcatcctgcacggccgtcgggccttcgacacggccaccggcgagaggtggctcaagggtgcctacgtcgagaactcttcccaccagagcaagctacgctcggtgtttcccgagctggcccagctcgaaatcccttggttgtgaacctatccagttcacatcagtgctggacaaggaccgagatggatctacgcctagactacttggctgggaaccccctttctaggtaagcatgccactccagtgattgtgtctagtttggaaattcatccttcgatgtgaaatgccgaggcagaccaaagtgaatatgtgatgcatagtacgagggcaccgccagggaggcacgacatttggaatccaaggcattcaatgctacagggaaaagtgtggttacatcagatagtggtagtcagaatcataaggtaggcacaagcactaatgttgacgcgttatgagcgcttgctcatagtgacggatttcatgtcattcatatttcaagagcgggaatacccgtctatgatagtctctgcgaatggtgtttgatttgtgcagcatttgctttccatgttgcccctgttcatcgaggtccttcaagctattgtatctgtctagtggcctagatgttgagaataatgaagctcgtcgacatggccggcaacttgtcaattgctaattggccatcgtctaaccgccacgatagccctccgaaagcgacagagtccaaactggtcggagccacgggtaaggcgatagaaaccggctcgttgatatcgtcatctacaccccagaccaccgagaccatcatctcttgccccacgatccaatacgccacatccagcaactcatacccagcgatagataaccggccaggtttcccactgagcagaaagtcgctgacgggtgaggtcgtaaccacgttggccatctgcgagtgcacatcgaacagcaagttggtgctcggccacgtccagccgaagatgcccgtagcccctcggttgaatgcgagtgcgttcatgacccgcgcctcgtccggtgttgggtctcgagcccagtagtcctcgccgtgaaagacctgcgtgttgtgaaacttggggagcggccagcggcctagccagctctcgtatttctccaggtcgtcgagccggctcggtacgtcttgcacgccgccgttgcagttgtcgcagccgcagtcccccagcgtgcgattgcaagccgtgccccacttcgagaacgtgctgttgatgccgatcggatacacgtcttccatcaagatgtcgccaccctccgagtacgccccgaagtagtaatcttggcagttgagcgtcacggctaccggatggtacgggtccagcgagtggatgagcgcctgcgccgcggg

SEQ ID NO: 19199 - DNA, 864 bp, Muscodor strobelii
  misc_feature: SGI cDNA ID NO. 566452
  misc_feature: Encodes the peptide sequence at SEQ ID NO 19200
atggctggcgcctctctcaagaagcgaagtcacgtcgacggcctcaatcaacagaggcccgccaagaagcagaagaggccatcgcagtacaacagcgacgaggacgacctcgacaacgccatagtcgacgatgttgcctctctctccgattctgatcacacctccgactctgactctgacgcccaagtcagcacaattgcgccatctgtcaaatcattgcccaagaagaagtctacggggaaaccccaagccagtgacagcggagaggatgatgacgagaatgaggatgaggatgaagacgacgacgatataagcgacgatcaagatgcagacgagagcgcagaagctggccccaggagacaaaagtccaagcgcaacgacccctcggctttctctacctccctccaaaagatcctgtcaacggggctctccaacgccaagaagcacgacgccatcctgtcccgcagtgtcgacgctcagaaggcgagccgtgagatcgtggacgccggcctagaagccaaggccagaaaactgctgcgcgacaagaagctgctggcgcaggaaaaggggcgggtcaaggatgtgatgatgggcggtatggacgagaacacgtcgacgggcgagatcctgcagacggagaggcggctgcgcaagacggcccataaaggtgtcatcgtatggttccgtgcagtgcgtgaggcgcaggagaaggcacatgaggccgaaggcagggcgcggggcgagggcatcgtcggggtggcacggcgcaaggagaaggtgcaggagatgaccaaggaggcgttcctcgacaccctcgcccgcggcggcggcaagcttaagaagggcgggctccaggaagcgtga

SEQ ID NO: 19200 - protein, 287 aa, Muscodor strobelii
  misc_feature: SGI Peptide ID NO. 566452
  misc_feature (130)..(274): Pfam Id: PF07890 Pfam Desc: Rrp15p
  misc_feature (1)..(273): NCBI GI: 116198881 Blast Desc: CHGG_07596 [Chaetomium globosum CBS 148.51] gi|88178875|gb|EAQ86343.1| CHGG_07596 [Chaetomium globosum CBS 148.51]
  misc_feature (1)..(273): NCBI GI: 171692959 Blast Desc: protein product [Podospora anserina] gi|170946428|emb|CAP73229.1| protein product [Podospora anserina]
  misc_feature (1)..(273): NCBI GI: 46123471 Blast Desc: FG06113.1 [Gibberella zeae PH-1]
  misc_feature (1)..(287): NCBI GI: 156059508 Blast Desc: SS1G_03766 [Sclerotinia sclerotiorum 1980] gi|154701553|gb|EDO01292.1| SS1G_03766 [Sclerotinia sclerotiorum 1980]
  misc_feature (1)..(287): NCBI GI: 154290870 Blast Desc: BC1G_15367 [Botryotinia fuckeliana B05.10] gi|150847186|gb|EDN22379.1| BC1G_15367 [Botryotinia fuckeliana B05.10]
  misc_feature (41)..(273): NCBI GI: 85089737 Blast Desc: NCU07795 [Neurospora crassa OR74A] gi|28919406|gb|EAA28850.1| [Neurospora crassa OR74A]
  misc_feature (120)..(287): NCBI GI: 39976221 Blast Desc: MGG_05963 [Magnaporthe grisea 70-15] gi|145011765|gb|EDJ96421.1| MGG_05963 [Magnaporthe grisea 70-15]
  misc_feature (88)..(282): NCBI GI: 169624361 Blast Desc: SNOG_15440 [Phaeosphaeria nodorum SN15] gi|160705154|gb|EAT77105.2| SNOG_15440 [Phaeosphaeria nodorum SN15]
  misc_feature (1)..(287): NCBI GI: 146324028 Blast Desc: DUF1665 domain protein [Aspergillus fumigatus Af293] gi|129556359|gb|EAL85917.2| DUF1665 domain protein [Aspergillus fumigatus Af293] gi|159126119|gb|EDP51235.1| DUF1665 domain
  misc_feature (1)..(278): NCBI GI: 226277641 Blast Desc: conserved [Paracoccidioides brasiliensis Pb01]
MAGASLKKRSHVDGLNQQRPAKKQKRPSQYNSDEDDLDNAIVDDVASLSDSDHTSDSDSDAQVSTIAPSVKSLPKKKSTGKPQASDSGEDDDENEDEDEDDDDISDDQDADESAEAGPRRQKSKRNDPSAFSTSLQKILSTGLSNAKKHDAILSRSVDAQKASREIVDAGLEAKARKLLRDKKLLAQEKGRVKDVMMGGMDENTSTGEILQTERRLRKTAHKGVIVWFRAVREAQEKAHEAEGRARGEGIVGVARRKEKVQEMTKEAFLDTLARGGGKLKKGGLQEA

SEQ ID NO: 19201 - DNA, 7189 bp, Muscodor strobelii
  misc_feature: SGI EST ID NO. CUFF.44987.1
  misc_feature: Variant of the nucleotide sequence at SEQ ID NO 19199
cgctgctagtaatgaagcaatcaccctgcgcatagacgtaatagacttgccgcgtcacgggaggccacgatctagacacacatatttgaacatcgtgtatcatggtcttaaggagctcccatgtttcgacaattttaatgaatcctatctaaacacagtccaacctccgctccccggaacagaagcaccgggcacgtttgcttatgcagttacacaacaccgctacacatattttagcagcttaccatcatgagatttgccgtagtttcaccaacattatggtgtctgatctcaatctggactctggcagctgcccaggcagatgagccagacactggcaatcacccggattggccacgttggtgtggcaaagtctacgagtcggggtatccgtcttttgagccaggtggtgagactgtacagccgcccacgaatgactcgacctatctttacatgcagttcaagccgcggtatagcttgtatcttgacacggaatccacggcctcgttcgttgtgaatgctgctttgtcaccgtggttcggagttccgtatacaaatgagagcattgagggcactggtgactatccgacagacttgagcttcgagattaagctagctgataccgaggaactgttggtcgagggtaccatcggcgtcaacgagacgggaagagaatacaaatttgacctcgcgggtctcacgcctagcaggaatccctacggtgtaacgctaagcgggtcgtctgccgatggcagtgtgaaatacacggcgacgagcgagctcgtatatctcaccgacaacccctcggtgacgaaaattgatcatctcaagggcagcctcttgttcaagaacccctccactaacgataagttcgtcccattcttaccgtacggatattatgggctatataatggatcaaacgacactgcggcctctgaagactttgtccgaaactatacgactggtggagcaggcttgaattccatcatctcgctcgctgggttcgcagacacaaatccagtgtatgatagtatggacgccgcggatctgcgcttcatgtttgacttgagaggttcatacaaaaatctcaccgataccgagcagcgcgtgaatacgatcaagaaccacacgtcacttttcgcgtattggacagccgacgagcctgatggctggcaagtgcccttcgacacgacgcccgcggcgcaggcgctcatccactcgctggacccgtaccatccggtagccgtgacgctcaactgccaagattactacttcggggcgtactcggagggtggcgacatcttgatggaagacgtgtatccgatcggcatcaacagcacgttctcgaagtggggcacggcttgcaatcgcacgctgggggactgcggctgcgacaactgcaacggcggcgtgcaagacgtaccgagccggctcgacgacctggagaaatacgagagctggctaggccgctggccgctccccaagtttcacaacacgcaggtctttcacggcgaggactactgggctcgagacccaacaccggacgaggcgcgggtcatgaacgcactcgcattcaaccgaggggctacgggcatcttcggctggacgtggccgagcaccaacttgctgttcgatgtgcactcgcagatggccaacgtggttacgacctcacccgtcagcgactttctgctcagtgggaaacctggccggttatctatcgctgggtatgagttgctggatgtggcgtattggatcgtggggcaagagatgatggtctcggtggtctggggtgtagatgacgatatcaacgagccggtttctatcgccttacccgtggctccgaccagtttggactctgtcgctttcggagggctatcgtggcggttagacgatggccaattagcaattgacaagttgccggccatgtcgacgagcttcattattctcaacatctaggccactagacagatacaatagcttgaaggacctcgatgaacaggggcaacatggaaagcaaatgctgcacaaatcaaacaccattcgcagagactatcatagacgggtattcccgctcttgaaatatgaatgacatgaaatccgtcactatgagcaagcgctcataacgcgtcaacattagtgcttgtgcctaccttatgattctgactaccactatctgatgtaaccacacttttccctgtagcattgaatgccttggattccaaatgtcgtgcctccctggcggtgccctcgtactatgcatcacatattcactttggtctgcctcggcatttcacatcgaaggatgaatttccaaactagacacaatcactggagtggcatgcttacctagaaagggggttcccagccaagtagtctaggcgtagatccatctcggtccttgtccagcactgatgtgaactggataggttcacaaccaagggatttcgagctgggccagctcgggaaacaccgagcgtagcttgctctggtgggaagagttctcgacgtaggcacccttgagccacctctcgccggtggccgtgtcgaaggcccgacggccgtgcaggatgcggcggttgtcgaatatgacgcactcgcccggctgcattttgtattcgtacacgttggcatcatcctcggtcatgtgcttgatgctgcgagccatcttgtaccactcggctgtcttggctcgggtaaggaaagatggctggtagggatcctggaagggcggagaccaccagagcaatcctttgttccagaccggacgcgagtactggtagtggtggccgttcttcttgtagtgatatcggatggggtaatggatgggcatagtgtcgcgatcacgctggaccagcatgtgcagctggttgccaaggtgccggccgtcgcagaagagggactcgccgccgtcgcacgtgttctggagacagtggaggacctggagacggggcacattctgcaggtacaacaagtcctggtgcaggccgaggtaggcgctggtgtaggcgacgttctcggcgcgcggcttggacttgacgtcccaggtgaggccgtacaaggtgagctgcagctcgccgaggcgggaggcaacgtcctcgacggcagactcggagggtggcacgtcgcggaggatgacgaggccgtatctgtagagggtctgcagggcggcctcgtacggtgcgccgtcgcgggcgaagtcgtcgtaggcgtagatgggggcgaggctggtcatgccgccacggtcccagagttggaggtcccacgcgcgaggcctcgggttttgctggttccacgcgcgggaccacgagttattggcgcgcagccagaggtgcggggagtagaccgaagggtggtcggcgccggtgaagaagtcttggttccaggtgaggtgcagactgccgtcgtcggcgcagatggcgtccttgatgcgcagggcgtctggcacatcagcggtagcgaagcgcttctggcccgagtcggcgtcgacacaggtagagcacgcgcaggcgtcgcggagggcgacgaggttggtggggaaatacaccgagtctaggtctgagtttgagtctgagtcgaagtctggcggtgatgcagctggaatctggtagaccagatggtgctggtcagagtcggccgggttgctgaggacccaaccgtcgccgttcttgccagcgatggttgtccctgctttcaagatgtcgatattcaacagatgcgccggcgatgtggatggagctgtggatggggcattttgtttgattttgcggaaagatttaggtgaggattgagatgaggcttgagagtacgcgacagcagcgttgcgaaaggacggcgtcgacaagtatggacgagagcttgtcaacgccgtgaagcgtacatgtgagctcagtcgtgtgcgtgcaaacgaagccgacatggcgggcaatgcatctatctccccttctcgggagagagagatgacgatgattctatcttacagagcgttggtcacaggctggtgtcattgggtcatagcaaggacagatgagacacgtgtacatgccagagctcaggagagaagggccggtcctcatttaaagtactggactcttgagtgaggctcagcgagtctcggcgagtgaagtggtgcaaggttagtagtaggtcgtacgcaaggacgggagattgaagagatgcgacgtgggacccttatgtatagctgttcctgtagttttccaagaatttcgagttccccagccttgttattagccaatgggagagctattctttccgtcaacggtaatccgtgccactctgcgctctgccgttctttgcctcgttgtgccatgtaccttatgtttcatcatgagttttggagagcttccccgcactccgcaccagtgggaatctacccgcaacggcggagagtgcagatgtaattgggacctactattgggaattgaggggagtcaagggagtctaagacgcgccacgggccttgactaggctaatgcgccgacgcttgcctcaaccccactaaccactgggaaagcttcttatcggataacactcaaggatccagctccaatcttttttttgggcgggaccatctggtgtggtctacaacatacaacatctcaacctcatcgcgccacctcaaaccggacaccaattcataccgagtacatcgcccctccgacaaatctgaataccattcggccactcaagaattgatcaattagcaacacagcacatctcgcccactatggctggcgcctctctcaagaagcgaagtcacgtcgacggcctcaatcaacagaggcccgccaagaagcagaagaggccatcgcagtacaacagcgacgaggacgacctcgacaacgccatagtcgacgatgttgcctctctctccgattctgatcacacctccgactctgactctgacgcccaagtcagcacaattgcgccatctgtcaaatcattgcccaagaagaagtctacggggaaaccccaagccagtgacagcggagaggatgatgacgagaatgaggatgaggatgaagacgacgacgatataagcgacgatcaagatgcagacgagagcgcagaagctggccccaggagacaaaagtccaagcgcaacgacccctcggctttctctacctccctccaaaagatcctgtcaacggggctctccaacgccaagaagcacgacgccatcctgtcccgcagtgtcgacgctcagaaggcgagccgtgagatcgtggacgccggcctagaagccaaggccagaaaactgctgcgcgacaagaagctgctggcgcaggaaaaggggcgggtcaaggatgtgatgatgggcggtatggacgagaacacgtcgacgggcgagatcctgcagacggagaggcggctgcgcaagacggcccataaaggtgtcatcgtatggttccgtgcagtgcgtgaggcgcaggagaaggcacatgaggccgaaggcagggcgcggggcgagggcatcgtcggggtggcacggcgcaaggagaaggtgcaggagatgaccaaggaggcgttcctcgacaccctcgcccgcggcggcggcaagcttaagaagggcgggctccaggaagcgtgagacgagagacatgaaggacacggcagaaacagcgatgggcacgggatatatagacctgcgtacgaggtatgcatgatgtacggggccgggttgtgtaggccacggccactttggagttgagtctatgtatggctgctttgagatgctcatggtcatggtcatgctcatgctcatgcagaggttcctcttcctcttgcgtttttcgtgattatggtacatgtgacttgtacagtatggcgccatgtcaggccaaggggtacatgtatatatgcaaggttccatcatatcctcttgatatacactatgtcgtgatgccgcagggcttacttctatcggtgtcgcctggacatctcctccactcgtcttccttgctcgctagtacatcgaacagcgaccacacctcttctactacatttatcatacatatctcactgggacgtattgttattgttacttgggagtgaagtcggaggcttggaggttgcgggtcatggagggcaacttgacgcgcaggccgtcgagctctttggtcatgtggatctggcagccgaggcgggaggtctcggtgaggccgaaggcgaggtcgagcatgtcgttctcgtcgtcctcgggctcggccatcttatcgtagtactgctcgtcgaggacgatgacgtggcaggtggagcaggcgcaagaccccccgcaggcgccttccatctcgaggtcgttggcctgggcgatgtcgagcaggttgtcacccttggagacggcgatcttgtgttcgcggtcctccttgtcgatgaaggttacgtacagtctgtttttgggaggcgcgagcaaggtcagtggttggataacttgtttgcgcattacgtctctgccgaatgagggtggcggagggtcgcagatggaaagagattggtcttactcttcgccaggtttagggggtgttatatgaccgtggctgcggatcggagatgtgctgaaggcccggacggtcgaagatgtgtaggtggcgttggtgagagcagcagagggcggcatatgtcgacgggccgccgaagacaatggcctcgaagcaatggcagtggcaggagtagtgtacaagtgtgcagtaggtggcgagacatgccgtatgcgccgcatagcaggacgaaataatctgggcgcggacatgacggaggtgttcggacgagatggggtcgattcgacaagagcaaaaaaaataagaatggtatagaaagaggatatcgggattaaatggtcaatgccaaaggggcagcaggttgagggtacaagctgttggatcgcagagttgaactgttggtccgatgtgtgtcaacgaggttcgatgttggtgagaaaccaacctatcgcaattgttgtcgcggttatccaaggtctcgagccgataatggccaatgagccgaagcgcctgagattaacagacgcagcggaccatgcagtagggacaacaaagtcaattaacagccaacgatggtgatctgcaatgggagggctcgagagagaaagttgtcggagtgggaaatgcaaaatgcggatgcgacgattggacgagctgagagacgcaacagaaaa

SEQ ID NO: 19202 - DNA, 1488 bp, Muscodor strobelii
  misc_feature: SGI cDNA ID NO. 566453
  misc_feature: Encodes the peptide sequence at SEQ ID NO 19203
atgtcggcttcgtttgcacgcacacgactgagctcacatgtacgcttcacggcgttgacaagctctcgtccatacttgtcgacgccgtcctttcgcaacgctgctgtcgcgtactctcaagcctcatctcaatcctcacctaaatctttccgcaaaatcaaacaaaatgccccatccacagctccatccacatcgccggcgcatctgttgaatatcgacatcttgaaagcagggacaaccatcgctggcaagaacggcgacggttgggtcctcagcaacccggccgactctgaccagcaccatctggtctaccagattccagctgcatcaccgccagacttcgactcagactcaaactcagacctagactcggtgtatttccccaccaacctcgtcgccctccgcgacgcctgcgcgtgctctacctgtgtcgacgccgactcgggccagaagcgcttcgctaccgctgatgtgccagacgccctgcgcatcaaggacgccatctgcgccgacgacggcagtctgcacctcacctggaaccaagacttcttcaccggcgccgaccacccttcggtctactccccgcacctctggctgcgcgccaataactcgtggtcccgcgcgtggaaccagcaaaacccgaggcctcgcgcgtgggacctccaactctgggaccgtggcggcatgaccagcctcgcccccatctacgcctacgacgacttcgcccgcgacggcgcaccgtacgaggccgccctgcagaccctctacagatacggcctcgtcatcctccgcgacgtgccaccctccgagtctgccgtcgaggacgttgcctcccgcctcggcgagctgcagctcaccttgtacggcctcacctgggacgtcaagtccaagccgcgcgccgagaacgtcgcctacaccagcgcctacctcggcctgcaccaggacttgttgtacctgcagaatgtgccccgtctccaggtcctccactgtctccagaacacgtgcgacggcggcgagtccctcttctgcgacggccggcaccttggcaaccagctgcacatgctggtccagcgtgatcgcgacactatgcccatccattaccccatccgatatcactacaagaagaacggccaccactaccagtactcgcgtccggtctggaacaaaggattgctctggtggtctccgcccttccaggatccctaccagccatctttccttacccgagccaagacagccgagtggtacaagatggctcgcagcatcaagcacatgaccgaggatgatgccaacgtgtacgaatacaaaatgcagccgggcgagtgcgtcatattcgacaaccgccgcatcctgcacggccgtcgggccttcgacacggccaccggcgagaggtggctcaagggtgcctacgtcgagaactcttcccaccagagcaagctacgctcggtgtttcccgagctggcccagctcgaaatcccttggttgtga

SEQ ID NO: 19203 - protein, 495 aa, Muscodor strobelii
  misc_feature: SGI Peptide ID NO. 566453
  misc_feature (237)..(478): Pfam Id: PF02668 Pfam Desc: Taurine catabolism dioxygenase TauD, TfdA family
  misc_feature (253)..(347): Pfam Id: PF02668 Pfam Desc: Taurine catabolism dioxygenase TauD, TfdA family
  misc_feature (431)..(478): Pfam Id: PF02668 Pfam Desc: Taurine catabolism dioxygenase TauD, TfdA family
  misc_feature (123)..(487): NCBI GI: 145605485 Blast Desc: MGG_09250 [Magnaporthe grisea 70-15] gi|145013305|gb|EDJ97946.1| MGG_09250 [Magnaporthe grisea 70-15]
  misc_feature (134)..(494): NCBI GI: 171678804 Blast Desc: protein product [Podospora anserina] gi|170937472|emb|CAP62130.1| protein product [Podospora anserina]
  misc_feature (108)..(481): NCBI GI: 154295051 Blast Desc: BC1G_13654 [Botryotinia fuckeliana B05.10] gi|150844430|gb|EDN19623.1| BC1G_13654 [Botryotinia fuckeliana B05.10]
  misc_feature (132)..(488): NCBI GI: 46123151 Blast Desc: FG05953.1 [Gibberella zeae PH-1]
  misc_feature (132)..(488): NCBI GI: 256731471 Blast Desc: NECHADRAFT_48822 [Nectria haematococca mpVI 77-13-4]
  misc_feature (134)..(480): NCBI GI: 115401754 Blast Desc: conserved [Aspergillus terreus NIH2624] gi|114190406|gb|EAU32106.1| conserved [Aspergillus terreus NIH2624]
  misc_feature (123)..(481): NCBI GI: 189203269 Blast Desc: gamma-butyrobetaine dioxygenase [Pyrenophora tritici-repentis Pt-1C-BFP] gi|187985069|gb|EDU50557.1| gamma-butyrobetaine dioxygenase [Pyrenophora tritici-repentis
  misc_feature (132)..(481): NCBI GI: 67901162 Blast Desc: AN7568.2 [Aspergillus nidulans FGSC A4] gi|40742958|gb|EAA62148.1| AN7568.2 [Aspergillus nidulans FGSC A4] gi|259483888|tpe|CBF79645.1| TPA: Gamma-butyrobetaine FGSC
  misc_feature (99)..(480): NCBI GI: 242761350 Blast Desc: Gamma-butyrobetaine hydroxylase subfamily, [Talaromyces stipitatus ATCC 10500] gi|218723359|gb|EED22776.1| Gamma-butyrobetaine hydroxylase subfamily, [Talaromyces ATCC
  misc_feature (132)..(491): NCBI GI: 145250691 Blast Desc: An15g03210 [Aspergillus niger] gi|134082381|emb|CAK42396.1| protein product [Aspergillus niger]
  misc_feature (134)..(480): SWISSPROT Homolog: EC 1.14.11.1 Gamma-butyrobetaine dioxygenase
MSASFARTRLSSHVRFTALTSSRPYLSTPSFRNAAVAYSQASSQSSPKSFRKIKQNAPSTAPSTSPAHLLNIDILKAGTTIAGKNGDGWVLSNPADSDQHHLVYQIPAASPPDFDSDSNSDLDSVYFPTNLVALRDACACSTCVDADSGQKRFATADVPDALRIKDAICADDGSLHLTWNQDFFTGADHPSVYSPHLWLRANNSWSRAWNQQNPRPRAWDLQLWDRGGMTSLAPIYAYDDFARDGAPYEAALQTLYRYGLVILRDVPPSESAVEDVASRLGELQLTLYGLTWDVKSKPRAENVAYTSAYLGLHQDLLYLQNVPRLQVLHCLQNTCDGGESLFCDGRHLGNQLHMLVQRDRDTMPIHYPIRYHYKKNGHHYQYSRPVWNKGLLWWSPPFQDPYQPSFLTRAKTAEWYKMARSIKHMTEDDANVYEYKMQPGECVIFDNRRILHGRRAFDTATGERWLKGAYVENSSHQSKLRSVFPELAQLEIPWL

SEQ ID NO: 19204 - DNA, 6084 bp, Muscodor strobelii; identical to SEQ ID NO: 19198
  misc_feature: SGI EST ID NO. CUFF.44986.0
  misc_feature: Variant of the nucleotide sequence at SEQ ID NO 19202

SEQ ID NO: 19205 - DNA, 1707 bp, Muscodor strobelii
  misc_feature: SGI cDNA ID NO. 566454
  misc_feature: Encodes the peptide sequence at SEQ ID NO 19206
atgagatttgccgtagtttcaccaacattatggtgtctgatctcaatctggactctggcagctgcccaggcagatgagccagacactggcaatcacccggattggccacgttggtgtggcaaagtctacgagtcggggtatccgtcttttgagccaggtggtgagactgtacagccgcccacgaatgactcgacctatctttacatgcagttcaagccgcggtatagcttgtatcttgacacggaatccacggcctcgttcgttgtgaatgctgctttgtcaccgtggttcggagttccgtatacaaatgagagcattgagggcactggtgactatccgacagacttgagcttcgagattaagctagctgataccgaggaactgttggtcgagggtaccatcggcgtcaacgagacgggaagagaatacaaatttgacctcgcgggtctcacgcctagcaggaatccctacggtgtaacgctaagcgggtcgtctgccgatggcagtgtgaaatacacggcgacgagcgagctcgtatatctcaccgacaacccctcggtgacgaaaattgatcatctcaagggcagcctcttgttcaagaacccctccactaacgataagttcgtcccattcttaccgtacggatattatgggctatataatggatcaaacgacactgcggcctctgaagactttgtccgaaactatacgactggtggagcaggcttgaattccatcatctcgctcgctgggttcgcagacacaaatccagtgtatgatagtatggacgccgcggatctgcgcttcatgtttgacttgagaggttcatacaaaaatctcaccgataccgagcagcgcgtgaatacgatcaagaaccacacgtcacttttcgcgtattggacagccgacgagcctgatggctggcaagtgcccttcgacacgacgcccgcggcgcaggcgctcatccactcgctggacccgtaccatccggtagccgtgacgctcaactgccaagattactacttcggggcgtactcggagggtggcgacatcttgatggaagacgtgtatccgatcggcatcaacagcacgttctcgaagtggggcacggcttgcaatcgcacgctgggggactgcggctgcgacaactgcaacggcggcgtgcaagacgtaccgagccggctcgacgacctggagaaatacgagagctggctaggccgctggccgctccccaagtttcacaacacgcaggtctttcacggcgaggactactgggctcgagacccaacaccggacgaggcgcgggtcatgaacgcactcgcattcaaccgaggggctacgggcatcttcggctggacgtggccgagcaccaacttgctgttcgatgtgcactcgcagatggccaacgtggttacgacctcacccgtcagcgactttctgctcagtgggaaacctggccggttatctatcgctgggtatgagttgctggatgtggcgtattggatcgtggggcaagagatgatggtctcggtggtctggggtgtagatgacgatatcaacgagccggtttctatcgccttacccgtggctccgaccagtttggactctgtcgctttcggagggctatcgtggcggttagacgatggccaattagcaattgacaagttgccggccatgtcgacgagcttcattattctcaacatctag

SEQ ID NO: 19206 - protein, 568 aa, Muscodor strobelii
  misc_feature: SGI Peptide ID NO. 566454
  misc_feature (10)..(568): NCBI GI: 116206362 Blast Desc: CHGG_02474 [Chaetomium globosum CBS 148.51] gi|88183071|gb|EAQ90539.1| CHGG_02474 [Chaetomium globosum CBS 148.51]
  misc_feature (10)..(568): NCBI GI: 242805734 Blast Desc: conserved [Talaromyces stipitatus ATCC 10500] gi|218715218|gb|EED14640.1| conserved [Talaromyces stipitatus ATCC 10500]
  misc_feature (42)..(568): NCBI GI: 212538745 Blast Desc: conserved [Penicillium marneffei ATCC 18224] gi|210069270|gb|EEA23361.1| conserved [Penicillium marneffei ATCC 18224]
  misc_feature (10)..(568): NCBI GI: 39940740 Blast Desc: MGG_04870 [Magnaporthe grisea 70-15] gi|145010903|gb|EDJ95559.1| MGG_04870 [Magnaporthe grisea 70-15]
  misc_feature (11)..(568): NCBI GI: 85101460 Blast Desc: NCU04194 [Neurospora crassa OR74A] gi|28922694|gb|EAA31918.1| [Neurospora crassa OR74A]
  misc_feature (45)..(568): NCBI GI: 21622348 Blast Desc: [Neurospora crassa]
  misc_feature (47)..(568): NCBI GI: 171693547 Blast Desc: protein product [Podospora anserina] gi|170946722|emb|CAP73525.1| protein product [Podospora anserina]
  misc_feature (49)..(568): NCBI GI: 156044897 Blast Desc: SS1G_09637 [Sclerotinia sclerotiorum 1980] gi|154694032|gb|EDN93770.1| SS1G_09637 [Sclerotinia sclerotiorum 1980]
  misc_feature (49)..(514): NCBI GI: 154303454 Blast Desc: BC1G_09298 [Botryotinia fuckeliana B05.10] gi|150854609|gb|EDN29801.1| BC1G_09298 [Botryotinia fuckeliana B05.10]
  misc_feature (31)..(568): NCBI GI: 242813331 Blast Desc: conserved [Talaromyces stipitatus ATCC 10500] gi|218714484|gb|EED13907.1| conserved [Talaromyces stipitatus ATCC 10500]
MRFAVVSPTLWCLISIWTLAAAQADEPDTGNHPDWPRWCGKVYESGYPSFEPGGETVQPPTNDSTYLYMQFKPRYSLYLDTESTASFVVNAALSPWFGVPYTNESIEGTGDYPTDLSFEIKLADTEELLVEGTIGVNETGREYKFDLAGLTPSRNPYGVTLSGSSADGSVKYTATSELVYLTDNPSVTKIDHLKGSLLFKNPSTNDKFVPFLPYGYYGLYNGSNDTAASEDFVRNYTTGGAGLNSIISLAGFADTNPVYDSMDAADLRFMFDLRGSYKNLTDTEQRVNTIKNHTSLFAYWTADEPDGWQVPFDTTPAAQALIHSLDPYHPVAVTLNCQDYYFGAYSEGGDILMEDVYPIGINSTFSKWGTACNRTLGDCGCDNCNGGVQDVPSRLDDLEKYESWLGRWPLPKFHNTQVFHGEDYWARDPTPDEARVMNALAFNRGATGIFGWTWPSTNLLFDVHSQMANVVTTSPVSDFLLSGKPGRLSIAGYELLDVAYWIVGQEMMVSVVWGVDDDINEPVSIALPVAPTSLDSVAFGGLSWRLDDGQLAIDKLPAMSTSFIILNI

SEQ ID NO: 19207 - DNA, 7189 bp, Muscodor strobelii; identical to SEQ ID NO: 19201
  misc_feature: SGI EST ID NO. CUFF.44987.1
  misc_feature: Variant of the nucleotide sequence at SEQ ID NO 19205

SEQ ID NO: 19208 - DNA, 588 bp, Muscodor strobelii
  misc_feature: SGI cDNA ID NO. 566455
  misc_feature: Encodes the peptide sequence at SEQ ID NO 19209
atgcactacggcgtggtgtcgctccaacgatgttgcgacaaggccaatgcacccctattgcgcatccctgggaacacgggctgcgagatccagttctgcgatgtgcaacccgtcacatcatcatacacggagactatcgtctacggctatgctaccgggtccggcacagcgacaaagactccggcccctacggtgacgaagggcgcgtccataggcccgcctgacgatgtcacgaattgcatggcctttgtgtatgaaggaaatttgccagacgatgtgaaagccaaggtcagggacgtggattggtggaatgttgtcagggtctatgatgacgaattgagcgccgaggaagaagaaacaccagtggcagcgagcccggcgccggcgagctggacgactgccgccgaagacccgtgggatgcgtacttttccacctcgacagcatcagcaggtagccctacgactcaaccagacagtgcttcatcctcatcgcaggatcatgattctcgtgcagactcacatctgagtggcctcaagatgtggctgatggccgcattggctgtattgtggataatgatcgccttataa

SEQ ID NO: 19209 - protein, 195 aa, Muscodor strobelii
  misc_feature: SGI Peptide ID NO. 566455
MHYGVVSLQRCCDKANAPLLRIPGNTGCEIQFCDVQPVTSSYTETIVYGYATGSGTATKTPAPTVTKGASIGPPDDVTNCMAFVYEGNLPDDVKAKVRDVDWWNVVRVYDDELSAEEEETPVAASPAPASWTTAAEDPWDAYFSTSTASAGSPTTQPDSASSSSQDHDSRADSHLSGLKMWLMAALAVLWIMIAL

SEQ ID NO: 19210 - DNA, 1078 bp, Muscodor strobelii
  misc_feature: SGI EST ID NO. CUFF.44946.0
  misc_feature: Variant of the nucleotide sequence at SEQ ID NO 19208
tctcaatggaggaggatcaaatcgcggaatggaaatcgctatcttcttctcaacatcgttgtgaaccgacacccggatggacaacaaccttcgacctctattcgccagggaagcataccgagagctgactacctatctaatgtaaagaaaaatggctggtattctaaatagtctgtcggacagcacatgcaacacgcataatgcactcaagaatgtttcgggctacgcatgcggagtgacattcctgttcaaagatgcgtccgatccgccagatatgcactacggcgtggtgtcgctccaacgatgttgcgacaaggccaatgcacccctattgcgcatccctgggaacacgggctgcgagatccagttctgcgatgtgcaacccgtcacatcatcatacacggagactatcgtctacggctatgctaccgggtccggcacagcgacaaagactccggcccctacggtgacgaagggcgcgtccataggcccgcctgacgatgtcacgaattgcatggcctttgtgtatgaaggaaatttgccagacgatgtgaaagccaaggtcagggacgtggattggtggaatgttgtcagggtctatgatgacgaattgagcgccgaggaagaagaaacaccagtggcagcgagcccggcgccggcgagctggacgactgccgccgaagacccgtgggatgcgtacttttccacctcgacagcatcagcaggtagccctacgactcaaccagacagtgcttcatcctcatcgcaggatcatgattctcgtgcagactcacatctgagtggcctcaagatgtggctgatggccgcattggctgtattgtggataatgatcgccttataacaggaacaggagttcttccatctaccagttcttaaaaattatgcaagggtgatatcacgactaattgattccgacaaacagtgcgtgccaaggtggcagtcaggacaggagataaaataactggtaccaccgaataatacaccgcctaaagtaacgaataaacaggcgcgttttcgcctgatcataatccgaataatcaacaggattactctctaa

SEQ ID NO: 19211 - DNA, 549 bp, Muscodor strobelii
  misc_feature: SGI cDNA ID NO. 566456
  misc_feature: Encodes the peptide sequence at SEQ ID NO 19212
atgcccgacgaagttcgcgctcattttgccgccataccttggtgcgctcgccatcttgaccagccccacgttgtcgccaaagaaccgactagtagaactgcaaagcctacggctgaggatgccctatttgcagagacgctgaagacagacaaaacgatcagggcaatgctccagttcttcgaccggcctgtagctccaaaggaacgagtcgaggaggtcaaagcattcctcactctcggttgcgggttaaatgggtaccctggcgtgtgccatggggggctcgtcacgacgatattggacgaggtaatcggtcttctgattcctatcaacatggagcgcgagatgattctcagaggctcttacatgacagcctatctcaacacgacatttgtgaagcctgttcctacctctgccacagtgctggcacgggcgagctttactaaagtggaggggcgcaaatacttcgcgatcggctctatcgaagatgagaatggcgtcattcttgccaaagccgatgctctctttgttcagctcaagagcgcattatag

SEQ ID NO: 19212 - protein, 182 aa, Muscodor strobelii
  misc_feature: SGI Peptide ID NO. 566456
  misc_feature (8)..(182): NCBI GI: 261352324 Blast Desc: conserved [Verticillium albo-atrum VaMs.102]
  misc_feature (8)..(175): NCBI GI: 85090356 Blast Desc: NCU09853 [Neurospora crassa OR74A] gi|28919735|gb|EAA29141.1| [Neurospora crassa OR74A]
  misc_feature (1)..(179): NCBI GI: 169610399 Blast Desc: SNOG_08299 [Phaeosphaeria nodorum SN15] gi|111063455|gb|EAT84575.1| SNOG_08299 [Phaeosphaeria nodorum SN15]
  misc_feature (7)..(179): NCBI GI: 171694461 Blast Desc: protein product [Podospora anserina] gi|170947179|emb|CAP73984.1| protein product [Podospora anserina]
  misc_feature (3)..(180): NCBI GI: 189204834 Blast Desc: conserved [Pyrenophora tritici-repentis Pt-1C-BFP] gi|187985851|gb|EDU51339.1| conserved [Pyrenophora tritici-repentis Pt-1C-BFP]
  misc_feature (6)..(178): NCBI GI: 156060749 Blast Desc: SS1G_02517 [Sclerotinia sclerotiorum 1980] gi|154699921|gb|EDN99659.1| SS1G_02517 [Sclerotinia sclerotiorum 1980]
  misc_feature (4)..(179): NCBI GI: 145610400 Blast Desc: MGG_11096 [Magnaporthe grisea 70-15] gi|149209495|ref|XP_001522122.1| MGCH7_ch7g231 [Magnaporthe grisea 70-15] gi|86196186|gb|EAQ70824.1| MGCH7_ch7g231 grisea
  misc_feature (1)..(162): NCBI GI: 67522653 Blast Desc: AN1783.2 [Aspergillus nidulans FGSC A4] gi|40744803|gb|EAA63959.1| AN1783.2 [Aspergillus nidulans FGSC A4] gi|259487128|tpe|CBF85553.1| TPA: short-chain dehydrogenase,
  misc_feature (9)..(182): NCBI GI: 256726796 Blast Desc: NECHADRAFT_76148 [Nectria haematococca mpVI 77-13-4]
  misc_feature (9)..(182): NCBI GI: 46136353 Blast Desc: FG09692.1 [Gibberella zeae PH-1]
MPDEVRAHFAAIPWCARHLDQPHVVAKEPTSRTAKPTAEDALFAETLKTDKTIRAMLQFFDRPVAPKERVEEVKAFLTLGCGLNGYPGVCHGGLVTTILDEVIGLLIPINMEREMILRGSYMTAYLNTTFVKPVPTSATVLARASFTKVEGRKYFAIGSIEDENGVILAKADALFVQLKSAL

SEQ ID NO: 19213 - DNA, 912 bp, Muscodor strobelii
  misc_feature: SGI cDNA ID NO. 566458
  misc_feature: Encodes the peptide sequence at SEQ ID NO 19214
atgtcggtgtccaagacggctatcatcacgggtggtgccagtggtatgggcctagctgtggctcaagccctcaagacgaaatgcggttgggatattcatctctttgatctcaatccaacctctggccaggctgccgccgactcacttgcggccacatttcacaaggtcgatgtgaccaattacgactctctcggagcggccttcaagtctgcatattctaagaacaagagattggactttgtttttgccaatgcaggcatcgccgagcctggttcattctacgagaggcatgatgagataggagacggcgtgccaccgccacccaagttgcacgtcgtaagaatcctctacgatgccgtgataacgacatcgcatctagccctccattactttcggctgtcaccaaaaggtgtagataagaatctcgtcatgacggcgagctgcggtgctctctacccatcctacttctcagctttatattgtggtgccaaacatggcgttctgggcttcatgagggcgatagcgaagccgctgtggcaccgagaggggatccgtgtcaacgccgtctgccctggcaccgtcaagacggcgttgctgaccaaggacgagtggacgttcgtggaagaagacatgttcacgcccgtcgaaaagatcgccgaagccgtcatgatacttgtcgatggccgagacgacacgccggcggagaagacgaggatcgatggagaaccactggctgagcgacagggcatcttgtggggcgaggcaatcgaagtcagtggtgataatcactactaccgcgagagatcaaaatattgtgacgaaaagatggcagcagtgatgcaaaacacatacatcacacagctcccgggggatgagaatgctcgcgaggttaatgcagtacttgaaaagtag

SEQ ID NO: 19214 - protein, 303 aa, Muscodor strobelii
  misc_feature: SGI Peptide ID NO. 566458
  misc_feature (5)..(179): Pfam Id: PF00106 Pfam Desc: short chain dehydrogenase
  misc_feature (5)..(93): Pfam Id: PF00106 Pfam Desc: short chain dehydrogenase
  misc_feature (5)..(283): NCBI GI: 189208562 Blast Desc: 15-hydroxyprostaglandin dehydrogenase [Pyrenophora tritici-repentis Pt-1C-BFP] gi|187976707|gb|EDU43333.1| 15-hydroxyprostaglandin dehydrogenase [Pyrenophora Pt-1C-BFP]
  misc_feature (5)..(283): NCBI GI: 261353883 Blast Desc: 3-beta-hydroxysteroid dehydrogenase [Verticillium albo-atrum VaMs.102]
  misc_feature (3)..(283): NCBI GI: 169613482 Blast Desc: SNOG_09872 [Phaeosphaeria nodorum SN15] gi|160702734|gb|EAT83137.2| SNOG_09872 [Phaeosphaeria nodorum SN15]
  misc_feature (16)..(290): NCBI GI: 255931829 Blast Desc: Pc12g06280 [Penicillium chrysogenum Wisconsin 54-1255] gi|211582090|emb|CAP80255.1| Pc12g06280 [Penicillium chrysogenum Wisconsin 54-1255]
  misc_feature (7)..(282): NCBI GI: 238506169 Blast Desc: short-chain dehydrogenase, [Aspergillus flavus NRRL3357] gi|220688999|gb|EED45350.1| short-chain dehydrogenase, [Aspergillus flavus NRRL3357]
  misc_feature (7)..(275): NCBI GI: 145253973 Blast Desc: An18g00090 [Aspergillus niger] gi|134084057|emb|CAK43087.1| protein product [Aspergillus niger]
  misc_feature (7)..(282): NCBI GI: 169785195 Blast Desc: [Aspergillus oryzae RIB40] gi|83775806|dbj|BAE65925.1| protein product [Aspergillus oryzae]
  misc_feature (3)..(275): NCBI GI: 255940818 Blast Desc: Pc16g08590 [Penicillium chrysogenum Wisconsin 54-1255] gi|211585801|emb|CAP93529.1| Pc16g08590 [Penicillium chrysogenum Wisconsin 54-1255]
  misc_feature (1)..(264): NCBI GI: 256727819 Blast Desc: NECHADRAFT_28041 [Nectria haematococca mpVI 77-13-4]
  misc_feature (5)..(275): NCBI GI: 212537371 Blast Desc: short chain dehydrogenase/reductase, [Penicillium marneffei ATCC 18224] gi|210068583|gb|EEA22674.1| short chain dehydrogenase/reductase, [Penicillium marneffei ATCC 18224]
  misc_feature (5)..(216): SWISSPROT Homolog: EC 1.1.1.141 15-hydroxyprostaglandin dehydrogenase (NAD(+))
MSVSKTAIITGGASGMGLAVAQALKTKCGWDIHLFDLNPTSGQAAADSLAATFHKVDVTNYDSLGAAFKSAYSKNKRLDFVFANAGIAEPGSFYERHDEIGDGVPPPPKLHVVRILYDAVITTSHLALHYFRLSPKGVDKNLVMTASCGALYPSYFSALYCGAKHGVLGFMRAIAKPLWHREGIRVNAVCPGTVKTALLTKDEWTFVEEDMFTPVEKIAEAVMILVDGRDDTPAEKTRIDGEPLAERQGILWGEAIEVSGDNHYYRERSKYCDEKMAAVMQNTYITQLPGDENAREVNAVLEK

SEQ ID NO: 19215 - DNA, 1560 bp, Muscodor strobelii
  misc_feature: SGI EST ID NO. CUFF.44964.0
  misc_feature: Variant of the nucleotide sequence at SEQ ID NO 19213
cgtaacgagaggcggaattggccttgctcctgaaagcgaccaagccatagctccacaccgcacacaagggctcatcacactcaatggtgtcgagccaccgccgtcctcatctaagtagccacagaaacaacatatctacgaagagcgatgactggctaacaatatccgcggcaaaccatttcctgacgagcggggtcttacttcaaagtcgcatgttccatctctcgatgcaagttggggaagattgtccatcgcatgcaacatggcgggataatttccatctgggccatagaccacctagatatttagctgaacagcttcggcattcacgatgccgagcatagaacatcgtagccgttcatgtatttgcgacctattgccaataacgtagcatcgggaacatcgccatgtcggtgtccaagacggctatcatcacgggtggtgccagtggtatgggcctagctgtggctcaagccctcaagacgaaatgcggttgggatattcatctctttgatctcaatccaacctctggccaggctgccgccgactcacttgcggccacatttcacaaggtcgatgtgaccaattacgactctctcggagcggccttcaagtctgcatattctaagaacaagagattggactttgtttttgccaatgcaggcatcgccgagcctggttcattctacgagaggcatgatgagataggagacggcgtgccaccgccacccaagttgcacgtcgtaagaatcctctacgatgccgtgataacgacatcgcatctagccctccattactttcggctgtcaccaaaaggtgtagataagaatctcgtcatgacggcgagctgcggtgctctctacccatcctacttctcagctttatattgtggtgccaaacatggcgttctgggcttcatgagggcgatagcgaagccgctgtggcaccgagaggggatccgtgtcaacgccgtctgccctggcaccgtcaagacggcgttgctgaccaaggacgagtggacgttcgtggaagaagacatgttcacgcccgtcgaaaagatcgccgaagccgtcatgatacttgtcgatggccgagacgacacgccggcggagaagacgaggatcgatggagaaccactggctgagcgacagggcatcttgtggggcgaggcaatcgaagtcagtggtgataatcactactaccgcgagagatcaaaatattgtgacgaaaagatggcagcagtgatgcaaaacacatacatcacacagctcccgggggatgagaatgctcgcgaggttaatgcagtacttgaaaagtaggacagatcaacaatatgacattgaggaaccaacagcatgcaaatgtgcagcccgaactatagatcaatctcccccaagccaacaggcactcgtcatattttggccgcgcagacaaagcctattcaaagtcagggtcacttcagattgcagaatatttgtctggcattgcgacatgaaacgcgagttgtcaatttcgtagagcatataaatatgcgttgctgtgcccggcgttgaaggctcc

SEQ ID NO: 19216 - DNA, 548 bp, Muscodor strobelii
  misc_feature: SGI cDNA ID NO. 566459
  misc_feature: Encodes the peptide sequence at SEQ ID NO 19217
atgggcaaggcgtcagaccgcgacggtgtgcccgcagacgccgtgtcgctgcacagcaacgtcggcgtcggcgtcggcgagagctcggcgagcttccccttcaccgacgacgacgcgcccgagctcgacctcgacgacctgccgcccaactacaccgactcgctcgacgccgatgcctctgcctccgaacatgcgcccatgctgcctccccccaacagcgacatcaacagcaacagcaccacgatcagcacgcccgccgtcgcccccgccatgctcgccgtggtgcggccccgcgaaatcgacgccaccgtcgtcaaggaccagaatacgggcgccgaggcctggatcgccaagagcgtcgagaaccccgaagacctggccagctacgtgcagcggctggccctcacgcccccgcgcccctacgtcaagcttgtcggcagccactgcgagacgacccgcgaccgcgacggcaagactaagaagaccaccgtcgtcgacttcgacgtctcggtcgacctgaccccctacctctaccgcgacgcccaata

SEQ ID NO: 19217 - protein, 182 aa, Muscodor strobelii
  misc_feature: SGI Peptide ID NO. 566459
  misc_feature (2)..(180): NCBI GI: 171681529 Blast Desc: protein product [Podospora anserina] gi|170940723|emb|CAP65951.1| protein product [Podospora anserina]
  misc_feature (9)..(181): NCBI GI: 116203859 Blast Desc: CHGG_09813 [Chaetomium globosum CBS 148.51] gi|88175941|gb|EAQ83409.1| CHGG_09813 [Chaetomium globosum CBS 148.51]
  misc_feature (1)..(181): NCBI GI: 85092193 Blast Desc: NCU06926 [Neurospora crassa OR74A] gi|28920676|gb|EAA30037.1| [Neurospora crassa OR74A]
  misc_feature (7)..(180): NCBI GI: 261357992 Blast Desc: conserved [Verticillium albo-atrum VaMs.102]
  misc_feature (117)..(178): NCBI GI: 46139123 Blast Desc: FG11076.1 [Gibberella zeae PH-1]
  misc_feature (68)..(180): NCBI GI: 39955144 Blast Desc: MGG_08981 [Magnaporthe grisea 70-15] gi|145021060|gb|EDK05189.1| MGG_08981 [Magnaporthe grisea 70-15]
  misc_feature (118)..(178): NCBI GI: 256724874 Blast Desc: NECHADRAFT_66932 [Nectria haematococca mpVI 77-13-4]
  misc_feature (122)..(180): NCBI GI: 256727881 Blast Desc: NECHADRAFT_5512 [Nectria haematococca mpVI 77-13-4]
  misc_feature (13)..(177): NCBI GI: 169609671 Blast Desc: SNOG_07928 [Phaeosphaeria nodorum SN15] gi|160701893|gb|EAT84204.2| SNOG_07928 [Phaeosphaeria nodorum SN15]
  misc_feature (121)..(179): NCBI GI: 145236124 Blast Desc: [Aspergillus niger] gi|134075161|emb|CAK96474.1| [Aspergillus niger]
MGKASDRDGVPADAVSLHSNVGVGVGESSASFPFTDDDAPELDLDDLPPNYTDSLDADASASEHAPMLPPPNSDINSNSTTISTPAVAPAMLAVVRPREIDATVVKDQNTGAEAWIAKSVENPEDLASYVQRLALTPPRPYVKLVGSHCETTRDRDGKTKKTTVVDFDVSVDLTPYLYRDAQ

SEQ ID NO: 19218 - DNA, 956 bp, Muscodor strobelii
  misc_feature: SGI EST ID NO. CUFF.44970.0
  misc_feature: Variant of the nucleotide sequence at SEQ ID NO 19216
caggaatccacctgggcaggcaaccaccaaagatgaaacgccagtcccgcctccataaggtaggaggaactcttgtcagcacaggtctctcacctctgtctttcatcaccagcctatcgactacactctatcagtggatgtgacatctatccgattgaactcacaattcgcacctcatcagacattatatcctacacactggaatattttattgagaataatcatcatccatctgtttcgggacctcatacgtccaggcactagaccaattgccccacgccgtcagcaactacctgttatacacgggcaacttcagggtcactgtcaccgatcgctccctcattctttttcccccttcaaccttacctttcctttctacctttcgggataactgacgtctccattcgtaccatgggcaaggcgtcagaccgcgacggtgtgcccgcagacgccgtgtcgctgcacagcaacgtcggcgtcggcgtcggcgagagctcggcgagcttccccttcaccgacgacgacgcgcccgagctcgacctcgacgacctgccgcccaactacaccgactcgctcgacgccgatgcctctgcctccgaacatgcgcccatgctgcctccccccaacagcgacatcaacagcaacagcaccacgatcagcacgcccgccgtcgcccccgccatgctcgccgtggtgcggccccgcgaaatcgacgccaccgtcgtcaaggaccagaatacgggcgccgaggcctggatcgccaagagcgtcgagaaccccgaagacctggccagctacgtgcagcggctggccctcacgcccccgcgcccctacgtcaagcttgtcggcagccactgcgagacgacccgcgaccgcgacggcaagactaagaagaccaccgtcgtcgacttcgacgtctcggtcgacctgaccccctacctctaccgcgacgccca

SEQ ID NO: 19219 - DNA, 1008 bp, Muscodor strobelii
  misc_feature: SGI cDNA ID NO. 566460
  misc_feature: Reduced expression when VOC is produced
  misc_feature: Encodes the peptide sequence at SEQ ID NO 19220
ggctcccgccatcgctcccactcccgcgcctcctccagctattcgcgcgaacgcgagcgcgagcgcgaggccgcccgtgagcgtgagcgcgacatgtgggccctgcagcacgtgcgcgaggaccacgagcgggagctccaggccaagcgccgcgagtacaagcgcgaccaggaggccaagcagaaggagtacgagctcgagcgcgcccagaaagagctccacgagctccagctcgccgccaagatcgaacacgaggagaagcgccgcgagcggacggcccgcgaggagcgcgagttgcgcgaggcgaaaaaggagctcgactccatccgcgagaagaaggagcgcgacgagctggagcgtcgcgtcaagcagaagatcgacctcgaccgtctcaaggaggaggagaaggccctcgccgagaagcagcgccgagagaaggaggccaaagaggccgtcgagaaatacaagaaggacgaggccgcgcgccagctcaaagagaagcaggaagccgaggcgcgcgacaaagaatacaagcaacgcatgcaagagcagcttctcaagtccggcctcgacgagaaagccatcaacgacatcctcgccggcaagaagatcgacaaggagaaggagaagaagcccaagccgctgcagcctatccacgtcatcgacgacaagccccggcctacctacacgcgcatggcccggcgacacctctctctcgagaccttgcgcatctacgatatcgactacgtcatggaccccgatcccgaatacgtcttgatcaagagatgggtccccgagcaggagcaagatatcctctggcgacacaccaaagtcgtccgcgagcagcgggcgggcaagcttgtcctgcagatcgaagacaagaaagagaagaagcatcaccacggccatcacctcgaacccgaatttgaatgggtgcggaagaaggagcgtagaaggagtcgttctccatcgcttttgacctatctggccggcggccgaccagcctaa

SEQ ID NO: 19220 - protein, 335 aa, Muscodor strobelii
  misc_feature: SGI Peptide ID NO. 566460
  misc_feature (18)..(335): NCBI GI: 256734287 Blast Desc: NECHADRAFT_98623 [Nectria haematococca mpVI 77-13-4]
  misc_feature (63)..(335): NCBI GI: 261356554 Blast Desc: conserved [Verticillium albo-atrum VaMs.102]
  misc_feature (30)..(335): NCBI GI: 46108988 Blast Desc: FG01376.1 [Gibberella zeae PH-1]
  misc_feature (16)..(334): NCBI GI: 116192377 Blast Desc: CHGG_05906 [Chaetomium globosum CBS 148.51] gi|88181819|gb|EAQ89287.1| CHGG_05906 [Chaetomium globosum CBS 148.51]
  misc_feature (98)..(335): NCBI GI: 85118006 Blast Desc: NCU02972 [Neurospora crassa OR74A] gi|16945387|emb|CAD11800.1| conserved [Neurospora crassa] gi|28927167|gb|EAA36123.1| NCU02972 [Neurospora crassa OR74A]
  misc_feature (63)..(334): NCBI GI: 39941422 Blast Desc: MGG_05622 [Magnaporthe grisea 70-15] gi|145022305|gb|EDK06325.1| MGG_05622 [Magnaporthe grisea 70-15]
  misc_feature (85)..(335): NCBI GI: 171684747 Blast Desc: protein product [Podospora anserina] gi|170942334|emb|CAP67986.1| protein product [Podospora anserina]
  misc_feature (2)..(284): NCBI GI: 154303989 Blast Desc: [Botryotinia fuckeliana B05.10] gi|150854265|gb|EDN29457.1| [Botryotinia fuckeliana B05.10]
  misc_feature (156)..(333): NCBI GI: 156030635 Blast Desc: SS1G_14413 [Sclerotinia sclerotiorum 1980] gi|154700804|gb|EDO00543.1| SS1G_14413 [Sclerotinia sclerotiorum 1980]
  misc_feature (217)..(284): NCBI GI: 256735683 Blast Desc: NECHADRAFT_99050 [Nectria haematococca mpVI 77-13-4]
  misc_feature: Useful for introducing or modulating the production of volatile compounds
GSRHRSHSRASSSYSREREREREAARERERDMWALQHVREDHERELQAKRREYKRDQEAKQKEYELERAQKELHELQLAAKIEHEEKRRERTAREERELREAKKELDSIREKKERDELERRVKQKIDLDRLKEEEKALAEKQRREKEAKEAVEKYKKDEAARQLKEKQEAEARDKEYKQRMQEQLLKSGLDEKAINDILAGKKIDKEKEKKPKPLQPIHVIDDKPRPTYTRMARRHLSLETLRIYDIDYVMDPDPEYVLIKRWVPEQEQDILWRHTKVVREQRAGKLVLQIEDKKEKKHHHGHHLEPEFEWVRKKERRRSRSPSLLTYLAGGRPA

SEQ ID NO: 19221 - DNA, 2619 bp, Muscodor strobelii
  misc_feature: SGI EST ID NO. CUFF.45062.0
  misc_feature: Variant of the nucleotide sequence at SEQ ID NO 19219
gtggctcccgccatcgctcccactcccgcgcctcctccagctattcgcgcgaacgcgagcgcgagcgcgaggccgcccgtgagcgtgagcgcgacatgtgggccctgcagcacgtgcgcgaggaccacgagcgggagctccaggccaagcgccgcgagtacaagcgcgaccaggaggccaagcagaaggagtacgagctcgagcgcgcccagaaagagctccacgagctccagctcgccgccaagatcgaacacgaggagaagcgccgcgagcggacggcccgcgaggagcgcgagttgcgcgaggcgaaaaaggagctcgactccatccgcgagaagaaggagcgcgacgagctggagcgtcgcgtcaagcagaagatcgacctcgaccgtctcaaggaggaggagaaggccctcgccgagaagcagcgccgagagaaggaggccaaagaggccgtcgagaaatacaagaaggacgaggccgcgcgccagctcaaagagaagcaggaagccgaggcgcgcgacaaagaatacaagcaacgcatgcaagagcagcttctcaagtccggcctcgacgagaaagccatcaacgacatcctcgccggcaagaagatcgacaaggagaaggagaagaagcccaagccgctgcagcctatccacgtcatcgacgacaagccccggcctacctacacgcgcatggcccggcgacacctctctctcgagaccttgcgcatctacgatatcgactacgtcatggaccccgatcccgaatacgtcttgatcaagagatgggtccccgagcaggagcaagatatcctctggcgacacaccaaagtcgtccgcgagcagcgggcgggcaagcttgtcctgcagatcgaagacaagaaagagaagaagcatcaccacggccatcacctcgaacccgaatttgaatgggtgcggaagaaggagcgtagaaggagtcgttctccatcgcttttgacctatctggccggcggccgaccagcctaaacgacttcttcgcttctatcttatacaataccaaaaaacctctcttctgtgcctttctactgggtctgacccttcccctctctttcgcctctggacgcatctagggaaatgtggatgggtctctgtgtgctcgaaatcataacactccaaacgaagtcaatggagaccatgcatctttcatagcaccgtagttggatattgcggatagtggcttaggaagggccgtgcgagattcttgtcatagacagtcaagtatgttcggattggggattggaattgggcaccttttacttatacatattcatttgtgtttcgcctccacgtagtctccgcccttctaatgagttcttcatagagcatccatgctaaagccgaactgatggcctttcgtgtcatccgcaaggccagtccatcgtagagtgatcgtacgccttcctgcgtcaacatctttcgagaggcgtggaacatatttctgtagatgtgaggctgtaattgaatgcgggtcttcacagcgtcgaacgggttggagacgaacgagcacgtcgcgccagcgagagcgcccgaggtgaagttgatggtggccggcgcggagccatccatggcagcgccgtcggacccatgccacacgcctagtcgcttcttgaactgttcatacgacaccacgtagaggccagcgtaaggggcatcgcgcatggcggttgcgccgaaccccacaaagaagccagggatgcgttgcgtcttgtatatatctcgggcagcaccggccatggacttgtaagaatataagttggattcgtatcgcactttgatgatggtcatgggcatgaggacaaagcccgcgaaggcacgcgccacgccgcctgagaggagatttacggtgttcgagagcttcggcagagcggatgaggacggccggtgcgcatcggagactcgagggagtgatgcgaaggcggccgccctttgtcgaatagtgttcaatgtggtgaagtagatggcagagccgacgccagttcgcagagctgaggggaccgtgcccctccagaaggcggcaatggcattaggcgaccgggcgatgtctcggacagcggaccgaatagagtgtgatccggactgctgaacacgagttttaaggaggtcgaatggttggagaaggacagccccgaacacgcctgaacctagaccagcgacgaagtggaagccttggagcaggccgtgttagcgacgcaggctgtcaaaatgccagacgacgaagacctaccagtagaggatttggtggacggattaccctgccgcgacatcttgggcctgtgcgccccgaggcaagcaacggttgctatcacagccgagccatctggtctctggtgatttgtgggaggcaaatgacaatccggggttcgcgtgcgaagagacagttcatgcgggtccactcaacacggcctgcgactgcctgtccgacgacgaaaagtgcagaatgtgcttgtagtgctcaatgatgtcgtcgctgtccgactgagtagctggggtaggttgagctcgcggtggtgcgcaggtgcaatcagagagcgaactcgagttacacgcgacaatcgattaatgagatgcgtcggcg

SEQ ID NO: 19222 - DNA, 948 bp, Muscodor strobelii
  misc_feature: SGI cDNA ID NO. 566461
  misc_feature: Reduced expression when VOC is produced
  misc_feature: Encodes the peptide sequence at SEQ ID NO 19223
atgtcgcggcagggtaatccgtccaccaaatcctctactggcttccacttcgtcgctggtctaggttcaggcgtgttcggggctgtccttctccaaccattcgacctccttaaaactcgtgttcagcagtccggatcacactctattcggtccgctgtccgagacatcgcccggtcgcctaatgccattgccgccttctggaggggcacggtcccctcagctctgcgaactggcgtcggctctgccatctacttcaccacattgaacactattcgacaaagggcggccgccttcgcatcactccctcgagtctccgatgcgcaccggccgtcctcatccgctctgccgaagctctcgaacaccgtaaatctcctctcaggcggcgtggcgcgtgccttcgcgggctttgtcctcatgcccatgaccatcatcaaagtgcgatacgaatccaacttatattcttacaagtccatggccggtgctgcccgagatatatacaagacgcaacgcatccctggcttctttgtggggttcggcgcaaccgccatgcgcgatgccccttacgctggcctctacgtggtgtcgtatgaacagttcaagaagcgactaggcgtgtggcatgggtccgacggcgctgccatggatggctccgcgccggccaccatcaacttcacctcgggcgctctcgctggcgcgacgtgctcgttcgtctccaacccgttcgacgctgtgaagacccgcattcaattacagcctcacatctacagaaatatgttccacgcctctcgaaagatgttgacgcaggaaggcgtacgatcactctacgatggactggccttgcggatgacacgaaaggccatcagttcggctttagcatggatgctctatgaagaactcattagaagggcggagactacgtggaggcgaaacacaaatgaatatgtataa

SEQ ID NO: 19223 - protein, 315 aa, Muscodor strobelii
  misc_feature: SGI Peptide ID NO. 566461
  misc_feature (219)..(307): Pfam Id: PF00153 Pfam Desc: Mitochondrial carrier protein
  misc_feature (119)..(207): Pfam Id: PF00153 Pfam Desc: Mitochondrial carrier protein
  misc_feature (12)..(99): Pfam Id: PF00153 Pfam Desc: Mitochondrial carrier protein
  misc_feature (6)..(307): NCBI GI: 261356555 Blast Desc: solute carrier family 25 member 38 [Verticillium albo-atrum VaMs.102]
  misc_feature (5)..(315): NCBI GI: 85118010 Blast Desc: NCU02973 [Neurospora crassa OR74A] gi|74664624|sp|Q96U08.1|S2538_NEUCR RecName: Full=Solute carrier family 25 member 38 homolog gi|16945388|emb|CAD11801.1| conserved
  misc_feature (4)..(308): NCBI GI: 116192379 Blast Desc: CHGG_05907 [Chaetomium globosum CBS 148.51] gi|121786194|sp|Q2H608.1|S2538_CHAGB RecName: Full=Solute carrier family 25 member 38 homolog gi|88181820|gb|EAQ89288.1| CHGG_05907
  misc_feature (1)..(315): NCBI GI: 154303991 Blast Desc: BC1G_09631 [Botryotinia fuckeliana B05.10] gi|251765010|sp|A6S8E0.1|S2538_BOTFB RecName: Full=Solute carrier family 25 member 38 homolog gi|150854266|gb|EDN29458.1| B05.10]
  misc_feature (1)..(308): NCBI GI: 156030637 Blast Desc: SS1G_14414 [Sclerotinia sclerotiorum 1980] gi|251765061|sp|A7F9Y3.1|S2538_SCLS1 RecName: Full=Solute carrier family 25 member 38 homolog gi|154700805|gb|EDO00544.1| 1980]
  misc_feature (8)..(303): NCBI GI: 256734993 Blast Desc: [Nectria haematococca mpVI 77-13-4]
  misc_feature (16)..(303): NCBI GI: 46108986 Blast Desc: FG01375.1 [Gibberella zeae PH-1]
  misc_feature (15)..(307): NCBI GI: 145615484 Blast Desc: MGG_05623 [Magnaporthe grisea 70-15] gi|251765012|sp|A4RPU0.1|S2538_MAGGR RecName: Full=Solute carrier family 25 member 38 homolog gi|145022306|gb|EDK06326.1| MGG_05623
  misc_feature (4)..(310): NCBI GI: 171684749 Blast Desc: protein product [Podospora anserina] gi|170942335|emb|CAP67987.1| protein product [Podospora anserina]
  misc_feature (11)..(305): NCBI GI: 189189444 Blast Desc: conserved [Pyrenophora tritici-repentis Pt-1C-BFP] gi|251765029|sp|B2VSU4.1|S2538_PYRTR RecName: Full=Solute carrier family 25 member 38 homolog gi|187972667|gb|EDU40166.1| conserved
  misc_feature: Useful for introducing or modulating the production of volatile compounds
MSRQGNPSTKSSTGFHFVAGLGSGVFGAVLLQPFDLLKTRVQQSGSHSIRSAVRDIARSPNAIAAFWRGTVPSALRTGVGSAIYFTTLNTIRQRAAAFASLPRVSDAHRPSSSALPKLSNTVNLLSGGVARAFAGFVLMPMTIIKVRYESNLYSYKSMAGAARDIYKTQRIPGFFVGFGATAMRDAPYAGLYVVSYEQFKKRLGVWHGSDGAAMDGSAPATINFTSGALAGATCSFVSNPFDAVKTRIQLQPHIYRNMFHASRKMLTQEGVRSLYDGLALRMTRKAISSALAWMLYEELIRRAETTWRRNTNEYV

SEQ ID NO: 19224 - DNA, 2625 bp, Muscodor strobelii
  misc_feature: SGI EST ID NO. CUFF.45063.1
  misc_feature: Variant of the nucleotide sequence at SEQ ID NO 19222
cgccgacgcatctcattaatcgattgtcgcgtgtaactcgagttcgctctctgattgcacctgcgcaccaccgcgagctcaacctaccccagctactcagtcggacagcgacgacatcattgagcactacaagcacattctgcacttttcgtcgtcggacaggcagtcgcaggccgtgttgagtggacccgcatgaactgtctcttcgcacgcgaaccccggattgtcatttgcctcccacaaatcaccagagaccagatggctcggctgtgatagcaaccgttgcttgcctcggggcgcacaggcccaagatgtcgcggcagggtaatccgtccaccaaatcctctactggcttccacttcgtcgctggtctaggttcaggcgtgttcggggctgtccttctccaaccattcgacctccttaaaactcgtgttcagcagtccggatcacactctattcggtccgctgtccgagacatcgcccggtcgcctaatgccattgccgccttctggaggggcacggtcccctcagctctgcgaactggcgtcggctctgccatctacttcaccacattgaacactattcgacaaagggcggccgccttcgcatcactccctcgagtctccgatgcgcaccggccgtcctcatccgctctgccgaagctctcgaacaccgtaaatctcctctcaggcggcgtggcgcgtgccttcgcgggctttgtcctcatgcccatgaccatcatcaaagtgcgatacgaatccaacttatattcttacaagtccatggccggtgctgcccgagatatatacaagacgcaacgcatccctggcttctttgtggggttcggcgcaaccgccatgcgcgatgccccttacgctggcctctacgtggtgtcgtatgaacagttcaagaagcgactaggcgtgtggcatgggtccgacggcgctgccatggatggctccgcgccggccaccatcaacttcacctcgggcgctctcgctggcgcgacgtgctcgttcgtctccaacccgttcgacgctgtgaagacccgcattcaattacagcctcacatctacagaaatatgttccacgcctctcgaaagatgttgacgcaggaaggcgtacgatcactctacgatggactggccttgcggatgacacgaaaggccatcagttcggctttagcatggatgctctatgaagaactcattagaagggcggagactacgtggaggcgaaacacaaatgaatatgtataagtaaaaggtgcccaattccaatccccaatccgaacatacttgactgtctatgacaagaatctcgcacggcccttcctaagccactatccgcaatatccaactacggtgctatgaaagatgcatggtctccattgacttcgtttggagtgttatgatttcgagcacacagagacccatccacatttccctagatgcgtccagaggcgaaagagaggggaagggtcagacccagtagaaaggcacagaagagaggttttttggtattgtataagatagaagcgaagaagtcgtttaggctggtcggccgccggccagataggtcaaaagcgatggagaacgactccttctacgctccttcttccgcacccattcaaattcgggttcgaggtgatggccgtggtgatgcttcttctctttcttgtcttcgatctgcaggacaagcttgcccgcccgctgctcgcggacgactttggtgtgtcgccagaggatatcttgctcctgctcggggacccatctcttgatcaagacgtattcgggatcctgacggatgacgcattagtggccaagctgcccaagagtcagcggaaagggagatgaatactcacggggtccatgacgtagtcgatatcgtagatgcgcaaggtctcgagagagaggtgtcgccgggccatgcgcgtgtaggtaggccggggcttgtcgtcgatgacgtggataggctgcagcggcttgggcttcttctccttctccttgtcgatcttcttgccggcgaggatgtcgttgatggctttctcgtcgaggccggacttgagaagctgctcttgcatgcgttgcttgtattctttgtcgcgcgcctcggcttcctgcttctctttgagctggcgcgcggcctcgtccttcttgtatttctcgacggcctctttggcctccttctctcggcgctgcttctcggcgagggccttctcctcctccttgagacggtcgaggtcgatcttctgcttgacgcgacgctccagctcgtcgcgctccttcttctcgcggatggagtcgagctcctttttcgcctcgcgcaactcgcgctcctcgcgggccgtccgctcgcggcgcttctcctcgtgttcgatcttggcggcgagctggagctcgtggagctctttctgggcgcgctcgagctcgtactccttctgcttggcctcctggtcgcgcttgtactcgcggcgcttggcctggagctcccgctcgtggtcctcgcgcacgtgctgcagggcccacatgtcgcgctcacgctcacgggcggcctcgcgctcgcgctcgcgttcgcgcgaatagctggaggaggcgcgggagtgggagcgatggcgggagccac

SEQ ID NO: 19225 - DNA, 1287 bp, Muscodor strobelii
  misc_feature: SGI cDNA ID NO. 566462
  misc_feature: Encodes the peptide sequence at SEQ ID NO 19226
atggccgatctgctatatgatctgttaagcccagctccagagccggctcgaccctcggccgccgctctccaatatctcacaagtctgaccactcagcgactttctcaccttgacacggcggaagaacaagacttagctcatgcttctcattccttactgctcgctctacagtctctttcgcagcgctctcataaggccgtcataacgtcctccgagagccatgcaatcctgtccaccgctctgcccgccttggctacttcggtcgcagacctcaaggttgtcatcccaaagttagacgatgccgcagttcgcttttccaccacctaccataaatcagcggacaacgaattgctgcgactccgcaagaccgcccttctgctctctcgaaatgtagagcgtgtcgtagacctgcttgatctccccaacctgctatccaccaccatcgccacgggatcctcaaacttgtccgcaaactactcttctgctctagatctcaacgcccacatacggcgtcttcactcgctctatcccgactcaccggttgtctcctccgtagcccaacaagccgaccaggctatgcaactcatggccaaaaatctcattgccagcttgcgtgctcccaatctcaagctcgcctccgccttgagaaacatagggtggctgcgcagagtggtccctgaccttgaatccgctgctcctggtgggctgggcaccttattccttgtttgccggctctcaactctcatgaatttgcttggggccctagaacctctccgtgagctggccgaccaggagaggcttcgccagcaagagaactcaacagccggcaatgcttggtccggtggccaacaaactgaacgctatctcaagcgttacgtggaaatttttagagagcagagctttgctatcgtgtccatgtttcgaagtatatttcccccccagccagcaaagccctcatcagccggagctgcctcacaggatcccttgactatgtcgtcgtctgctttatctacgtttccgctccatctcgttgagatgcttattgagacactacgttcctacctgccaggtgtcaaagaccaagcttcgcgtgatagcctcttgacccaagttctctactgcgcaggcagccttggccgactcggaggcgactttggtatactgctagcaagcattgacctgggagaggatgtagaaggagaatgggtggaggttgtccgacgccatcgcctaatggccggccgcctcgagtctatcgtcgggagcaaagaaaagcaccatgcgtga

SEQ ID NO: 19226 - protein, 428 aa, Muscodor strobelii
  misc_feature: SGI Peptide ID NO. 566462
  misc_feature (6)..(360): Pfam Id: PF04124 Pfam Desc: Dor1-like family
  misc_feature (23)..(306): Pfam Id: PF04124 Pfam Desc: Dor1-like family
  misc_feature (1)..(425): NCBI GI: 85118013 Blast Desc: NCU02974 [Neurospora crassa OR74A] gi|28927169|gb|EAA36125.1| conserved [Neurospora crassa OR74A]
  misc_feature (1)..(425): NCBI GI: 116192381 Blast Desc: CHGG_05908 [Chaetomium globosum CBS 148.51] gi|88181821|gb|EAQ89289.1| CHGG_05908 [Chaetomium globosum CBS 148.51]
  misc_feature (1)..(425): NCBI GI: 39941426 Blast Desc: MGG_05624 [Magnaporthe grisea 70-15] gi|145022307|gb|EDK06327.1| MGG_05624 [Magnaporthe grisea 70-15]
  misc_feature (1)..(425): NCBI GI: 16945389 Blast Desc: conserved [Neurospora crassa]
  misc_feature (1)..(425): NCBI GI: 171684751 Blast Desc: protein product [Podospora anserina] gi|170942336|emb|CAP67988.1| protein product [Podospora anserina]
  misc_feature (1)..(428): NCBI GI: 256734994 Blast Desc: [Nectria haematococca mpVI 77-13-4]
  misc_feature (21)..(421): NCBI GI: 46108984 Blast Desc: FG01374.1 [Gibberella zeae PH-1]
  misc_feature (1)..(423): NCBI GI: 156063026 Blast Desc: SS1G_01629 [Sclerotinia sclerotiorum 1980] gi|154696965|gb|EDN96703.1| SS1G_01629 [Sclerotinia sclerotiorum 1980]
  misc_feature (1)..(425): NCBI GI: 119491919 Blast Desc: Dor1-like family protein [Neosartorya fischeri NRRL 181] gi|119411614|gb|EAW21557.1| Dor1-like family protein [Neosartorya fischeri NRRL 181]
  misc_feature (1)..(420): NCBI GI: 255934126 Blast Desc: Pc12g15440 [Penicillium chrysogenum Wisconsin 54-1255] gi|211582963|emb|CAP81171.1| Pc12g15440 [Penicillium chrysogenum Wisconsin 54-1255]
MADLLYDLLSPAPEPARPSAAALQYLTSLTTQRLSHLDTAEEQDLAHASHSLLLALQSLSQRSHKAVITSSESHAILSTALPALATSVADLKVVIPKLDDAAVRFSTTYHKSADNELLRLRKTALLLSRNVERVVDLLDLPNLLSTTIATGSSNLSANYSSALDLNAHIRRLHSLYPDSPVVSSVAQQADQAMQLMAKNLIASLRAPNLKLASALRNIGWLRRVVPDLESAAPGGLGTLFLVCRLSTLMNLLGALEPLRELADQERLRQQENSTAGNAWSGGQQTERYLKRYVEIFREQSFAIVSMFRSIFPPQPAKPSSAGAASQDPLTMSSSALSTFPLHLVEMLIETLRSYLPGVKDQASRDSLLTQVLYCAGSLGRLGGDFGILLASIDLGEDVEGEWVEVVRRHRLMAGRLESIVGSKEKHHA

SEQ ID NO: 19227 - DNA, 1761 bp, Muscodor strobelii
  misc_feature: SGI EST ID NO. CUFF.45066.0
  misc_feature: Variant of the nucleotide sequence at SEQ ID NO 19225
cgaccatacatgagtccacctcacgcttcatactgtaatatcgtgcaatatcgtgtttatctccaagttccctctcacattccataacagcactacaactcgctctcgcgctgcataacggctttcgcagctcgtttaggaaacttcacgccgctcgtttatcggactccaaccctgagccgggttccaatgagattcgcgttttgagtcggactagtggttaatggtacatgagatgggaacgactcactgagaaccaggaccgagacgttgtataagtggatgtgatacattctcacaacatggccgatctgctatatgatctgttaagcccagctccagagccggctcgaccctcggccgccgctctccaatatctcacaagtctgaccactcagcgactttctcaccttgacacggcggaagaacaagacttagctcatgcttctcattccttactgctcgctctacagtctctttcgcagcgctctcataaggccgtcataacgtcctccgagagccatgcaatcctgtccaccgctctgcccgccttggctacttcggtcgcagacctcaaggttgtcatcccaaagttagacgatgccgcagttcgcttttccaccacctaccataaatcagcggacaacgaattgctgcgactccgcaagaccgcccttctgctctctcgaaatgtagagcgtgtcgtagacctgcttgatctccccaacctgctatccaccaccatcgccacgggatcctcaaacttgtccgcaaactactcttctgctctagatctcaacgcccacatacggcgtcttcactcgctctatcccgactcaccggttgtctcctccgtagcccaacaagccgaccaggctatgcaactcatggccaaaaatctcattgccagcttgcgtgctcccaatctcaagctcgcctccgccttgagaaacatagggtggctgcgcagagtggtccctgaccttgaatccgctgctcctggtgggctgggcaccttattccttgtttgccggctctcaactctcatgaatttgcttggggccctagaacctctccgtgagctggccgaccaggagaggcttcgccagcaagagaactcaacagccggcaatgcttggtccggtggccaacaaactgaacgctatctcaagcgttacgtggaaatttttagagagcagagctttgctatcgtgtccatgtttcgaagtatatttcccccccagccagcaaagccctcatcagccggagctgcctcacaggatcccttgactatgtcgtcgtctgctttatctacgtttccgctccatctcgttgagatgcttattgagacactacgttcctacctgccaggtgtcaaagaccaagcttcgcgtgatagcctcttgacccaagttctctactgcgcaggcagccttggccgactcggaggcgactttggtatactgctagcaagcattgacctgggagaggatgtagaaggagaatgggtggaggttgtccgacgccatcgcctaatggccggccgcctcgagtctatcgtcgggagcaaagaaaagcaccatgcgtgatgcaagatccatacgggacacgaggtgctccagcactgttatggaacacaaaattccagtggcgggcatagtctcacgcgcgtacaaagcaacctcctgtattgtgtcataatggagatatgcaactaataaaaatgatctctgtcgcaatctgggcgcgccagtgtgtgac

SEQ ID NO: 19228 - DNA, 543 bp, Muscodor strobelii
  misc_feature: SGI cDNA ID NO. 566463
  misc_feature: Encodes the peptide sequence at SEQ ID NO 19229
atgaatttgcttggggccctagaacctctccgtgagctggccgaccaggagaggcttcgccagcaagagaactcaacagccggcaatgcttggtccggtggccaacaaactgaacgctatctcaagcgttacgtggaaatttttagagagcagagctttgctatcgtgtccatgtttcgaagtatatttcccccccagccagcaaagccctcatcagccggagctgcctcacaggatcccttgactatgtcgtcgtctgctttatctacgtttccgctccatctcgttgagatgcttattgagacactacgttcctacctgccaggtgtcaaagaccaagcttcgcgtgatagcctcttgacccaagttctctactgcgcaggcagccttggccgactcggaggcgactttggtatactgctagcaagcattgacctgggagaggatgtagaaggagaatgggtggaggttgtccgacgccatcgcctaatggccggccgcctcgagtctatcgtcgggagcaaagaaaagcaccatgcgtga

SEQ ID NO: 19229 - protein, 180 aa, Muscodor strobelii
  misc_feature: SGI Peptide ID NO. 566463
  misc_feature (1)..(177): NCBI GI: 39941426 Blast Desc: MGG_05624 [Magnaporthe grisea 70-15] gi|145022307|gb|EDK06327.1| MGG_05624 [Magnaporthe grisea 70-15]
  misc_feature (1)..(177): NCBI GI: 116192381 Blast Desc: CHGG_05908 [Chaetomium globosum CBS 148.51] gi|88181821|gb|EAQ89289.1| CHGG_05908 [Chaetomium globosum CBS 148.51]
  misc_feature (1)..(177): NCBI GI: 85118013 Blast Desc: NCU02974 [Neurospora crassa OR74A] gi|28927169|gb|EAA36125.1| conserved [Neurospora crassa OR74A]
  misc_feature (1)..(177): NCBI GI: 171684751 Blast Desc: protein product [Podospora anserina] gi|170942336|emb|CAP67988.1| protein product [Podospora anserina]
  misc_feature (1)..(180): NCBI GI: 256734994 Blast Desc: [Nectria haematococca mpVI 77-13-4]
  misc_feature (1)..(173): NCBI GI: 46108984 Blast Desc: FG01374.1 [Gibberella zeae PH-1]
  misc_feature (1)..(177): NCBI GI: 16945389 Blast Desc: conserved [Neurospora crassa]
  misc_feature (1)..(172): NCBI GI: 255934126 Blast Desc: Pc12g15440 [Penicillium chrysogenum Wisconsin 54-1255] gi|211582963|emb|CAP81171.1| Pc12g15440 [Penicillium chrysogenum Wisconsin 54-1255]
  misc_feature (3)..(169): NCBI GI: 189193379 Blast Desc: conserved [Pyrenophora tritici-repentis Pt-1C-BFP] gi|187978592|gb|EDU45218.1| conserved [Pyrenophora tritici-repentis Pt-1C-BFP]
  misc_feature (3)..(171): NCBI GI: 154289082 Blast Desc: BC1G_16260 [Botryotinia fuckeliana B05.10] gi|150851396|gb|EDN26589.1| BC1G_16260 [Botryotinia fuckeliana B05.10]
MNLLGALEPLRELADQERLRQQENSTAGNAWSGGQQTERYLKRYVEIFREQSFAIVSMFRSIFPPQPAKPSSAGAASQDPLTMSSSALSTFPLHLVEMLIETLRSYLPGVKDQASRDSLLTQVLYCAGSLGRLGGDFGILLASIDLGEDVEGEWVEVVRRHRLMAGRLESIVGSKEKHHA

SEQ ID NO: 19230 - DNA, 1761 bp, Muscodor strobelii; identical to SEQ ID NO: 19227
  misc_feature: SGI EST ID NO. CUFF.45066.0
  misc_feature: Variant of the nucleotide sequence at SEQ ID NO 19228

SEQ ID NO: 19231 - DNA, 514 bp, Muscodor strobelii
  misc_feature: SGI cDNA ID NO. 566464
  misc_feature: Reduced expression when VOC is produced
  misc_feature: Encodes the peptide sequence at SEQ ID NO 19232
atgaaggaccccttcccgataccgcccatccccgccctgagcgcctgggtccagccgtgggccgactacctcaacctgcccacgctgccgctgcacatccacgagatcctcatcatagccagcttctacgagttcacccgcagcgtcgtctcgccggcgctctccaagtcgctgttcccggcccagtacgcggccctgtccaagtccaagaggctgaactgggacgtccacgtcgtctcctttgtccagagcaccaccatcaacgccctcgccctctgggtcatgtacgcagacgacgaccgtgccgccatggacgcccaggagcgcctctggggctacacgggcggagccgccatgatccaggccctcgccgccggctacttcctctgggacctgttcgtcaccgccgccaacgtccacatcttcggcctcggcatgctggcccacgccgtctgcgccctcggcgtctactccttcggcttcgtacgctcccccctcctcccttccccccctt

SEQ ID NO: 19232 - protein, 171 aa, Muscodor strobelii
  misc_feature: SGI Peptide ID NO. 566464
  misc_feature (24)..(159): Pfam Id: PF05967 Pfam Desc: Eukaryotic protein of function (DUF887)
  misc_feature (1)..(161): NCBI GI: 164427582 Blast Desc: NCU02977 [Neurospora crassa OR74A] gi|16945392|emb|CAB97314.2| conserved [Neurospora crassa] gi|157071803|gb|EAA36128.2| conserved [Neurospora crassa OR74A]
  misc_feature (1)..(161): NCBI GI: 171684799 Blast Desc: protein product [Podospora anserina] gi|170942360|emb|CAP68012.1| protein product [Podospora anserina]
  misc_feature (1)..(161): NCBI GI: 156063030 Blast Desc: SS1G_01631 [Sclerotinia sclerotiorum 1980] gi|154696967|gb|EDN96705.1| SS1G_01631 [Sclerotinia sclerotiorum 1980]
  misc_feature (1)..(161): NCBI GI: 154318969 Blast Desc: BC1G_02436 [Botryotinia fuckeliana B05.10] gi|150856867|gb|EDN32059.1| BC1G_02436 [Botryotinia fuckeliana B05.10]
  misc_feature (1)..(161): NCBI GI: 46108982 Blast Desc: FG01373.1 [Gibberella zeae PH-1]
  misc_feature (1)..(161): NCBI GI: 39941428 Blast Desc: MGG_05625 [Magnaporthe grisea 70-15] gi|145022308|gb|EDK06328.1| MGG_05625 [Magnaporthe grisea 70-15]
  misc_feature (1)..(161): NCBI GI: 256734288 Blast Desc: [Nectria haematococca mpVI 77-13-4]
  misc_feature (1)..(161): NCBI GI: 116192387 Blast Desc: CHGG_05911 [Chaetomium globosum CBS 148.51] gi|88181824|gb|EAQ89292.1| CHGG_05911 [Chaetomium globosum CBS 148.51]
  misc_feature (1)..(161): NCBI GI: 169606810 Blast Desc: SNOG_06455 [Phaeosphaeria nodorum SN15] gi|160707086|gb|EAT86286.2| SNOG_06455 [Phaeosphaeria nodorum SN15]
  misc_feature (1)..(161): NCBI GI: 258563590 Blast Desc: conserved [Uncinocarpus reesii 1704] gi|237908047|gb|EEP82448.1| conserved [Uncinocarpus reesii 1704]
  misc_feature: Useful for introducing or modulating the production of volatile compounds
MKDPFPIPPIPALSAWVQPWADYLNLPTLPLHIHEILIIASFYEFTRSVVSPALSKSLFPAQYAALSKSKRLNWDVHVVSFVQSTTINALALWVMYADDDRAAMDAQERLWGYTGGAAMIQALAAGYFLWDLFVTAANVHIFGLGMLAHAVCALGVYSFGFVRSPLLPSPP

SEQ ID NO: 19233 - DNA, 1134 bp, Muscodor strobelii
  misc_feature: SGI EST ID NO. CUFF.44977.0
  misc_feature: Variant of the nucleotide sequence at SEQ ID NO 19231
ctctatcagaatactggagcacgtacagagatgatgggtaggtaccttaggtacagtccatcatgtacctaattgacagcgctgaagcacacacacacccttgtcccccgcgatgtgaccgggacatctgaagggtcccaacagatttgggtgcatgtcatggcaggtacctcatcaatctcgttaatggtcccttggcctcggaaatcggcagggtccaagaagatgtccaacctccagtctccaacctcatccggattctgcaccgcacacgcctcgtccctcagccaaaaacctccaaactgcaagcagggcggaagcttttgctctagctgagtcgagtgtccatctgatgccagcgtgagaaggggcacgccacgcccgtccagcgacaccaagcccggcagccaggcacgacgcggcatcacacgccgtctgcatcagccctcccctacgagcgtgtccgcctgattcctgccttgcccgcgcaggtcgtggtatatcagccaacgccgcctcctctctcgccccctctcgaccccctcttgatcctatctcgatcgtatctcacttgcccatcgtcatcgccgtcgccgtcgccgtcgccatcgccatcgccaccatgaaggaccccttcccgataccgcccatccccgccctgagcgcctgggtccagccgtgggccgactacctcaacctgcccacgctgccgctgcacatccacgagatcctcatcatagccagcttctacgagttcacccgcagcgtcgtctcgccggcgctctccaagtcgctgttcccggcccagtacgcggccctgtccaagtccaagaggctgaactgggacgtccacgtcgtctcctttgtccagagcaccaccatcaacgccctcgccctctgggtcatgtacgcagacgacgaccgtgccgccatggacgcccaggagcgcctctggggctacacgggcggagccgccatgatccaggccctcgccgccggctacttcctctgggacctgttcgtcaccgccgccaacgtccacatcttcggcctcggcatgctggcccacgccgtctgcgccctcggcgtctactccttcggcttcgtacgctcccccctcctcccttccccccc

SEQ ID NO: 19234 - DNA, 597 bp, Muscodor strobelii
  misc_feature: SGI cDNA ID NO. 566465
  misc_feature: Encodes the peptide sequence at SEQ ID NO 19235
cgaccgttcgtaaactactacagcaccaacttcatcctctgggagctctcctcccccttcctcaacatccactggttcttcgacaaactcggcatgacgggctccaaagcccagctgtacaacggcctggtcttgattgccaccttcttctcctgccgcctcgtctggggcacctaccagtccttcctcgtcggccgtgacatctgggccggcatccagtccggccccgccgtgcccgccaccctcgccgtcgacaagctgcatgacgccgtcttccccgcgcgctatgcctctaccatggtctttgtctcccccatggcgacggccgtgcccacttggctggccggggtctatatggctggcaatctgacgctgaactcgctcaacttctactggttcttcaagatgatcgacgccgtccgcaaacgcttcgatcccaaagccgctgccgaccaggacgccgctgacaccaaagcctacgtcgacgggagagcggccacaacgacgggcacggatggcgtagtcaagactgctcgcccgcggcgtcgcacaattctggatggcgaggatcctgacgcgccgccaccaggtatctga

SEQ ID NO: 19235 - protein, 198 aa, Muscodor strobelii
  misc_feature: SGI Peptide ID NO. 566465
  misc_feature (13)..(59): Pfam Id: PF05967 Pfam Desc: Eukaryotic protein of function (DUF887)
  misc_feature (1)..(192): NCBI GI: 164427582 Blast Desc: NCU02977 [Neurospora crassa OR74A] gi|16945392|emb|CAB97314.2| conserved [Neurospora crassa] gi|157071803|gb|EAA36128.2| conserved [Neurospora crassa OR74A]
  misc_feature (1)..(193): NCBI GI: 156063030 Blast Desc: SS1G_01631 [Sclerotinia sclerotiorum 1980] gi|154696967|gb|EDN96705.1| SS1G_01631 [Sclerotinia sclerotiorum 1980]
  misc_feature (1)..(183): NCBI GI: 46108982 Blast Desc: FG01373.1 [Gibberella zeae PH-1]
  misc_feature (1)..(183): NCBI GI: 256734288 Blast Desc: [Nectria haematococca mpVI 77-13-4]
  misc_feature (1)..(189): NCBI GI: 39941428 Blast Desc: MGG_05625 [Magnaporthe grisea 70-15] gi|145022308|gb|EDK06328.1| MGG_05625 [Magnaporthe grisea 70-15]
  misc_feature (1)..(187): NCBI GI: 171684799 Blast Desc: protein product [Podospora anserina] gi|170942360|emb|CAP68012.1| protein product [Podospora anserina]
  misc_feature (1)..(170): NCBI GI: 121702549 Blast Desc: DUF887 domain protein [Aspergillus clavatus NRRL 1] gi|119397682|gb|EAW08113.1| DUF887 domain protein [Aspergillus clavatus NRRL 1]
  misc_feature (1)..(192): NCBI GI: 240108383 Blast Desc: CPC735_007300 [Coccidioides posadasii C735 delta SOWgp]
  misc_feature (1)..(192): NCBI GI: 119186937 Blast Desc: CIMG_03516 [Coccidioides immitis RS]
  misc_feature (1)..(152): NCBI GI: 154318969 Blast Desc: BC1G_02436 [Botryotinia fuckeliana B05.10] gi|150856867|gb|EDN32059.1| BC1G_02436 [Botryotinia fuckeliana B05.10]
RPFVNYYSTNFILWELSSPFLNIHWFFDKLGMTGSKAQLYNGLVLIATFFSCRLVWGTYQSFLVGRDIWAGIQSGPAVPATLAVDKLHDAVFPARYASTMVFVSPMATAVPTWLAGVYMAGNLTLNSLNFYWFFKMIDAVRKRFDPKAAADQDAADTKAYVDGRAATTTGTDGVVKTARPRRRTILDGEDPDAPPPGI

SEQ ID NO: 19236 - DNA, 2802 bp, Muscodor strobelii
  misc_feature: SGI cDNA ID NO. 566466
  misc_feature: Reduced expression when VOC is produced
  misc_feature: Encodes the peptide sequence at SEQ ID NO 19237
ctgccgcccgcgctgccactcctccccccatcacccctgcccccgcgctaccaccggccccaagccgacgactacgacgaggagcagagccccgctctgcccgcccgcgcgcccacgcagtccagctacgcaagtccacagtccgccgagtccccggcctcaccaccgcttccgcagcgcacctcgagccgctacgacagaggcgacagaggcgacagaagcgacaggacccaagaggccgagtcccaaccccagccgttcagccctctggcgccgggcggcttccacatgtacaacatcaacgagatggtctccgtcatgggcaagaagaagaagatgcccaccactttgggcatcaacctgaggaccggcatcatcctgatcgcccccgagcgcacctcggatggccccacccaggagtggacggccgacaagatgacgcactactcgagagagggcaagcacgtattcctggagctcgtccggcccagcaagagcatcgacttccacgccggcgccaaggatacggccgaggagattgtgagtgcgctcggcgagctctccggggccatgcgcgccgaaggcctgcgcgaggtcatcgcggcgggcacgggccagggcggccagaagcgcgggcagatgctgtacgacttcatggcgcagggcgacgacgaggtcaccgttgccttaggagacgaggtcatcatcctcgatgaccagcggagcgaggagtggtggcaggtccgccgtctcaagaacgggaaggaaggagtggtccccagcagctacgtcgaagtgaccgacaccatcattccgccgccaccgtccgcgccggcgtcggcgtcggcgtcgacatcaggggtcaacgcgggcaagtccgccgtcgcccagaaccggatcgaggaggagcggctgaccaaagaggccctcaagaaagaccaaacgaaagcagagcgaagcagacgcgagaacggccgctccgagtcgagccgatcggcttcctccaagcccaaacctgatcccgccaaggtgcggagctggaccgacagatccaagtcattcagcgtcgaagcccagtttctgggtctcaaggacggcaagatcaatctacacaaaatgaacggcgtcaagattgcggtgcctttggccaagatgtccatcgaggacatagagtatgtcgagcgcaccaccgggatatcgctcgacgaggacaagcccctgtccgagatgaagcggagaaagtcgaccaggtctcctcccgtgaacgccaacaagagtattccgtcatcccacataggagcctctgtcgagccgggaaagccagactacgattggtttcagttctttctctcgtgcgatgtggccgtcggcctgtgcgagcgctatgcgcaagccttcaaccgagattccatggatgagagcgtgttgccagatgttgacgctggcattctgcgcaatcttggcttacgcgaaggcgatatcatcaaggtcatgcgcacgttggacaagaagttcaaccgggatagcaagaagaagggcgccggcgaggcggaggaaggaggtctcttctccggcccgggaggcacgctgcgcaacaacacccgaaaaggtcggccagcacccgctgtccaagccagcgacgtcgtcgacgccaaagccttttcacagtcgcccaaagatgccgagtcgaggccgccgccgtctaaatcacccgatccctctcggcccgctgcccctgaaaaggcgagcagcggcttcgatgacgatgcgtgggatgtgaagccctccaggcaaccagagccacaacccaaaccaactcccaaccctgagcccaagactgcccccgccaccgccgcgcccgtccaaccaactgctcccccgacacaggccatgcaggatctttccctcctaagccaacctctcgaaccgacaaaggcggagcttccggctctcgtagcctcggcctcggccccagcgcaaccccaaacgttcagccagcctcaggctactccggcagccccgccccagcctcagggcgcaaccccatctttcttcacgggcattcctgccaaccccacaggatccgtgactccggcacagcccttgaacctcggactcggcaaccggcagcgacccacgccaccgcagatgacgggcacccagggcgttatcatgccgccgccgccggcacgtccgctatcagctcctcaagcagctttgccaagcggcttcgcaccaccgcccatgccagctctgcagcctcaaatgaccggcatagcacctccgggacaaagcttgggtgagctccagcaacagcggctgcagcaatcctacatgggcaatttccaaccacaaccgacgggacagggtatgatgccctacaccatgcagcagcagcagcagcagtttatgccgccgcagatgaccggagcacctcaaatgcccatgccgtacggcgctcagcaattctcaccgatgcaaagccagccaaccggatttgccaacaatttccaacccagtcaacagttctcgcaacctacaggtgtaaatacattcttacccacggccctggaaccccagaagatcagcatgccttccgtgcaagctcaacctaccggcttcggtgggttccagtcgaacagtccatctcaacaaccagcgccgattgctcccctcgtgcctcagcagaccggcccggcaccgcctgtgcggtttggagtggccaaaccgctggctcctcagccaacaggccgtcgtgccaacctgtcgcaagccaccccacagaacccctttggattttaa

SEQ ID NO: 19237 - protein, 933 aa, Muscodor strobelii
  misc_feature: SGI Peptide ID NO. 566466
  misc_feature (210)..(267): Pfam Id: PF00018 Pfam Desc: SH3 domain
  misc_feature (211)..(267): Pfam Id: PF07653 Pfam Desc: Variant SH3 domain
  misc_feature (333)..(402): Pfam Id: PF03983 Pfam Desc: SLA1 homology domain 1, SHD1
  misc_feature (18)..(933): NCBI GI: 145615486 Blast Desc: MGG_05626 [Magnaporthe grisea 70-15] gi|145022309|gb|EDK06329.1| MGG_05626 [Magnaporthe grisea 70-15]
  misc_feature (20)..(933): NCBI GI: 256734995 Blast Desc: NECHADRAFT_89870 [Nectria haematococca mpVI 77-13-4]
  misc_feature (2)..(933): NCBI GI: 261356558 Blast Desc: cytoskeleton assembly control protein SLA1 [Verticillium albo-atrum VaMs.102]
  misc_feature (75)..(933): NCBI GI: 46108980 Blast Desc: FG01372.1 [Gibberella zeae PH-1]
  misc_feature (91)..(933): NCBI GI: 205829940 Blast Desc: FG01372.1 [Gibberella zeae PH-1]
  misc_feature (27)..(933): NCBI GI: 116192389 Blast Desc: CHGG_05912 [Chaetomium globosum CBS 148.51] gi|88181825|gb|EAQ89293.1| CHGG_05912 [Chaetomium globosum CBS 148.51]
  misc_feature (85)..(933): NCBI GI: 154313187 Blast Desc: BC1G_05595 [Botryotinia fuckeliana B05.10] gi|150849680|gb|EDN24873.1| BC1G_05595 [Botryotinia fuckeliana B05.10]
  misc_feature (91)..(933): NCBI GI: 156062856 Blast Desc: SS1G_01544 [Sclerotinia sclerotiorum 1980] gi|154696880|gb|EDN96618.1| SS1G_01544 [Sclerotinia sclerotiorum 1980]
  misc_feature (9)..(926): NCBI GI: 16945393 Blast Desc: related to cytoskeleton assembly control protein SLA1 [Neurospora crassa]
  misc_feature (29)..(933): NCBI GI: 171684797 Blast Desc: protein product [Podospora anserina] gi|170942359|emb|CAP68011.1| protein product [Podospora anserina]
  misc_feature: Useful for introducing or modulating the production of volatile compounds
LPPALPLLPPSPLPPRYHRPQADDYDEEQSPALPARAPTQSSYASPQSAESPASPPLPQRTSSRYDRGDRGDRSDRTQEAESQPQPFSPLAPGGFHMYNINEMVSVMGKKKKMPTTLGINLRTGIILIAPERTSDGPTQEWTADKMTHYSREGKHVFLELVRPSKSIDFHAGAKDTAEEIVSALGELSGAMRAEGLREVIAAGTGQGGQKRGQMLYDFMAQGDDEVTVALGDEVIILDDQRSEEWWQVRRLKNGKEGVVPSSYVEVTDTIIPPPPSAPASASASTSGVNAGKSAVAQNRIEEERLTKEALKKDQTKAERSRRENGRSESSRSASSKPKPDPAKVRSWTDRSKSFSVEAQFLGLKDGKINLHKMNGVKIAVPLAKMSIEDIEYVERTTGISLDEDKPLSEMKRRKSTRSPPVNANKSIPSSHIGASVEPGKPDYDWFQFFLSCDVAVGLCERYAQAFNRDSMDESVLPDVDAGILRNLGLREGDIIKVMRTLDKKFNRDSKKKGAGEAEEGGLFSGPGGTLRNNTRKGRPAPAVQASDVVDAKAFSQSPKDAESRPPPSKSPDPSRPAAPEKASSGFDDDAWDVKPSRQPEPQPKPTPNPEPKTAPATAAPVQPTAPPTQAMQDLSLLSQPLEPTKAELPALVASASAPAQPQTFSQPQATPAAPPQPQGATPSFFTGIPANPTGSVTPAQPLNLGLGNRQRPTPPQMTGTQGVIMPPPPARPLSAPQAALPSGFAPPPMPALQPQMTGIAPPGQSLGELQQQRLQQSYMGNFQPQPTGQGMMPYTMQQQQQQFMPPQMTGAPQMPMPYGAQQFSPMQSQPTGFANNFQPSQQFSQPTGVNTFLPTALEPQKISMPSVQAQPTGFGGFQSNSPSQQPAPIAPLVPQQTGPAPPVRFGVAKPLAPQPTGRRANLSQATPQNPFGF

SEQ ID NO: 19238 - DNA, 3975 bp, Muscodor strobelii
  misc_feature: SGI EST ID NO. CUFF.45110.1
  misc_feature: Variant of the nucleotide sequence at SEQ ID NO 19236
acccctgcccccgcgctaccaccggccccaagccgacgactacgacgaggagcagagccccgctctgcccgcccgcgcgcccacgcagtccagctacgcaagtccacagtccgccgagtccccggcctcaccaccgcttccgcagcgcacctcgagccgctacgacagaggcgacagaggcgacagaagcgacaggacccaagaggccgagtcccaaccccagccgttcagccctctggcgccgggcggcttccacatgtacaacatcaacgagatggtctccgtcatgggcaagaagaagaagatgcccaccactttgggcatcaacctgaggaccggcatcatcctgatcgcccccgagcgcacctcggatggccccacccaggagtggacggccgacaagatgacgcactactcgagagagggcaagcacgtattcctggagctcgtccggcccagcaagagcatcgacttccacgccggcgccaaggatacggccgaggagattgtgagtgcgctcggcgagctctccggggccatgcgcgccgaaggcctgcgcgaggtcatcgcggcgggcacgggccagggcggccagaagcgcgggcagatgctgtacgacttcatggcgcagggcgacgacgaggtcaccgttgccttaggagacgaggtcatcatcctcgatgaccagcggagcgaggagtggtggcaggtccgccgtctcaagaacgggaaggaaggagtggtccccagcagctacgtcgaagtgaccgacaccatcattccgccgccaccgtccgcgccggcgtcggcgtcggcgtcgacatcaggggtcaacgcgggcaagtccgccgtcgcccagaaccggatcgaggaggagcggctgaccaaagaggccctcaagaaagaccaaacgaaagcagagcgaagcagacgcgagaacggccgctccgagtcgagccgatcggcttcctccaagcccaaacctgatcccgccaaggtgcggagctggaccgacagatccaagtcattcagcgtcgaagcccagtttctgggtctcaaggacggcaagatcaatctacacaaaatgaacggcgtcaagattgcggtgcctttggccaagatgtccatcgaggacatagagtatgtcgagcgcaccaccgggatatcgctcgacgaggacaagcccctgtccgagatgaagcggagaaagtcgaccaggtctcctcccgtgaacgccaacaagagtattccgtcatcccacataggagcctctgtcgagccgggaaagccagactacgattggtttcagttctttctctcgtgcgatgtggccgtcggcctgtgcgagcgctatgcgcaagccttcaaccgagattccatggatgagagcgtgttgccagatgttgacgctggcattctgcgcaatcttggcttacgcgaaggcgatatcatcaaggtcatgcgcacgttggacaagaagttcaaccgggatagcaagaagaagggcgccggcgaggcggaggaaggaggtctcttctccggcccgggaggcacgctgcgcaacaacacccgaaaaggtcggccagcacccgctgtccaagccagcgacgtcgtcgacgccaaagccttttcacagtcgcccaaagatgccgagtcgaggccgccgccgtctaaatcacccgatccctctcggcccgctgcccctgaaaaggcgagcagcggcttcgatgacgatgcgtgggatgtgaagccctccaggcaaccagagccacaacccaaaccaactcccaaccctgagcccaagactgcccccgccaccgccgcgcccgtccaaccaactgctcccccgacacaggccatgcaggatctttccctcctaagccaacctctcgaaccgacaaaggcggagcttccggctctcgtagcctcggcctcggccccagcgcaaccccaaacgttcagccagcctcaggctactccggcagccccgccccagcctcagggcgcaaccccatctttcttcacgggcattcctgccaaccccacaggatccgtgactccggcacagcccttgaacctcggactcggcaaccggcagcgacccacgccaccgcagatgacgggcacccagggcgttatcatgccgccgccgccggcacgtccgctatcagctcctcaagcagctttgccaagcggcttcgcaccaccgcccatgccagctctgcagcctcaaatgaccggcatagcacctccgggacaaagcttgggtgagctccagcaacagcggctgcagcaatcctacatgggcaatttccaaccacaaccgacgggacagggtatgatgccctacaccatgcagcagcagcagcagcagtttatgccgccgcagatgaccggagcacctcaaatgcccatgccgtacggcgctcagcaattctcaccgatgcaaagccagccaaccggatttgccaacaatttccaacccagtcaacagttctcgcaacctacaggtgtaaatacattcttacccacggccctggaaccccagaagatcagcatgccttccgtgcaagctcaacctaccggcttcggtgggttccagtcgaacagtccatctcaacaaccagcgccgattgctcccctcgtgcctcagcagaccggcccggcaccgcctgtgcggtttggagtggccaaaccgctggctcctcagccaacaggccgtcgtgccaacctgtcgcaagccaccccacagaacccctttggattttaagcctagggatccctatttcacgaagctcacgaggcgtggtttgcgcgatatggcgggtcacgataatcgtaatattgaccacagaccacttcatgggtatgtaatcaacggtcgagtgtttgagaggagagagtttaagtggaggaaagacgtggaattagtagaccgtccacaacaggtagacgcggaaacgggtcggtccaggattggacaagaggatttgtttgaagagacgattacatctgtctagcctttgggatctattcagctacattctctacgatagacgcttaccagcaactcagtatctactacccataacaccccccttagtacataaggccaagcagtaatcattcatcattacccatttccgctcctccgagtgcggcgccaggctggcgtaccgtgtcccatcctatggtgacgtgcatgttccccagttcaagccgagataacctttcacgtgagacttgagcagacaaagcagcagcaggcagcggaatatgtgctgcaagggcacgcggccgtcatttcgccacaacggcttataagggcgatagtcggagtgcagcgaatcagatacctggtggcggcgcgtcaggatcctcgccatccagaattgtgcgacgccgcgggcgagcagtcttgactacgccatccgtgcccgtcgttgtggccgctctcccgtcgacgtaggctttggtgtcagcggcgtcctggtcggcagcggctttgggatcgaagcgtttgcggacggcgtcgatcatcttgaagaaccagtagaagttgagcgagttcagcgtcagattgccagccatatagaccccggccagccaagtgggcacggccgtcgccatgggggagacaaagaccatggtagaggcatagcgcgcggggaagacggcgtcatgcagcttgtcgacggcgagggtggcgggcacggcggggccggactggatgccggcccagatgtcacggccgacgaggaaggactggtaggtgccccagacgaggcggcaggagaagaaggtggcaatcaagaccaggccgttgtacagctgggctttggagcccgtcatgccgagtttgtcgaagaaccagtggatgttgaggaagggggaggagagctcccagaggatgaagttggtgctgtagtagtttacgaacggtcgctgcgagggcctgtcagcgggcgggcgacg

SEQ ID NO: 19239 - DNA, 323 bp, Muscodor strobelii
  misc_feature: SGI cDNA ID NO. 566467
  misc_feature: Encodes the peptide sequence at SEQ ID NO 19240
atggctgaccacactgccgacgcccaaaacggcgacagtaacaacttgcaggagaatgcctacgacgtcgaggtcgtcctctccgagctgcaccaggacactaacaaccctattgcctcgggcaagacctttcaagacctcggccttcccgatacggtcctccagggcctcaacgccatgaagttcctcaagccctccaaggtccaggagaaggccctcccgctcatgctcgccgacccgccccagaacatgatcggccagtcccagtccggcaccggcaagacgggcgcctttgtcgtcaccgtcctctcgcgcgtcgactt

SEQ ID NO: 19240 - protein, 107 aa, Muscodor strobelii
  misc_feature: SGI Peptide ID NO. 566467
  misc_feature (66)..(107): Pfam Id: PF00270 Pfam Desc: DEAD/DEAH box helicase
  misc_feature (3)..(107): NCBI GI: 242783452 Blast Desc: ATP dependent RNA helicase (Dbp5), [Talaromyces stipitatus ATCC 10500] gi|218720337|gb|EED19756.1| ATP dependent RNA helicase (Dbp5), [Talaromyces stipitatus ATCC 10500]
  misc_feature (14)..(107): NCBI GI: 212527338 Blast Desc: ATP dependent RNA helicase (Dbp5), [Penicillium marneffei ATCC 18224] gi|210073224|gb|EEA27311.1| ATP dependent RNA helicase (Dbp5), [Penicillium marneffei ATCC 18224]
  misc_feature (9)..(107): NCBI GI: 50554453 Blast Desc: YALI0E31427p [Yarrowia lipolytica] gi|74633162|sp|Q6C3X7.1|DBP5_YARLI RecName: Full=ATP-dependent RNA helicase DBP5 gi|49650504|emb|CAG80239.1| YALI0E31427p
  misc_feature (14)..(107): NCBI GI: 85103495 Blast Desc: NCU01160 [Neurospora crassa OR74A] gi|74622816|sp|Q8X0X2.1|DBP5_NEUCR RecName: Full=ATP-dependent RNA helicase dbp-5 gi|18376257|emb|CAD21371.1| RNA helicase DBP5
  misc_feature (6)..(107): NCBI GI: 115433274 Blast Desc: ATEG_08153 [Aspergillus terreus NIH2624] gi|121735241|sp|Q0CDT1.1|DBP5_ASPTN RecName: Full=ATP-dependent RNA helicase dbp5 gi|114189626|gb|EAU31326.1| ATEG_08153 terreus
  misc_feature (1)..(107): NCBI GI: 261204545 Blast Desc: ATP-dependent RNA helicase DBP5 [Ajellomyces dermatitidis SLH14081] gi|239587271|gb|EEQ69914.1| ATP-dependent RNA helicase DBP5 [Ajellomyces dermatitidis SLH14081] RNA DBP5
  misc_feature (1)..(107): NCBI GI: 50421353 Blast Desc: DEHA0D18491g [Debaryomyces hansenii CBS767] gi|74602368|sp|Q6BRE4.1|DBP5_DEBHA RecName: Full=ATP-dependent RNA helicase DBP5 gi|49654893|emb|CAG87398.1| DEHA2D17072p
  misc_feature (8)..(107): NCBI GI: 67901344 Blast Desc: AN7659.2 [Aspergillus nidulans FGSC A4] gi|74627431|sp|Q5AVM1.1|DBP5_EMENI RecName: Full=ATP-dependent RNA helicase dbp5 gi|40742655|gb|EAA61845.1| AN7659.2 nidulans
  misc_feature (3)..(107): NCBI GI: 121711124 Blast Desc: ATP dependent RNA helicase (Dbp5), [Aspergillus clavatus NRRL 1] gi|134034073|sp|A1CFV3.1|DBP5_ASPCL RecName: Full=ATP-dependent RNA helicase dbp5 gi|119401328|gb|EAW11752.1|
  misc_feature (15)..(107): NCBI GI: 149241762 Blast Desc: ATP-dependent RNA helicase DDX19B [Lodderomyces elongisporus NRRL YB-4239] gi|152013485|sp|A5DZX2.1|DBP5_LODEL RecName: Full=ATP-dependent RNA helicase DBP5 ATP-dependent RNA
MADHTADAQNGDSNNLQENAYDVEVVLSELHQDTNNPIASGKTFQDLGLPDTVLQGLNAMKFLKPSKVQEKALPLMLADPPQNMIGQSQSGTGKTGAFVVTVLSRVD

SEQ ID NO: 19241 - DNA, 1015 bp, Muscodor strobelii
  misc_feature: SGI EST ID NO. CUFF.44991.1
  misc_feature: Variant of the nucleotide sequence at SEQ ID NO 19239
cccccggagttcttgggaaagagctagccacgccaagcacaagatcatgtccagatacctgcccctccttccaactgtgtgcatgtcagggtatgggccatcaagtttggaagtcgcaatacatacctatcagctctaacagcccctcgaagtcacatacccacagcacgctccggcttttgacctacccctctgtatgtacaaacacaatagggccccgcgttggcaggcgcaagtggcagtaggggcagcagcaacaacaccatcaaaaagctcatcgttgaggtaaccccgccaaaattcatgaccgtgaagcttcatccctcgtccgcagctcaccacccccgtcaccctcccccgtagcagcacccccgtccgcgctgcctgtctgagtgttttgtatttctgattcccctctttgttgtgttcattcctctcttctctccccttctcccagaccacactctatctcagagcatctggcatctggactctggactctgaactctaggccttggcagagcgagtgcatcaaccaccacttctgcgcatatcagctggctagcttcctcacagaccacataaccctctcctgccgtgccgcgcgcatctagatcttggttcacgccaggcctgccttcctcgcactttgcattgatacattgcattgacgctctgcctacctgcctctcgccatggctgaccacactgccgacgcccaaaacggcgacagtaacaacttgcaggagaatgcctacgacgtcgaggtcgtcctctccgagctgcaccaggacactaacaaccctattgcctcgggcaagacctttcaagacctcggccttcccgatacggtcctccagggcctcaacgccatgaagttcctcaagccctccaaggtccaggagaaggccctcccgctcatgctcgccgacccgccccagaacatgatcggccagtcccagtccggcaccggcaagacgggcgcctttgtcgtcaccgtcctctcgcgcgtcga

SEQ ID NO: 19242 - DNA, 1824 bp, Muscodor strobelii
  misc_feature: SGI cDNA ID NO. 566468
  misc_feature: Reduced expression when VOC is produced
  misc_feature: Encodes the peptide sequence at SEQ ID NO 19243
cgctggcccctcaacacggccgccaagcccctcggcgccgtccgcgctgtctccgaggtggtcaagaaggccggcgacacctacgccgtcagggccgccgtggtcaccgacgccgacgactggacccaggtcgtgaacggcgacgtcagctggacccgcctcgagggcatgagcggtgctgtggccgccacctgggccgacatccccgagcctgaagacctcgccaaggtgctcgaggccgaagcccacgacaaccccctgaaggcctacatccaccgcgtgaaccgccacatcgacgatctccagtacctgcccgcgtacctgcagtcccttccccggcgtctgctcagtgtcctcgtgggctcggagcacgcggcttcctctactggtgagctatcgcgtgatagctttgggttcaacaagctcgtcgtgctagccacgaagcgtgggaagctatatgggctcgatgccggcgaccacggcaaggtgctctggtccaagaagtcgaccgagaccccctcgggcccgacttgggacgtcaaggccatgtacgccgacaacgccaagggcttcgtcacggtgcgcggcgccgagggcgacttcatcattgtgaacgcctccaccggccagaccatcgacactatgcccatcggcctcctgccgcatgtggacggtgctgtggccgtagacagcgacgccgggccttggttgctccccatcgaacaagacggcaagctggccgaggtgatgagtgcctacgctccgaagcagaccgtcgtcacccgtccgagcgccaatgagatccagggtcagatgttcgtcaacaaaggcgaccttgcgtccgccgtgcccgtctggaacttctcgccttcagcagggcagcggatcgtgaaggtggcaacccgctcacagcatgatcccatcgcctccatcggccgcgtcctcggcgatcgaacggtcaagtacaaatatctgaaccccaacaccttggtggtcgcggctgtgaacgatgagtcctccacgctctccgtctacctcttagacacggtatcgggccaggtgctcacgtcatcaagcctggaaggagtcgacgcggacaaagacatcagctgcgccatcgccgagaactggttcctctgcacgtacttcggacagtacacattgcgcgacaaccaggagcaaaagctgaagggctatcaggtcgtcgtcttcgatctgtacgagtctgagctggccaacgatcgcggcgtcctcggcgaggcaccccagttttcctctctcgatcctgtcgactcgcacaccggccccgccctcccatctgtggagtccaagacgttcatcctgtccggccccatcacctctctcgccgtcacgcagaccaggcaaggtatcaccgtccgccagctgctggcctacatgccggaagcccattccatcgtcggcctgcccaagatgatattggagccccgtagaatcgtcggccgagaccccacggcggccgagatggaagaaggcctgtccaagtatctaccggcgattgagctcgacccacgcctcacgatcacgcatctgagagacgtagtgggcgtaaaggagatcattacggcacccgctatattggagagtacttgtctcgtgtttgcctatggcgttgatgtgtttggcacgagggtggcgccgagccacgcctttgatattctcggcaaggggttcaataaagtggcccttttggggacggtgttagccctctttgttggtgtttcggttttgggacctatggttcggaaaaagcagattaacatgcgctggaaggcgcctatgtaa

SEQ ID NO: 19243 - protein, 607 aa, Muscodor strobelii
  misc_feature: SGI Peptide ID NO. 566468
  misc_feature (308)..(603): Pfam Id: PF07774 Pfam Desc: Domain of function (DUF1620)
  misc_feature (140)..(179): Pfam Id: PF01011 Pfam Desc: PQQ enzyme repeat
  misc_feature (1)..(607): NCBI GI: 171683935 Blast Desc: protein product [Podospora anserina] gi|170941928|emb|CAP67580.1| protein product [Podospora anserina]
  misc_feature (1)..(607): NCBI GI: 85074773 Blast Desc: NCU00614 [Neurospora crassa OR74A] gi|28927567|gb|EAA36518.1| conserved [Neurospora crassa OR74A]
  misc_feature (1)..(606): NCBI GI: 261353640 Blast Desc: conserved [Verticillium albo-atrum VaMs.102]
  misc_feature (1)..(606): NCBI GI: 39970801 Blast Desc: MGG_02867 [Magnaporthe grisea 70-15] gi|145017315|gb|EDK01678.1| MGG_02867 [Magnaporthe grisea 70-15]
  misc_feature (1)..(606): NCBI GI: 149210293 Blast Desc: MGCH7_ch7g624 [Magnaporthe grisea 70-15] gi|86196579|gb|EAQ71217.1| MGCH7_ch7g624 [Magnaporthe grisea 70-15]
  misc_feature (1)..(603): NCBI GI: 154310580 Blast Desc: BC1G_06764 [Botryotinia fuckeliana B05.10] gi|150851304|gb|EDN26497.1| BC1G_06764 [Botryotinia fuckeliana B05.10]
  misc_feature (1)..(605): NCBI GI: 46105266 Blast Desc: FG00261.1 [Gibberella zeae PH-1]
  misc_feature (1)..(605): NCBI GI: 256731907 Blast Desc: [Nectria haematococca mpVI 77-13-4]
  misc_feature (1)..(605): NCBI GI: 156058420 Blast Desc: SS1G_03221 [Sclerotinia sclerotiorum 1980] gi|154701009|gb|EDO00748.1| SS1G_03221 [Sclerotinia sclerotiorum 1980]
  misc_feature (1)..(604): NCBI GI: 212534540 Blast Desc: conserved [Penicillium marneffei ATCC 18224] gi|210069825|gb|EEA23915.1| conserved [Penicillium marneffei ATCC 18224]
  misc_feature: Useful for introducing or modulating the production of volatile compounds
RWPLNTAAKPLGAVRAVSEVVKKAGDTYAVRAAVVTDADDWTQVVNGDVSWTRLEGMSGAVAATWADIPEPEDLAKVLEAEAHDNPLKAYIHRVNRHIDDLQYLPAYLQSLPRRLLSVLVGSEHAASSTGELSRDSFGFNKLVVLATKRGKLYGLDAGDHGKVLWSKKSTETPSGPTWDVKAMYADNAKGFVTVRGAEGDFIIVNASTGQTIDTMPIGLLPHVDGAVAVDSDAGPWLLPIEQDGKLAEVMSAYAPKQTVVTRPSANEIQGQMFVNKGDLASAVPVWNFSPSAGQRIVKVATRSQHDPIASIGRVLGDRTVKYKYLNPNTLVVAAVNDESSTLSVYLLDTVSGQVLTSSSLEGVDADKDISCAIAENWFLCTYFGQYTLRDNQEQKLKGYQVVVFDLYESELANDRGVLGEAPQFSSLDPVDSHTGPALPSVESKTFILSGPITSLAVTQTRQGITVRQLLAYMPEAHSIVGLPKMILEPRRIVGRDPTAAEMEEGLSKYLPAIELDPRLTITHLRDVVGVKEIITAPAILESTCLVFAYGVDVFGTRVAPSHAFDILGKGFNKVALLGTVLALFVGVSVLGPMVRKKQINMRWKAPM

SEQ ID NO: 19244 - DNA, 2418 bp, Muscodor strobelii
  misc_feature: SGI EST ID NO. CUFF.45002.0
  misc_feature: Variant of the nucleotide sequence at SEQ ID NO 19242
gccgctggcccctcaacacggccgccaagcccctcggcgccgtccgcgctgtctccgaggtggtcaagaaggccggcgacacctacgccgtcagggccgccgtggtcaccgacgccgacgactggacccaggtcgtgaacggcgacgtcagctggacccgcctcgagggcatgagcggtgctgtggccgccacctgggccgacatccccgagcctgaagacctcgccaaggtgctcgaggccgaagcccacgacaaccccctgaaggcctacatccaccgcgtgaaccgccacatcgacgatctccagtacctgcccgcgtacctgcagtcccttccccggcgtctgctcagtgtcctcgtgggctcggagcacgcggcttcctctactggtgagctatcgcgtgatagctttgggttcaacaagctcgtcgtgctagccacgaagcgtgggaagctatatgggctcgatgccggcgaccacggcaaggtgctctggtccaagaagtcgaccgagaccccctcgggcccgacttgggacgtcaaggccatgtacgccgacaacgccaagggcttcgtcacggtgcgcggcgccgagggcgacttcatcattgtgaacgcctccaccggccagaccatcgacactatgcccatcggcctcctgccgcatgtggacggtgctgtggccgtagacagcgacgccgggccttggttgctccccatcgaacaagacggcaagctggccgaggtgatgagtgcctacgctccgaagcagaccgtcgtcacccgtccgagcgccaatgagatccagggtcagatgttcgtcaacaaaggcgaccttgcgtccgccgtgcccgtctggaacttctcgccttcagcagggcagcggatcgtgaaggtggcaacccgctcacagcatgatcccatcgcctccatcggccgcgtcctcggcgatcgaacggtcaagtacaaatatctgaaccccaacaccttggtggtcgcggctgtgaacgatgagtcctccacgctctccgtctacctcttagacacggtatcgggccaggtgctcacgtcatcaagcctggaaggagtcgacgcggacaaagacatcagctgcgccatcgccgagaactggttcctctgcacgtacttcggacagtacacattgcgcgacaaccaggagcaaaagctgaagggctatcaggtcgtcgtcttcgatctgtacgagtctgagctggccaacgatcgcggcgtcctcggcgaggcaccccagttttcctctctcgatcctgtcgactcgcacaccggccccgccctcccatctgtggagtccaagacgttcatcctgtccggccccatcacctctctcgccgtcacgcagaccaggcaaggtatcaccgtccgccagctgctggcctacatgccggaagcccattccatcgtcggcctgcccaagatgatattggagccccgtagaatcgtcggccgagaccccacggcggccgagatggaagaaggcctgtccaagtatctaccggcgattgagctcgacccacgcctcacgatcacgcatctgagagacgtagtgggcgtaaaggagatcattacggcacccgctatattggagagtacttgtctcgtgtttgcctatggcgttgatgtgtttggcacgagggtggcgccgagccacgcctttgatattctcggcaaggggttcaataaagtggcccttttggggacggtgttagccctctttgttggtgtttcggttttgggacctatggttcggaaaaagcagattaacatgcgctggaaggcgcctatgtaaaaccctagatgtgaatcggtatggatatttgatcgacacacggcggaatgctgtgttaatatacaataaaatagaggttggcgtgacataatctggaacggcacggtcgggacagaatggcctgtagatacttgttattggatttggctgtctttccccctcactctggggcgtatggagctagaaagatcttcttttcatttatattggtcttggctgagtatctgtgagcctaaagattcgacaatcagtgtcgtacttatccccgataaatccacagggcgatcaagtataagactattggttaacttgatgaaatcattgcatatggtcgaactaagttacgtcgtccagtccagtggcagagatgctgcaagagatgctctcttattgctttttgaaatgtaatgctgaggaataccagactctatcgagcccttgggaggaggacaagagcagtgagatcgatcgcagacaatagcattgaaagacaaaggaggagagtgaaagaaccatgtctccctgcgcaagacaatgcctttatacaggtagggactagaaacaccaactgatatttataaacgagttgtcc

SEQ ID NO: 19245 - DNA, 600 bp, Muscodor strobelii
  misc_feature: SGI cDNA ID NO. 566469
  misc_feature: Encodes the peptide sequence at SEQ ID NO 19246
atgcacgtaaagaccctccttcacgtaactttccgtcaagataatgttctcaaagacccactactaacctccaactacagactccgcatactcgagtacaaggccgtcctctccaaggtcggctttgatgcctctctcctggactcgatcgatggcaagcttggagccgcgggacacgacctcaagatcgctctacaaagtcttgctgagctcccgctcttggttgatgagctggaccccgactggcagcgttgcaaattcatcgtgtacggcgatatcgaggagcttgcggatcgagcaacgagaatggcgagggcgatcgggggtgtggagggtgcaatggagaaagtgattaaagccaggaataaaagcgaatttgtagtgcgggatgatgtgtttgaagagaatagatatttgactggtgctcatgctgagaggctagagggcgagtttaggaaagaggtgagtttgtttcctgaatttgcaacctttgatagcacgaggtggttgggacagatgattgatggacggcgggatgaagcgagacttcctgcatggagacggccgagacggaatgctttgagtgttcttgagtattag

SEQ ID NO: 19246 - protein, 199 aa, Muscodor strobelii
  misc_feature: SGI Peptide ID NO. 566469
MHVKTLLHVTFRQDNVLKDPLLTSNYRLRILEYKAVLSKVGFDASLLDSIDGKLGAAGHDLKIALQSLAELPLLVDELDPDWQRCKFIVYGDIEELADRATRMARAIGGVEGAMEKVIKARNKSEFVVRDDVFEENRYLTGAHAERLEGEFRKEVSLFPEFATFDSTRWLGQMIDGRRDEARLPAWRRPRRNALSVLEY

SEQ ID NO: 19247 - DNA, 1131 bp, Muscodor strobelii
  misc_feature: SGI cDNA ID NO. 566470
  misc_feature: Encodes the peptide sequence at SEQ ID NO 19248
atgagatactctatcctcgccaccgcccttgttggcgccaccaccgtccatggacttcctagcttcattaatgagatcgtcaatgacttcaagggagccttggcacctcttctccagcccatcagctacggtcgccacttggtgaatctggaggaggccaagactaagtatgcttcatggcccaagttcattcaccccgacccgaaccacgagtacaaggatggcgcctgcgagaccgagatagccttcaagaatggaagcctgggtggtctgctcccaagagaaactgctgcggcctgtgctgccagccccaacatccgatacgaatgggacgactactccacgagcgaccggcaggctctgatgtcggctttcaagtgccttcagaacaagaagccgtcaggcgctttctcgtcctccaccagcagatgggaggacttcgctcgtcttcaccagtcctacactgccaacattcacggtaaccagaaattcctcctctggcaccgctacttcctgtggaccttcgagcaggtcctccgttccgagtgtggtttcaaccgcgccttcgtctggtttgatgagaccaagcacgccggcgctttctccggctccgacttgttcagcaatgcgtatctcggatctttgagcggaactcagaagtgcgtgactgacggtgctttcgccggacttacctgccacatcggacccggaactggcgagtcgactcattgcttgagccgtaagggaacgtcttcggacactgctcagtgcagcactggttacatcaactactgcgccagcatggccgactacaagaactacgaggtttgcctcgagaatggacctcacggatacggccacaacggtgtcggtggtgtcatggaggacgtcaactcctctccccaggagcctttcttctggttccaccacgccttcatcgaccgtgcctaccgtgtctgggagctcgccgacactggctcccgctacagctcgatcgacggtaccgacgcaaacggcaacgccttcaccttggacacagtcatcttcatgggcggcatccgacccgacgtcacggtccgcgagatcatcaacacgctcagcgggaccatgtgctaccgatacaactactag

SEQ ID NO: 19248 - protein, 376 aa, Muscodor strobelii
  misc_feature: SGI Peptide ID NO. 566470
  misc_feature (1)..(376): NCBI GI: 225562498 Blast Desc: conserved [Ajellomyces capsulatus G186AR]
  misc_feature (1)..(376): NCBI GI: 240281068 Blast Desc: tyrosinase [Ajellomyces capsulatus H143]
  misc_feature (1)..(376): NCBI GI: 225680996 Blast Desc: conserved [Paracoccidioides brasiliensis Pb03] gi|226292709|gb|EEH48129.1| conserved [Paracoccidioides brasiliensis Pb18]
  misc_feature (91)..(376): NCBI GI: 189191358 Blast Desc: conserved [Pyrenophora tritici-repentis Pt-1C-BFP] gi|187973624|gb|EDU41123.1| conserved [Pyrenophora tritici-repentis Pt-1C-BFP]
  misc_feature (97)..(376): NCBI GI: 226283985 Blast Desc: conserved [Paracoccidioides brasiliensis Pb01]
  misc_feature (27)..(376): NCBI GI: 261205108 Blast Desc: tyrosinase [Ajellomyces dermatitidis SLH14081] gi|239592350|gb|EEQ74931.1| tyrosinase [Ajellomyces dermatitidis SLH14081] gi|239611493|gb|EEQ88480.1| tyrosinase [Ajellomyces
  misc_feature (96)..(376): NCBI GI: 169622300 Blast Desc: SNOG_14370 [Phaeosphaeria nodorum SN15] gi|111057121|gb|EAT78241.1| SNOG_14370 [Phaeosphaeria nodorum SN15]
  misc_feature (93)..(376): NCBI GI: 169596702 Blast Desc: SNOG_01119 [Phaeosphaeria nodorum SN15] gi|160701375|gb|EAT92614.2| SNOG_01119 [Phaeosphaeria nodorum SN15]
  misc_feature (94)..(376): NCBI GI: 145603725 Blast Desc: MGG_05862 [Magnaporthe grisea 70-15] gi|145011893|gb|EDJ96549.1| MGG_05862 [Magnaporthe grisea 70-15]
  misc_feature (97)..(376): NCBI GI: 39962362 Blast Desc: MGG_09614 [Magnaporthe grisea 70-15] gi|145021841|gb|EDK05918.1| MGG_09614 [Magnaporthe grisea 70-15]
MRYSILATALVGATTVHGLPSFINEIVNDFKGALAPLLQPISYGRHLVNLEEAKTKYASWPKFIHPDPNHEYKDGACETEIAFKNGSLGGLLPRETAAACAASPNIRYEWDDYSTSDRQALMSAFKCLQNKKPSGAFSSSTSRWEDFARLHQSYTANIHGNQKFLLWHRYFLWTFEQVLRSECGFNRAFVWFDETKHAGAFSGSDLFSNAYLGSLSGTQKCVTDGAFAGLTCHIGPGTGESTHCLSRKGTSSDTAQCSTGYINYCASMADYKNYEVCLENGPHGYGHNGVGGVMEDVNSSPQEPFFWFHHAFIDRAYRVWELADTGSRYSSIDGTDANGNAFTLDTVIFMGGIRPDVTVREIINTLSGTMCYRYNY

SEQ ID NO: 19249 - DNA, 1991 bp, Muscodor strobelii
  misc_feature: SGI EST ID NO. CUFF.45084.0
  misc_feature: Variant of the nucleotide sequence at SEQ ID NO 19247
tcgggataggggcgcaagccaacaatcgcatgcacgcggtggtctcttttaaagatgctgctgctgctgcggcgatcttcgatcctcgattatcctgtttgctagtccagctttcggccgcctcgcccattataacgacctcgtcgtttgtcattcgttttcagtcgctcgctcacgtcactcgttgctcgtcgccctggtcgcttcgtcgaccttaatatacgttcgcctaatattgtaatatcgaaactcttcattgtagatagtgctgggtcaccatgagatactctatcctcgccaccgcccttgttggcgccaccaccgtccatggacttcctagcttcattaatgagatcgtcaatgacttcaagggagccttggcacctcttctccagcccatcagctacggtcgccacttggtgaatctggaggaggccaagactaagtatgcttcatggcccaagttcattcaccccgacccgaaccacgagtacaaggatggcgcctgcgagaccgagatagccttcaagaatggaagcctgggtggtctgctcccaagagaaactgctgcggcctgtgctgccagccccaacatccgatacgaatgggacgactactccacgagcgaccggcaggctctgatgtcggctttcaagtgccttcagaacaagaagccgtcaggcgctttctcgtcctccaccagcagatgggaggacttcgctcgtcttcaccagtcctacactgccaacattcacggtaaccagaaattcctcctctggcaccgctacttcctgtggaccttcgagcaggtcctccgttccgagtgtggtttcaaccgcgccttcgtctggtttgatgagaccaagcacgccggcgctttctccggctccgacttgttcagcaatgcgtatctcggatctttgagcggaactcagaagtgcgtgactgacggtgctttcgccggacttacctgccacatcggacccggaactggcgagtcgactcattgcttgagccgtaagggaacgtcttcggacactgctcagtgcagcactggttacatcaactactgcgccagcatggccgactacaagaactacgaggtttgcctcgagaatggacctcacggatacggccacaacggtgtcggtggtgtcatggaggacgtcaactcctctccccaggagcctttcttctggttccaccacgccttcatcgaccgtgcctaccgtgtctgggagctcgccgacactggctcccgctacagctcgatcgacggtaccgacgcaaacggcaacgccttcaccttggacacagtcatcttcatgggcggcatccgacccgacgtcacggtccgcgagatcatcaacacgctcagcgggaccatgtgctaccgatacaactactagagaattggctatccttcttgaacgctgtttactatttcaatatcagatactaggcatgacacgtatataacgatatacatatacccactacatatcatgatcatcatcatctgcattttccccgttggcgtggcgcacgttgagttgctagagagacgtgtagatatgtctttctgaagtaggtgaagtgctgtccacgcatcgctcttgtgtatattcccaccatagatcaatttagttcttcgtcttaagatcgtgcatttcggagcatcatgggatgtgtgtgaatatggtcatgttcggatgcaggccgggcgacgctggataatatgcaaattctgtctattatctacaaatcatcatgacccagtcgcatagtagtaatcaggacgaactacctcagtatctcctgacgatagcctcgccgcagacagttaataggacttacgcatttactgtcagtcccataagcctcacttttgcaataagatagttcatcgaagtcattgcatacaacgcagcatctctaagaggcaggacgttgcttattgcggagtctaattataggccgcccaagccccg

SEQ ID NO: 19250 - DNA, 1128 bp, Muscodor strobelii
  misc_feature: SGI cDNA ID NO. 566471
  misc_feature: Reduced expression when VOC is produced
  misc_feature: Encodes the peptide sequence at SEQ ID NO 19251
cagtccccgctgccccccaagctgcccgacgacgcgcccctgagcgaccgcgtgcgcgaggcccgcgacaccatcttccaccaagagctgtggtacgagctcaaccgcgaggcccgcctcctcctcgcctccagcgtccgctacagcggcgccgccatcgtctgggacatggacggcgacacccagtacgtcttcaccctcgaagacctggtcgacgacgaggtcgccccctacgcaaacctggccgccgccaccaactcctgcctcgccagctactccttcctccagttcctcctcttccagaaccaccgccagaactacaaccgccgcacctcccccaccctcctcgcacgccagccgccctccctcaacgccccctaccacatcctgcgtcccttcatctccaggctcggctatctgaaggacgctgccgctctgaccagcttcctcgagcggctcgtcacgacgatccgacgcgcgggcatcgccacggctacctactcttccaccttcatgccccagatcgcctccggctccaatgctacacccgtgcgcctcacccccagcggcgagctccagtgggttcaccagcttttcagcgccctgacttccttatacactctgaccatcactcccgaggcccgcgtctggtgccacagtcgcgccgtcatgcagcccttcatcggcaccctgtatgccatgtccctccggccgccctttaccgacaccaaggacctgccccggaatccgctgcaacatctctgcccaccttctgatcctcacaatcagccatatcccaaccttcacgaggccactctctacctccgccaggctgctgtgcgcgctatatcctaccagtgcgcacgcaacgccgccgagaagctcggcaacaaggagatcaggcccttagacgccgtcgaaggcacaggcgtcacggataataaaggtaactatgcccggattgatatcaatatggtggatgggaaggcgatcctcacgttggacgctcagtggccagccgggaacgagacgcagcctcggcgctggacctggggccccgacccgggagacgcgaatcccgagagcatacagacggtcgtcaacaaactcatgagaggcaacgtatag

SEQ ID NO: 19251 - protein, 375 aa, Muscodor strobelii
  misc_feature: SGI Peptide ID NO. 566471
  misc_feature (1)..(307): NCBI GI: 149209793 Blast Desc: MGCH7_ch7g379 [Magnaporthe grisea 70-15] gi|86196334|gb|EAQ70972.1| MGCH7_ch7g379 [Magnaporthe grisea 70-15]
  misc_feature (1)..(307): NCBI GI: 145610209 Blast Desc: MGG_12636 [Magnaporthe grisea 70-15] gi|145017561|gb|EDK01924.1| MGG_12636 [Magnaporthe grisea 70-15]
  misc_feature (1)..(372): NCBI GI: 46128327 Blast Desc: FG08541.1 [Gibberella zeae PH-1]
  misc_feature (1)..(364): NCBI GI: 261353126 Blast Desc: mediator of RNA polymerase II transcription subunit 17 [Verticillium albo-atrum VaMs.102]
  misc_feature (1)..(299): NCBI GI: 85074801 Blast Desc: NCU00628 [Neurospora crassa OR74A] gi|28927581|gb|EAA36532.1| [Neurospora crassa OR74A]
  misc_feature (1)..(258): NCBI GI: 116193097 Blast Desc: CHGG_06266 [Chaetomium globosum CBS 148.51] gi|88182179|gb|EAQ89647.1| CHGG_06266 [Chaetomium globosum CBS 148.51]
  misc_feature (1)..(369): NCBI GI: 256733616 Blast Desc: NECHADRAFT_92009 [Nectria haematococca mpVI 77-13-4]
  misc_feature (11)..(162): NCBI GI: 258578193 Blast Desc: [Uncinocarpus reesii 1704] gi|237903544|gb|EEP77945.1| [Uncinocarpus reesii 1704]
  misc_feature (2)..(250): NCBI GI: 145254421 Blast Desc: An18g01610 [Aspergillus niger] gi|134084201|emb|CAK47234.1| protein product [Aspergillus niger]
  misc_feature (3)..(217): NCBI GI: 119180508 Blast Desc: CIMG_08881 [Coccidioides immitis RS] gi|121752962|sp|Q1DLD2.1|MED17_COCIM RecName: Full=Mediator of RNA polymerase II transcription subunit 17; AltName: complex 17
  misc_feature: Useful for introducing or modulating the production of volatile compounds
QSPLPPKLPDDAPLSDRVREARDTIFHQELWYELNREARLLLASSVRYSGAAIVWDMDGDTQYVFTLEDLVDDEVAPYANLAAATNSCLASYSFLQFLLFQNHRQNYNRRTSPTLLARQPPSLNAPYHILRPFISRLGYLKDAAALTSFLERLVTTIRRAGIATATYSSTFMPQIASGSNATPVRLTPSGELQWVHQLFSALTSLYTLTITPEARVWCHSRAVMQPFIGTLYAMSLRPPFTDTKDLPRNPLQHLCPPSDPHNQPYPNLHEATLYLRQAAVRAISYQCARNAAEKLGNKEIRPLDAVEGTGVTDNKGNYARIDINMVDGKAILTLDAQWPAGNETQPRRWTWGPDPGDANPESIQTVVNKLMRGNV

SEQ ID NO: 19252 - DNA, 1614 bp, Muscodor strobelii
  misc_feature: SGI EST ID NO. CUFF.45087.0
  misc_feature: Variant of the nucleotide sequence at SEQ ID NO 19250
tccccgctgccccccaagctgcccgacgacgcgcccctgagcgaccgcgtgcgcgaggcccgcgacaccatcttccaccaagagctgtggtacgagctcaaccgcgaggcccgcctcctcctcgcctccagcgtccgctacagcggcgccgccatcgtctgggacatggacggcgacacccagtacgtcttcaccctcgaagacctggtcgacgacgaggtcgccccctacgcaaacctggccgccgccaccaactcctgcctcgccagctactccttcctccagttcctcctcttccagaaccaccgccagaactacaaccgccgcacctcccccaccctcctcgcacgccagccgccctccctcaacgccccctaccacatcctgcgtcccttcatctccaggctcggctatctgaaggacgctgccgctctgaccagcttcctcgagcggctcgtcacgacgatccgacgcgcgggcatcgccacggctacctactcttccaccttcatgccccagatcgcctccggctccaatgctacacccgtgcgcctcacccccagcggcgagctccagtgggttcaccagcttttcagcgccctgacttccttatacactctgaccatcactcccgaggcccgcgtctggtgccacagtcgcgccgtcatgcagcccttcatcggcaccctgtatgccatgtccctccggccgccctttaccgacaccaaggacctgccccggaatccgctgcaacatctctgcccaccttctgatcctcacaatcagccatatcccaaccttcacgaggccactctctacctccgccaggctgctgtgcgcgctatatcctaccagtgcgcacgcaacgccgccgagaagctcggcaacaaggagatcaggcccttagacgccgtcgaaggcacaggcgtcacggataataaaggtaactatgcccggattgatatcaatatggtggatgggaaggcgatcctcacgttggacgctcagtggccagccgggaacgagacgcagcctcggcgctggacctggggccccgacccgggagacgcgaatcccgagagcatacagacggtcgtcaacaaactcatgagaggcaacgtatagaatgcgtccgtccccccatttctcctaactacccacggttgggtcagtgtttttgatgatcctcagctatatcagagtgtcttgtattgcctcgagagatatgatagctgggcaagtcaagaataaactgaattgacaaaacacgtctttttcttttggctcccagcagtgccatgttccattgtgcctataccatgcttgaaccgcctgtcagcctaatgacgccgtcgtcatcaccaagaccatagtctcataagcatccctactcacactattcaattatagcaggtgcgagggaaattgtgcgagttgagtactcacaaagaatccgaagcttgatttcattgggagttctgtaacttgcccttcgacaattcgatgccatcgtctacctcagctagtaggtgcgaatagtggatgaaataagcacatatgaacgcaattttagccagaatctaactacatatatgtaatgaaggctgcttgacc

SEQ ID NO: 19253 - DNA, 2424 bp, Muscodor strobelii
  misc_feature: SGI cDNA ID NO. 566472
  misc_feature: Reduced expression when VOC is produced
  misc_feature: Encodes the peptide sequence at SEQ ID NO 19254
atggccacaagcccggcaccttcgggacccaagcggttgtcttttgccaaggtcgctgcctcctcccagcagcatctctccccccagaaccgagtcgccgtccccgctgccatggatcgccgtgcgcagcctgtcgcagcgtctgcctctgcatctgcctcgagccttgttgccactcctcagtatgctcctcagatcgcccctccgaacgggcacacagcggatccagccacggcctcgaggccctccatcggtggagcatcagttccagtcccagttccagcgccccccgtcgccgccgccgcgcctcagcaccgagaggacacaagtgtgaacaagttgttggagggagtgaaggatatggccgtcgcttccccgctgcccagcgtcacatctacgcccagcttggtggtgaatggctcgtcgtcttcggtggtgggctcccagggcaagaacgacaacgggacctcgctgtcggacgacgtctcccagcctgccgactccagctcggacatgggcaccaaagccccgagcctcgacgggaagagcatcacctccggcacgaccttcgcgctggacgagaaagagtctctccggcccgacgacagcgccagcgtcaaggctgcagccgacgacgacgagcccttctccgtcaggggctcgctgctggccacgtcccgcatgggctcggacaacgcgcgcgtccaccgtctgcgaatcggagacatgcccacagagaagcgcttcgtccagcagcagcttctccccgaggtccaagacaacggtgtctccacgccacagagtgccgcctcgagccagcagccgctcgccggccagactccggcactgggcacggcaggcacgcccggcgatgccttcaactcgacctacgggcagaatcccgacgacaagcttttggaagccatgaagtcgcccaaggaccgcctctttctgttgaaggcagaacagacggttatccattttgtgcagttctccaaagacccttatatagacctgccgccctgcaactcgttttgcggtccaaggcgccttcgcatctacaagacccccttctgccggctgcctccctcgctcgccggcatggtagagagcgagacggatgagacggccaacacgcccccaccgccagtcctgcccaagaagatcatgcgacgtggcgacaacggcggctccggcccgaccagcaccagcgcctccaaggctacctctgaggtcggtagtgacggcaaggagaagacgctcaacaaagagaagatgacgagagaagagcgcgaggaggcctacaagcaagctcgcgagaggatcttcggcaacagctcggacaaggcagatctgacccccgagactgaagatccaagtggcatctcccgcgccagctcggtgtcgggcaaggagaagtctaccattggcaggagaggaaaggcaaacaggcatcgcagagacgactcggagagctttgaatcgcgctcgcagttcgtccaatactttcatccaccggcccagatggattgggcaccgcactacatgtctggcaatatgcagtataatgtgcaagcaccacagccctaccaatatcagcttcctcagccctaccagacaccacagcagggctatcccaacatggcaccgagttcgatgcccaacccgagctaccagcaatatggcagcatgccagcatatgccccccaagcgcaaccttcccctcaacaacaggcccagcctcccccacagcctcttcctcggttcccatccaatgggtccatgggcccaggaggctacggctcccctgctcaacctagtccccagcagcagcagcaacaatggcagcctagctttacgccaactccgccgccagcggtacctcttcagcaatatcctaaccgtgtttctatgtctccacctcaaggacagtctccgggcagctcgggtccgatgggaggaattccttacgcgtacgggcaacttcccgtcaatgccaacccgcatgaccccaagagtcaacatcctatccctggaagctacaatcgacatcatgccttcaatccaaacactaaatcatttgttcccggcggtgggataaatgccgcgcagccgccgataccctataatatagcgggtccggcgcatggcagtccgcaacttgcatcgactcacatggcgtacaacgggtacagctcgtccacgccaccacagccttatatgggtgggaatatgggtggtcccgggtacggcatgagccggcagagctccaacaactccctccctccgtaccatgcgcctcagcacctcccgccgcacccggcacctcctagtcatctccccccaaatgcctcacaagccaggcatgacatctcaggcagcaccggcagggccgagcccgccgacgtacagccacctccctaa

SEQ ID NO: 19254 - protein, 807 aa, Muscodor strobelii
  misc_feature: SGI Peptide ID NO. 566472
  misc_feature (14)..(782): NCBI GI: 46137117 Blast Desc: FG10074.1 [Gibberella zeae PH-1]
  misc_feature (14)..(768): NCBI GI: 256732121 Blast Desc: NECHADRAFT_100540 [Nectria haematococca mpVI 77-13-4]
  misc_feature (113)..(789): NCBI GI: 171691931 Blast Desc: protein product [Podospora anserina] gi|170945914|emb|CAP72715.1| protein product [Podospora anserina]
  misc_feature (106)..(761): NCBI GI: 145605289 Blast Desc: MGG_11709 [Magnaporthe grisea 70-15] gi|145013118|gb|EDJ97759.1| MGG_11709 [Magnaporthe grisea 70-15]
  misc_feature (1)..(781): NCBI GI: 154316829 Blast Desc: BC1G_03832 [Botryotinia fuckeliana B05.10] gi|150845444|gb|EDN20637.1| BC1G_03832 [Botryotinia fuckeliana B05.10]
  misc_feature (37)..(785): NCBI GI: 85103962 Blast Desc: NCU01019 [Neurospora crassa OR74A] gi|16415975|emb|CAB88519.3| conserved [Neurospora crassa] gi|28923179|gb|EAA32395.1| [Neurospora crassa OR74A]
  misc_feature (1)..(546): NCBI GI: 261355716 Blast Desc: conserved [Verticillium albo-atrum VaMs.102]
  misc_feature (1)..(454): NCBI GI: 156043627 Blast Desc: SS1G_10817 [Sclerotinia sclerotiorum 1980] gi|154695204|gb|EDN94942.1| SS1G_10817 [Sclerotinia sclerotiorum 1980]
  misc_feature (107)..(435): NCBI GI: 116180066 Blast Desc: CHGG_00661 [Chaetomium globosum CBS 148.51] gi|88184958|gb|EAQ92426.1| CHGG_00661 [Chaetomium globosum CBS 148.51]
  misc_feature (142)..(789): NCBI GI: 189196380 Blast Desc: conserved [Pyrenophora tritici-repentis Pt-1C-BFP] gi|187980407|gb|EDU47033.1| conserved [Pyrenophora tritici-repentis Pt-1C-BFP]
  misc_feature: Useful for introducing or modulating the production of volatile compounds
MATSPAPSGPKRLSFAKVAASSQQHLSPQNRVAVPAAMDRRAQPVAASASASASSLVATPQYAPQIAPPNGHTADPATASRPSIGGASVPVPVPAPPVAAAAPQHREDTSVNKLLEGVKDMAVASPLPSVTSTPSLVVNGSSSSVVGSQGKNDNGTSLSDDVSQPADSSSDMGTKAPSLDGKSITSGTTFALDEKESLRPDDSASVKAAADDDEPFSVRGSLLATSRMGSDNARVHRLRIGDMPTEKRFVQQQLLPEVQDNGVSTPQSAASSQQPLAGQTPALGTAGTPGDAFNSTYGQNPDDKLLEAMKSPKDRLFLLKAEQTVIHFVQFSKDPYIDLPPCNSFCGPRRLRIYKTPFCRLPPSLAGMVESETDETANTPPPPVLPKKIMRRGDNGGSGPTSTSASKATSEVGSDGKEKTLNKEKMTREEREEAYKQARERIFGNSSDKADLTPETEDPSGISRASSVSGKEKSTIGRRGKANRHRRDDSESFESRSQFVQYFHPPAQMDWAPHYMSGNMQYNVQAPQPYQYQLPQPYQTPQQGYPNMAPSSMPNPSYQQYGSMPAYAPQAQPSPQQQAQPPPQPLPRFPSNGSMGPGGYGSPAQPSPQQQQQQWQPSFTPTPPPAVPLQQYPNRVSMSPPQGQSPGSSGPMGGIPYAYGQLPVNANPHDPKSQHPIPGSYNRHHAFNPNTKSFVPGGGINAAQPPIPYNIAGPAHGSPQLASTHMAYNGYSSSTPPQPYMGGNMGGPGYGMSRQSSNNSLPPYHAPQHLPPHPAPPSHLPPNASQARHDISGSTGRAEPADVQPPP

SEQ ID NO: 19255 - DNA, 4089 bp, Muscodor strobelii
  misc_feature: SGI EST ID NO. CUFF.45148.1
  misc_feature: Variant of the nucleotide sequence at SEQ ID NO 19253
ttcgcactgcgtggtcggctacaagtcatacgtcgaggtacctacagacatgacctaataataaggtaccctaataaggtaccctttccattctagctgcacgtttcccaccgacgctagcatctgagcccacctagcgcctaagcctacctagtaggactcgtagcgtcggcttctcctccacaggcccgtacgattctcaacctccgccagcctcgcatcactttttgcagcttcacccatcaacgacggcgcccctctgtgtctctcctccctacgtcgcccgcgacgcatctccagcatcgcgacgccctgtgcatttgtgcattctcgaccgcatccttgaccacgcacatggtcttgtccctcccgtcgaccgctgtccgatttcatcgcatccgccgtctttttgcttgcccgctgcgtcgtcgtcggcggcccatcgtctgctcggcctctctgacactacaccacacagccatctcccgccgtcctcaccactgatctctagtccccggccccccttgcggcgcatcgagcgctgactccgctagcaccgacggcttggacataggcttgcagatacatcctagacgacaatgatcagccgcatctccatctgctcgcgggttgcgctgattcattttcttttctgatcccctgtcgcgccgccgactgttctgcaacttctgcgccctctgcgtcctttgcccatttctccagctttcatagggtggaattgcttgaatgtgctgggcctggatcactacttctacgcttccagcttgtctctgtccctaccgacgtcccgatatcccgcagcggagcacttggacacctcaaccacggctctccagcgtgacgtatctctgatataggccatggccacaagcccggcaccttcgggacccaagcggttgtcttttgccaaggtcgctgcctcctcccagcagcatctctccccccagaaccgagtcgccgtccccgctgccatggatcgccgtgcgcagcctgtcgcagcgtctgcctctgcatctgcctcgagccttgttgccactcctcagtatgctcctcagatcgcccctccgaacgggcacacagcggatccagccacggcctcgaggccctccatcggtggagcatcagttccagtcccagttccagcgccccccgtcgccgccgccgcgcctcagcaccgagaggacacaagtgtgaacaagttgttggagggagtgaaggatatggccgtcgcttccccgctgcccagcgtcacatctacgcccagcttggtggtgaatggctcgtcgtcttcggtggtgggctcccagggcaagaacgacaacgggacctcgctgtcggacgacgtctcccagcctgccgactccagctcggacatgggcaccaaagccccgagcctcgacgggaagagcatcacctccggcacgaccttcgcgctggacgagaaagagtctctccggcccgacgacagcgccagcgtcaaggctgcagccgacgacgacgagcccttctccgtcaggggctcgctgctggccacgtcccgcatgggctcggacaacgcgcgcgtccaccgtctgcgaatcggagacatgcccacagagaagcgcttcgtccagcagcagcttctccccgaggtccaagacaacggtgtctccacgccacagagtgccgcctcgagccagcagccgctcgccggccagactccggcactgggcacggcaggcacgcccggcgatgccttcaactcgacctacgggcagaatcccgacgacaagcttttggaagccatgaagtcgcccaaggaccgcctctttctgttgaaggcagaacagacggttatccattttgtgcagttctccaaagacccttatatagacctgccgccctgcaactcgttttgtaggatgctgactcacaaactggccgactactaccacatgacccattcttcgaggcggtccaaggcgccttcgcatctacaagacccccttctgccggctgcctccctcgctcgccggcatggtagagagcgagacggatgagacggccaacacgcccccaccgccagtcctgcccaagaagatcatgcgacgtggcgacaacggcggctccggcccgaccagcaccagcgcctccaaggctacctctgaggtcggtagtgacggcaaggagaagacgctcaacaaagagaagatgacgagagaagagcgcgaggaggcctacaagcaagctcgcgagaggatcttcggcaacagctcggacaaggcagatctgacccccgagactgaagatccaagtggcatctcccgcgccagctcggtgtcgggcaaggagaagtctaccattggcaggagaggaaaggcaaacaggcatcgcagagacgactcggagagctttgaatcgcgctcgcagttcgtccaatactttcatccaccggcccagatggattgggcaccgcactacatgtctggcaatatgcagtataatgtgcaagcaccacagccctaccaatatcagcttcctcagccctaccagacaccacagcagggctatcccaacatggcaccgagttcgatgcccaacccgagctaccagcaatatggcagcatgccagcatatgccccccaagcgcaaccttcccctcaacaacaggcccagcctcccccacagcctcttcctcggttcccatccaatgggtccatgggcccaggaggctacggctcccctgctcaacctagtccccagcagcagcagcaacaatggcagcctagctttacgccaactccgccgccagcggtacctcttcagcaatatcctaaccgtgtttctatgtctccacctcaaggacagtctccgggcagctcgggtccgatgggaggaattccttacgcgtacgggcaacttcccgtcaatgccaacccgcatgaccccaagagtcaacatcctatccctggaagctacaatcgacatcatgccttcaatccaaacactaaatcatttgttcccggcggtgggataaatgccgcgcagccgccgataccctataatatagcgggtccggcgcatggcagtccgcaacttgcatcgactcacatggcgtacaacgggtacagctcgtccacgccaccacagccttatatgggtgggaatatgggtggtcccgggtacggcatgagccggcagagctccaacaactccctccctccgtaccatgcgcctcagcacctcccgccgcacccggcacctcctagtcatctccccccaaatgcctcacaagccaggcatgacatctcaggcagcaccggcagggccgagcccgccgacgtacagccacctccctaattacggcaaccctgccacactaccgcagaagccccctacgggcctctagatgagacacgaatggcacgaaacggtcggatttgggccatcttccatgtgtataggatggccgcgcgactaataccaacaaagcattacactggtgttgcatggttttttttttaaaatgaatgagggcgaggggtgttttccccttacgcctgaaaagaacaacggatagaaaagtaaaccgcaaagtaaagactgatgactgacacaaatactcacaatacgcactaaatccgtaccaccactacgaatattgacttgactctggcatacgactttggacgtaggtaggggtgggaccatctccaaaggggggcgaacggtggaaagggaggatagggctgcgtaccgtttacaagcatggcataggtagtgcaggccgatactcatactcatagtcatggtcatggttatgggctggagttctaggcgggatgggcggttgattttttttcggccctctctcgtacgcattgggttttgattgcggactcgaaagagaggaggaagagagagatggtaacgtgagtggcagaggcacacacaggtttcttgcaccagtctacgcgaataagccgaaggttctatgagttcaccaaatctcttctctgtgcgtgacgtcttgccaagccgggttttcttctgtcaggaggcatcgtgagatgtctagccctttcgaac

SEQ ID NO: 19256 - DNA, 819 bp, Muscodor strobelii
  misc_feature: SGI cDNA ID NO. 566473
  misc_feature: Encodes the peptide sequence at SEQ ID NO 19257
atgtatcggagaggtcctaccaaggccactccagccaatgtgcaatgccagaaatgcctgaagagagataagtccatcaccgcatctgcccaggagagaccatacgtacccaggccatcgcggacacaacaactcctcaaccccaagctcatgcccaagctccagagcgataccgctgaggcgctgcaatccaaaaaggggttggcggatgagcagttggctaagagggaggccgagagagctagacagcaggcgctggaacgggacgatgacgacgatgacgggcttagaaacgatgcgcccaagcgcgaccgttcggcatcgtacgactcggtctctaccatatccaccaggggacctgcatcgcgaaacggctcgagatcaccaccaccaccaccaaggtcatccagagcggaacagagcccgtcgccacatctcccgaaagaaaccatgttcgacgggaaaggacacagccaagacggcaaactagctcagcaagctatgacaacagcccgcggcaacggcgcatggattctcgtgatctgtccccggaccacagaccggcgagccgaggttatcggattcgagatggggatgcggcaagggacagtcggtcaccaccttcaggcacgtggcagcggggcttccgctccagatcgccccgagcggcgcgggacgacgagagacggcctccacggtacaacgaagggacggcagggcagggaggagggcagccgaggcgggcgccgcagcaagaagcgcctcggcagcgcagcctcagcccgttctctaagcggctggccctcacacaagcgatga

SEQ ID NO: 19257 - protein, 272 aa, Muscodor strobelii
  misc_feature: SGI Peptide ID NO. 566473
  misc_feature (1)..(117): NCBI GI: 171691933 Blast Desc: protein product [Podospora anserina] gi|170945915|emb|CAP72716.1| protein product [Podospora anserina]
  misc_feature (7)..(129): NCBI GI: 226290658 Blast Desc: conserved [Paracoccidioides brasiliensis Pb18]
  misc_feature (2)..(114): NCBI GI: 255939716 Blast Desc: Pc16g02550 [Penicillium chrysogenum Wisconsin 54-1255] gi|211585250|emb|CAP92925.1| Pc16g02550 [Penicillium chrysogenum Wisconsin 54-1255]
  misc_feature (1)..(130): NCBI GI: 85103955 Blast Desc: NCU01017 [Neurospora crassa OR74A] gi|16415976|emb|CAB88521.3| [Neurospora crassa] gi|28923177|gb|EAA32393.1| [Neurospora crassa OR74A]
  misc_feature (6)..(129): NCBI GI: 261198831 Blast Desc: conserved [Ajellomyces dermatitidis SLH14081] gi|239594969|gb|EEQ77550.1| conserved [Ajellomyces dermatitidis SLH14081]
  misc_feature (4)..(129): NCBI GI: 239609908 Blast Desc: conserved [Ajellomyces dermatitidis ER-3]
  misc_feature (28)..(130): NCBI GI: 225557781 Blast Desc: conserved [Ajellomyces capsulatus G186AR]
  misc_feature (1)..(117): NCBI GI: 169604788 Blast Desc: SNOG_05409 [Phaeosphaeria nodorum SN15] gi|160706643|gb|EAT87800.2| SNOG_05409 [Phaeosphaeria nodorum SN15]
  misc_feature (4)..(87): NCBI GI: 242767407 Blast Desc: conserved [Talaromyces stipitatus ATCC 10500] gi|218724558|gb|EED23975.1| conserved [Talaromyces stipitatus ATCC 10500]
  misc_feature (1)..(117): NCBI GI: 189196378 Blast Desc: [Pyrenophora tritici-repentis Pt-1C-BFP] gi|187980406|gb|EDU47032.1| [Pyrenophora tritici-repentis Pt-1C-BFP]
MYRRGPTKATPANVQCQKCLKRDKSITASAQERPYVPRPSRTQQLLNPKLMPKLQSDTAEALQSKKGLADEQLAKREAERARQQALERDDDDDDGLRNDAPKRDRSASYDSVSTISTRGPASRNGSRSPPPPPRSSRAEQSPSPHLPKETMFDGKGHSQDGKLAQQAMTTARGNGAWILVICPRTTDRRAEVIGFEMGMRQGTVGHHLQARGSGASAPDRPERRGTTRDGLHGTTKGRQGREEGSRGGRRSKKRLGSAASARSLSGWPSHKR

SEQ ID NO: 19258 - DNA, 1682 bp, Muscodor strobelii
  misc_feature: SGI EST ID NO. CUFF.45052.2
  misc_feature: Variant of the nucleotide sequence at SEQ ID NO 19256
cagaagcctgcctaacgacaccttgagccttcctagtgggaactacctatgtcaggttcggattcgatgaagcgagttggtctctgtcaacctcctgaaatctcatagcgatctcactcatccacaacaaaacagcaacggcaagcgggaagactcaattcaagactagcatggttcttatgcttcactgctcgctttgatctgatactcatcgtcctcatatcataggtactcaaccaagcaacattgtcgacctatctgctccaatatctcatacaagccgggttcgttcagtttcagtctctaccgccgccatgtatcggagaggtcctaccaaggccactccagccaatgtgcaatgccagaaatgcctgaagagagggcactactcatatgaatgcaaggcatctgcccaggagagaccatacgtacccaggccatcgcggacacaacaactcctcaaccccaagctcatgcccaagctccagagcgataccgctgaggcgctgcaatccaaaaaggggttggcggatgagcagttggctaagagggaggccgagagagctagacagcaggcgctggaacgggacgatgacgacgatgacgggcttagaaacgatgcgcccaagcgcgaccgttcggcatcgtacgactcggtctctaccatatccaccaggggacctgcatcgcgaaacggctcgagatcaccaccaccaccaccaaggtcatccagagcggaacagagcccgtcgccacatcgtgagtacgacaaacgaccatctatgaactcacgaagtagctacgagagacgccgctccccagatgtagagcgacaagaccggcgggcatcatttgactcgagaagcgatcgctctagacggtcctctccaagtcccgaaagaaaccatgttcgacgggaaaggacacagccaagacggcaaactagctcagcaagctatgacaacagcccgcggcaacggcgcatggattctcgtgatctgtccccggaccacagaccggcgagccgaggttatcggattcgagatggggatgcggcaagggacagtcggtcaccaccttcaggcacgtggcagcggggcttccgctccagatcgccccgagcggcgcgggacgacgagagacggcctccacggtacaacgaagggacggcagggcagggaggagggcagccgaggcgggcgccgcagcaagaagcgcctcggcagcgcagcctcagcccgttctctaagcggctggccctcacacaagcgatgaatgcagatcggtagaaagggactacgggtatcattcggggttttcgtcttgcagtcccatacttgagcactctgcctctgtgcctcctcggcccggctgcgcgccgcccccggatctacataatcaagctatacattattctttttgtggcatgaaacgccctgagactcctacaccggaaactccaataccgtaaaagtccgccccaaacgccgtgccatgcctttgcctttgcctctgcccatgtgatggatatgatgaagtaagtgagaaggtgagaaagtgagaaagtgagaaagtgagtaagccaatggtagtgggcagtgtctctgttctggctaggccagatcgggatcctcgcgttccctgcgctcgtcctcctcgtcctcgcgctccctgacccgggg

SEQ ID NO: 19259 - DNA, 1593 bp, Muscodor strobelii
  misc_feature: SGI cDNA ID NO. 566474
  misc_feature: Encodes the peptide sequence at SEQ ID NO 19260
atggcgacgtcacttgcagcggaggcgcaacgcgttgtctcgggttttgagtacagcgacgacgacgtcaacaagggtatccaggagttcctgcgccagatgaatgaggggctgcagcaagatggcaccagtatcagccagatcccaacttacgtcacaggcgtgcccaatggcacagaaaagggattatacctcgccgtcgacctgggaggcacgaattttcgagtctgctccatccatctgaacggagacaccaccttcaacctcacattcagcaaggtcgcaatccctaaggaattgatggtcgccaagacagccaaggagctatttgccttcctagctaagcaaatcgaggagttcttgaaggtgcaccactcagatcacttcgaggcgcatgttcggcggcgacagacggtcagcaccccagacgggtatcgggacgaaaacattttccgactcgggttcaccttctcattccccgttcaacagttcggcatcaacaaaggcacgctcataagatggaccaagggattcgacatcgctgatgccgtcggcaaagacgtctgtgctctactacaggaggagattgacctgcttcgactccccgtcaaagttgcggccctggtaaatgatactgtcggtaccctcatggcccgatcctacacatcgcccggaaagacggcgaccctcctcggtgccattttcggcacgggaacgaatggcgcttacgtcgagaaagtcaccaacatacaaaagaaggttgatggcgaatacgacaaatcgacgggcgacatggtcatcaacacagagtggggatcattcgacaaccagttaaacgtgctccccaacacaccctatgacaaggaattggacgaaaagagcgtcaaccccggcattcagatgttcgagaagagagtatctggcatgttcctcggcgagattgtccgccttgctgtgttcgacctgcacaaggccagcaacaccacgcttttcaaagacgaaaactccagcactaatgattggaagtcgaccacacatgtcgacccggcctcaaaattgttcgagcagtggggccttgatagctcgctcatgtccatcgcggcttccgacagcacgccggagctctcgacgctgcgacaggaaattgagaagcagctccagatttactcgccttcgcttgaggatgcccaagccttcaaggacatctcctatgccgtcggccgacgtgctgcgagactcagtgccgtagcactgggcggcgttgtgatccagagtggtaagctgaaggaatcctccgatgagcccattgatatcggcgtagatggcagtctggtggagcactacccgttcttccgggacatgatttacgagaccttcaatgccattaaggagattggcccggagggcgcgaagcagattcgcattggtattgcgaaagacggcagtggcgtcggcgctgccctcattgcgctcgtggccgctggcatggagaagaaaggcgtggtggactatttgagtgccgtcaagaatgacgctgcgcagaaagttgttggtgcgttagggtcggcgggccagagtacgaccttagcctag

SEQ ID NO: 19260 - protein, 530 aa, Muscodor strobelii
  misc_feature: SGI Peptide ID NO. 566474
  misc_feature (3)..(223): Pfam Id: PF00349 Pfam Desc: Hexokinase
  misc_feature (228)..(495): Pfam Id: PF03727 Pfam Desc: Hexokinase
  misc_feature (153)..(223): Pfam Id: PF00349 Pfam Desc: Hexokinase
  misc_feature (3)..(129): Pfam Id: PF00349 Pfam Desc: Hexokinase
  misc_feature (1)..(512): NCBI GI: 171684011 Blast Desc: protein product [Podospora anserina] gi|170941966|emb|CAP67618.1| protein product [Podospora anserina]
  misc_feature (4)..(514): NCBI GI: 85114646 Blast Desc: glucokinase [Neurospora crassa OR74A] gi|28926528|gb|EAA35500.1| glucokinase [Neurospora crassa OR74A] gi|38567331|emb|CAE76619.1| glucokinase [Neurospora crassa]
  misc_feature (4)..(522): NCBI GI: 256734019 Blast Desc: NECHADRAFT_36746 [Nectria haematococca mpVI 77-13-4]
  misc_feature (4)..(512): NCBI GI: 166797283 Blast Desc: hexokinase HXK2 [Gibberella moniliformis]
  misc_feature (4)..(516): NCBI GI: 116192959 Blast Desc: CHGG_06197 [Chaetomium globosum CBS 148.51] gi|88182110|gb|EAQ89578.1| CHGG_06197 [Chaetomium globosum CBS 148.51]
  misc_feature (5)..(506): NCBI GI: 67937780 Blast Desc: glucokinase [Hypocrea jecorina]
  misc_feature (4)..(510): NCBI GI: 156056110 Blast Desc: SS1G_05407 [Sclerotinia sclerotiorum 1980] gi|154703191|gb|EDO02930.1| SS1G_05407 [Sclerotinia sclerotiorum 1980]
  misc_feature (4)..(510): NCBI GI: 154298051 Blast Desc: BC1G_12178 [Botryotinia fuckeliana B05.10] gi|120564539|gb|ABM30190.1| glucokinase [Botryotinia fuckeliana] gi|150858305|gb|EDN33497.1| BC1G_12178 [Botryotinia fuckeliana
  misc_feature (4)..(466): NCBI GI: 261353102 Blast Desc: glucokinase [Verticillium albo-atrum VaMs.102]
  misc_feature (5)..(498): NCBI GI: 39971149 Blast Desc: MGG_03041 [Magnaporthe grisea 70-15] gi|149210721|ref|XP_001522735.1| MGCH7_ch7g833 [Magnaporthe grisea 70-15] gi|86196788|gb|EAQ71426.1| MGCH7_ch7g833 grisea
  misc_feature (1)..(480): SWISSPROT Homolog: EC 2.7.1.2 Glucokinase
MATSLAAEAQRVVSGFEYSDDDVNKGIQEFLRQMNEGLQQDGTSISQIPTYVTGVPNGTEKGLYLAVDLGGTNFRVCSIHLNGDTTFNLTFSKVAIPKELMVAKTAKELFAFLAKQIEEFLKVHHSDHFEAHVRRRQTVSTPDGYRDENIFRLGFTFSFPVQQFGINKGTLIRWTKGFDIADAVGKDVCALLQEEIDLLRLPVKVAALVNDTVGTLMARSYTSPGKTATLLGAIFGTGTNGAYVEKVTNIQKKVDGEYDKSTGDMVINTEWGSFDNQLNVLPNTPYDKELDEKSVNPGIQMFEKRVSGMFLGEIVRLAVFDLHKASNTTLFKDENSSTNDWKSTTHVDPASKLFEQWGLDSSLMSIAASDSTPELSTLRQEIEKQLQIYSPSLEDAQAFKDISYAVGRRAARLSAVALGGVVIQSGKLKESSDEPIDIGVDGSLVEHYPFFRDMIYETFNAIKEIGPEGAKQIRIGIAKDGSGVGAALIALVAAGMEKKGVVDYLSAVKNDAAQKVVGALGSAGQSTTLA

SEQ ID NO: 19261 - DNA, 2170 bp, Muscodor strobelii
  misc_feature: SGI EST ID NO. CUFF.45096.2
  misc_feature: Variant of the nucleotide sequence at SEQ ID NO 19259
ttcggcgcaattgctaacctgcccctccaaacacttccaggctacccagctttttctcgcagatatcaaaatccaatattctcatatatttacttctcccccggccgttgttgtagacggcgccgtctgccaaagcccgcagccttttcctaccgcccctccagtctccaaagcacccaccatggcgacgtcacttgcagcggaggcgcaacgcgttgtctcgggttttgagtacagcgacgacgacgtcaacaagggtatccaggagttcctgcgccagatgaatgaggggctgcagcaagatggcaccagtatcagccagatcccaacttacgtcacaggcgtgcccaatggcacagaaaagggattatacctcgccgtcgacctgggaggcacgaattttcgagtctgctccatccatctgaacggagacaccaccttcaacctcacattcagcaaggtcgcaatccctaaggaattgatggtcgccaagacagccaaggagctatttgccttcctagctaagcaaatcgaggagttcttgaaggtgcaccactcagatcacttcgaggcgcatgttcggcggcgacagacggtcagcaccccagacgggtatcgggacgaaaacattttccgactcgggttcaccttctcattccccgttcaacagttcggcatcaacaaaggcacgctcataagatggaccaagggattcgacatcgctgatgccgtcggcaaagacgtctgtgctctactacaggaggagattgacctgcttcgactccccgtcaaagttgcggccctggtaaatgatactgtcggtaccctcatggcccgatcctacacatcgcccggaaagacggcgaccctcctcggtgccattttcggcacgggaacgaatggcgcttacgtcgagaaagtcaccaacatacaaaagaaggttgatggcgaatacgacaaatcgacgggcgacatggtcatcaacacagagtggggatcattcgacaaccagttaaacgtgctccccaacacaccctatgacaaggaattggacgaaaagagcgtcaaccccggcattcagatgttcgagaagagagtatctggcatgttcctcggcgagattgtccgccttgctgtgttcgacctgcacaaggccagcaacaccacgcttttcaaagacgaaaactccagcactaatgattggaagtcgaccacacatgtcgacccggcctcaaaattgttcgagcagtggggccttgatagctcgctcatgtccatcgcggcttccgacagcacgccggagctctcgacgctgcgacaggaaattgagaagcagctccagatttactcgccttcgcttgaggatgcccaagccttcaaggacatctcctatgccgtcggccgacgtgctgcgagactcagtgccgtagcactgggcggcgttgtgatccagagtggtaagctgaaggaatcctccgatgagcccattgatatcggcgtagatggcagtctggtggagcactacccgttcttccgggacatgatttacgagaccttcaatgccattaaggagattggcccggagggcgcgaagcagattcgcattggtattgcgaaagacggcagtggcgtcggcgctgccctcattgcgctcgtggccgctggcatggagaagaaaggcgtggtggactatttgagtgccgtcaagaatgacgctgcgcagaaagttgttggtgcgttagggtcggcgggccagagtacgaccttagcctaggagcctgcacattacctgcaaatgactctgctagcagtgtgtcccgtactgttttgggcaatggtatggtactaccttgcttgatggccggcacccatatgaggaggtataaattggtggttggaatactggcacaaggaggacacacaggggcggaagggagattgaagaaagattacgcgagatcgagggtcctatgaatcatggctcaggacgacgttatgcatctctagaactcactataacctaatgagtgaaacaagaattaaacactctagtgcatttcgtttcgaaccagaggcaaggatctcaatcaacggtgactggcaatacggtagaacaagctatgccacatatggtcgacacatgtacttctacgagaaatttgcctctccg

SEQ ID NO: 19262 - DNA, 597 bp, Muscodor strobelii
  misc_feature: SGI cDNA ID NO. 566475
  misc_feature: Encodes the peptide sequence at SEQ ID NO 19263
cccttccgcagtctcgggctggccgccgccctgctcgaggccgtcgtccacgacgccaggcacagccccttcgcctgcgagacggcctgggcgcacgtctggagccccaacgaagagggcttgcgctggtacacggccaggggcttccacaaggtcgaagaggtcaagggctactacttcaagctcagacccgacagcgcttggatcgtcaggagagacatggacgacttcgccgccaacgctgtccatcagccaggtgcgaatggggctggctccgtgccgggcagcgtgacggcagctgcggccaatctaccctcgccgccagtagaagctccgccgtaccgtggcgcccgtcctctcaatccgagccctcctactggacgtagctaccagaaggtcggtcccgccaccgagtggaacgatctgcccccggatatggcgccgctgagcaccgtctcgtcgaccagcaacaacgggaatggggacggcatcagtcttcaagtgcctcgcagcaacgcaagttcccggagcagttcatcggcacgcagcaagaaaaaagatcgtgcatatccagcggccgcatttgggaacagttag

SEQ ID NO: 19263 - protein, 198 aa, Muscodor strobelii
  misc_feature: SGI Peptide ID NO. 566475
  misc_feature (1)..(197): NCBI GI: 256733512 Blast Desc: NECHADRAFT_36175 [Nectria haematococca mpVI 77-13-4]
  misc_feature (1)..(197): NCBI GI: 39971053 Blast Desc: MGG_02993 [Magnaporthe grisea 70-15] gi|145017167|gb|EDK01530.1| MGG_02993 [Magnaporthe grisea 70-15]
  misc_feature (1)..(197): NCBI GI: 171684009 Blast Desc: protein product [Podospora anserina] gi|170941965|emb|CAP67617.1| protein product [Podospora anserina]
  misc_feature (1)..(196): NCBI GI: 46128795 Blast Desc: FG08775.1 [Gibberella zeae PH-1]
  misc_feature (1)..(146): NCBI GI: 156031128 Blast Desc: SS1G_14172 [Sclerotinia sclerotiorum 1980] gi|154700563|gb|EDO00302.1| SS1G_14172 [Sclerotinia sclerotiorum 1980]
  misc_feature (1)..(84): NCBI GI: 85114651 Blast Desc: NCU00576 [Neurospora crassa OR74A] gi|28926529|gb|EAA35501.1| NCU00576 [Neurospora crassa OR74A] gi|38567330|emb|CAE76618.1| [Neurospora crassa]
  misc_feature (1)..(74): NCBI GI: 116192961 Blast Desc: CHGG_06198 [Chaetomium globosum CBS 148.51] gi|88182111|gb|EAQ89579.1| CHGG_06198 [Chaetomium globosum CBS 148.51]
  misc_feature (1)..(146): NCBI GI: 154305715 Blast Desc: BC1G_07672 [Botryotinia fuckeliana B05.10] gi|150853191|gb|EDN28383.1| BC1G_07672 [Botryotinia fuckeliana B05.10]
  misc_feature (1)..(75): NCBI GI: 149210605 Blast Desc: MGCH7_ch7g775 [Magnaporthe grisea 70-15] gi|86196730|gb|EAQ71368.1| MGCH7_ch7g775 [Magnaporthe grisea 70-15]
  misc_feature (1)..(90): NCBI GI: 189199254 Blast Desc: conserved [Pyrenophora tritici-repentis Pt-1C-BFP] gi|187983063|gb|EDU48551.1| conserved [Pyrenophora tritici-repentis Pt-1C-BFP]
PFRSLGLAAALLEAVVHDARHSPFACETAWAHVWSPNEEGLRWYTARGFHKVEEVKGYYFKLRPDSAWIVRRDMDDFAANAVHQPGANGAGSVPGSVTAAAANLPSPPVEAPPYRGARPLNPSPPTGRSYQKVGPATEWNDLPPDMAPLSTVSSTSNNGNGDGISLQVPRSNASSRSSSSARSKKKDRAYPAAAFGNS

SEQ ID NO: 19264 - DNA, 1589 bp, Muscodor strobelii
  misc_feature: SGI EST ID NO. CUFF.45055.0
  misc_feature: Variant of the nucleotide sequence at SEQ ID NO 19262
tccgcagtctcgggctggccgccgccctgctcgaggccgtcgtccacgacgccaggcacagccccttcgcctgcgagacggcctgggcgcacgtctggagccccaacgaagagggcttgcgctggtacacggccaggggcttccacaaggtcgaagaggtcaagggctactacttcaagctcagacccgacagcgcttggatcgtcaggagagacatggacgacttcgccgccaacgctgtccatcagccaggtgcgaatggggctggctccgtgccgggcagcgtgacggcagctgcggccaatctaccctcgccgccagtagaagctccgccgtaccgtggcgcccgtcctctcaatccgagccctcctactggacgtagctaccagaaggtcggtcccgccaccgagtggaacgatctgcccccggatatggcgccgctgagcaccgtctcgtcgaccagcaacaacgggaatggggacggcatcagtcttcaagtgcctcgcagcaacgcaagttcccggagcagttcatcggcacgcagcaagaaaaaagatcgtgcatatccagcggccgcatttgggaacagttaggagcagacaagagccaaaacgaatggccccacgggatgccaccgtggctacattggcgagtaccacagccagcagttctcggatgataaaccgcattatcggctcgattgactcttcaacgccgttgaacgttgatttatgagccagagttcgaacacagatatccaatgtcctggtgaagcgatacaggtgccgctgctgcaggacttaggtgagtaataatgtaattaattccgctgttactcgcctgtcaagaacttctcgacaattcacggcacgacaaggcccaagtcgcacacgctccccaaccccacgctgcgatcgcatttgcatagatgaaagacaaagcataatacgaaattagtgagcggcacggatcgcggtggaggacccgtgctgcgcctgtatttattatacttcatgccgagcttctccgatgagcttatccatcgggctcctcgtttacgttgacgataccttgttctgcgcagccagtgaacaagcacgagccaagcctgaacatcaatatggttgacttgagccatcgtggccgactcctgaagacgacgaagtaggccgtcttgggtcgtcgtcggcaacagatcttgtgacggacagacgaaagactgcattggtaaatcattgataaatagacagggggcgagagactgaggtatagataaaattgctagatgagacgacgtgcgatgattgaaacggattaatcaaagatacggctttactagtctcaataatgctgcacttatgccgggcttttagaaattccataatgaaatttgatgcgaacacgagtacatgatacagttggtgagcgaatggtatctacgacggtggtacgtcgaatgtgagaatacaactcgggaagagggttggcgttcagagatagatgattgctttcgtaatatttctcaacgagtagcagcaaaaagcaaccaagcacggctacaacccaacagcttgcgtctgtgaaaagcg

SEQ ID NO: 19265 - DNA, 992 bp, Muscodor strobelii
  misc_feature: SGI cDNA ID NO. 566476
  misc_feature: Reduced expression when VOC is produced
  misc_feature: Encodes the peptide sequence at SEQ ID NO 19266
atgcgggccatccatctcgtcgcccgcgcatgcgcccgtccgtccaacatcttcgctcgcgtcgccctcagatcacacactggacccatatgtggtcgctgcccttcgacattacgatatgctacagctagagctacagccagaactctccctgcgcggtcctcacggtcctcgtggtcatcccggtctcgctcgtccatcctgaaggcggccaccacgggtctcctgggcaccgccgctttcgtcaagctgtctgaaaaagacaatggcggcaccgagaagactgccgagggccgcatgctcgaggcttcccgacaagagctgaagaagacggtcgacgcggacgagaaggggatacggcgcgtcctgcacggggcctacatcttcttcgacgtctacatgtgggaaccgctgtgcaccggagtgcgcttctgccatctcgtcgtcatcttcgcccccgtcatcctctccgtcccggccatctggctcgggagcagacagcccgaccgcgacaacgagcgctcggggactctgtggtggtacaactttttggtgtggagcatggagaacgcagggccggctttcatcaagctgggccagtgggcggcgtcgcggaccgacatcttcccgaccgagatgtgcaacgtcatgtccaagctgcactccaacgcccccgcccactcgctgcaccagacccggcgcatcgtctgcgcggccttcgacggccgggccttcgacgacatcttcgaggagttccaggaggagcccctcggcgttggcgccatcgcccaggtctaccgcgccaagctgaagcgcgacctggccgtgccgggggacatcgacgtcatggacgcggccaccctccgccagaacgtccagcgcaacgtcaacaccgtcctcaagagcacgccccaccgcgtgccctcgtcctacgtcgccgtcaaggtgctgcacccgggcgtcgagcgcaccgtccgccgcgacctgcgcat

SEQ ID NO: 19266 - protein, 330 aa, Muscodor strobelii
  misc_feature: SGI Peptide ID NO. 566476
  misc_feature (238)..(330): Pfam Id: PF03109 Pfam Desc: ABC1 family
  misc_feature (1)..(330): NCBI GI: 261361042 Blast Desc: ABC1 family protein [Verticillium albo-atrum VaMs.102]
  misc_feature (81)..(330): NCBI GI: 256733934 Blast Desc: [Nectria haematococca mpVI 77-13-4]
  misc_feature (28)..(330): NCBI GI: 46128015 Blast Desc: FG08385.1 [Gibberella zeae PH-1]
  misc_feature (99)..(330): NCBI GI: 164425527 Blast Desc: NCU05600 [Neurospora crassa OR74A] gi|157070962|gb|EAA31326.2| NCU05600 [Neurospora crassa OR74A]
  misc_feature (1)..(330): NCBI GI: 238508791 Blast Desc: ubiquinone biosynthesis protein, [Aspergillus flavus NRRL3357] gi|220688471|gb|EED44824.1| ubiquinone biosynthesis protein, [Aspergillus flavus NRRL3357]
  misc_feature (17)..(329): NCBI GI: 212535920 Blast Desc: ubiquinone biosynthesis protein, [Penicillium marneffei ATCC 18224] gi|210070515|gb|EEA24605.1| ubiquinone biosynthesis protein, [Penicillium marneffei ATCC 18224]
  misc_feature (31)..(330): NCBI GI: 171678052 Blast Desc: protein product [Podospora anserina] gi|170937095|emb|CAP61753.1| protein product [Podospora anserina]
  misc_feature (13)..(330): NCBI GI: 115388847 Blast Desc: conserved [Aspergillus terreus NIH2624] gi|114196013|gb|EAU37713.1| conserved [Aspergillus terreus NIH2624]
  misc_feature (76)..(330): NCBI GI: 255935983 Blast Desc: Pc13g05840 [Penicillium chrysogenum Wisconsin 54-1255] gi|211583638|emb|CAP91653.1| Pc13g05840 [Penicillium chrysogenum Wisconsin 54-1255]
  misc_feature (28)..(330): NCBI GI: 121714293 Blast Desc: ubiquinone biosynthesis protein, [Aspergillus clavatus NRRL 1] gi|119402911|gb|EAW13331.1| ubiquinone biosynthesis protein, [Aspergillus clavatus NRRL 1]
  misc_feature: Useful for introducing or modulating the production of volatile compounds
MRAIHLVARACARPSNIFARVALRSHTGPICGRCPSTLRYATARATARTLPARSSRSSWSSRSRSSILKAATTGLLGTAAFVKLSEKDNGGTEKTAEGRMLEASRQELKKTVDADEKGIRRVLHGAYIFFDVYMWEPLCTGVRFCHLVVIFAPVILSVPAIWLGSRQPDRDNERSGTLWWYNFLVWSMENAGPAFIKLGQWAASRTDIFPTEMCNVMSKLHSNAPAHSLHQTRRIVCAAFDGRAFDDIFEEFQEEPLGVGAIAQVYRAKLKRDLAVPGDIDVMDAATLRQNVQRNVNTVLKSTPHRVPSSYVAVKVLHPGVERTVRRDLR

SEQ ID NO: 19267 - DNA, 2621 bp, Muscodor strobelii
  misc_feature: SGI EST ID NO. CUFF.45141.1
  misc_feature: Variant of the nucleotide sequence at SEQ ID NO 19265
caaaggcggaggggtacagccagcccatgacctggatcatggcggccttgggggtcatgtccttggggcggccctggaagcggacgaggctgggggcgaggtcgtcgatgtcgcggtcgtggccgtagcggcgggcggtggcctcgaagttggcctcgccgcggctgcagttgcgccagcccttgagcaggccgccggcgaagcgccgctcccactccatgatctcggcccaggcgccctcgttgaggaagttgtggacgctgaccatgctctcgacggcggtgacgtcggtgtcggtgtagcccttgcgcagcagcgcgttgtacatctgctgcggcgacgggtactcccagttgccctcgccgtcgcccttggggatcgtcgacggctcgcgctccagcggcagcgcctgtgtctggtgcggggcgcgggcctgcgacaggtccttgaacatgtagttgagcgggttcagcttcgacatgatcgaggcgggctgctcagactcgggcggtatcggtgaggctggacatgcggagggtggcgacggtgatgataatgcagcagaggcatcgtgcttgacggggcaggcagatgggggtttggtcatggcatcggccgacttcttgtgcatggggcattccggctacagagagagaggtcgagttagctacttcttgaccgaactgagaggttgtgaggacgtcgctcgcgtacgggtggcgatcgcggagagccatgttgggtgtgatagtcgcggtgggacggaggcggtgccggcagggcgttgttgtcggcccagaaccaacccatggcgcaggaaccggaagagtgtgatgagtataggattttgaggatagatcaagagttaggtacggaacttggaggtggacggagacgtatggaagtgatgggatagcagatgtatgcgagatggggaggaggagtagtcggtaggtattggatgctacaagtcatgagctaacatcgacttttttttttggaaggcgaagatacgacaaagtcccgacacgctgcggcgacaaattggacacgggagacgccgggaggggaccctctagactctagtgaacgtgcaacagggatttacataggtcgggttctcggcggtcgaaatgcgctattgcaagatttgtagcgggcagatacagatactaggactgggtaaaaactagcgcccattttcacatgcgtcaacgaatgaaatgcagcacgaagaagatagtatagggaggataaggtattaggtacttgcatagatggcctagagttggaaccgtcacttatccgagcaagctcataggctcgtgcctatacgagcaggtgcagtgttgctgcaatcggttatggttatggcgataatctacgtcaccgattcaggtcggtcgcatcgtcaaccactctccgcgtcccgaggctcccaatcttttttgatgacacgcttttgggggttccatgtattgacaaggctcatgtctgcttggccaactcgttcgagtccattgccgtgccatctttgccaattgggtgtttgactactctgatagacagaatcatgtgcataccttcgatatagacccttcgcatccctcccttttgcagcggccagcggcatgcgggccatccatctcgtcgcccgcgcatgcgcccgtccgtccaacatcttcgctcgcgtcgccctcagatcacacactggacccatatgtggtcgctgcccttcgacattacgatatgctacagctagagctacagccagaactctccctgcgcggtcctcacggtcctcgtggtcatcccggtctcgctcgtccatcctgaaggcggccaccacgggtctcctgggcaccgccgctttcgtcaagctgtctgaaaaagacaatggcggcaccgagaagactgccgagggccgcatgctcgaggcttcccgacaagagctgaagaagacggtcgacgcggacgagaaggggatacggcgcgtcctgcacggggcctacatcttcttcgacgtctacatgtgggaaccgctgtgcaccggagtgcgcttctgccatctcgtcgtcatcttcgcccccgtcatcctctccgtcccggccatctggctcgggagcagacagcccgaccgcgacaacgagcgctcggggactctgtggtggtacaactttttggtgtggagcatggagaacgcagggccggctttcatcaagctgggccagtgggcggcgtcgcggaccgacatcttcccgaccgagatgtgcaacgtcatgtccaagctgcactccaacgcccccgcccactcgctgcaccagacccggcgcatcgtctgcgcggccttcgacggccgggccttcgacgacatcttcgaggagttccaggaggagcccctcggcgttggcgccatcgcccaggtctaccgcgccaagctgaagcgcgacctggccgtgccgggggacatcgacgtcatggacgcggccaccctccgccagaacgtccagcgcaacgtcaacaccgtcctcaagagcacgccccaccgcgtgccctcgtcctacgtcgccgtcaaggtgctgcacccgggcgtcgagcgcaccgtccgccgcgacctgcgc

SEQ ID NO: 19268 - DNA, 1443 bp, Muscodor strobelii
  misc_feature: SGI cDNA ID NO. 566477
  misc_feature: Encodes the peptide sequence at SEQ ID NO 19269
aactcgcggcccgtcgaccctgccgccccctcgagtctgtacagcttcaacatcccgccgagccccggccccaacagcaacttcagcaagagcgtcagcggcctggatctgcgccacggcgggagggccctccgcgagaagaggaaggaagagagacatggcgacgtcatgcgccacgacaacgagtcgagctacgggctggcgcaggagtggtccgggggcccagccagtctggggtccgccgccaccagcggcccttcctatttcctcgatgctgccgactccagtaaatacggcctgaataacatgtcactagacgacgcatggccgtacctcaaagcgaagttgctggtcatatttgagggagaggatctgcgcttgcccatcgaggatttcaaccgcgtcgtcaccatgcatatccagtattgcatacagcgacgctcagcgcacatcatcgtcgacgacttgcgcgacctcctctccacggggttcgcatcgctggaccacgccctgcggcagacgcccgaggatcaggtcatcccggccctggtggagctctgggtcataacattcaccagtattctgccgtacatgcaagctgtcttcttaccgctcgatctagaattcgcaggcgcaggctcgctcctgacgcctgagcaagcccgggatttctggggcggtgtgatccccgccagtagcaccgcggccaatgtcacacccgcgagtgagatcctcgaagtgcggaaactcgtgctcatggcctacagagataccctcatattaccgcgctacgaaaagctaaagactatcttctcccgtctctcccttgagcacctgccttcgtctctagcgtctctagcgctcgcctctccgaggcccatagtagacagcagcgcgtcgctatctacgagcccatcggaccaacggcctggcacggccatgagtctcgaccccagcgtggccagctatgggagcaacagcacgacggtgttcggtaacgactcgaacccgtcgcggagccgggccatcagtaacgtgagctacgggagtggcgtctccgatcccgcatccggcggcgctttgctgcgaccttttactccgcagtacggggacaagagcagagagagcatattgggcagtctccgagaccagaatgtggaggatagtaaacaagtcacggacatggccggcagactgctgcagtgcatgagcgtgctggcgggtgtcggcacggggcctggcggcgggctgaatggagccgcaccggacgagaggagtcagatggttaccgagctggggagactcttgaagctgaactggctgggacgaggcaggacaggccggaacagacgaggcatggtagggggacgagtgaagagagataacgtggttggcatggtgaaggagggtagtagagaaggtgttggtgttgttgtaggatga

SEQ ID NO: 19269 - protein, 480 aa, Muscodor strobelii
  misc_feature: SGI Peptide ID NO. 566477
  misc_feature (101)..(270): Pfam Id: PF08539 Pfam Desc: HbrB-like
  misc_feature (1)..(468): NCBI GI: 256729227 Blast Desc: NECHADRAFT_47711 [Nectria haematococca mpVI 77-13-4]
  misc_feature (1)..(460): NCBI GI: 145610611 Blast Desc: MGG_11443 [Magnaporthe grisea 70-15] gi|145017988|gb|EDK02267.1| MGG_11443 [Magnaporthe grisea 70-15]
  misc_feature (1)..(468): NCBI GI: 46116994 Blast Desc: FG04339.1 [Gibberella zeae PH-1]
  misc_feature (1)..(367): NCBI GI: 116199671 Blast Desc: CHGG_07991 [Chaetomium globosum CBS 148.51] gi|88179270|gb|EAQ86738.1| CHGG_07991 [Chaetomium globosum CBS 148.51]
  misc_feature (1)..(439): NCBI GI: 164428002 Blast Desc: NCU01542 [Neurospora crassa OR74A] gi|157071969|gb|EAA27009.2| conserved [Neurospora crassa OR74A]
  misc_feature (1)..(439): NCBI GI: 18376153 Blast Desc: conserved [Neurospora crassa]
  misc_feature (1)..(458): NCBI GI: 154295447 Blast Desc: BC1G_13202 [Botryotinia fuckeliana B05.10] gi|150844070|gb|EDN19263.1| BC1G_13202 [Botryotinia fuckeliana B05.10]
  misc_feature (1)..(379): NCBI GI: 261354511 Blast Desc: conserved [Verticillium albo-atrum VaMs.102]
  misc_feature (1)..(459): NCBI GI: 189198876 Blast Desc: PTRG_05442 [Pyrenophora tritici-repentis Pt-1C-BFP] gi|187982874|gb|EDU48362.1| PTRG_05442 [Pyrenophora tritici-repentis Pt-1C-BFP]
  misc_feature (1)..(459): NCBI GI: 255943899 Blast Desc: Pc20g01580 [Penicillium chrysogenum Wisconsin 54-1255] gi|211587452|emb|CAP85487.1| Pc20g01580 [Penicillium chrysogenum Wisconsin 54-1255]
NSRPVDPAAPSSLYSFNIPPSPGPNSNFSKSVSGLDLRHGGRALREKRKEERHGDVMRHDNESSYGLAQEWSGGPASLGSAATSGPSYFLDAADSSKYGLNNMSLDDAWPYLKAKLLVIFEGEDLRLPIEDFNRVVTMHIQYCIQRRSAHIIVDDLRDLLSTGFASLDHALRQTPEDQVIPALVELWVITFTSILPYMQAVFLPLDLEFAGAGSLLTPEQARDFWGGVIPASSTAANVTPASEILEVRKLVLMAYRDTLILPRYEKLKTIFSRLSLEHLPSSLASLALASPRPIVDSSASLSTSPSDQRPGTAMSLDPSVASYGSNSTTVFGNDSNPSRSRAISNVSYGSGVSDPASGGALLRPFTPQYGDKSRESILGSLRDQNVEDSKQVTDMAGRLLQCMSVLAGVGTGPGGGLNGAAPDERSQMVTELGRLLKLNWLGRGRTGRNRRGMVGGRVKRDNVVGMVKEGSREGVGVVVG

SEQ ID NO: 19270 - DNA, 1599 bp, Muscodor strobelii
  misc_feature: SGI EST ID NO. CUFF.45069.0
  misc_feature: Variant of the nucleotide sequence at SEQ ID NO 19268
cccctgtcctccgccgccagcaactcgcggcccgtcgaccctgccgccccctcgagtctgtacagcttcaacatcccgccgagccccggccccaacagcaacttcagcaagagcgtcagcggcctggatctgcgccacggcgggagggccctccgcgagaagaggaaggaagagagacatggcgacgtcatgcgccacgacaacgagtcgagctacgggctggcgcaggagtggtccgggggcccagccagtctggggtccgccgccaccagcggcccttcctatttcctcgatgctgccgactccagtaaatacggcctgaataacatgtcactagacgacgcatggccgtacctcaaagcgaagttgctggtcatatttgagggagaggatctgcgcttgcccatcgaggatttcaaccgcgtcgtcaccatgcatatccagtattgcatacagcgacgctcagcgcacatcatcgtcgacgacttgcgcgacctcctctccacggggttcgcatcgctggaccacgccctgcggcagacgcccgaggatcaggtcatcccggccctggtggagctctgggtcataacattcaccagtattctgccgtacatgcaagctgtcttcttaccgctcgatctagaattcgcaggcgcaggctcgctcctgacgcctgagcaagcccgggatttctggggcggtgtgatccccgccagtagcaccgcggccaatgtcacacccgcgagtgagatcctcgaagtgcggaaactcgtgctcatggcctacagagataccctcatattaccgcgctacgaaaagctaaagactatcttctcccgtctctcccttgagcacctgccttcgtctctagcgtctctagcgctcgcctctccgaggcccatagtagacagcagcgcgtcgctatctacgagcccatcggaccaacggcctggcacggccatgagtctcgaccccagcgtggccagctatgggagcaacagcacgacggtgttcggtaacgactcgaacccgtcgcggagccgggccatcagtaacgtgagctacgggagtggcgtctccgatcccgcatccggcggcgctttgctgcgaccttttactccgcagtacggggacaagagcagagagagcatattgggcagtctccgagaccagaatgtggaggatagtaaacaagtcacggacatggccggcagactgctgcagtgcatgagcgtgctggcgggtgtcggcacggggcctggcggcgggctgaatggagccgcaccggacgagaggagtcagatggttaccgagctggggagactcttgaagctgaactggctgggacgaggcaggacaggccggaacagacgaggcatggtagggggacgagtgaagagagataacgtggttggcatggtgaaggagggtagtagagaaggtgttggtgttgttgtaggatgatgacatgatggatgattgagatagctatagcttctggcatgaatgtgatatgtgacactgtcctgaatgcgtggagactgattctcatggttgatgaattcgtgctgttgtgttggattccattacgccttcgcc

SEQ ID NO: 19271 - DNA, 549 bp, Muscodor strobelii
  misc_feature: SGI cDNA ID NO. 566478
  misc_feature: Reduced expression when VOC is produced
  misc_feature: Encodes the peptide sequence at SEQ ID NO 19272
atctccagtcgtggcggtcctggctttggccgtggccgaggtggctccggctggggcgcttccatccagagccgcaatctgcctcccgcgacgggcccagcctcggccagtactgccactagtgccaacagtattccgacgggcccccgtgccaacagcgtgtcgcactcggtgccctcgacccccgtctcgcagagccggtcgttcaacccgcccaagggcccggccgccgagagcaaccggccgagcttcgcccaacagctggtggccgccatgccccctctcgtccccggcggcaggatgagcccctcgcacgtgcccctgacgacgggcgtccttcccgagctgcaagaccacttcgaccgcctgcaggaggagtccgagaagatccgcaaggagctccatgggaagcgggacaagctgcgcaacggtatccacgagtgggacaagggccagcgtgaggtccatgtgctcaggctcaagacggagctggccgaagaggcgctgaagaaggtcgccggcgagggaccgggcggtgctgcgttttag

SEQ ID NO: 19272 - protein, 182 aa, Muscodor strobelii
  misc_feature: SGI Peptide ID NO. 566478
  misc_feature (43)..(182): NCBI GI: 256729419 Blast Desc: NECHADRAFT_47657 [Nectria haematococca mpVI 77-13-4]
  misc_feature (8)..(176): NCBI GI: 46116962 Blast Desc: FG04323.1 [Gibberella zeae PH-1]
  misc_feature (3)..(182): NCBI GI: 164427991 Blast Desc: NCU01527 [Neurospora crassa OR74A] gi|157071965|gb|EAA27740.2| [Neurospora crassa OR74A]
  misc_feature (3)..(182): NCBI GI: 18376167 Blast Desc: [Neurospora crassa]
  misc_feature (40)..(182): NCBI GI: 39973541 Blast Desc: [Magnaporthe grisea 70-15] gi|145017958|gb|EDK02237.1| [Magnaporthe grisea 70-15]
  misc_feature (81)..(182): NCBI GI: 116199647 Blast Desc: CHGG_07979 [Chaetomium globosum CBS 148.51] gi|88179258|gb|EAQ86726.1| CHGG_07979 [Chaetomium globosum CBS 148.51]
  misc_feature (24)..(182): NCBI GI: 154298217 Blast Desc: BC1G_11953 [Botryotinia fuckeliana B05.10] gi|150858139|gb|EDN33331.1| BC1G_11953 [Botryotinia fuckeliana B05.10]
  misc_feature (88)..(178): NCBI GI: 261355123 Blast Desc: conserved [Verticillium albo-atrum VaMs.102]
  misc_feature (24)..(182): NCBI GI: 156050401 Blast Desc: [Sclerotinia sclerotiorum 1980] gi|154692188|gb|EDN91926.1| [Sclerotinia sclerotiorum 1980]
  misc_feature (32)..(182): NCBI GI: 239614960 Blast Desc: conserved [Ajellomyces dermatitidis ER-3]
  misc_feature: Useful for introducing or modulating the production of volatile compounds
ISSRGGPGFGRGRGGSGWGASIQSRNLPPATGPASASTATSANSIPTGPRANSVSHSVPSTPVSQSRSFNPPKGPAAESNRPSFAQQLVAAMPPLVPGGRMSPSHVPLTTGVLPELQDHFDRLQEESEKIRKELHGKRDKLRNGIHEWDKGQREVHVLRLKTELAEEALKKVAGEGPGGAAF

SEQ ID NO: 19273 - DNA, 962 bp, Muscodor strobelii
  misc_feature: SGI EST ID NO. CUFF.45072.0
  misc_feature: Variant of the nucleotide sequence at SEQ ID NO 19271
catctccagtcgtggcggtcctggctttggccgtggccgaggtggctccggctggggcgcttccatccagagccgcaatctgcctcccgcgacgggcccagcctcggccagtactgccactagtgccaacagtattccgacgggcccccgtgccaacagcgtgtcgcactcggtgccctcgacccccgtctcgcagagccggtcgttcaacccgcccaagggcccggccgccgagagcaaccggccgagcttcgcccaacagctggtggccgccatgccccctctcgtccccggcggcaggatgagcccctcgcacgtgcccctgacgacgggcgtccttcccgagctgcaagaccacttcgaccgcctgcaggaggagtccgagaagatccgcaaggagctccatgggaagcgggacaagctgcgcaacggtatccacgagtgggacaagggccagcgtgaggtccatgtgctcaggctcaagacggagctggccgaagaggcgctgaagaaggtcgccggcgagggaccgggcggtgctgcgttttagtgaagccgatggccttgtggctgtgttcccgatgtgtatctactgggaagacgacgacgacgacgacgacgaatcagcgttggccattctagcatggttcttgcggtcctgttgtctatttggagagccaagactgtgtcgcgcaattagttttgggtcatgactgctcttcttgctcagatgagatggacattgctcatacatggctagcaaaacaaaaagggttgccatgtttcgggagaaaagtggagtgagaatcacccgggtgtacatgtatatgacggtcttgtcttgagagactgcttctagaggggggtgtgaactaaggcctacgagaaagtcagttgctcccatggctgtaggactagctaggatacagtgccgtatctgaactatgagaaaatgataaaat

SEQ ID NO: 19274 - DNA, 308 bp, Muscodor strobelii
  misc_feature: SGI cDNA ID NO. 566479
  misc_feature: Reduced expression when VOC is produced
  misc_feature: Encodes the peptide sequence at SEQ ID NO 19275
atggcgcggctgcctctgaccacgaccacgccgccatctgccgcgccgccggaccagacctctccccacgctcagcctcacccgcaccctcagcctcacccacatcatcagcatcagcatcagcatcaatatcggcactaccatggccatctgccctcacatccgcactccaagctgccccgcggcgccgcagataggccacatcaggccggggctggggccgcagctgccttcccgccgctgtcgcagtccaacccgccggccgtgtcgctcgagcacagcaccgcccgcggccagtcgatcccgct

SEQ ID NO: 19275 - protein, 102 aa, Muscodor strobelii
  misc_feature: SGI Peptide ID NO. 566479
  misc_feature: Useful for introducing or modulating the production of volatile compounds
MARLPLTTTTPPSAAPPDQTSPHAQPHPHPQPHPHHQHQHQHQYRHYHGHLPSHPHSKLPRGAADRPHQAGAGAAAAFPPLSQSNPPAVSLEHSTARGQSIP

SEQ ID NO: 19276 - DNA, 2293 bp, Muscodor strobelii
  misc_feature: SGI EST ID NO. CUFF.45113.2
  misc_feature: Variant of the nucleotide sequence at SEQ ID NO 19274
ccggcatgagcgcttgcgctaaatccgaaacctggccaccaagtaccaaccacacctacgattacgtagctcatcggaatgcggcatcgtagtatgctagagcgtgaatgctatgattgaacggacaagtgactgttgcctgactgacacgctgtaatcgcccgcccatccaatcctgcatagctgccctttctcacactcttgttttgtttgttgtcgccataaggtacgaccctgaaaccgatattcttgaaccccaagccacttcaccatttctctctctcccactctccgttccgccttggtctctaccatttaatccgcccttttccaaccaccgctgccagtgccccgccatccaccactacacatcagttccaagagtcatacacatcgaggaaagactgtgttcatcactagatctacaaacgatgggtgccgcctcgactgtgctggtggttctaatcaccatcctgtgtgagtgtagacgccggtccaaggctgacgaggggaatgcatgacgcactgacctagatgctcggaacccgcagtccctcctgtcggagtcgccatcgtaaataccttttttttttccgattcaaagatccggcgatggccgggcaattatagaatagatcgatttccttccatttcctaagggataaaagaaaggactaacaggttttgatacatcaggtggccggttgcggtgctgacctctttatcaacatcgctctgaccatcctcggatacattcccgggcacatccacgcgttctacgtcgagtatgtctactacagccggcgcgaccaggccaaccagggctttccggtctcgaaccagcgggcgccgggcgtctacagcgaccgggtccaggcgggcggacagaactacgggacggtagtccagcccggcgtacactagccaagccaaagcgactcaccacaggttgacggtgtttttgcgggtgcatgaggaggggcgaggggaggcgatgcgacgacatactatttggcttgataccgggcagcgggatcaatcactggcatgcgaaaaatacgagtgttggatgatcagtcgctgcgtgccacacggccacgtggatggcaagagagttttttctatgtatgtgctaaggatgaagcgacattagcttttaggtgaggtagatgtgaaagatggcagtttgtcgctctcgtgcgcgagacatgtcgatgaggcagcacggctggcgaggattgcatgatggaggtcaggtagcccgaacgcgcaacgcgagatagaccattggcaattgtctggtgatctgtgaggctgcaattgaggtcataagggtaagaaaagcgatgtagaaacaagcatgcatatcttccaattgattgaaagagcaggctaattgttgggatatataaaagaagagaaagctagttctggactgccccaatatgcccctccccgccacgactgagatggaatgtaatgaatggatggatggatgtacataatacaggtgcggatagatgtgacaggtgcactggtggagccaagagcacgcatcgataggtggtgcatggtgtcgggagaagcaatggaccattcggagaacaccacgaatttttgcaggtcgcaaggccgtggaccagtcagaccagcgccccggatgtgaggatgcgaggatgcagcagaaagcgacgagaagggccatacccatctctcgctagcttcactctagcctctctctccgcctctctctgcatctctgtctcctcctcgacggcgcagactgcgacgagctccagaggcacatatattcagtcaatcgcacttctcaattgaacagcatctcgatcgcagccccatcaattgcagcctgtcagttggggcattgcgacgaccgttgccgcgaccattgcccacgaccaactgtctggatcatcacttaggaacagcaacacgattattgagggaggtcgataactatgtccatgcaagatggcgcggctgcctctgaccacgaccacgccgccatctgccgcgccgccggaccagacctctccccacgctcagcctcacccgcaccctcagcctcacccacatcatcagcatcagcatcagcatcaatatcggcactaccatggccatctgccctcacatccgcactccaagctgccccgcggcgccgcagataggccacatcaggccggggctggggccgcagctgccttcccgccgctgtcgcagtccaacccgccggccgtgtcgctcgagcacagcaccgcccgcggccagtcga

SEQ ID NO: 19277 - DNA, 300 bp, Muscodor strobelii
  misc_feature: SGI cDNA ID NO. 566480
  misc_feature: Reduced expression when VOC is produced
  misc_feature: Encodes the peptide sequence at SEQ ID NO 19278
atgggtgccgcctcgactgtgctggtggttctaatcaccatcctgttccctcctgtcggagtcgccatcggtgtggccggttgcggtgctgacctctttatcaacatcgctctgaccatcctcggatacattcccgggcacatccacgcgttctacgtcgagtatgtctactacagccggcgcgaccaggccaaccagggctttccggtctcgaaccagcgggcgccgggcgtctacagcgaccgggtccaggcgggcggacagaactacgggacggtagtccagcccggcgtacactag

SEQ ID NO: 19278 - protein, 99 aa, Muscodor strobelii
  misc_feature: SGI Peptide ID NO. 566480
  misc_feature (5)..(56): Pfam Id: PF01679 Pfam Desc: Uncharacterized protein family UPF0057
  misc_feature (1)..(96): NCBI GI: 213511390 Blast Desc: Plasma membrane proteolipid 3 [Salmo salar] gi|209730844|gb|ACI66291.1| Plasma membrane proteolipid 3 [Salmo salar]
  misc_feature (1)..(96): NCBI GI: 39972025 Blast Desc: MGG_07328 [Magnaporthe grisea 70-15] gi|145019839|gb|EDK04067.1| MGG_07328 [Magnaporthe grisea 70-15]
  misc_feature (1)..(96): NCBI GI: 256731005 Blast Desc: [Nectria haematococca mpVI 77-13-4]
  misc_feature (1)..(97): NCBI GI: 46124835 Blast Desc: FG06795.1 [Gibberella zeae PH-1]
  misc_feature (1)..(96): NCBI GI: 28949921 Blast Desc: conserved [Neurospora crassa]
  misc_feature (3)..(96): NCBI GI: 85100627 Blast Desc: NCU06682 [Neurospora crassa OR74A] gi|28922533|gb|EAA31761.1| [Neurospora crassa OR74A]
  misc_feature (1)..(96): NCBI GI: 156063326 Blast Desc: SS1G_01779 [Sclerotinia sclerotiorum 1980] gi|154697115|gb|EDN96853.1| SS1G_01779 [Sclerotinia sclerotiorum 1980]
  misc_feature (5)..(89): NCBI GI: 189207112 Blast Desc: conserved [Pyrenophora tritici-repentis Pt-1C-BFP] gi|187975983|gb|EDU42609.1| conserved [Pyrenophora tritici-repentis Pt-1C-BFP]
  misc_feature (2)..(92): NCBI GI: 261355619 Blast Desc: conserved [Verticillium albo-atrum VaMs.102]
  misc_feature (2)..(93): NCBI GI: 238503123 Blast Desc: stress response RCI peptide, [Aspergillus flavus NRRL3357] gi|220691605|gb|EED47953.1| stress response RCI peptide, [Aspergillus flavus NRRL3357]
  misc_feature: Useful for introducing or modulating the production of volatile compounds
MGAASTVLVVLITILFPPVGVAIGVAGCGADLFINIALTILGYIPGHIHAFYVEYVYYSRRDQANQGFPVSNQRAPGVYSDRVQAGGQNYGTVVQPGVH

SEQ ID NO: 19279 - DNA, 2293 bp, Muscodor strobelii; identical to SEQ ID NO: 19276
  misc_feature: SGI EST ID NO. CUFF.45113.2
  misc_feature: Variant of the nucleotide sequence at SEQ ID NO 19277

SEQ ID NO: 19280 - DNA, 600 bp, Muscodor strobelii
  misc_feature: SGI cDNA ID NO. 566481
  misc_feature: Reduced expression when VOC is produced
  misc_feature: Encodes the peptide sequence at SEQ ID NO 19281
atgtctagccagcagacgcctccgcctctggccgaccgctacgtcgtcatccacgtcgccacgacctgcgacgagcacggcgtctatgtcaccaaggactcggccgaggtcatcgagctcggctggatcctgctcgacgccaagtcgctcgaagagatccaccgcgagagcgtgctcgtcaagcccatcaacacgcccatcacgcccctctgcacgagcctcacgacgctcacctgggagcacgtcaggaacgcgggcacgttccgcgacgccgtcaaccgcttcgacgccttcgccgtggagcacctgacggcgcagaacctcgacttcgtcttcgtgacgctcgacgcgtgggacctgcgcgtccagctgccgcgcgaggcccgcgacaaggccgtcgtcctgccgccctacctgcagcactcgcgcaccttcgacctgcgcaccgagtaccagcgctggcagcagcaccacccggagtcgctgcccttcggcccctccatgctcagcaacatctgcgccgccctcgaggtcgaccccgtccagtcctccgccccgatcaagcacaacctgcccttccacctgcaggccctcgccccg

SEQ ID NO: 19281 - protein, 200 aa, Muscodor strobelii
  misc_feature: SGI Peptide ID NO. 566481
  misc_feature (1)..(200): NCBI GI: 85100635 Blast Desc: NCU06684 [Neurospora crassa OR74A] gi|28922535|gb|EAA31763.1| conserved [Neurospora crassa OR74A] gi|28949923|emb|CAD70909.1| related to centractin (ARP1) crassa]
  misc_feature (1)..(200): NCBI GI: 116199179 Blast Desc: CHGG_07745 [Chaetomium globosum CBS 148.51] gi|88179024|gb|EAQ86492.1| CHGG_07745 [Chaetomium globosum CBS 148.51]
  misc_feature (1)..(200): NCBI GI: 261355620 Blast Desc: asparagine-rich protein [Verticillium albo-atrum VaMs.102]
  misc_feature (1)..(200): NCBI GI: 256731392 Blast Desc: [Nectria haematococca mpVI 77-13-4]
  misc_feature (12)..(200): NCBI GI: 156063312 Blast Desc: SS1G_01772 [Sclerotinia sclerotiorum 1980] gi|154697108|gb|EDN96846.1| SS1G_01772 [Sclerotinia sclerotiorum 1980]
  misc_feature (2)..(200): NCBI GI: 119182868 Blast Desc: CIMG_06432 [Coccidioides immitis RS] gi|240109426|gb|EER27595.1| Zn-finger in Ran binding protein and others domain containing protein [Coccidioides posadasii C735
  misc_feature (1)..(200): NCBI GI: 119499117 Blast Desc: RNA binding protein (Arp), [Neosartorya fischeri NRRL 181] gi|119414480|gb|EAW24419.1| RNA binding protein (Arp), [Neosartorya fischeri NRRL 181]
  misc_feature (1)..(200): NCBI GI: 121719217 Blast Desc: RNA binding protein (Arp), [Aspergillus clavatus NRRL 1] gi|119404521|gb|EAW14897.1| RNA binding protein (Arp), [Aspergillus clavatus NRRL 1]
  misc_feature (2)..(200): NCBI GI: 258571315 Blast Desc: conserved [Uncinocarpus reesii 1704] gi|237904731|gb|EEP79132.1| conserved [Uncinocarpus reesii 1704]
  misc_feature (1)..(200): NCBI GI: 70985240 Blast Desc: RNA binding protein (Arp) [Aspergillus fumigatus Af293] gi|66845754|gb|EAL86088.1| RNA binding protein (Arp), [Aspergillus fumigatus Af293] gi|159125951|gb|EDP51067.1| RNA
  misc_feature: Useful for introducing or modulating the production of volatile compounds
MSSQQTPPPLADRYVVIHVATTCDEHGVYVTKDSAEVIELGWILLDAKSLEEIHRESVLVKPINTPITPLCTSLTTLTWEHVRNAGTFRDAVNRFDAFAVEHLTAQNLDFVFVTLDAWDLRVQLPREARDKAVVLPPYLQHSRTFDLRTEYQRWQQHHPESLPFGPSMLSNICAALEVDPVQSSAPIKHNLPFHLQALAP

SEQ ID NO: 19282 - DNA, 1630 bp, Muscodor strobelii
  misc_feature: SGI EST ID NO. CUFF.45093.0
  misc_feature: Variant of the nucleotide sequence at SEQ ID NO 19280
cagctctcgatgccctcttcgtaggccccgagctcatcagctccgcttcactctagggatctctacatagtggcgaggaggagcgggttggaaccatgtactatcatttatgacctatctaacatgtctcactaagctagatctcgtttaataagtacacagatgggggtgaggggtgctaaggtatgcgagccagcgagagtcgttggacccgagccgactctgcatcacagaccgacagaacagccagcacagacacagactggggggcacaagtcgaagcagacgtcgctggacgggcccagtgcaaggcggtagactagaattacctacctaccacgacttggcacaattattccatgactgctaggtaggccaggtagtcgtgccgtggtccatagcgtagtccatagtgtagtgcgtgcatatagattgaataatcgtggctgccaataatttcacgggtgcagtcgacaagccgacacctcgtctccctcaccttctctctcttcgttcattatctcgtcgtcgtcgtcgtcctcctcctcatcggccgccgcccccaatcgagtgctgctgtctgtgtctttttcgaagaaaatacagctgcaatcgggcggagtggtgcgttgtgtccagtataggcatatgtgatcatcccgttttttctggtgcacctcgctctctctccaatcctccaaccctcctccgcctctccgccgcctccccaattctcctctccacctccatctccccatctccccatcctcgcgagccattgcgagctgcccacccgccggccacgccatcgacactcgccatcgcagcgccgggcctcctctctgcccttggaatcgacgtgtgcgtgcccgctgcgtgccgagccccagccgacccccagccgacccccagtcgctcgttctccccgacgtcgacgcccaacaacatcgcgccttgtctctcgcttccgcagcgtgtcccgcgcgtgtctccgagtgctgctgctgctgccgccgcggccccgcccaccatgtctagccagcagacgcctccgcctctggccgaccgctacgtcgtcatccacgtcgccacgacctgcgacgagcacggcgtctatgtcaccaaggactcggccgaggtcatcgagctcggctggatcctgctcgacgccaagtcgctcgaagagatccaccgcgagagcgtgctcgtcaagcccatcaacacgcccatcacgcccctctgcacgagcctcacgacgctcacctgggagcacgtcaggaacgcgggcacgttccgcgacgccgtcaaccgcttcgacgccttcgccgtggagcacctgacggcgcagaacctcgacttcgtcttcgtgacgctcgacgcgtgggacctgcgcgtccagctgccgcgcgaggcccgcgacaaggccgtcgtcctgccgccctacctgcagcactcgcgcaccttcgacctgcgcaccgagtaccagcgctggcagcagcaccacccggagtcgctgcccttcggcccctccatgctcagcaacatctgcgccgccctcgaggtcgaccccgtccagtcctccgccccgatcaagcacaacctgcccttccacctgcaggccctcgccccg

SEQ ID NO: 19283 - DNA, 4176 bp, Muscodor strobelii
  misc_feature: SGI cDNA ID NO. 566482
  misc_feature: Reduced expression when VOC is produced
  misc_feature: Encodes the peptide sequence at SEQ ID NO 19284
aacgcccttgtcctcgccgacacccacgccgtgcgcagcgccttcaatggccccaaagacggcgactccgacctcgtctccttctcaccccagctcaccctgccgctgcctctccgcgtgtgccagcttgccttctccgccgacgaggcttacttggtcctgtccgccgagcagggcggcggcctcgcggtctacgacgtcgatgccctccaacgaggcgagcgcaactctgcctttgagatgcccaccctcggcgagcctctcagggccctcgtgcccaaccaccagcccgaaaaggcagagctctgtgctgtcgtcaccaccgagggcaagctctttatggccgatctgcagaagcagggccgcagcgatgtcctcaaggaaaatgtcagctgcgtcgcttggagcagcaagggcaagcagatcgtcgccggcctgggcgacggctccatggtgcagatgaccccgaatggccaggtcaaggccgagatccccaggccccccgatctcgatgatacgtaccacgtttcggctataatgtggctcgagaacgacatattcctggccattcatgtctctgtcccgcagagttcttctcctacacaatgtcatctgatcaccaggaaagacggcaagttccagtaccagtctcgtcgggaccctgtcgaagcgtacggcgccgacagagtgccgcattacaccgcagtccgtctcaaggacttcgaacctcatattaaggacttgttgatcttctcttcaaccgccggagacgacattgggttgctcgctcgctctaccaagccgtgggtccaaaatggtccagaagatgtcttcgtaaacatccagctagctgacgatacgaagcgtgctactttgcccatgggcgagggtttcgataccccggccgccgtcggtgcttcccttgacctgactagccaagaaccagtgtacagacctattccgactgatgagctgaaccaatcatcaggacccctgccaggatactgggtcctaaatgaccaaggagtcttgtccatctggtggattgtgtacacagagtctgtccgaagtgggagtacctatagtggatttgctgccgtcgaggcctccggtgccgtgtctactacgagacaacctgctcagaaggcctcatcgaatgctttcgcggcacactccgccccgtcaaacccctttgccactccaagtgccgctataggagggtcaaattccccagcaccgtcattcggcggcccttcagtattaggcgccactcgctctccttggggtgcgccgtcaacaacgggagcttccacgttcggctcctccgcctttgggggcagtagtgctcctgtcgcgaagcctacttttggccagtccagcttcggcacgagcagcacaccgacatcgacgtttggacaatcctctggactgaatgctgcttcgtcgccttggggctctgcggcggcgccgagacaaccggcctttggccagtcaggatttgcccaagccagtcctaccgcccctaatccgttcggaagcgcagcgtcgaatgcgccgagcgcaggaaatcctttcgggacgtttgctaagcagggcggatttgcagcactgggtcccaaagccggcgaaggaagttctaacatatttgcctctaagaagtctgactcagcctttagcactgtgacttctgatacaactacctctttcccacctccaagctcagaacccgccggcgccagtggagctgcaagttcttttggtaccttcaagttaaagtcaggtttcacagctagcccagatgcaggaaacgaagacgacaagcccgcggcgaaggatgaaaagtcttttttcggctctggcttcacgtcttctttaggcgaggccactaagtcgacttccacgctcttcggaggggagaagactgggctatttagccaaccgaaagtcccaaccacaagtgttgagtcgaccacgcctacaaccacaccggcaccgaacagattcttttcgcagccgtcaagcacatcggagaacaagggcccttttgggtttcccgccaaatcttctggcagtttgttcggtacgactcctgtcacggctccggagccccaagtaactgctgcggaagacacacctctgcctccagagtcaaccaacagcatatttcaggccgaagatgtgccattgccatccgaaacatctaccaccaaagcgacggccgggatcgagagaacggcggatgagaaaggcaagaaaacgtctgccgctggcgctgcccccttgccgccagatcctatccgaaataagaaactatacagcgcgcctcttcctccgctgcctggagcaaatgccacatcaaaggcagccgaaagcgcggctttacctcccgaccccgtcaccaataagaaagcttacgcttctcccctccctcccctgcctggagttgtagcgcaggccaaaccccgaccaacgggtgatatgcctttaccgcctgaccctgtgaagcaacccaaagcctacgagaacaagttacctgccttgcctattgctaaaaccccctcagctgtagcgggaccgggattcaaatttcccaccgatcttccccccgtgtctgatagtgatgacgacgaggatgacgggcacggggagacagaggctgccagcgaaggcagcggtgttgacgtagcaagagacctcagcccacaatcgactggcgcaaaccgaaccccaggattcaccccccagagttctgatggtctaggaggaagcttttccaccatctctcgcccagagccggagaggcgaagtctatttggcgaactgggccggacagcgcccatgttccctcaaccgaacccggtgagccctcgctcgcctagtcctatacgtggcgcggtgccgtcaagattattgggtcaggaccaccagcgatcatttagtgctccgggcatggcctctcagatccttggcgcatccaggaagccggcccaggcacgtctaggagcttccattgtgggccgagagaccgccttcgaagatgtggttctcgaacaacgcaaggctaaggccaagaaggcagcagaggaggaggctcaagtgctcgtcgacgaagaggatgacgccattcaacagctgctccaggctgagctggaaccaacgcttaatctcgatgagttcattgctcattccggagttgcacctcccgcgagcgacagtgtcccagcccaggtggaggccgtgtaccgagatatcaattcaatgattgacacactgggcctcaacgcccggtcgttgatggcatttactcagggacatgagaagttcggttcagagcagcgtacgaaacaagatcttgggacgcttgatgcctggaccttgagcgatgcgagacatctgacctacttggcagacgacgtcctaggacgcgccctggctgaagcccaagttgtcgatgtggaggccaaagtgatgcagttgaaggacttgatgcgtgactttgcgcgcgactgcaataaacaggccgaactgaaaaagacgatggccgcgaggctggatcctgaacaatcctcaacacaccagtcgcttcctctgaatcccgaacagatagcccagcagagcgacctgcgccggcaactcagccagttccaaaccctcctggcccagagcgaagaagcactgacactgctcaaagccaaacttgtttccgccacgggcgggaacggaaaggcaggaccggtacctaccatcgaggcaattgtgcgcaccatcaccaagatgacgagcatggtcgagaagagaagtggcgatatcgatgtgatggaaaaccagatgcgaaagctacggctgggctcactggacctctcgggaagccgagacggatcacccttcgccacacccaagagaattctaggatcctctgtcctctcaccggaacgatccgtcagagagagcacacctctgcgcggcagcatcatgcgccattcactctcgggatcgattggccttggagacagcgcgttccgtacaccaccccgcaagaagctcagtgggttcggagatgcggagagaaatgccgtcaaggataagcgggcacgcagaggcgtgctcttggggactctgagggacatcatcgagaagaagggaccggcggtatggtccatggacgaccttgagtag

SEQ ID NO: 19284 - protein, 1391 aa, Muscodor strobelii
  misc_feature: SGI Peptide ID NO. 566482
  misc_feature (1)..(1391): NCBI GI: 256734594 Blast Desc: NECHADRAFT_57482 [Nectria haematococca mpVI 77-13-4]
  misc_feature (1)..(1391): NCBI GI: 46105476 Blast Desc: FG00366.1 [Gibberella zeae PH-1]
  misc_feature (1)..(1391): NCBI GI: 171696252 Blast Desc: protein product [Podospora anserina] gi|170948368|emb|CAP60532.1| protein product [Podospora anserina]
  misc_feature (1)..(1389): NCBI GI: 156030951 Blast Desc: SS1G_14256 [Sclerotinia sclerotiorum 1980] gi|154700647|gb|EDO00386.1| SS1G_14256 [Sclerotinia sclerotiorum 1980]
  misc_feature (1)..(1389): NCBI GI: 154297632 Blast Desc: BC1G_12661 [Botryotinia fuckeliana B05.10] gi|150858484|gb|EDN33676.1| BC1G_12661 [Botryotinia fuckeliana B05.10]
  misc_feature (1)..(1382): NCBI GI: 116181578 Blast Desc: CHGG_01417 [Chaetomium globosum CBS 148.51] gi|88185714|gb|EAQ93182.1| CHGG_01417 [Chaetomium globosum CBS 148.51]
  misc_feature (1)..(1390): NCBI GI: 121710182 Blast Desc: nuclear pore complex subunit Nup159, [Aspergillus clavatus NRRL 1] gi|119400857|gb|EAW11281.1| nuclear pore complex subunit Nup159, [Aspergillus clavatus NRRL 1]
  misc_feature (3)..(1343): NCBI GI: 239610636 Blast Desc: nuclear pore complex subunit Nup159 [Ajellomyces dermatitidis ER-3]
  misc_feature (3)..(1343): NCBI GI: 261195198 Blast Desc: nuclear pore complex subunit Nup159 [Ajellomyces dermatitidis SLH14081] gi|239587875|gb|EEQ70518.1| nuclear pore complex subunit Nup159 [Ajellomyces dermatitidis SLH14081]
  misc_feature (3)..(1390): NCBI GI: 240105727 Blast Desc: CPC735_052900 [Coccidioides posadasii C735 delta SOWgp]
  misc_feature: Useful for introducing or modulating the production of volatile compounds
NALVLADTHAVRSAFNGPKDGDSDLVSFSPQLTLPLPLRVCQLAFSADEAYLVLSAEQGGGLAVYDVDALQRGERNSAFEMPTLGEPLRALVPNHQPEKAELCAVVTTEGKLFMADLQKQGRSDVLKENVSCVAWSSKGKQIVAGLGDGSMVQMTPNGQVKAEIPRPPDLDDTYHVSAIMWLENDIFLAIHVSVPQSSSPTQCHLITRKDGKFQYQSRRDPVEAYGADRVPHYTAVRLKDFEPHIKDLLIFSSTAGDDIGLLARSTKPWVQNGPEDVFVNIQLADDTKRATLPMGEGFDTPAAVGASLDLTSQEPVYRPIPTDELNQSSGPLPGYWVLNDQGVLSIWWIVYTESVRSGSTYSGFAAVEASGAVSTTRQPAQKASSNAFAAHSAPSNPFATPSAAIGGSNSPAPSFGGPSVLGATRSPWGAPSTTGASTFGSSAFGGSSAPVAKPTFGQSSFGTSSTPTSTFGQSSGLNAASSPWGSAAAPRQPAFGQSGFAQASPTAPNPFGSAASNAPSAGNPFGTFAKQGGFAALGPKAGEGSSNIFASKKSDSAFSTVTSDTTTSFPPPSSEPAGASGAASSFGTFKLKSGFTASPDAGNEDDKPAAKDEKSFFGSGFTSSLGEATKSTSTLFGGEKTGLFSQPKVPTTSVESTTPTTTPAPNRFFSQPSSTSENKGPFGFPAKSSGSLFGTTPVTAPEPQVTAAEDTPLPPESTNSIFQAEDVPLPSETSTTKATAGIERTADEKGKKTSAAGAAPLPPDPIRNKKLYSAPLPPLPGANATSKAAESAALPPDPVTNKKAYASPLPPLPGVVAQAKPRPTGDMPLPPDPVKQPKAYENKLPALPIAKTPSAVAGPGFKFPTDLPPVSDSDDDEDDGHGETEAASEGSGVDVARDLSPQSTGANRTPGFTPQSSDGLGGSFSTISRPEPERRSLFGELGRTAPMFPQPNPVSPRSPSPIRGAVPSRLLGQDHQRSFSAPGMASQILGASRKPAQARLGASIVGRETAFEDVVLEQRKAKAKKAAEEEAQVLVDEEDDAIQQLLQAELEPTLNLDEFIAHSGVAPPASDSVPAQVEAVYRDINSMIDTLGLNARSLMAFTQGHEKFGSEQRTKQDLGTLDAWTLSDARHLTYLADDVLGRALAEAQVVDVEAKVMQLKDLMRDFARDCNKQAELKKTMAARLDPEQSSTHQSLPLNPEQIAQQSDLRRQLSQFQTLLAQSEEALTLLKAKLVSATGGNGKAGPVPTIEAIVRTITKMTSMVEKRSGDIDVMENQMRKLRLGSLDLSGSRDGSPFATPKRILGSSVLSPERSVRESTPLRGSIMRHSLSGSIGLGDSAFRTPPRKKLSGFGDAERNAVKDKRARRGVLLGTLRDIIEKKGPAVWSMDDLE

SEQ ID NO: 19285 - DNA, 4932 bp, Muscodor strobelii
  misc_feature: SGI EST ID NO. CUFF.45188.2
  misc_feature: Variant of the nucleotide sequence at SEQ ID NO 19283
aacgcccttgtcctcgccgacacccacgccgtgcgcagcgccttcaatggccccaaagacggcgactccgacctcgtctccttctcaccccagctcaccctgccgctgcctctccgcgtgtgccagcttgccttctccgccgacgaggcttacttggtcctgtccgccgagcagggcggcggcctcgcggtctacgacgtcgatgccctccaacgaggcgagcgcaactctgcctttgagatgcccaccctcggcgagcctctcagggccctcgtgcccaaccaccagcccgaaaaggcagagctctgtgctgtcgtcaccaccgagggcaagctctttatggccgatctgcagaagcagggccgcagcgatgtcctcaaggaaaatgtcagctgcgtcgcttggagcagcaagggcaagcagatcgtcgccggcctgggcgacggctccatggtgcagatgaccccgaatggccaggtcaaggccgagatccccaggccccccgatctcgatgatacgtaccacgtttcggctataatgtggctcgagaacgacatattcctggccattcatgtctctgtcccgcagagttcttctcctacacaatgtcatctgatcaccaggaaagacggcaagttccagtaccagtctcgtcgggaccctgtcgaagcgtacggcgccgacagagtgccgcattacaccgcagtccgtctcaaggacttcgaacctcatattaaggacttgttgatcttctcttcaaccgccggagacgacattgggttgctcgctcgctctaccaagccgtgggtccaaaatggtccagaagatgtcttcgtaaacatccagctagctgacgatacgaagcgtgctactttgcccatgggcgagggtttcgataccccggccgccgtcggtgcttcccttgacctgactagccaagaaccagtgtacagacctattccgactgatgagctgaaccaatcatcaggacccctgccaggatactgggtcctaaatgaccaaggagtcttgtccatctggtggattgtgtacacagagtctgtccgaagtgggagtacctatagtggatttgctgccgtcgaggcctccggtgccgtgtctactacgagacaacctgctcagaaggcctcatcgaatgctttcgcggcacactccgccccgtcaaacccctttgccactccaagtgccgctataggagggtcaaattccccagcaccgtcattcggcggcccttcagtattaggcgccactcgctctccttggggtgcgccgtcaacaacgggagcttccacgttcggctcctccgcctttgggggcagtagtgctcctgtcgcgaagcctacttttggccagtccagcttcggcacgagcagcacaccgacatcgacgtttggacaatcctctggactgaatgctgcttcgtcgccttggggctctgcggcggcgccgagacaaccggcctttggccagtcaggatttgcccaagccagtcctaccgcccctaatccgttcggaagcgcagcgtcgaatgcgccgagcgcaggaaatcctttcgggacgtttgctaagcagggcggatttgcagcactgggtcccaaagccggcgaaggaagttctaacatatttgcctctaagaagtctgactcagcctttagcactgtgacttctgatacaactacctctttcccacctccaagctcagaacccgccggcgccagtggagctgcaagttcttttggtaccttcaagttaaagtcaggtttcacagctagcccagatgcaggaaacgaagacgacaagcccgcggcgaaggatgaaaagtcttttttcggctctggcttcacgtcttctttaggcgaggccactaagtcgacttccacgctcttcggaggggagaagactgggctatttagccaaccgaaagtcccaaccacaagtgttgagtcgaccacgcctacaaccacaccggcaccgaacagattcttttcgcagccgtcaagcacatcggagaacaagggcccttttgggtttcccgccaaatcttctggcagtttgttcggtacgactcctgtcacggctccggagccccaagtaactgctgcggaagacacacctctgcctccagagtcaaccaacagcatatttcaggccgaagatgtgccattgccatccgaaacatctaccaccaaagcgacggccgggatcgagagaacggcggatgagaaaggcaagaaaacgtctgccgctggcgctgcccccttgccgccagatcctatccgaaataagaaactatacagcgcgcctcttcctccgctgcctggagcaaatgccacatcaaaggcagccgaaagcgcggctttacctcccgaccccgtcaccaataagaaagcttacgcttctcccctccctcccctgcctggagttgtagcgcaggccaaaccccgaccaacgggtgatatgcctttaccgcctgaccctgtgaagcaacccaaagcctacgagaacaagttacctgccttgcctattgctaaaaccccctcagctgtagcgggaccgggattcaaatttcccaccgatcttccccccgtgtctgatagtgatgacgacgaggatgacgggcacggggagacagaggctgccagcgaaggcagcggtgttgacgtagcaagagacctcagcccacaatcgactggcgcaaaccgaaccccaggattcaccccccagagttctgatggtctaggaggaagcttttccaccatctctcgcccagagccggagaggcgaagtctatttggcgaactgggccggacagcgcccatgttccctcaaccgaacccggtgagccctcgctcgcctagtcctatacgtggcgcggtgccgtcaagattattgggtcaggaccaccagcgatcatttagtgctccgggcatggcctctcagatccttggcgcatccaggaagccggcccaggcacgtctaggagcttccattgtgggccgagagaccgccttcgaagatgtggttctcgaacaacgcaaggctaaggccaagaaggcagcagaggaggaggctcaagtgctcgtcgacgaagaggatgacgccattcaacagctgctccaggctgagctggaaccaacgcttaatctcgatgagttcattgctcattccggagttgcacctcccgcgagcgacagtgtcccagcccaggtggaggccgtgtaccgagatatcaattcaatgattgacacactgggcctcaacgcccggtcgttgatggcatttactcagggacatgagaagttcggttcagagcagcgtacgaaacaagatcttgggacgcttgatgcctggaccttgagcgatgcgagacatctgacctacttggcagacgacgtcctaggacgcgccctggctgaagcccaagttgtcgatgtggaggccaaagtgatgcagttgaaggacttgatgcgtgactttgcgcgcgactgcaataaacaggccgaactgaaaaagacgatggccgcgaggctggatcctgaacaatcctcaacacaccagtcgcttcctctgaatcccgaacagatagcccagcagagcgacctgcgccggcaactcagccagttccaaaccctcctggcccagagcgaagaagcactgacactgctcaaagccaaacttgtttccgccacgggcgggaacggaaaggcaggaccggtacctaccatcgaggcaattgtgcgcaccatcaccaagatgacgagcatggtcgagaagagaagtggcgatatcgatgtgatggaaaaccagatgcgaaagctacggctgggctcactggacctctcgggaagccgagacggatcacccttcgccacacccaagagaattctaggatcctctgtcctctcaccggaacgatccgtcagagagagcacacctctgcgcggcagcatcatgcgccattcactctcgggatcgattggccttggagacagcgcgttccgtacaccaccccgcaagaagctcagtgggttcggagatgcggagagaaatgccgtcaaggataagcgggcacgcagaggcgtgctcttggggactctgagggacatcatcgagaagaagggaccggcggtatggtccatggacgaccttgagtagcggcggaagggctcggtagctcgccacaaccgcgtcgagttgtatgtagaaccaatgtaatacgatgagattgccccgccacgggccaaatagggaataggtacggaaaggaaataagataccatgacatatacctttcaatgcagcttcatcttgtactgtgtgggcatgcggaacagaatgagacggtgatttgttccgcctaatatagattcacgcccgaccccgtggccctatgtttcttctacttcacctctgcagactcggccaagaaggctccaaactatcttgtctcctttctctcattcctcgctcgcgagacagcctatggtacgattggtggggtataatacaaatacaagatcaagacccaaggcaaaacaggttccccttacgcgactccgtgctccctcgccacgcaggctcgcccaggcatggttgcttctatcaaaccagatgcaaatatcaatccatctcgccgactagatcacgtgcgtgccccggattccaggcgggcgacgagtttcttgacgctcgtccactcgtcgttccggacagactccttgccgcccaggtcggggccgacctcgaaaagggtcacgacggcgtcgatgccgccggtggccagacgcttgccctcggtcgtctcccaggcgaccttgttcagactcttgctcagcagctggcggccgtccttgcggggcgaggggctgatcctggcgacggggatctcggtctcgacggtgatgtcccaga

SEQ ID NO: 19286 - DNA, 270 bp, Muscodor strobelii
  misc_feature: SGI cDNA ID NO. 566483
  misc_feature: Reduced expression when VOC is produced
  misc_feature: Encodes the peptide sequence at SEQ ID NO 19287
ctctgggacatcaccgtcgagaccgagatccccgtcgccaggatcagcccctcgccccgcaaggacggccgccagctgctgagcaagagtctgaacaaggtcgcctgggagacgaccgagggcaagcgtctggccaccggcggcatcgacgccgtcgtgacccttttcgaggtcggccccgacctgggcggcaaggagtctgtccggaacgacgagtggacgagcgtcaagaaactcgtcgcccgcctggaatccggggcacgcacgtga

SEQ ID NO: 19287 - protein, 89 aa, Muscodor strobelii
  misc_feature: SGI Peptide ID NO. 566483
  misc_feature (1)..(85): NCBI GI: 171695302 Blast Desc: protein product [Podospora anserina] gi|170947893|emb|CAP60057.1| protein product [Podospora anserina]
  misc_feature (1)..(84): NCBI GI: 85091463 Blast Desc: NCU09142 [Neurospora crassa OR74A] gi|28920305|gb|EAA29678.1| NCU09142 [Neurospora crassa OR74A]
  misc_feature (1)..(85): NCBI GI: 116182366 Blast Desc: CHGG_01811 [Chaetomium globosum CBS 148.51] gi|88186108|gb|EAQ93576.1| CHGG_01811 [Chaetomium globosum CBS 148.51]
  misc_feature (1)..(89): NCBI GI: 154319117 Blast Desc: BC1G_02510 [Botryotinia fuckeliana B05.10] gi|150856941|gb|EDN32133.1| BC1G_02510 [Botryotinia fuckeliana B05.10]
  misc_feature (1)..(89): NCBI GI: 156063476 Blast Desc: SS1G_01856 [Sclerotinia sclerotiorum 1980] gi|154697190|gb|EDN96928.1| SS1G_01856 [Sclerotinia sclerotiorum 1980]
  misc_feature (1)..(85): NCBI GI: 256734565 Blast Desc: [Nectria haematococca mpVI 77-13-4]
  misc_feature (1)..(85): NCBI GI: 46106541 Blast Desc: FG00428.1 [Gibberella zeae PH-1]
  misc_feature (1)..(85): NCBI GI: 261357534 Blast Desc: cytoplasmic dynein 1 intermediate chain 1 [Verticillium albo-atrum VaMs.102]
  misc_feature (1)..(88): NCBI GI: 39945578 Blast Desc: MGG_04771 [Magnaporthe grisea 70-15] gi|145021353|gb|EDK05482.1| MGG_04771 [Magnaporthe grisea 70-15]
  misc_feature (1)..(86): NCBI GI: 119195659 Blast Desc: CIMG_02204 [Coccidioides immitis RS]
  misc_feature: Useful for introducing or modulating the production of volatile compounds
LWDITVETEIPVARISPSPRKDGRQLLSKSLNKVAWETTEGKRLATGGIDAVVTLFEVGPDLGGKESVRNDEWTSVKKLVARLESGART

SEQ ID NO: 19288 - DNA, 566 bp, Muscodor strobelii
  misc_feature: SGI cDNA ID NO. 566484
  misc_feature: Reduced expression when VOC is produced
  misc_feature: Encodes the peptide sequence at SEQ ID NO 19289
gccgagctcacccacgacgtgctggccctgcacgaggaggacggcgccaccgtcgcccgccgcatcgacggccgcgaggggcgcgttgtctgggagtaccgcaccgtcacccgcgacgtgccgctgcagctcagcaccagcggcgacaaggtcttcgtcgtcaccctgcacggcgccctgctctcctacaccctcaacgtcgtcgtcctcgacgccctgaccggccgcaagctcgacgagatcgtcctcaccaccaagggcgaggtccagaagcccgccgatgtcacctttgtcggcgccaactcggccgccgccgtcgtcgcctggaccgacaacagcgttacgaagctcaggctcaacgtcctcggcaccaagaccaagcacgagttccccctgccccccgacaccacgcacgtcgccgtccacgcgccccacgccgcccacgcgtcgccccacttcctcgtccacagccagacggccaccgccagcaaggccgacgtcttccacatcgacctcaagacggccgccatcgccaaggagtacgagctgcccctgctcgccggccc

SEQ ID NO: 19289 - protein, 188 aa, Muscodor strobelii
  misc_feature: SGI Peptide ID NO. 566484
  misc_feature (6)..(188): NCBI GI: 261353640 Blast Desc: conserved [Verticillium albo-atrum VaMs.102]
  misc_feature (6)..(188): NCBI GI: 39970801 Blast Desc: MGG_02867 [Magnaporthe grisea 70-15] gi|145017315|gb|EDK01678.1| MGG_02867 [Magnaporthe grisea 70-15]
  misc_feature (6)..(188): NCBI GI: 149210293 Blast Desc: MGCH7_ch7g624 [Magnaporthe grisea 70-15] gi|86196579|gb|EAQ71217.1| MGCH7_ch7g624 [Magnaporthe grisea 70-15]
  misc_feature (6)..(188): NCBI GI: 46105266 Blast Desc: FG00261.1 [Gibberella zeae PH-1]
  misc_feature (6)..(188): NCBI GI: 171683935 Blast Desc: protein product [Podospora anserina] gi|170941928|emb|CAP67580.1| protein product [Podospora anserina]
  misc_feature (6)..(188): NCBI GI: 256731907 Blast Desc: [Nectria haematococca mpVI 77-13-4]
  misc_feature (6)..(188): NCBI GI: 85074773 Blast Desc: NCU00614 [Neurospora crassa OR74A] gi|28927567|gb|EAA36518.1| conserved [Neurospora crassa OR74A]
  misc_feature (6)..(188): NCBI GI: 154310580 Blast Desc: BC1G_06764 [Botryotinia fuckeliana B05.10] gi|150851304|gb|EDN26497.1| BC1G_06764 [Botryotinia fuckeliana B05.10]
  misc_feature (6)..(188): NCBI GI: 156058420 Blast Desc: SS1G_03221 [Sclerotinia sclerotiorum 1980] gi|154701009|gb|EDO00748.1| SS1G_03221 [Sclerotinia sclerotiorum 1980]
  misc_feature (5)..(188): NCBI GI: 255955873 Blast Desc: Pc21g16890 [Penicillium chrysogenum Wisconsin 54-1255] gi|211590400|emb|CAP96586.1| Pc21g16890 [Penicillium chrysogenum Wisconsin 54-1255]
  misc_feature: Useful for introducing or modulating the production of volatile compounds
AELTHDVLALHEEDGATVARRIDGREGRVVWEYRTVTRDVPLQLSTSGDKVFVVTLHGALLSYTLNVVVLDALTGRKLDEIVLTTKGEVQKPADVTFVGANSAAAVVAWTDNSVTKLRLNVLGTKTKHEFPLPPDTTHVAVHAPHAAHASPHFLVHSQTATASKADVFHIDLKTAAIAKEYELPLLAG

SEQ ID NO: 19290 - DNA, 567 bp, Muscodor strobelii
  misc_feature: SGI EST ID NO. CUFF.45099.0
  misc_feature: Variant of the nucleotide sequence at SEQ ID NO 19288
cgccgagctcacccacgacgtgctggccctgcacgaggaggacggcgccaccgtcgcccgccgcatcgacggccgcgaggggcgcgttgtctgggagtaccgcaccgtcacccgcgacgtgccgctgcagctcagcaccagcggcgacaaggtcttcgtcgtcaccctgcacggcgccctgctctcctacaccctcaacgtcgtcgtcctcgacgccctgaccggccgcaagctcgacgagatcgtcctcaccaccaagggcgaggtccagaagcccgccgatgtcacctttgtcggcgccaactcggccgccgccgtcgtcgcctggaccgacaacagcgttacgaagctcaggctcaacgtcctcggcaccaagaccaagcacgagttccccctgccccccgacaccacgcacgtcgccgtccacgcgccccacgccgcccacgcgtcgccccacttcctcgtccacagccagacggccaccgccagcaaggccgacgtcttccacatcgacctcaagacggccgccatcgccaaggagtacgagctgcccctgctcgccggccc

SEQ ID NO: 19291 - DNA, 549 bp, Muscodor strobelii
  misc_feature: SGI cDNA ID NO. 566485
  misc_feature: Encodes the peptide sequence at SEQ ID NO 19292
atgacgacgacgacacccgccgcagtctccccagttgtggccaaccgccacgacgacatcacctccaccgccgacagcactacccctcttcctcctcccgccgaggtgctacgggcacaatatggtctggaagcttcggctgccaagtctcgcaacctagaggcgcacgactacgtcaaccagggccagccgcacgaggaccattcgcccctcagcctctcccatcgaaactcgcccaaaccagaccgagacacggctgctgcatcacccgatcaggatgccgtcgtcgacgagcccgcctcgcccggccgcaggagtgtgcagttcgcgcgcgcagacaccgtcttggagccgcccaagttcccccattcccggcagtcctcgtgggacgaaggcgagccgagtggcaggtcacgcagcgagagatggatgtcgaggctcaagtccaccctcagcaccacagccactccgtccccccagccgtcgaggggccccggcatgtccgaggtcggctcttcctccaccagcaactctcccgtcatgacgaga

SEQ ID NO: 19292 - protein, 183 aa, Muscodor strobelii
  misc_feature: SGI Peptide ID NO. 566485
  misc_feature (54)..(183): NCBI GI: 261353187 Blast Desc: phospholipase D1 [Verticillium albo-atrum VaMs.102]
  misc_feature (13)..(160): NCBI GI: 116201559 Blast Desc: CHGG_08664 [Chaetomium globosum CBS 148.51] gi|88177182|gb|EAQ84650.1| CHGG_08664 [Chaetomium globosum CBS 148.51]
  misc_feature (55)..(183): NCBI GI: 40882328 Blast Desc: related to phospholipase D [Neurospora crassa]
  misc_feature (55)..(183): NCBI GI: 164426645 Blast Desc: NCU03955 [Neurospora crassa OR74A] gi|157071420|gb|EAA28358.2| conserved [Neurospora crassa OR74A]
  misc_feature (82)..(179): NCBI GI: 46136803 Blast Desc: FG09917.1 [Gibberella zeae PH-1]
MTTTTPAAVSPVVANRHDDITSTADSTTPLPPPAEVLRAQYGLEASAAKSRNLEAHDYVNQGQPHEDHSPLSLSHRNSPKPDRDTAAASPDQDAVVDEPASPGRRSVQFARADTVLEPPKFPHSRQSSWDEGEPSGRSRSERWMSRLKSTLSTTATPSPQPSRGPGMSEVGSSSTSNSPVMTR

SEQ ID NO: 19293 - DNA, 1273 bp, Muscodor strobelii
  misc_feature: SGI EST ID NO. CUFF.45103.0
  misc_feature: Variant of the nucleotide sequence at SEQ ID NO 19291
ccaacctagcagagacctaggtcaccaactctcacagcgcatctcgagctgccccgctaccaccgagcatcgctagcccagggaaaataataggccaactcaaaagtcgtagcagagcacatgaattcccagctccaatcccttgtaggcggcggctgaacagcgagcgacgccctgcagcccaacgtgttgcattcccacccccttgcccatgttccaatgcatcccggtccaactgcgcgacgtcaggactcaggagagattacctacgacgaggcacctcgacgatacttggctgcacatgcactactctgcaattcccttgttgacttggattttggccgcctgctctcatttccaagtggcctcgggcgcaagttgagaggaagtggcatccatccgtttgtctgctttgagcgctgtgctattttctcggtgttttctcatgggcgtcgtcgatcgtctggccactgttccgtctttcaatcctctcctgctgagtgtctgaagttcaatctcgatggtggacagcaactgcatcccgtcaattgctcaatagaccggccccaacgagttttcctgcagctctatagttcgcgatcatcatctaattctatgagagtggttctggagtagaagcagacagacatttgtgctctcgactgccttgtgcccgccgcggcaaagaatgaagcctcccgatcgccatgattccatctcccccatgacgacgacgacacccgccgcagtctccccagttgtggccaaccgccacgacgacatcacctccaccgccgacagcactacccctcttcctcctcccgccgaggtgctacgggcacaatatggtctggaagcttcggctgccaagtctcgcaacctagaggcgcacgactacgtcaaccagggccagccgcacgaggaccattcgcccctcagcctctcccatcgaaactcgcccaaaccagaccgagacacggctgctgcatcacccgatcaggatgccgtcgtcgacgagcccgcctcgcccggccgcaggagtgtgcagttcgcgcgcgcagacaccgtcttggagccgcccaagttcccccattcccggcagtcctcgtgggacgaaggcgagccgagtggcaggtcacgcagcgagagatggatgtcgaggctcaagtccaccctcagcaccacagccactccgtccccccagccgtcgaggggccccggcatgtccgaggtcggctcttcctccaccagcaactctcccgtcatgacgaga

SEQ ID NO: 19294 - DNA, 1407 bp, Muscodor strobelii
  misc_feature: SGI cDNA ID NO. 566486
  misc_feature: Encodes the peptide sequence at SEQ ID NO 19295
atgaagaccgatatgtatctcaccctttgtgtcgagcaggctgagctgtctcctctccactaccgccacggctgcatcgttgtcaagggtggaaaggtcatcggcaaggggtttaatgactatcgtcctggatttgacggtggcgccttgaagacgggtgtcttatctactaaggctgctgcgatggataagccaaagaccaaggacgatagcatgggcaagaaaggcttcaagccatttgatgccacggtcggtttcttcagcagtggccatcatcacgctaccaattgtctaagcatgcactcggagatgatggccattaattcagcactcgcatcgtcgagcgcgacggccgccacgacactgtcgcacgttaaaccgacgatcacgacggcgcgtgacaataaacggaatcggcagcagcgtcgagatgtcttgcaggcgtatgcccagcgcgtcatctacgccacgcccgggcaagaggttcaacaagaacaacaacacggctcacacagcgaggcgagtcatcaacaaaaaggagacgggaagaaggactactatcacggcattcaacatcacggcatacatcatcacgaaccaacttcttctcagaagcagaaggctgggcaacagcaacagcagtggtccaagccgtctaaggctgcacttcatatcacaacgccattgagatccggtagtctgcagagtaatagcaatttgttgggcgagagccgtttgcagatgggctctgacaacgaaagcaacagtagtgatatgagcaacagtatgaagaggatcggaaaggaagcaaagaagaaagtaagcaatcgaatgaacgagagcgcgccagagttggtgtcatacccgcctttggaccgcaagaaagaccctcgattgcgcggtgcggatgtctatgtggtccgactgggtcgcagagctgaagatagtaatgtggaaaggaagaagtattcgggtgcatcgggcaagagcagagaaacatctacggccaagtcgacggcaaaagacaagctagcgaacgtgaaaacagacacacagacacagccggcgccaacgggttcactttacgacgagcttgtgtgcaaaggagccaaagagacaacagagcgaccgggctccagcagcagcggcacggtgttagaccgtagccacgtgctagagtcgcggccatgctaccggtgcgtgctgtacatgcaatcggtggggatcaggaggtgttactggtcgaatgctgctggggagtgggagagtgccaaggtgcgagatctatttgatcagtgtaacggcacgatcagtgtcagtggacaggcaggcgccggagaggtgtttgtaacgaagcacgagatcttgatgctcaggcgtctatacgatgctgagcagcatacttag

SEQ ID NO: 19295 - protein, 468 aa, Muscodor strobelii
  misc_feature: SGI Peptide ID NO. 566486
  misc_feature (24)..(123): Pfam Id: PF00383 Pfam Desc: Cytidine and deoxycytidylate deaminase zinc-binding region
  misc_feature (1)..(460): NCBI GI: 169609901 Blast Desc: SNOG_08042 [Phaeosphaeria nodorum SN15] gi|160701940|gb|EAT84318.2| SNOG_08042 [Phaeosphaeria nodorum SN15]
  misc_feature (1)..(112): NCBI GI: 145603526 Blast Desc: conserved [Magnaporthe grisea 70-15] gi|145011740|gb|EDJ96396.1| conserved [Magnaporthe grisea 70-15]
MKTDMYLTLCVEQAELSPLHYRHGCIVVKGGKVIGKGFNDYRPGFDGGALKTGVLSTKAAAMDKPKTKDDSMGKKGFKPFDATVGFFSSGHHHATNCLSMHSEMMAINSALASSSATAATTLSHVKPTITTARDNKRNRQQRRDVLQAYAQRVIYATPGQEVQQEQQHGSHSEASHQQKGDGKKDYYHGIQHHGIHHHEPTSSQKQKAGQQQQQWSKPSKAALHITTPLRSGSLQSNSNLLGESRLQMGSDNESNSSDMSNSMKRIGKEAKKKVSNRMNESAPELVSYPPLDRKKDPRLRGADVYVVRLGRRAEDSNVERKKYSGASGKSRETSTAKSTAKDKLANVKTDTQTQPAPTGSLYDELVCKGAKETTERPGSSSSGTVLDRSHVLESRPCYRCVLYMQSVGIRRCYWSNAAGEWESAKVRDLFDQCNGTISVSGQAGAGEVFVTKHEILMLRRLYDAEQHT

SEQ ID NO: 19296 - DNA, 2065 bp, Muscodor strobelii
  misc_feature: SGI EST ID NO. CUFF.45107.0
  misc_feature: Variant of the nucleotide sequence at SEQ ID NO 19294
catctttccaacttacttcgtcaccccgaacaaagctcagaaacttgtgccttcaaagtgtccaaatcaaacaaacatacgcagcagcaatccagctgaaaattcaaacactcatcagctctactaagcttgtcaaatccactccaggaacatcactccaggaacccctccattcgtcaaaatgaagaccgatatgtatctcaccctttgtgtcgagcaggctgagctgtctcctctccactaccgccacggctgcatcgttgtcaagggtggaaaggtcatcggcaaggggtttaatgactatcgtcctggatttgacggtggcgccttgaagacgggtgtcttatctactaaggctgctgcgatggataagccaaagaccaaggacgatagcatgggcaagaaaggcttcaagccatttgatgccacggtcggtttcttcagcagtggccatcatcacgctaccaattgtctaagcatgcactcggagatgatggccattaattcagcactcgcatcgtcgagcgcgacggccgccacgacactgtcgcacgttaaaccgacgatcacgacggcgcgtgacaataaacggaatcggcagcagcgtcgagatgtcttgcaggcgtatgcccagcgcgtcatctacgccacgcccgggcaagaggttcaacaaggtaccggcccggcttcgcccgccaagtctcgttttgaaccgtccacaggttcctgggacagaacaacaacacggctcacacagcgaggcgagtcatcaacaaaaaggagacgggaagaaggactactatcacggcattcaacatcacggcatacatcatcacgaaccaacttcttctcagaagcagaaggctgggcaacagcaacagcagtggtccaagccgtctaaggctgcacttcatatcacaacgccattgagatccggtagtctgcagagtaatagcaatttgttgggcgagagccgtttgcagatgggctctgacaacgaaagcaacagtagtgatatgagcaacagtatgaagaggatcggaaaggaagcaaagaagaaagtaagcaatcgaatgaacgagagcgcgccagagttggtgtcatacccgcctttggaccgcaagaaagaccctcgattgcgcggtgcggatgtctatgtggtccgactgggtcgcagagctgaagatagtaatgtggaaaggaagaagtattcgggtgcatcgggcaagagcagagaaacatctacggccaagtcgacggcaaaagacaagctagcgaacgtgaaaacagacacacagacacagccggcgccaacgggttcactttacgacgagcttgtgtgcaaaggagccaaagagacaacagagcgaccgggctccagcagcagcggcacggtgttagaccgtagccacgtgctagagtcgcggccatgctaccggtgcgtgctgtacatgcaatcggtggggatcaggaggtgttactggtcgaatgctgctggggagtgggagagtgccaaggtgcgagatctatttgatcagtgtaacggcacgatcagtgtcagtggacaggcaggcgccggagaggtgtttgtaacgaagcacgagatcttgatgctcaggcgtctatacgatgctgagcagcatacttagctcactaggtacctactcgaattacccaccatcatttagtcaattgcacaacccacctccagtgtcgccagatcattgcaaagctcacactctggctgtgagcacacagaataccaaggcgaaggcatgaagatgtggcatttgattgtgatctgtagctaggtacacatgaattaaccgatgaagcagaattgagacaaccccatactcagctgagatttgatgactattagctacatacctaattccagatccaagttcgtgagcatctcggtcatgtgttttagctacaatcattgtcccagttcaaatcaaagtagtagagatatgtatgagtatgtaaatgcagtgaagtcgctgtatggcctccaatatacaggcgcgatacaagccgtcatattcacttaatgtgaagc

SEQ ID NO: 19297 - DNA, 4737 bp, Muscodor strobelii
  misc_feature: SGI cDNA ID NO. 566487
  misc_feature: Elevated expression when VOC is produced
  misc_feature: Encodes the peptide sequence at SEQ ID NO 19298
atgctttcagtccctggtgctccgccggctgacctgcccatgccccctcatcggcacagcgccccgaatgttctgcgatcatggcggctaagacgagcggcatctaccggctcaccaagtgctgggagtatccagactagctcagaggcgacgagaggctcactaggactgaatctcttgtgcgagccctcggacccgcggttagatgtaatctttgtacatggacttcgaggcggatcaagaaagacctggtccctcaacccttcagattcttcgacgtactggccgatggaatggctccctatcgagccgggttttcgccatgcacgtctgcatagttttgggtatgattcggactggaaaaagacgacagccagctccttgaccattcacgactttgcactggcattattagcagacatcaagcactcgccgattttaggacaaaatgaagatactccaattgtgtttgttgcacatagcatgggaggtcttgttattaagaaagcttttttgttagcaacgaggaacgaggtatacaaagacattgcggctcggattcatacaatgtactttctcggaacaccacacagggggtcggattctgcggcataccttaagatctacttatcactgcccctgccgacaggtgcgaagtcttttgtgaaagaactcatgccagattctcaaacagtccatgacattaattacgactttcggtattcctgcagccatttaaagctttattcgttttttgaaagccttacaacagctggaatcatgattgtcgagaagcagtctgcggtgataggacttccaaacgaggaggagcaatatttaccggccgatcatcgtcacctatgcaagttcgaaagcgaacaggacccgggatatctcatcctaataaggaaacttaaatccacaatcgaggacgtgttgaaagatcgagataataaatacagggaacaataccgagacgatctcagtaccatcgctgacgcatctgaccacacgcaacggccttacagcgagctctatgccgctcagagtccatctaagtatctcacgggctcttgtaattggataaatcaaaacgataagtttggcaaatggatgcgccttgaggcgaactacgatgacgtcgaccctcttactgttcatctgcctgtttcagatgttcgttttctctggctgtcgggacccccgggatctgggaaaacagttgcgtcggcgcatatcataaactatctcgattcgaacaacctcgatgtcagttatttcttcttcagagctggttctaagtcgacactggcagttcttctactaagccttgcttatcaaatggcagaggccattgttgaagttcgacgcggatttctcgaaatgatcaaagccggaagcattataaattgtcaagactacacaatgatatggaacacgttgttccttgggtgtgtttttaaggcccaattccatcagccacagtactgggtgattgatgcaattgacgaatcgccgcgagattcgctcacgagtctattacagatgctagcaagagtcagtcgaaacattcccctgaaagtatttctaagcagtagaccggacagcaagattcaacagatattccagcatgaggacgctcaatacttagagctggagacggggcaaaaagaatcgctacaggacatatccgcatatctactctccaggcccaaactacgcggagacatcgacagtcaagctttagttcatctaattctggagaagtcggatggaatttttctttgggcttcgctcatgatggatcgtcttgacgagtgttacagtgttgaagacatggaagcggtcgtcagaggtgtaccaagcgagatgaatgagttttacgcgaatatcatcgacaacatccaaacctcggctaatgcagacctcgctaagggtatcttgacatgggtcgtcagcgcaccagaggcgctctcagtcgataccctgagagaagccgtcaggctagatctcaaaaggacccttttgtcttctggatcgcatgcagtgttgcctcagatctgtcgtaatttgatcacagtcaacagtgacatgcaagtccaactcatgcatcaaacagtcaaagcatatctaacctcaaaagattctaatttctatgtaccaaaacgggaggcacatgagaacattgcccttgtttgtctatcttaccttaacggcccggacttccaccctcggaacactcgaaaacccggcccaactgatgttgcggctgcagcttttgatatgtacgcagtgcgcaacttcgcatatcatcttgagcattctcggtcatcttcgcgcccgctcttagctgttgtacagaagttcatcgacactaaaacgttgatttgggtcgagcggattgccgagacaacgaagcttgggctcatgattacaattgtcaagagcttgaagcagtacttggctcgattactcgatgtcagccatcctctagacagcagccttcacgcacttggcgcgtggatcaccgatttgactcgattggtaacgaatttcggactcaaccttaccgattcacctccttcgatatacgtaccgatcccttctctatgtccccgttcatcgatgctgcataaaacatacgctgctcgcgttcgacaaaaagtactctgtgcctcaaacgaggtttgggatgagcgatcctcgtgcataccatttcaaagcgatcctaaatcagtcgcaacaggtttcaatagcgttgccatcgggctggtaaaggggaatatacgagtatatgatcagtcaactttagagcttactcatgagttgaatcatggaggcccagtacggcaattagctttcggcaatatttccaacattctcgtttctggaagtcccaaactcatcgctgtctggtcatccgagcggaagaagaagtggacatcttcgatcacaggcattttgttctctgtatccttcagtcccgacgattctatggtcttttcgacggttaaaggagagcttgatgaaatggtgatggctttcaaaacctcagatggaacttccattgggtttatgcagaacgagcatgacagtgcggattcagactcggacgacaacaccatatcacacgaaagatacatccctgagagacacattccagaggttgtcaagatatcaccattgctgggacttgccgctgtatcatatcggagcacccatcttacactgttctctatcgattactcgttaaacaagatgactcggatcggtcgcttcgccaaagaagactccgaagatattgcgctaccaccgcaagtattagatgttgctttctgtccagcaacagagtacagatccatggcagtgctttaccaagacggtgacctcgtgactgtcgagctggataactatgaccgtgtgaatcaacgagatgtctaccacatatttgcgcgagttcttgctgcatctcccgatggacggacacttgctgcgggcgaaaacactggagcagtctcactgtttgtctttgacacacttcagctaatacaccgaatcacctctgatagcatcagcataggtcttgcattctcacctaatagtctatgcttttacgatattcgaggtcggttctgtaatatctgggaaccaccaagcctcttacgaaaggacaggtgggaggatgattcgagccaagccgatgatgcccagcaggagtcaaatggttgtgtcacacggctggtgaatcacaagcaaagcatcacttgtatgacacaggcaggagatgacgcgttcatggtctgtggacgcgaggatggatcaatcaccgtacacgatactaccacaggtaatgtggtattagagataaaagaacatagaatatgtatctctcatctgtcctggaatcatcgtcttaagatcctttatagcgtcgatactgccagccgatgtgtcggtactcggctatcgtgcgcgagaaacgggcaatgggccaagttggatcagctacttgaccataaagtcgatggtaaagtcactcaagtggtctctaaacaggacgagatggctgttctcatatctactgagtctattcaagttttgtgcgaggcgagcacacataccacataccagatttccgtacgcaatggatcttggcaccagcatcccaccgatctgagttgcctcatcttgatcagagatatggctattgacatatttcgctggaaatcactggaacgcattacaggagaatcgaccatactcattgccttgctgccagatactgcgccaagtttgcgcctcaacagcaacaattgggcaacacgttccggtctgggtatcatggttcagacagccactacagagtctggtccgaacaacgtgttcttgctcctcgatacatcgcgattagtttcaaataatatccaaaaacctacgcccatcactacccacaaactgccctgcgatattagaacactcattggtattcacgggtcgaaaatcttctttttaacgcgtcgcgggtggatctgctcatgtaatctcaaaacaatgtctgatgggaaatattattcaagacacttcttcataccgccattctggcgtacgggaaatgcgttgattatgcatgtggtatctaaaactcacatggcgttggtataccgagacgagcttatagtcttgcaaagatttcttgaccttgatgagcgtatcgctattgggaagataacttcatag

SEQ ID NO: 19298 - protein, 1578 aa, Muscodor strobelii
  misc_feature: SGI Peptide ID NO. 566487
  misc_feature (2)..(1574): NCBI GI: 171689660 Blast Desc: protein product [Podospora anserina] gi|170944792|emb|CAP70903.1| protein product [Podospora anserina]
  misc_feature (18)..(1571): NCBI GI: 256720637 Blast Desc: NECHADRAFT_50281 [Nectria haematococca mpVI 77-13-4]
  misc_feature (12)..(1319): NCBI GI: 116205171 Blast Desc: CHGG_10469 [Chaetomium globosum CBS 148.51] gi|88176597|gb|EAQ84065.1| CHGG_10469 [Chaetomium globosum CBS 148.51]
  misc_feature (31)..(1530): NCBI GI: 258563436 Blast Desc: [Uncinocarpus reesii 1704] gi|237907970|gb|EEP82371.1| [Uncinocarpus reesii 1704]
  misc_feature (7)..(1578): NCBI GI: 119176152 Blast Desc: CIMG_09821 [Coccidioides immitis RS]
  misc_feature (14)..(1571): NCBI GI: 159127877 Blast Desc: AFUB_041630 [Aspergillus fumigatus A1163]
  misc_feature (14)..(1571): NCBI GI: 146323333 Blast Desc: NACHT and WD domain protein [Aspergillus fumigatus Af293] gi|129558342|gb|EAL92825.2| NACHT and WD domain protein [Aspergillus fumigatus Af293]
  misc_feature (51)..(1562): NCBI GI: 240108760 Blast Desc: WD domain, G-beta repeat containing protein [Coccidioides posadasii C735 delta SOWgp]
  misc_feature (38)..(1572): NCBI GI: 46135873 Blast Desc: FG09452.1 [Gibberella zeae PH-1]
  misc_feature (48)..(1573): NCBI GI: 256733681 Blast Desc: NECHADRAFT_36093 [Nectria haematococca mpVI 77-13-4]
  misc_feature: Useful for introducing or modulating the production of volatile compounds
MLSVPGAPPADLPMPPHRHSAPNVLRSWRLRRAASTGSPSAGSIQTSSEATRGSLGLNLLCEPSDPRLDVIFVHGLRGGSRKTWSLNPSDSSTYWPMEWLPIEPGFRHARLHSFGYDSDWKKTTASSLTIHDFALALLADIKHSPILGQNEDTPIVFVAHSMGGLVIKKAFLLATRNEVYKDIAARIHTMYFLGTPHRGSDSAAYLKIYLSLPLPTGAKSFVKELMPDSQTVHDINYDFRYSCSHLKLYSFFESLTTAGIMIVEKQSAVIGLPNEEEQYLPADHRHLCKFESEQDPGYLILIRKLKSTIEDVLKDRDNKYREQYRDDLSTIADASDHTQRPYSELYAAQSPSKYLTGSCNWINQNDKFGKWMRLEANYDDVDPLTVHLPVSDVRFLWLSGPPGSGKTVASAHIINYLDSNNLDVSYFFFRAGSKSTLAVLLLSLAYQMAEAIVEVRRGFLEMIKAGSIINCQDYTMIWNTLFLGCVFKAQFHQPQYWVIDAIDESPRDSLTSLLQMLARVSRNIPLKVFLSSRPDSKIQQIFQHEDAQYLELETGQKESLQDISAYLLSRPKLRGDIDSQALVHLILEKSDGIFLWASLMMDRLDECYSVEDMEAVVRGVPSEMNEFYANIIDNIQTSANADLAKGILTWVVSAPEALSVDTLREAVRLDLKRTLLSSGSHAVLPQICRNLITVNSDMQVQLMHQTVKAYLTSKDSNFYVPKREAHENIALVCLSYLNGPDFHPRNTRKPGPTDVAAAAFDMYAVRNFAYHLEHSRSSSRPLLAVVQKFIDTKTLIWVERIAETTKLGLMITIVKSLKQYLARLLDVSHPLDSSLHALGAWITDLTRLVTNFGLNLTDSPPSIYVPIPSLCPRSSMLHKTYAARVRQKVLCASNEVWDERSSCIPFQSDPKSVATGFNSVAIGLVKGNIRVYDQSTLELTHELNHGGPVRQLAFGNISNILVSGSPKLIAVWSSERKKKWTSSITGILFSVSFSPDDSMVFSTVKGELDEMVMAFKTSDGTSIGFMQNEHDSADSDSDDNTISHERYIPERHIPEVVKISPLLGLAAVSYRSTHLTLFSIDYSLNKMTRIGRFAKEDSEDIALPPQVLDVAFCPATEYRSMAVLYQDGDLVTVELDNYDRVNQRDVYHIFARVLAASPDGRTLAAGENTGAVSLFVFDTLQLIHRITSDSISIGLAFSPNSLCFYDIRGRFCNIWEPPSLLRKDRWEDDSSQADDAQQESNGCVTRLVNHKQSITCMTQAGDDAFMVCGREDGSITVHDTTTGNVVLEIKEHRICISHLSWNHRLKILYSVDTASRCVGTRLSCARNGQWAKLDQLLDHKVDGKVTQVVSKQDEMAVLISTESIQVLCEASTHTTYQISVRNGSWHQHPTDLSCLILIRDMAIDIFRWKSLERITGESTILIALLPDTAPSLRLNSNNWATRSGLGIMVQTATTESGPNNVFLLLDTSRLVSNNIQKPTPITTHKLPCDIRTLIGIHGSKIFFLTRRGWICSCNLKTMSDGKYYSRHFFIPPFWRTGNALIMHVVSKTHMALVYRDELIVLQRFLDLDERIAIGKITS

SEQ ID NO: 19299 - DNA, 5333 bp, Muscodor strobelii
  misc_feature: SGI EST ID NO. CUFF.45116.1
  misc_feature: Variant of the nucleotide sequence at SEQ ID NO 19297
caaattcacaagtttgtcgtggacttaaaaaaaatctatgttaggcgcgaacaagctgatcaatagtccctgattcaatagaagttagagagcaattgtgttatgatctaggtcaattacaactgtgtgcaggggctgccaacaggggtttgccggtgtgatgtggtgactaggtatgtgcatccatgctgtgggaaattttagtcgggggcggcgacctgctttgcttacgtcgaccatatgcttgtgtcaacacttggtcctcctcccagcaacccgaacctatctaggctagggaattaggttatgttggttcattttttgacaagcgtactcaacataattgttatccgtttatctcgctgctagtaagagtgtagtgacaccatcctgttctagctctatgtcgattgtgactccccagccatgctttcagtccctggtgctccgccggctgacctgcccatgccccctcatcggcacagcgccccgaatgttctgcgatcatggcggctaagacgagcggcatctaccggctcaccaagtgctgggagtatccagactagctcagaggcgacgagaggctcactaggactgaatctcttgtgcgagccctcggacccgcggttagatgtaatctttgtacatggacttcgaggcggatcaagaaagacctggtccctcaacccttcagattcttcgacgtactggccgatggaatggctccctatcgagccgggttttcgccatgcacgtctgcatagttttgggtatgattcggactggaaaaagacgacagccagctccttgaccattcacgactttgcactggcattattagcagacatcaagcactcgccgattttaggacaaaatgaagatactccaattgtgtttgttgcacatagcatgggaggtcttgttattaagaaagcttttttgttagcaacgaggaacgaggtatacaaagacattgcggctcggattcatacaatgtactttctcggaacaccacacagggggtcggattctgcggcataccttaagatctacttatcactgcccctgccgacaggtgcgaagtcttttgtgaaagaactcatgccagattctcaaacagtccatgacattaattacgactttcggtattcctgcagccatttaaagctttattcgttttttgaaagccttacaacagctggaatcatgattgtcgagaagcagtctgcggtgataggacttccaaacgaggaggagcaatatttaccggccgatcatcgtcacctatgcaagttcgaaagcgaacaggacccgggatatctcatcctaataaggaaacttaaatccacaatcgaggacgtgttgaaagatcgagataataaatacagggaacaataccgagacgatctcagtaccatcgctgacgcatctgaccacacgcaacggccttacagcgagctctatgccgctcagagtccatctaagtatctcacgggctcttgtaattggataaatcaaaacgataagtttggcaaatggatgcgccttgaggcgaactacgatgacgtcgaccctcttactgttcatctgcctgtttcagatgttcgttttctctggctgtcgggacccccgggatctgggaaaacagttgcgtcggcgcatatcataaactatctcgattcgaacaacctcgatgtcagttatttcttcttcagagctggttctaagtcgacactggcagttcttctactaagccttgcttatcaaatggcagaggccattgttgaagttcgacgcggatttctcgaaatgatcaaagccggaagcattataaattgtcaagactacacaatgatatggaacacgttgttccttgggtgtgtttttaaggcccaattccatcagccacagtactgggtgattgatgcaattgacgaatcgccgcgagattcgctcacgagtctattacagatgctagcaagagtcagtcgaaacattcccctgaaagtatttctaagcagtagaccggacagcaagattcaacagatattccagcatgaggacgctcaatacttagagctggagacggggcaaaaagaatcgctacaggacatatccgcatatctactctccaggcccaaactacgcggagacatcgacagtcaagctttagttcatctaattctggagaagtcggatggaatttttctttgggcttcgctcatgatggatcgtcttgacgagtgttacagtgttgaagacatggaagcggtcgtcagaggtgtaccaagcgagatgaatgagttttacgcgaatatcatcgacaacatccaaacctcggctaatgcagacctcgctaagggtatcttgacatgggtcgtcagcgcaccagaggcgctctcagtcgataccctgagagaagccgtcaggctagatctcaaaaggacccttttgtcttctggatcgcatgcagtgttgcctcagatctgtcgtaatttgatcacagtcaacagtgacatgcaagtccaactcatgcatcaaacagtcaaagcatatctaacctcaaaagattctaatttctatgtaccaaaacgggaggcacatgagaacattgcccttgtttgtctatcttaccttaacggcccggacttccaccctcggaacactcgaaaacccggcccaactgatgttgcggctgcagcttttgatatgtacgcagtgcgcaacttcgcatatcatcttgagcattctcggtcatcttcgcgcccgctcttagctgttgtacagaagttcatcgacactaaaacgttgatttgggtcgagcggattgccgagacaacgaagcttgggctcatgattacaattgtcaagagcttgaagcagtacttggctcgattactcgatgtcagccatcctctagacagcagccttcacgcacttggcgcgtggatcaccgatttgactcgattggtaacgaatttcggactcaaccttaccgattcacctccttcgatatacgtaccgatcccttctctatgtccccgttcatcgatgctgcataaaacatacgctgctcgcgttcgacaaaaagtactctgtgcctcaaacgaggtttgggatgagcgatcctcgtgcataccatttcaaagcgatcctaaatcagtcgcaacaggtttcaatagcgttgccatcgggctggtaaaggggaatatacgagtatatgatcagtcaactttagagcttactcatgagttgaatcatggaggcccagtacggcaattagctttcggcaatatttccaacattctcgtttctggaagtcccaaactcatcgctgtctggtcatccgagcggaagaagaagtggacatcttcgatcacaggcattttgttctctgtatccttcagtcccgacgattctatggtcttttcgacggttaaaggagagcttgatgaaatggtgatggctttcaaaacctcagatggaacttccattgggtttatgcagaacgagcatgacagtgcggattcagactcggacgacaacaccatatcacacgaaagatacatccctgagagacacattccagaggttgtcaagatatcaccattgctgggacttgccgctgtatcatatcggagcacccatcttacactgttctctatcgattactcgttaaacaagatgactcggatcggtcgcttcgccaaagaagactccgaagatattgcgctaccaccgcaagtattagatgttgctttctgtccagcaacagagtacagatccatggcagtgctttaccaagacggtgacctcgtgactgtcgagctggataactatgaccgtgtgaatcaacgagatgtctaccacatatttgcgcgagttcttgctgcatctcccgatggacggacacttgctgcgggcgaaaacactggagcagtctcactgtttgtctttgacacacttcagctaatacaccgaatcacctctgatagcatcagcataggtcttgcattctcacctaatagtctatgcttttacgatattcgaggtcggttctgtaatatctgggaaccaccaagcctcttacgaaaggacaggtgggaggatgattcgagccaagccgatgatgcccagcaggagtcaaatggttgtgtcacacggctggtgaatcacaagcaaagcatcacttgtatgacacaggcaggagatgacgcgttcatggtctgtggacgcgaggatggatcaatcaccgtacacgatactaccacaggtaatgtggtattagagataaaagaacatagaatatgtatctctcatctgtcctggaatcatcgtcttaagatcctttatagcgtcgatactgccagccgatgtgtcggtactcggctatcgtgcgcgagaaacgggcaatgggccaagttggatcagctacttgaccataaagtcgatggtaaagtcactcaagtggtctctaaacaggacgagatggctgttctcatatctactgagtctattcaagttttgtgcgaggcgagcacacataccacataccagatttccgtacgcaatggatcttggcaccagcatcccaccgatctgagttgcctcatcttgatcagagatatggctattgacatatttcgctggaaatcactggaacgcattacaggagaatcgaccatactcattgccttgctgccagatactgcgccaagtttgcgcctcaacagcaacaattgggcaacacgttccggtctgggtatcatggttcagacagccactacagagtctggtccgaacaacgtgttcttgctcctcgatacatcgcgattagtttcaaataatatccaaaaacctacgcccatcactacccacaaactgccctgcgatattagaacactcattggtattcacgggtcgaaaatcttctttttaacgcgtcgcgggtggatctgctcatgtaatctcaaaacaatgtctgatgggaaatattattcaagacacttcttcataccgccattctggcgtacgggaaatgcgttgattatgcatgtggtatctaaaactcacatggcgttggtataccgagacgagcttatagtcttgcaaagatttcttgaccttgatgagcgtatcgctattgggaagataacttcatagatccttcatctacagtgataatcttgattgaatacggcgcgacaatgattttagccacatcaatctctaatggcaatacctacctacgtgagattgtattgagcttcagtgttgtaaggcgtcttagcgctagtgaaataccactaccttactgatacaattacttgtcc

SEQ ID NO: 19300 - DNA, 3543 bp, Muscodor strobelii
  misc_feature: SGI cDNA ID NO. 566488
  misc_feature: Encodes the peptide sequence at SEQ ID NO 19301
atgctttcagtccctggtgctccgccggctgacctgcccatgccccctcatcggcacagcgccccgaatgttctgcgatcatggcggctaagacgagcggcatctaccggctcaccaagtgctgggagtatccagactagctcagaggcgacgagaggctcactaggactgaatctcttgtgcgagccctcggacccgcggttagatgtaatctttgtacatggacttcgaggcggatcaagaaagacctggtccctcaacccttcagattcttcgacgtactggccgatggaatggctccctatcgagccgggttttcgccatgcacgtctgcatagttttgggtatgattcggactggaaaaagacgacagccagctccttgaccattcacgactttgcactggcattattagcagacatcaagcactcgccgattttaggacaaaatgaagatactccaattgtgtttgttgcacatagcatgggaggtcttgttattaagaaagcttttttgttagcaacgaggaacgaggtatacaaagacattgcggctcggattcatacaatgtactttctcggaacaccacacagggggtcggattctgcggcataccttaagatctacttatcactgcccctgccgacaggtgcgaagtcttttgtgaaagaactcatgccagattctcaaacagtccatgacattaattacgactttcggtattcctgcagccatttaaagctttattcgttttttgaaagccttacaacagctggaatcatgattgtcgagaagcagtctgcggtgataggacttccaaacgaggaggagcaatatttaccggccgatcatcgtcacctatgcaagttcgaaagcgaacaggacccgggatatctcatcctaataaggaaacttaaatccacaatcgaggacgtgttgaaagatcgagataataaatacagggaacaataccgagacgatctcagtaccatcgctgacgcatctgaccacacgcaacggccttacagcgagctctatgccgctcagagtccatctaagtatctcacgggctcttgtaattggataaatcaaaacgataagtttggcaaatggatgcgccttgaggcgaactacgatgacgtcgaccctcttactgttcatctgcctgtttcagatgttcgttttctctggctgtcgggacccccgggatctgggaaaacagttgcgtcggcgcatatcataaactatctcgattcgaacaacctcgatgtcagttatttcttcttcagagctggttctaagtcgacactggcagttcttctactaagccttgcttatcaaatggcagaggccattgttgaagttcgacgcggatttctcgaaatgatcaaagccggaagcattataaattgtcaagactacacaatgatatggaacacgttgttccttgggtgtgtttttaaggcccaattccatcagccacagtactgggtgattgatgcaattgacgaatcgccgcgagattcgctcacgagtctattacagatgctagcaagagtcagtcgaaacattcccctgaaagtatttctaagcagtagaccggacagcaagattcaacagatattccagcatgaggacgctcaatacttagagctggagacggggcaaaaagaatcgctacaggacatatccgcatatctactctccaggcccaaactacgcggagacatcgacagtcaagctttagttcatctaattctggagaagtcggatggaatttttctttgggcttcgctcatgatggatcgtcttgacgagtgttacagtgttgaagacatggaagcggtcgtcagaggtgtaccaagcgagatgaatgagttttacgcgaatatcatcgacaacatccaaacctcggctaatgcagacctcgctaagggtatcttgacatgggtcgtcagcgcaccagaggcgctctcagtcgataccctgagagaagccgtcaggctagatctcaaaaggacccttttgtcttctggatcgcatgcagtgttgcctcagatctgtcgtaatttgatcacagtcaacagtgacatgcaagtccaactcatgcatcaaacagtcaaagcatatctaacctcaaaagattctaatttctatgtaccaaaacgggaggcacatgagaacattgcccttgtttgtctatcttaccttaacggcccggacttccaccctcggaacactcgaaaacccggcccaactgatgttgcggctgcagcttttgatatgtacgcagtgcgcaacttcgcatatcatcttgagcattctcggtcatcttcgcgcccgctcttagctgttgtacagaagttcatcgacactaaaacgttgatttgggtcgagcggattgccgagacaacgaagcttgggctcatgattacaattgtcaagagcttgaagcagtacttggctcgattactcgatgtcagccatcctctagacagcagccttcacgcacttggcgcgtggatcaccgatttgactcgattggtaacgaatttcggactcaaccttaccgattcacctccttcgatatacgtaccgatcccttctctatgtccccgttcatcgatgctgcataaaacatacgctgctcgcgttcgacaaaaagtactctgtgcctcaaacgaggtttgggatgagcgatcctcgtgcataccatttcaaagcgatcctaaatcagtcgcaacaggtttcaatagcgttgccatcgggctggtaaaggggaatatacgagtatatgatcagtcaactttagagcttactcatgagttgaatcatggaggcccagtacggcaattagctttcggcaatatttccaacattctcgtttctggaagtcccaaactcatcgctgtctggtcatccgagcggaagaagaagtggacatcttcgatcacaggcattttgttctctgtatccttcagtcccgacgattctatggtcttttcgacggttaaaggagagcttgatgaaatggtgatggctttcaaaacctcagatggaacttccattgggtttatgcagaacgagcatgacagtgcggattcagactcggacgacaacaccatatcacacgaaagatacatccctgagagacacattccagaggttgtcaagatatcaccattgctgggacttgccgctgtatcatatcggagcacccatcttacactgttctctatcgattactcgttaaacaagatgactcggatcggtcgcttcgccaaagaagactccgaagatattgcgctaccaccgcaagtattagatgttgctttctgtccagcaacagagtacagatccatggcagtgctttaccaagacggtgacctcgtgactgtcgagctggataactatgaccgtgtgaatcaacgagatgtctaccacatatttgcgcgagttcttgctgcatctcccgatggacggacacttgctgcgggcgaaaacactggagcacatcagcataggtcttgcattctcacctaa

SEQ ID NO: 19301 - protein, 1180 aa, Muscodor strobelii
  misc_feature: SGI Peptide ID NO. 566488
  misc_feature (2)..(1180): NCBI GI: 171689660 Blast Desc: protein product [Podospora anserina] gi|170944792|emb|CAP70903.1| protein product [Podospora anserina]
  misc_feature (12)..(1168): NCBI GI: 116205171 Blast Desc: CHGG_10469 [Chaetomium globosum CBS 148.51] gi|88176597|gb|EAQ84065.1| CHGG_10469 [Chaetomium globosum CBS 148.51]
  misc_feature (18)..(1165): NCBI GI: 256720637 Blast Desc: NECHADRAFT_50281 [Nectria haematococca mpVI 77-13-4]
  misc_feature (31)..(1170): NCBI GI: 258563436 Blast Desc: [Uncinocarpus reesii 1704] gi|237907970|gb|EEP82371.1| [Uncinocarpus reesii 1704]
  misc_feature (14)..(1170): NCBI GI: 159127877 Blast Desc: AFUB_041630 [Aspergillus fumigatus A1163]
  misc_feature (14)..(1170): NCBI GI: 146323333 Blast Desc: NACHT and WD domain protein [Aspergillus fumigatus Af293] gi|129558342|gb|EAL92825.2| NACHT and WD domain protein [Aspergillus fumigatus Af293]
  misc_feature (38)..(1170): NCBI GI: 46135873 Blast Desc: FG09452.1 [Gibberella zeae PH-1]
  misc_feature (7)..(1170): NCBI GI: 119176152 Blast Desc: CIMG_09821 [Coccidioides immitis RS]
  misc_feature (48)..(1170): NCBI GI: 256733681 Blast Desc: NECHADRAFT_36093 [Nectria haematococca mpVI 77-13-4]
  misc_feature (52)..(1164): NCBI GI: 171679241 Blast Desc: protein product [Podospora anserina] gi|170939246|emb|CAP64474.1| protein product [Podospora anserina]
MLSVPGAPPADLPMPPHRHSAPNVLRSWRLRRAASTGSPSAGSIQTSSEATRGSLGLNLLCEPSDPRLDVIFVHGLRGGSRKTWSLNPSDSSTYWPMEWLPIEPGFRHARLHSFGYDSDWKKTTASSLTIHDFALALLADIKHSPILGQNEDTPIVFVAHSMGGLVIKKAFLLATRNEVYKDIAARIHTMYFLGTPHRGSDSAAYLKIYLSLPLPTGAKSFVKELMPDSQTVHDINYDFRYSCSHLKLYSFFESLTTAGIMIVEKQSAVIGLPNEEEQYLPADHRHLCKFESEQDPGYLILIRKLKSTIEDVLKDRDNKYREQYRDDLSTIADASDHTQRPYSELYAAQSPSKYLTGSCNWINQNDKFGKWMRLEANYDDVDPLTVHLPVSDVRFLWLSGPPGSGKTVASAHIINYLDSNNLDVSYFFFRAGSKSTLAVLLLSLAYQMAEAIVEVRRGFLEMIKAGSIINCQDYTMIWNTLFLGCVFKAQFHQPQYWVIDAIDESPRDSLTSLLQMLARVSRNIPLKVFLSSRPDSKIQQIFQHEDAQYLELETGQKESLQDISAYLLSRPKLRGDIDSQALVHLILEKSDGIFLWASLMMDRLDECYSVEDMEAVVRGVPSEMNEFYANIIDNIQTSANADLAKGILTWVVSAPEALSVDTLREAVRLDLKRTLLSSGSHAVLPQICRNLITVNSDMQVQLMHQTVKAYLTSKDSNFYVPKREAHENIALVCLSYLNGPDFHPRNTRKPGPTDVAAAAFDMYAVRNFAYHLEHSRSSSRPLLAVVQKFIDTKTLIWVERIAETTKLGLMITIVKSLKQYLARLLDVSHPLDSSLHALGAWITDLTRLVTNFGLNLTDSPPSIYVPIPSLCPRSSMLHKTYAARVRQKVLCASNEVWDERSSCIPFQSDPKSVATGFNSVAIGLVKGNIRVYDQSTLELTHELNHGGPVRQLAFGNISNILVSGSPKLIAVWSSERKKKWTSSITGILFSVSFSPDDSMVFSTVKGELDEMVMAFKTSDGTSIGFMQNEHDSADSDSDDNTISHERYIPERHIPEVVKISPLLGLAAVSYRSTHLTLFSIDYSLNKMTRIGRFAKEDSEDIALPPQVLDVAFCPATEYRSMAVLYQDGDLVTVELDNYDRVNQRDVYHIFARVLAASPDGRTLAAGENTGAHQHRSCILT

SEQ ID NO: 19302 - DNA, 5333 bp, Muscodor strobelii; identical to SEQ ID NO: 19299
  misc_feature: SGI EST ID NO. CUFF.45116.1
  misc_feature: Variant of the nucleotide sequence at SEQ ID NO 19300

SEQ ID NO: 19303 - DNA, 1107 bp, Muscodor strobelii
  misc_feature: SGI cDNA ID NO. 566489
  misc_feature: Elevated expression when VOC is produced
  misc_feature: Encodes the peptide sequence at SEQ ID NO 19304
atggcagtggataaccgaaagcaacatttgagacttgacgaagcagtccttgctaagcttccgaagggatcggaagtcattagtgacacgctgctcggactaagtgaaaattgtgatactgcgcgaattgaagttagactggtagatggttcacgcgcgcaattttttgaaaagtcttctcaaggccaacatgggcttgagctcatgcgagcacactataactcagaaaccagtttgtatcgcttcattccggagaacataccaccacctttggcattggtctcgtataaatcagatcctgaacgacatgcatttattatggagttcgtcgacatgttagacgatgagctgccaggaccagaatatctcatgcaaaccatcgcaaatcttcaccgtaggagctcggggcagtcacccacaggtcaatatggttttcatattgacaccaagtttgcgcacctcacgactccaaatttctgggatgcttcttgggaatcctggtggaaacggcacatggttatggtgtttgagcgtgaggtcgaggaacgtgggccacgaagccaagaagaagaggagttggttgacttctatctcaacaaagccattccccgatacattcggcgacttgagactgaagggcgatccattgcgcccacactcctacacacagacctgtggccgggcaatgttaagttcatgcttgacaacgaaacagtttgcattttcgatgcaaattcgatgtgggggcataatgaaatggaacttgggttgatcgcaaatccccgatacccacttggagaaccatacattgaagagtactggaggcatattcccgtctccgaaccagaagaggatgctggcaatcgaatcattatgtatatggtgcgacatcaagcttgtctagcgagtgtgtatgctcaggacccgaaattaagagatgtctggattgaatctgtccgcactctcttagacaactatgttgtagaggatcgtttacgagctaataactcagcttctcgagcgaattctgttcttcaggaaggccttatggtcggagtggaaaacgcggaagcagcaactatgtcatacgtttccgcaacaacgtga

SEQ ID NO: 19304 - protein, 368 aa, Muscodor strobelii
  misc_feature: SGI Peptide ID NO. 566489
  misc_feature (1)..(339): NCBI GI: 256720827 Blast Desc: NECHADRAFT_85528 [Nectria haematococca mpVI 77-13-4]
  misc_feature (1)..(345): NCBI GI: 171689658 Blast Desc: protein product [Podospora anserina] gi|170944791|emb|CAP70902.1| protein product [Podospora anserina]
  misc_feature (1)..(319): NCBI GI: 116205173 Blast Desc: CHGG_10470 [Chaetomium globosum CBS 148.51] gi|88176598|gb|EAQ84066.1| CHGG_10470 [Chaetomium globosum CBS 148.51]
  misc_feature (1)..(324): NCBI GI: 85114984 Blast Desc: NCU00873 [Neurospora crassa OR74A] gi|28926583|gb|EAA35553.1| conserved [Neurospora crassa OR74A]
  misc_feature (12)..(307): NCBI GI: 255946231 Blast Desc: Pc20g14050 [Penicillium chrysogenum Wisconsin 54-1255] gi|211588618|emb|CAP86734.1| Pc20g14050 [Penicillium chrysogenum Wisconsin 54-1255]
  misc_feature (68)..(295): NCBI GI: 119176150 Blast Desc: CIMG_09820 [Coccidioides immitis RS]
  misc_feature (11)..(324): NCBI GI: 169765035 Blast Desc: [Aspergillus oryzae RIB40] gi|83764843|dbj|BAE54987.1| protein product [Aspergillus oryzae]
  misc_feature (149)..(299): NCBI GI: 171678625 Blast Desc: protein product [Podospora anserina] gi|170937382|emb|CAP62040.1| protein product [Podospora anserina]
  misc_feature (69)..(326): NCBI GI: 240108761 Blast Desc: conserved [Coccidioides posadasii C735 delta SOWgp]
  misc_feature (20)..(313): NCBI GI: 238503680 Blast Desc: conserved [Aspergillus flavus NRRL3357] gi|220690543|gb|EED46892.1| conserved [Aspergillus flavus NRRL3357]
  misc_feature: Useful for introducing or modulating the production of volatile compounds
MAVDNRKQHLRLDEAVLAKLPKGSEVISDTLLGLSENCDTARIEVRLVDGSRAQFFEKSSQGQHGLELMRAHYNSETSLYRFIPENIPPPLALVSYKSDPERHAFIMEFVDMLDDELPGPEYLMQTIANLHRRSSGQSPTGQYGFHIDTKFAHLTTPNFWDASWESWWKRHMVMVFEREVEERGPRSQEEEELVDFYLNKAIPRYIRRLETEGRSIAPTLLHTDLWPGNVKFMLDNETVCIFDANSMWGHNEMELGLIANPRYPLGEPYIEEYWRHIPVSEPEEDAGNRIIMYMVRHQACLASVYAQDPKLRDVWIESVRTLLDNYVVEDRLRANNSASRANSVLQEGLMVGVENAEAATMSYVSATT

SEQ ID NO: 19305 - DNA, 1455 bp, Muscodor strobelii
  misc_feature: SGI EST ID NO. CUFF.45163.2
  misc_feature: Variant of the nucleotide sequence at SEQ ID NO 19303
gaaatatgatagtttccagcctggtcgcttggaatacggatcagagaaactatcctcctcttcaagaaagagcttagattcagtatattattgtccagttgataaaatttcattcgagattctgtctccctactaccatggcagtggataaccgaaagcaacatttgagacttgacgaagcagtccttgctaagcttccgaagggatcggaagtcattagtgacacgctgctcggactaagtgaaaattgtgatactgcgcgaattgaagttagactggtagatggttcacgcgcgcaattttttgaaaagtcttctcaaggccaacatgggcttgagctcatgcgagcacactataactcagaaaccagtttgtatcgcttcattccggagaacataccaccacctttggcattggtctcgtataaatcagatcctgaacgacatgcatttattatggagttcgtcgacatgttagacgatgagctgccaggaccagaatatctcatgcaaaccatcgcaaatcttcaccgtaggagctcggggcagtcacccacaggtcaatatggttttcatattgacaccaagtttgcgcacctcacgactccaaatttctgggatgcttcttgggaatcctggtggaaacggcacatggttatggtgtttgagcgtgaggtcgaggaacgtgggccacgaagccaagaagaagaggagttggttgacttctatctcaacaaagccattccccgatacattcggcgacttgagactgaagggcgatccattgcgcccacactcctacacacagacctgtggccgggcaatgttaagttcatgcttgacaacgaaacagtttgcattttcgatgcaaattcgatgtgggggcataatgaaatggaacttgggttgatcgcaaatccccgatacccacttggagaaccatacattgaagagtactggaggcatattcccgtctccgaaccagaagaggatgctggcaatcgaatcattatgtatatggtgcgacatcaagcttgtctagcgagtgtgtatgctcaggacccgaaattaagagatgtctggattgaatctgtccgcactctcttagacaactatgttgtagaggatcgtttacgagctaataactcagcttctcgagcgaattctgttcttcaggaaggccttatggtcggagtggaaaacgcggaagcagcaactatgtcatacgtttccgcaacaacgtgatataagattttcggtggaatgattcacatgctcggatatttggtcactaatgttgtcgtaactacgggatcagatgtggtacacatacaatgcctggaaaactacaggatatgcaatttatgtcacaatcgttatgttttatattgtcgatagtcgagtacacttactggcggatgcatcgtgctaaattcatgcataaattatttccact

SEQ ID NO: 19306 - DNA, 693 bp, Muscodor strobelii
  misc_feature: SGI cDNA ID NO. 566490
  misc_feature: Encodes the peptide sequence at SEQ ID NO 19307
atggctctacaaacaagcttccccgcgttattggtgctcaggatgttacagagcgcgggcgcctctggcctaataggttccgcatacggaataatagctgatatcacagaaagagaagagcgtggcggttttgtgggcattttattactcgcgaccgatatagcgcccagccttggcccagtgattggtggcagcctggcccaagcattaggctggagatggatattctggttccttgttatacttcaaggagcacatgcgattttcattgcactgttcctgccagaaactcagcgtaacgtcgtgggaaatggaagcggaatatgtcgaggtgtttactggagtataccttacgcgctacaaagccgagagattaaaaagtcgagagtggatattcacagtccaactcgattttggccaaacccgttagcatgtctgcccatccttcgagatgcgacttcactagttgtgatagtcatgtacgctatcacgtacgctgtgaaaatgacattacaaacaagtcttggagcacaagcaattgagatatataagttgaactatctcgatggcggcttgatatacttgccttccggtgttgcgggtggacttgggtcttatggaacaggctgcgggtactatcggttacgggtgggcgctgacaacaagagcggtgcgtcacctgatgaagcttaa

SEQ ID NO: 19307 - protein, 230 aa, Muscodor strobelii
  misc_feature: SGI Peptide ID NO. 566490
  misc_feature (1)..(206): Pfam Id: PF07690 Pfam Desc: Major Facilitator Superfamily
  misc_feature (1)..(209): NCBI GI: 256720826 Blast Desc: NECHADRAFT_50131 [Nectria haematococca mpVI 77-13-4]
  misc_feature (1)..(209): NCBI GI: 85114992 Blast Desc: NCU00875 [Neurospora crassa OR74A] gi|28926585|gb|EAA35555.1| [Neurospora crassa OR74A]
  misc_feature (1)..(221): NCBI GI: 240108759 Blast Desc: Major Facilitator Superfamily protein [Coccidioides posadasii C735 delta SOWgp]
  misc_feature (1)..(205): NCBI GI: 116205175 Blast Desc: CHGG_10471 [Chaetomium globosum CBS 148.51] gi|88176599|gb|EAQ84067.1| CHGG_10471 [Chaetomium globosum CBS 148.51]
  misc_feature (10)..(196): NCBI GI: 171689656 Blast Desc: protein product [Podospora anserina] gi|170944790|emb|CAP70901.1| protein product [Podospora anserina]
  misc_feature (1)..(224): NCBI GI: 255947864 Blast Desc: Pc22g06710 [Penicillium chrysogenum Wisconsin 54-1255] gi|211591716|emb|CAP97959.1| Pc22g06710 [Penicillium chrysogenum Wisconsin 54-1255]
  misc_feature (1)..(209): NCBI GI: 46138129 Blast Desc: FG10579.1 [Gibberella zeae PH-1]
  misc_feature (1)..(224): NCBI GI: 242769557 Blast Desc: MFS transporter, [Talaromyces stipitatus ATCC 10500] gi|218724985|gb|EED24402.1| MFS transporter, [Talaromyces stipitatus ATCC 10500]
  misc_feature (1)..(209): NCBI GI: 212542181 Blast Desc: MFS transporter, [Penicillium marneffei ATCC 18224] gi|210066152|gb|EEA20245.1| MFS transporter, [Penicillium marneffei ATCC 18224]
  misc_feature (1)..(199): NCBI GI: 119500304 Blast Desc: MFS transporter, [Neosartorya fischeri NRRL 181] gi|119415074|gb|EAW25012.1| MFS transporter, [Neosartorya fischeri NRRL 181]
MALQTSFPALLVLRMLQSAGASGLIGSAYGIIADITEREERGGFVGILLLATDIAPSLGPVIGGSLAQALGWRWIFWFLVILQGAHAIFIALFLPETQRNVVGNGSGICRGVYWSIPYALQSREIKKSRVDIHSPTRFWPNPLACLPILRDATSLVVIVMYAITYAVKMTLQTSLGAQAIEIYKLNYLDGGLIYLPSGVAGGLGSYGTGCGYYRLRVGADNKSGASPDEA

SEQ ID NO: 19308 - DNA, 3214 bp, Muscodor strobelii
  misc_feature: SGI EST ID NO. CUFF.45127.0
  misc_feature: Variant of the nucleotide sequence at SEQ ID NO 19306
atattttccctcttcaagctttgcttaaaaacttattacgatgcatcccaatcaagacaaacaggaattcacttcatataatgacctatgcaaaccttcacctcgagaggagattgattatcccgccacaaagactcgtaaccccccagcacagactgatgatgagccacgtccgtacacagtcttcacccatcggcagaagcattggattaacatccaatcttcttttgctgcaatgttttcaacaatgagcagctacatttattcccctgctctcgttccaattgcagctgatctacacgtatcagtatcactgattaaccttaccgttacttcttatctcattgtagctgcgattgccccagctttcatgggcgacttggcagaccaagctgggcgcagaccagtatatatgctcatgtttgctttaatgctcggagcaaacctaggcatggctctacaaacaagcttccccgcgttattggtgctcaggatgttacagagcgcgggcgcctctggcctaataggttccgcatacggaataatagctgatatcacagaaagagaagagcgtggcggttttgtgggcattttattactcgcgaccgatatagcgcccagccttggcccagtgattggtggcagcctggcccaagcattaggctggagatggatattctggttccttgttatacttcaaggagcacatgcgattttcattgcactgttcctgccagaaactcagcgtaacgtcgtgggaaatggaagcggaatatgtcgaggtgtttactggagtataccttacgcgctacaaagccgagagattaaaaagtcgagagtggatattcacagtccaactcgattttggccaaacccgttagcatgtctgcccatccttcgagatgcgacttcactagttgtgatagtcatgtacgctatcacgtacgctgtgaaaatgacattacaaacaagtcttggagcacaagcaattgagatatataagttgaactatctcgatggcggcttgatatacttgccttccggtgttgcgggtggacttgggtcttatggaacaggtcagtgctgctcgaatatcaattttgttatgataacccttatcctatatacttcttaatgcttaaatatcccaaggtcggtttcttaattataattacaaaaaagcgaaaacgcaaaggccagtccacgctcacataatgtcgtcaccgaagtctcaagatgcggccttaatcaatttacgactaaaaggattctttcttttgattctagtcactgctgcgggtactatcggttacgggtgggcgctgacaacaagagcgcatatctcggtcatgctcattatgcagtttctgacaggtgtaactacagcgagtacattcacaatgacctccactttgcttaccgatctgaatgcggatcgatcggccacagcccaaggggcttcaagtattgtgagatgtttgttagccggagctgcaatagcagctgttgagccattggcccgggccgtggggctcggatggtgttttgttacctacgcgttggttgtgttgctaaatttgatattgttatggatgcttcggctgttcgctcaacggcattcatcaaatgccgcttgcacctcttcagaataactgtaacaccgagacggatgcgacacactccatggctacgaatctactgagaatgatgtgggaagaatagggttgtgtttagatatagaactgttctaaactcagaatatggcagtgtacctaatctttttagctacgtgttgcgcatgtacctgactggattttgaaaggatgcccctctgtgttgaatacccactcatctaagctaatggtagacgctggagcgaaagtgaggtataagtatttcaaaacctctgcgaagtagaatgcctcgacgatgttgtctaacttgccaccgagaggttgagtgacgtttgttagcgacgcgaaagagacacctttctctctgtagcgtgtgtctttcagaatggcctggaatgcatcccaattgtagtccgcccatctctcatcgccactaactctgtacgcatagaagatggattcgagaggctctggaaacgcaccccactcagggcttgtgacgaagaagccagcgcgttcggcgtaggcatagttagcaggatccgcgccggctgtctgattgtacgtctgattttgtgagttgtaccaggagatctctgcagatcaaaatgtaagacactgagttttgcctcattgggagcactggtcgagtgcaggtacggcttcactcaccgagaggattgaggccagcttcacttgtgttgaaccaggcatgacaagaatcggataatgcgtacccgagatccaagaattcattgtttttaagatattgaccgccaagcagaatgttgccaccagcgaaacaggcatagtcatccattgtgtactctagtgtgccattctcatctgcctgagtgatcaaagtgagttcagggcgatggaagggatgcttgacgatgttcttgatgcttgaatcgacggttccgacccagaagtctttgtagctcgtagtatctgctcttgtcggatcatatacgtatgtcttgatcagatattcgattgcgctaccaacgcctgcttcccagcctacatccttcgtaatgaacttgcctgtcacgtaattcatattacttccgaaaaggtatgggtacaggagatcttgagatgggctgataatattcgactcggacttggcggcgacatcacgatacgaatcatcgcccgtcaagtcggacagacggtagaactcaagaatgagggtgccgacctgggctgtattaactgtggtgtctgtgcaattggcagcgaaatcggcgcagttgctgtgcgcctttgtggtgtagttgtagtatttagttggtaggccagagggtgtgttgaacccgagtttcaagacatctgcaatgacgacggcttggctgagtagcgcatcgacgtggctctggagatatgtacccttaggtacaacattgctgttgatcaggtcataagcactgatcaagccaccgagatagcgaatgacggcgtcgaattcgttaacaacaccaatggaatggtcgaatttgaaatcggcaatgaacttcaattgatcctcaacaatatctgtaaggcccattatgattgccgtgtcaatgccatca

SEQ ID NO: 19309 - DNA, 1638 bp, Muscodor strobelii
  misc_feature: SGI cDNA ID NO. 566491
  misc_feature: Encodes the peptide sequence at SEQ ID NO 19310
atggttcggaacttcatcactcgcgctgccctggtagcaggggcagcattcaatgctattgtatccgcagctcctcactcctacaacgtctctgactgcatcaccattcagcataagttcccttctcgcggcggcggtaacgctgctcgagccgctgctattgttgatgagtatcgatacgtctggaatcaatattatacagaggctttccctaacgacgagctcgtgccagagaaccataccggcagcaatcccttatttggttggggatgcagtgtcattgatggcattgacacggcaatcataatgggccttacagatattgttgaggatcaattgaagttcattgccgatttcaaattcgaccattccattggtgttgttaacgaattcgacgccgtcattcgctatctcggtggcttgatcagtgcttatgacctgatcaacagcaatgttgtacctaagggtacatatctccagagccacgtcgatgcgctactcagccaagccgtcgtcattgcagatgtcttgaaactcgggttcaacacaccctctggcctaccaactaaatactacaactacaccacaaaggcgcacagcaactgcgccgatttcgctgccaattgcacagacaccacagttaatacagcccaggtcggcaccctcattcttgagttctaccgtctgtccgacttgacgggcgatgattcgtatcgtgatgtcgccgccaagtccgagtcgaatattatcagcccatctcaagatctcctgtacccataccttttcggaagtaatatgaattacgtgacaggcaagttcattacgaaggatgtaggctgggaagcaggcgttggtagcgcaatcgaatatctgatcaagacatacgtatatgatccgacaagagcagatactacgagctacaaagacttctgggtcggaaccgtcgattcaagcatcaagaacatcgtcaagcatcccttccatcgccctgaactcactttgatcactcaggcagatgagaatggcacactagagtacacaatggatgactatgcctgtttcgctggtggcaacattctgcttggcggtcaatatcttaaaaacaatgaattcttggatctcgggtacgcattatccgattcttgtcatgcctggttcaacacaagtgaagctggcctcaatcctctcgagatctcctggtacaactcacaaaatcagacgtacaatcagacagccggcgcggatcctgctaactatgcctacgccgaacgcgctggcttcttcgtcacaagccctgagtggggtgcgtttccagagcctctcgaatccatcttctatgcgtacagagttagtggcgatgagagatgggcggactacaattgggatgcattccaggccattctgaaagacacacgctacagagagaaaggtgtctctttcgcgtcgctaacaaacgtcactcaacctctcggtggcaagttagacaacatcgtcgaggcattctacttcgcagaggttttgaaatacttatacctcactttcgctccagcgtctaccattagcttagatgagtgggtattcaacacagaggggcatcctttcaaaatccagtcaggtacatgcgcaacacgtagctaa

SEQ ID NO: 19310 - protein, 545 aa, Muscodor strobelii
  misc_feature: SGI Peptide ID NO. 566491
  misc_feature (62)..(536): Pfam Id: PF01532 Pfam Desc: Glycosyl hydrolase family 47
  misc_feature (62)..(400): Pfam Id: PF01532 Pfam Desc: Glycosyl hydrolase family 47
  misc_feature (438)..(536): Pfam Id: PF01532 Pfam Desc: Glycosyl hydrolase family 47
  misc_feature (8)..(536): NCBI GI: 240274614 Blast Desc: alpha-mannosidase [Ajellomyces capsulatus H143]
  misc_feature (36)..(536): NCBI GI: 225561512 Blast Desc: alpha-mannosidase [Ajellomyces capsulatus G186AR]
  misc_feature (2)..(536): NCBI GI: 154282775 Blast Desc: mannosyl-oligosaccharide alpha-1,2-mannosidase precursor [Ajellomyces capsulatus NAm1] gi|150410363|gb|EDN05751.1| mannosyl-oligosaccharide precursor
  misc_feature (23)..(536): NCBI GI: 154324112 Blast Desc: BC1G_00455 [Botryotinia fuckeliana B05.10] gi|150842684|gb|EDN17877.1| BC1G_00455 [Botryotinia fuckeliana B05.10]
  misc_feature (48)..(536): NCBI GI: 156057473 Blast Desc: SS1G_04468 [Sclerotinia sclerotiorum 1980] gi|154702253|gb|EDO01992.1| SS1G_04468 [Sclerotinia sclerotiorum 1980]
  misc_feature (47)..(538): NCBI GI: 226295258 Blast Desc: mannosyl-oligosaccharide alpha-1,2-mannosidase [Paracoccidioides brasiliensis Pb18]
  misc_feature (47)..(538): NCBI GI: 225677599 Blast Desc: alpha-mannosidase [Paracoccidioides brasiliensis Pb03]
  misc_feature (47)..(538): NCBI GI: 226278792 Blast Desc: mannosyl-oligosaccharide alpha-1,2-mannosidase [Paracoccidioides brasiliensis Pb01]
  misc_feature (48)..(537): NCBI GI: 121701081 Blast Desc: mannosidase MsdS [Aspergillus clavatus NRRL 1] gi|119396948|gb|EAW07379.1| mannosidase MsdS [Aspergillus clavatus NRRL 1]
  misc_feature (50)..(536): NCBI GI: 189188152 Blast Desc: mannosyl-oligosaccharide 1,2-alpha-mannosidase precursor [Pyrenophora tritici-repentis Pt-1C-BFP] gi|187972021|gb|EDU39520.1| mannosyl-oligosaccharide precursor
  misc_feature (54)..(536): SWISSPROT Homolog: EC 3.2.1.113 Mannosyl-oligosaccharide 1,2-alpha-mannosidase
MVRNFITRAALVAGAAFNAIVSAAPHSYNVSDCITIQHKFPSRGGGNAARAAAIVDEYRYVWNQYYTEAFPNDELVPENHTGSNPLFGWGCSVIDGIDTAIIMGLTDIVEDQLKFIADFKFDHSIGVVNEFDAVIRYLGGLISAYDLINSNVVPKGTYLQSHVDALLSQAVVIADVLKLGFNTPSGLPTKYYNYTTKAHSNCADFAANCTDTTVNTAQVGTLILEFYRLSDLTGDDSYRDVAAKSESNIISPSQDLLYPYLFGSNMNYVTGKFITKDVGWEAGVGSAIEYLIKTYVYDPTRADTTSYKDFWVGTVDSSIKNIVKHPFHRPELTLITQADENGTLEYTMDDYACFAGGNILLGGQYLKNNEFLDLGYALSDSCHAWFNTSEAGLNPLEISWYNSQNQTYNQTAGADPANYAYAERAGFFVTSPEWGAFPEPLESIFYAYRVSGDERWADYNWDAFQAILKDTRYREKGVSFASLTNVTQPLGGKLDNIVEAFYFAEVLKYLYLTFAPASTISLDEWVFNTEGHPFKIQSGTCATRS

SEQ ID NO: 19311 - DNA, 1618 bp, Muscodor strobelii
  misc_feature: SGI EST ID NO. CUFF.45128.3
  misc_feature: Variant of the nucleotide sequence at SEQ ID NO 19309
tgatggcattgacacggcaatcataatgggccttacagatattgttgaggatcaattgaagttcattgccgatttcaaattcgaccattccattggtgttgttaacgaattcgacgccgtcattcgctatctcggtggcttgatcagtgcttatgacctgatcaacagcaatgttgtacctaagggtacatatctccagagccacgtcgatgcgctactcagccaagccgtcgtcattgcagatgtcttgaaactcgggttcaacacaccctctggcctaccaactaaatactacaactacaccacaaaggcgcacagcaactgcgccgatttcgctgccaattgcacagacaccacagttaatacagcccaggtcggcaccctcattcttgagttctaccgtctgtccgacttgacgggcgatgattcgtatcgtgatgtcgccgccaagtccgagtcgaatattatcagcccatctcaagatctcctgtacccataccttttcggaagtaatatgaattacgtgacaggcaagttcattacgaaggatgtaggctgggaagcaggcgttggtagcgcaatcgaatatctgatcaagacatacgtatatgatccgacaagagcagatactacgagctacaaagacttctgggtcggaaccgtcgattcaagcatcaagaacatcgtcaagcatcccttccatcgccctgaactcactttgatcactcaggcagatgagaatggcacactagagtacacaatggatgactatgcctgtttcgctggtggcaacattctgcttggcggtcaatatcttaaaaacaatgaattcttggatctcgggtacgcattatccgattcttgtcatgcctggttcaacacaagtgaagctggcctcaatcctctcgagatctcctggtacaactcacaaaatcagacgtacaatcagacagccggcgcggatcctgctaactatgcctacgccgaacgcgctggcttcttcgtcacaagccctgagtggggtgcgtttccagagcctctcgaatccatcttctatgcgtacagagttagtggcgatgagagatgggcggactacaattgggatgcattccaggccattctgaaagacacacgctacagagagaaaggtgtctctttcgcgtcgctaacaaacgtcactcaacctctcggtggcaagttagacaacatcgtcgaggcattctacttcgcagaggttttgaaatacttatacctcactttcgctccagcgtctaccattagcttagatgagtgggtattcaacacagaggggcatcctttcaaaatccagtcaggtacatgcgcaacacgtagctaaaaagattaggtacactgccatattctgagtttagaacagttctatatctaaacacaaccctattcttcccacatcattctcagtagattcgtagccatggagtgtgtcgcatccgtctcggtgttacagttattctgaagaggtgcaagcggcatttgatgaatgccgttgagcgaacagccgaagcatccataacaatatcaaatttagcaacacaaccaacgcgtaggtaacaaaacaccatccgagccccacggcccg

SEQ ID NO: 19312 - DNA, 381 bp, Muscodor strobelii
  misc_feature: SGI cDNA ID NO. 566492
  misc_feature: Encodes the peptide sequence at SEQ ID NO 19313
gatgcctgggagtgtctttcgcgcagtccccattcagctggacatggtggtacaggtggaacgatgtcgaatcccaccctgagtcctggtgaccctgtcttctatctacaccattcctaccttgacaagctttggtgggagtgggagaagcttgatcttgatgctcgattagccgatatgagtggaccaaacataccaacggggacgcgacctggctcagcgaactatcctgggcctgaggttaccgactactttggcgataatggaggaaatgtcacgacgctcagccataacttatgggtgacgggattagatgctaatgtcactattggcgatgtcatggatgtgaacggaccagtcatttgctccgaatatctgtaa

SEQ ID NO: 19313 - protein, 126 aa, Muscodor strobelii
  misc_feature: SGI Peptide ID NO. 566492
  misc_feature (6)..(51): Pfam Id: PF00264 Pfam Desc: Common central domain of tyrosinase
  misc_feature (1)..(120): NCBI GI: 67540544 Blast Desc: AN6442.2 [Aspergillus nidulans FGSC A4] gi|40739274|gb|EAA58464.1| AN6442.2 [Aspergillus nidulans FGSC A4] gi|259479330|tpe|CBF69463.1| TPA: amino acid transporter FGSC
  misc_feature (2)..(126): NCBI GI: 261356949 Blast Desc: conserved [Verticillium albo-atrum VaMs.102]
  misc_feature (3)..(126): NCBI GI: 240277823 Blast Desc: conserved [Ajellomyces capsulatus H143]
  misc_feature (3)..(126): NCBI GI: 154285700 Blast Desc: [Ajellomyces capsulatus NAm1] gi|150407286|gb|EDN02827.1| [Ajellomyces capsulatus NAm1]
  misc_feature (2)..(126): NCBI GI: 145604204 Blast Desc: MGG_13937 [Magnaporthe grisea 70-15] gi|145012249|gb|EDJ96905.1| MGG_13937 [Magnaporthe grisea 70-15]
  misc_feature (1)..(126): NCBI GI: 116205217 Blast Desc: CHGG_10492 [Chaetomium globosum CBS 148.51] gi|88176620|gb|EAQ84088.1| CHGG_10492 [Chaetomium globosum CBS 148.51]
  misc_feature (3)..(78): NCBI GI: 225554517 Blast Desc: conserved [Ajellomyces capsulatus G186AR]
  misc_feature (3)..(125): NCBI GI: 238507087 Blast Desc: tyrosinase, [Aspergillus flavus NRRL3357] gi|220689458|gb|EED45809.1| tyrosinase, [Aspergillus flavus NRRL3357]
  misc_feature (3)..(125): NCBI GI: 169786145 Blast Desc: [Aspergillus oryzae RIB40] gi|83776281|dbj|BAE66400.1| protein product [Aspergillus oryzae]
  misc_feature (2)..(126): NCBI GI: 261202110 Blast Desc: conserved [Ajellomyces dermatitidis SLH14081] gi|239590366|gb|EEQ72947.1| conserved [Ajellomyces dermatitidis SLH14081] gi|239612075|gb|EEQ89062.1| conserved [Ajellomyces
DAWECLSRSPHSAGHGGTGGTMSNPTLSPGDPVFYLHHSYLDKLWWEWEKLDLDARLADMSGPNIPTGTRPGSANYPGPEVTDYFGDNGGNVTTLSHNLWVTGLDANVTIGDVMDVNGPVICSEYL

SEQ ID NO: 19314 - DNA, 755 bp, Muscodor strobelii
  misc_feature: SGI EST ID NO. CUFF.45125.0
  misc_feature: Variant of the nucleotide sequence at SEQ ID NO 19312
gcgcgacttcaatacccgcgaattttcatcggccgcgcagtctgaaatcgacaaatgcaatgccattgacacctatagtgatgcctgggagtgtctttcgcgcagtccccattcagctggacatggtggtacaggtggaacgatgtcgaatcccaccctgagtcctggtgaccctgtcttctatctacaccattcctaccttgacaagctttggtgggagtgggagaagcttgatcttgatgctcgattagccgatatgagtggaccaaacataccaacggggacgcgacctggctcagcgaactatcctgggcctgaggttaccgactactttggcgataatggaggaaatgtcacgacgctcagccataacttatgggtgacgggattagatgctaatgtcactattggcgatgtcatggatgtgaacggaccagtcatttgctccgaatatctgtaaagagagtgggtgtcaacatagggctcgaaactcaccgcagtattgttatatcatatgttttagggcaatgcgctgctttgttgagcaagagcattattacacgatgtccttgtagctacgaatgtcagaaagtcaagcgcgttgcaggtgcttattggtacttgcacgctctgcttattttgaataatgcagtgagcctcgcctcgtggctacgcaagcttaaagattctatatctactcaatcttgcattcagcgtgatatcatctagttctaataaaacaagagcaatttggc

SEQ ID NO: 19315 - DNA, 387 bp, Muscodor strobelii
  misc_feature: SGI cDNA ID NO. 566493
  misc_feature: Reduced expression when VOC is produced
  misc_feature: Encodes the peptide sequence at SEQ ID NO 19316
atggcccacaccaacggccatgtcaacgggtccgccaacgggcccaagaaggccgtcaatggcgtgaacggcatcaagcagaacggcctcaacggtctcagcaatggtcttaatggccacgccgtcacccacgtctcccgcaagagcacgcccccgaggaaacagcgaggcgtcgtgtcgagactgttcaacatcgccgccagactcctgacatggtactcgatcctcaccatcctcttgcgctgcccggcgaccgtcgagctgtgcgacgacaacgcccccaggatctgcaagccctacttccacgtcaagcaggccgtcgcgccgcacgtcgcgccttactacgacgcctacgccgccccctacgtcgacctcgcccgcccctac

SEQ ID NO: 19316 - protein, 129 aa, Muscodor strobelii
  misc_feature: SGI Peptide ID NO. 566493
  misc_feature (1)..(129): NCBI GI: 85090325 Blast Desc: NCU07514 [Neurospora crassa OR74A] gi|28919719|gb|EAA29126.1| [Neurospora crassa OR74A]
  misc_feature (1)..(129): NCBI GI: 116208758 Blast Desc: CHGG_03672 [Chaetomium globosum CBS 148.51] gi|88184269|gb|EAQ91737.1| CHGG_03672 [Chaetomium globosum CBS 148.51]
  misc_feature (8)..(129): NCBI GI: 171685248 Blast Desc: protein product [Podospora anserina] gi|170942585|emb|CAP68237.1| protein product [Podospora anserina]
  misc_feature (24)..(129): NCBI GI: 256726392 Blast Desc: NECHADRAFT_68795 [Nectria haematococca mpVI 77-13-4]
  misc_feature (18)..(129): NCBI GI: 46124411 Blast Desc: FG06583.1 [Gibberella zeae PH-1]
  misc_feature (37)..(129): NCBI GI: 261354202 Blast Desc: conserved [Verticillium albo-atrum VaMs.102]
  misc_feature (26)..(129): NCBI GI: 156052339 Blast Desc: SS1G_06335 [Sclerotinia sclerotiorum 1980] gi|154704115|gb|EDO03854.1| SS1G_06335 [Sclerotinia sclerotiorum 1980]
  misc_feature (35)..(129): NCBI GI: 154298823 Blast Desc: BC1G_11303 [Botryotinia fuckeliana B05.10] gi|150857699|gb|EDN32891.1| BC1G_11303 [Botryotinia fuckeliana B05.10]
  misc_feature (42)..(129): NCBI GI: 115443028 Blast Desc: [Aspergillus terreus NIH2624] gi|114188190|gb|EAU29890.1| [Aspergillus terreus NIH2624]
  misc_feature (30)..(129): NCBI GI: 212532803 Blast Desc: conserved [Penicillium marneffei ATCC 18224] gi|210071922|gb|EEA26011.1| conserved [Penicillium marneffei ATCC 18224]
  misc_feature: Useful for introducing or modulating the production of volatile compounds
MAHTNGHVNGSANGPKKAVNGVNGIKQNGLNGLSNGLNGHAVTHVSRKSTPPRKQRGVVSRLFNIAARLLTWYSILTILLRCPATVELCDDNAPRICKPYFHVKQAVAPHVAPYYDAYAAPYVDLARPY

SEQ ID NO: 19317 - DNA, 2315 bp, Muscodor strobelii
  misc_feature: SGI EST ID NO. CUFF.45157.2
  misc_feature: Variant of the nucleotide sequence at SEQ ID NO 19315
gtgggcaaatccaggtctgtattcagcggactcacttgaaaaatttgtcttggcctagttatcgctgccctcaacgtgatcgtctagaaatcgtttgaacttgcctatcgaaactaccaggcttaattttgaactagtcgactaactctcctatatttctcctagacgccctagccactacgcagaaatcccgtcatggacagagacgcatctttcatagtgtaatcatagtaattcagctcttattcaaaatgcgcgtgcattcgacccccctccccctatgcagcaggtcgttatacaattcagacaattatacagttatgggttatgcattatagagactggacgcatctttcaattcgtccccgagtaaaatcaccgatgaatggttgcctgcattgtgagcatgtgattctgtaccgtttaggcttgctgtctaggagggcgagcaatcattattgacacaaattcgaatatgacgtttctggcctccgctagcgaggaacaccgtggtgactcgtgagaatagtaaatgagcccatgtcaattgtcgaacactatcggaatgattggctagagggggagtcgcggcgagacagatatgcagctaggacaagtcgcttgcgcatgtggtagccatggcatcgtcatcgttcaggtcaccgggagcaacacaccgataagaggcgcggcgatttgagatctgagctgttatacactgattacaggtgggagataaggccaatggggagaggatgcgatggtgctcagaaaacctgattcgacagcccctaagcatgcaggctcttgtcgatggttcaaggaagtcgaagttgcatcatggaagatctgaaattccgcttcgaaagctattgcgatgcaggcagctcaagcatagtcattggaaaaatggtaattaatgtgcaggatcaggtggttgggggcagggaatcgcaaatttaaatacacaatgtcagagacacgccgtcgccatcgaacctgacgcagttgaataccccgtgtttgcgagtaccgggaaggactggaatatgacatgtagtgagcatcagacatgctgaaacacgattgcgggtaggttcgcattgtggagaggagtctagtgctgtttgaaccgggatgggagtgggatgggcttgtagcaggtacaaagagcaggccgttcgtccatagaatcggtgatgccaagagcccccccagcaggagttagaaggggtagagaaagggttcacagaaggcatcggaagtcggggtgcagcaggcagcagacaagtagaagatacgtcgtgtcggtgaggtgggccaggatcgcgtcttcatcgacgagcttctgggtcatcggccttgtccaccacggtttacccaccttgcagcttgttgtgcgtccttctaagtaaagccaggcttggagccagtgtgtgtgcaagaaagagagaaggaaaaagagactgaatgtctcgtcacagctcctccacattgtcaaaagtcaacatcatccgtcatcttcatccccatcgccatcgtcgctagtttcagcttttctccaacctggctctgctctcctaacactgacccctcagctctgcttgaggcgtcttacgacatcgcgacacattgtagtctccatctagagctggttggatcatcgctggtgtcgagtctcactcaaatttactctgctgtatttcacgcgcccgcactgctgttctgccttcagtgagaggtagacagagacatactgacagctgcctcggccgcctcggctccccatccccaccacatgcagtgaacgcgatactcgtccatctccaatcccagacagacagatagaccactagacacgccatccctttgtgatctatctctactcgagcgcaccaagtgctgctaccacccgtcgtccgcgtcgtcgccatggcccacaccaacggccatgtcaacgggtccgccaacgggcccaagaaggccgtcaatggcgtgaacggcatcaagcagaacggcctcaacggtctcagcaatggtcttaatggccacgccgtcacccacgtctcccgcaagagcacgcccccgaggaaacagcgaggcgtcgtgtcgagactgttcaacatcgccgccagactcctgacatggtactcgatcctcaccatcctcttgcgctgcccggcgaccgtcgagctgtgcgacgacaacgcccccaggatctgcaagccctacttccacgtcaagcaggccgtcgcgccgcacgtcgcgccttactacgacgcctacgccgccccctacgtcgacctcgcccgccc

SEQ ID NO: 19318 - DNA, 468 bp, Muscodor strobelii
  misc_feature: SGI cDNA ID NO. 566494
  misc_feature: Reduced expression when VOC is produced
  misc_feature: Encodes the peptide sequence at SEQ ID NO 19319
atggacgacccgcccccaccgcccgtgctccctcttcccgcgggccaccccgatccccatcacggcgacgccctgcccgccccgacgccgacgacgctcgatgccgacggtgttgttgtcgatactatagaggtggacgagagggggtcggagctgtgggccagccacgagggcagcggcgtggcggacgcagacacgtgccgcatctgccggggcgagggcacgggcgaggagccgctgttctacccgtgcaagtgcagcggcagcatcaagttcgtgcaccaggactgcctgatggagtggctgtcgcactcgcagaagaagcactgcgagctgtgcaagacgcccttccgcttcaccaagctctacgcccccgacatgccccgccgcctgcccgcccacgtcttcgcccaccacctcgccgcctacgccctgcgcaacctgctcgtctggctgcgcgccgccctc

SEQ ID NO: 19319 - protein, 156 aa, Muscodor strobelii
  misc_feature: SGI Peptide ID NO. 566494
  misc_feature (67)..(113): Pfam Id: PF00097 Pfam Desc: Zinc finger, C3HC4 type (RING finger)
  misc_feature (63)..(156): NCBI GI: 171685250 Blast Desc: protein product [Podospora anserina] gi|170942586|emb|CAP68238.1| protein product [Podospora anserina]
  misc_feature (57)..(156): NCBI GI: 212532805 Blast Desc: RING finger membrane protein [Penicillium marneffei ATCC 18224] gi|210071923|gb|EEA26012.1| RING finger membrane protein [Penicillium marneffei ATCC 18224]
  misc_feature (67)..(156): NCBI GI: 256726527 Blast Desc: NECHADRAFT_68793 [Nectria haematococca mpVI 77-13-4]
  misc_feature (67)..(156): NCBI GI: 46124409 Blast Desc: FG06582.1 [Gibberella zeae PH-1]
  misc_feature (63)..(156): NCBI GI: 261354201 Blast Desc: RING finger membrane protein [Verticillium albo-atrum VaMs.102]
  misc_feature (57)..(156): NCBI GI: 242776551 Blast Desc: RING finger membrane protein [Talaromyces stipitatus ATCC 10500] gi|218722477|gb|EED21895.1| RING finger membrane protein [Talaromyces stipitatus ATCC 10500]
  misc_feature (57)..(156): NCBI GI: 119192904 Blast Desc: CIMG_00829 [Coccidioides immitis RS]
  misc_feature (57)..(156): NCBI GI: 240105917 Blast Desc: C3HC4 type (RING finger) zinc finger containing protein [Coccidioides posadasii C735 delta SOWgp]
  misc_feature (53)..(156): NCBI GI: 154298827 Blast Desc: BC1G_11305 [Botryotinia fuckeliana B05.10] gi|150857701|gb|EDN32893.1| BC1G_11305 [Botryotinia fuckeliana B05.10]
  misc_feature (62)..(153): NCBI GI: 156052337 Blast Desc: SS1G_06334 [Sclerotinia sclerotiorum 1980] gi|154704114|gb|EDO03853.1| SS1G_06334 [Sclerotinia sclerotiorum 1980]
  misc_feature: Useful for introducing or modulating the production of volatile compounds
MDDPPPPPVLPLPAGHPDPHHGDALPAPTPTTLDADGVVVDTIEVDERGSELWASHEGSGVADADTCRICRGEGTGEEPLFYPCKCSGSIKFVHQDCLMEWLSHSQKKHCELCKTPFRFTKLYAPDMPRRLPAHVFAHHLAAYALRNLLVWLRAAL

SEQ ID NO: 19320 - DNA, 1046 bp, Muscodor strobelii
  misc_feature: SGI EST ID NO. CUFF.45134.0
  misc_feature: Variant of the nucleotide sequence at SEQ ID NO 19318
cacccaaccagcgacaaccaccactcaaacactcactcgcccactctcattacttgcagagacattgtcacacaacataattacctaaggcactcaacgcagtgcacattgttcctatttgcaggcccgacatatccgtataacacgcgcgcggcccgccgccaatccacgacccacgactcggtgttcgctttgtactcaacgtcgacagacaaaggagagcgagtctcccgccgcctgtctctacgccgccgccgccgccgccgggtgcccgacttgcccaacgacgacatctttctcatgatatcaaaaccggcgtcgtagccctcggggcatacacactctttcgccgatccacgacacactctctgctggagccggccctcggtggccactgctgtacgaagcggacaagacaccggccgggttcgagtcagagtctgagccatacctcctaggcaaaggacaaagacagtcactcaagtcagacatatagacgtctgcgtctgcatctgcatctgcatctgtagctgcggctggacctacagtatactatacacttgtctgccaccatggacgacccgcccccaccgcccgtgctccctcttcccgcgggccaccccgatccccatcacggcgacgccctgcccgccccgacgccgacgacgctcgatgccgacggtgttgttgtcgatactatagaggtggacgagagggggtcggagctgtgggccagccacgagggcagcggcgtggcggacgcagacacgtgccgcatctgccggggcgagggcacgggcgaggagccgctgttctacccgtgcaagtgcagcggcagcatcaagttcgtgcaccaggactgcctgatggagtggctgtcgcactcgcagaagaagcactgcgagctgtgcaagacgcccttccgcttcaccaagctctacgcccccgacatgccccgccgcctgcccgcccacgtcttcgcccaccacctcgccgcctacgccctgcgcaacctgctcgtctggctgcgcgccgccctcgtcacc

SEQ ID NO: 19321 - DNA, 507 bp, Muscodor strobelii
  misc_feature: SGI cDNA ID NO. 566495
  misc_feature: Reduced expression when VOC is produced
  misc_feature: Encodes the peptide sequence at SEQ ID NO 19322
atccctcgactgaagagccctagcgtggtggaccacgtcttgaagccactcgagcagaaggtccgcgagtacgagtcactcatgcaccgcgaacaggacgagatgaggcgtctggacgacgagatacgcatcctgcaagcccagcgtgccgaggccgacaaccgcttcaccgaagccaaatccaagcacgacgattataggcgccagtataccgacgtccagcgcgccatgtccggcgaactgcccacgtcgcccctgcagagacccgccaccatgcacgcccagatgcccaacggccagcagcgccccatgagcgaacaccagcgacgcctcgtgtccggtgagcacgacgacgatgacgacgaagaagtcgatgacgacgacataggcccaccctacgggccgaaccgccgcatcaactcacaacagtccttcggtcgcgcatccatgaacacggccaccaaggagaagtttcgcttcagcaagttgttcggtggaggccgataa

SEQ ID NO: 19322 - protein, 168 aa, Muscodor strobelii
  misc_feature: SGI Peptide ID NO. 566495
  misc_feature (1)..(106): NCBI GI: 256722250 Blast Desc: NECHADRAFT_102043 [Nectria haematococca mpVI 77-13-4]
  misc_feature (1)..(81): NCBI GI: 46114220 Blast Desc: FG02952.1 [Gibberella zeae PH-1]
  misc_feature (1)..(81): NCBI GI: 261361246 Blast Desc: conserved [Verticillium albo-atrum VaMs.102]
  misc_feature: Useful for introducing or modulating the production of volatile compounds
IPRLKSPSVVDHVLKPLEQKVREYESLMHREQDEMRRLDDEIRILQAQRAEADNRFTEAKSKHDDYRRQYTDVQRAMSGELPTSPLQRPATMHAQMPNGQQRPMSEHQRRLVSGEHDDDDDEEVDDDDIGPPYGPNRRINSQQSFGRASMNTATKEKFRFSKLFGGGR

SEQ ID NO: 19323 - DNA, 2439 bp, Muscodor strobelii
  misc_feature: SGI EST ID NO. CUFF.45137.0
  misc_feature: Variant of the nucleotide sequence at SEQ ID NO 19321
atccctcgactgaagagccctagcgtggtggaccacgtcttgaagccactcgagcagaaggtccgcgagtacgagtcactcatgcaccgcgaacaggacgagatgaggcgtctggacgacgagatacgcatcctgcaagcccagcgtgccgaggccgacaaccgcttcaccgaagccaaatccaagcacgacgattataggcgccagtataccgacgtccagcgcgccatgtccggcgaactgcccacgtcgcccctgcagagacccgccaccatgcacgcccagatgcccaacggccagcagcgccccatgagcgaacaccagcgacgcctcgtgtccggtgagcacgacgacgatgacgacgaagaagtcgatgacgacgacataggcccaccctacgggccgaaccgccgcatcaactcacaacagtccttcggtcgcgcatccatgaacacggccaccaaggagaagtttcgcttcagcaagttgttcggtggaggccgataaatgtcttcaagccctcttgcttcgatacatatggatcggacatgacgaccatgacttgagtccaagaagaggaaacgactggttctctattgatttccaaatcacacgattaatgaatgaaacgcctggccaaaaggttggtgggttgggaaaatcgccatagaggcatggctcgccccgagcataatgacaatgccttgtatttaatgacgttgaattttcatgcatgggttagtagctactagtagcagtctaatgaggcaattgatgttagaaataccacaacgtgtctgccttgatatgctcacagtgctatgtgcttcgtctgaaaaaaacggacttccttttctaacgggggttggaataaataatcgtagaaacttcgaaaagtgttacaaacgctcgagtgaatagaatagtaataagatggacggagtaggctggcaaataacgctggtatatatatccgcctagacgcctatatcatattctacggagaatgccgaactaccggcgcaaaggatgctgaattggtaggctaactcatcgccactttcttctattctaaatacacatgacaacaacacaagtagataattaagaggatacaactaagtttcggctccatcagagcatccgcatgcatcagcgcagatcgcggtattcttcttgattattctatgtctatcgttggtgagctgtttgttttcatgagtattagaagattccagtctctttagctacggcaagaatggcgtcaatgacaggctgcacatccgtacttttcagcaccactcgatgtccgccgtcccattgcacaagctttgtacaggcgggatcggtatactgttcgtatagttcttggtgtagatgcagccctggatctgtcagtccatgcacatgaatagaaggcaaccgtaagacgtggtcttccctcgcaatctccatgaggtctggctgcccgctcaatccgatttctgagggatcacttagtagcgatgatttgaaaacgcctggctcgagattgactagaggtgcgcgaccggcgagcgcaacagcgaacttccacccatcatatatgtcatcttggatccctatcgtccctacaatgctccctttcctcttatttgccgcagctcgcgcagaccgctgctgttgacggaatagaagactgaccgccaatttggcaccctggctgaaaccgagaagtccaacccacggcccatcagccccggccgcgtcatcctcattcatggcttcttggatagattggtcgatgtctcgaacggcttcctggtcctcgaccgttgcatgtgtcggtaaccagcgcagccacctcttgaaaggtccgtcgttggcgtagacggctacaacgtccggaccaggcgcggacggatatggagcttccgcgtaggcgagccgaaaatgcggctccaacatacgggatagaacgcggcattgggcgcggaagatgcgtgcattcgtaccaccgccgtgcaggcataggatgcggggaaggtgaagagttgagtctgtgccgttcatggtttcgggtcgcctggtatcccaattcacctgcaagcagtggtacagatgtccgtgaagtgcgtagattgagcaccgatatggccagacgctggatttacagtgtatgtaaagacctaggatgatgatctgactttcttcaattgtcgcccttctttatcttcttgaaagcaggtctagtgattgcttgcctcgtcacaaagttggtcggaatcgcgcgttatgatctgatgataaatggaagcagagttgaatgatcttaatgttcgagatatgtgaaatacaatccgcgttcatctcatgtgtgaaacccgagaagtcggcgtagacgtgagggatccttcggtggtgcgtttctgacaagccacctgccaatcaatacgccgc

SEQ ID NO: 19324 - DNA, 828 bp, Muscodor strobelii
  misc_feature: SGI cDNA ID NO. 566496
  misc_feature: Encodes the peptide sequence at SEQ ID NO 19325
atgaacggcacagactcaactcttcaccttccccgcatcctatgcctgcacggcggtggtacgaatgcacgcatcttccgcgcccaatgccgcgttctatcccgtatgttggagccgcattttcggctcgcctacgcggaagctccatatccgtccgcgcctggtccggacgttgtagccgtctacgccaacgacggacctttcaagaggtggctgcgctggttaccgacacatgcaacggtcgaggaccaggaagccgttcgagacatcgaccaatctatccaagaagccatgaatgaggatgacgcggccggggctgatgggccgtgggttggacttctcggtttcagccagggtgccaaattggcggtcagtcttctattccgtcaacagcagcggtctgcgcgagctgcggcaaataagaggaaagggagcattgtagggacgatagggatccaagatgacatatatgatgggtggaagttcgctgttgcgctcgccggtcgcgcacctctagtcaatctcgagccaggcgttttcaaatcatcgctactaagtgatccctcagaaatcggattgagcgggcagccagacctcatggagattgcgagggaagaccacgtcttacggttgccttctattcatgtgcatggactgacagatccagggctgcatctacaccaagaactatacgaacagtataccgatcccgcctgtacaaagcttgtgcaatgggacggcggacatcgagtggtgctgaaaagtacggatgtgcagcctgtcattgacgccattcttgccgtagctaaagagactggaatcttctaa

SEQ ID NO: 19325 - protein, 275 aa, Muscodor strobelii
  misc_feature: SGI Peptide ID NO. 566496
  misc_feature (6)..(273): NCBI GI: 240107409 Blast Desc: CPC735_066940 [Coccidioides posadasii C735 delta SOWgp]
  misc_feature (6)..(273): NCBI GI: 119191035 Blast Desc: CIMG_05565 [Coccidioides immitis RS]
  misc_feature (6)..(273): NCBI GI: 238495584 Blast Desc: conserved [Aspergillus flavus NRRL3357] gi|220695678|gb|EED52021.1| conserved [Aspergillus flavus NRRL3357]
  misc_feature (6)..(273): NCBI GI: 169778301 Blast Desc: [Aspergillus oryzae RIB40] gi|83772353|dbj|BAE62483.1| protein product [Aspergillus oryzae]
  misc_feature (5)..(275): NCBI GI: 212539213 Blast Desc: conserved [Penicillium marneffei ATCC 18224] gi|210069504|gb|EEA23595.1| conserved [Penicillium marneffei ATCC 18224]
  misc_feature (1)..(275): NCBI GI: 169768896 Blast Desc: [Aspergillus oryzae RIB40] gi|83766776|dbj|BAE56916.1| protein product [Aspergillus oryzae]
  misc_feature (1)..(275): NCBI GI: 238501324 Blast Desc: conserved [Aspergillus flavus NRRL3357] gi|220692133|gb|EED48480.1| conserved [Aspergillus flavus NRRL3357]
  misc_feature (5)..(275): NCBI GI: 242760721 Blast Desc: conserved [Talaromyces stipitatus ATCC 10500] gi|218723243|gb|EED22660.1| conserved [Talaromyces stipitatus ATCC 10500]
  misc_feature (6)..(274): NCBI GI: 39969385 Blast Desc: MGG_10303 [Magnaporthe grisea 70-15] gi|149211223|ref|XP_001522986.1| MGCH7_ch7g1072 [Magnaporthe grisea 70-15] gi|86197027|gb|EAQ71665.1| MGCH7_ch7g1072 grisea
  misc_feature (5)..(275): NCBI GI: 119184609 Blast Desc: CIMG_07082 [Coccidioides immitis RS]
MNGTDSTLHLPRILCLHGGGTNARIFRAQCRVLSRMLEPHFRLAYAEAPYPSAPGPDVVAVYANDGPFKRWLRWLPTHATVEDQEAVRDIDQSIQEAMNEDDAAGADGPWVGLLGFSQGAKLAVSLLFRQQQRSARAAANKRKGSIVGTIGIQDDIYDGWKFAVALAGRAPLVNLEPGVFKSSLLSDPSEIGLSGQPDLMEIAREDHVLRLPSIHVHGLTDPGLHLHQELYEQYTDPACTKLVQWDGGHRVVLKSTDVQPVIDAILAVAKETGIF

SEQ ID NO: 19326 - DNA, 2439 bp, Muscodor strobelii
  misc_feature: SGI EST ID NO. CUFF.45137.0
  misc_feature: Variant of the nucleotide sequence at SEQ ID NO 19324
gcggcgtattgattggcaggtggcttgtcagaaacgcaccaccgaaggatccctcacgtctacgccgacttctcgggtttcacacatgagatgaacgcggattgtatttcacatatctcgaacattaagatcattcaactctgcttccatttatcatcagatcataacgcgcgattccgaccaactttgtgacgaggcaagcaatcactagacctgctttcaagaagataaagaagggcgacaattgaagaaagtcagatcatcatcctaggtctttacatacactgtaaatccagcgtctggccatatcggtgctcaatctacgcacttcacggacatctgtaccactgcttgcaggtgaattgggataccaggcgacccgaaaccatgaacggcacagactcaactcttcaccttccccgcatcctatgcctgcacggcggtggtacgaatgcacgcatcttccgcgcccaatgccgcgttctatcccgtatgttggagccgcattttcggctcgcctacgcggaagctccatatccgtccgcgcctggtccggacgttgtagccgtctacgccaacgacggacctttcaagaggtggctgcgctggttaccgacacatgcaacggtcgaggaccaggaagccgttcgagacatcgaccaatctatccaagaagccatgaatgaggatgacgcggccggggctgatgggccgtgggttggacttctcggtttcagccagggtgccaaattggcggtcagtcttctattccgtcaacagcagcggtctgcgcgagctgcggcaaataagaggaaagggagcattgtagggacgatagggatccaagatgacatatatgatgggtggaagttcgctgttgcgctcgccggtcgcgcacctctagtcaatctcgagccaggcgttttcaaatcatcgctactaagtgatccctcagaaatcggattgagcgggcagccagacctcatggagattgcgagggaagaccacgtcttacggttgccttctattcatgtgcatggactgacagatccagggctgcatctacaccaagaactatacgaacagtataccgatcccgcctgtacaaagcttgtgcaatgggacggcggacatcgagtggtgctgaaaagtacggatgtgcagcctgtcattgacgccattcttgccgtagctaaagagactggaatcttctaatactcatgaaaacaaacagctcaccaacgatagacatagaataatcaagaagaataccgcgatctgcgctgatgcatgcggatgctctgatggagccgaaacttagttgtatcctcttaattatctacttgtgttgttgtcatgtgtatttagaatagaagaaagtggcgatgagttagcctaccaattcagcatcctttgcgccggtagttcggcattctccgtagaatatgatataggcgtctaggcggatatatataccagcgttatttgccagcctactccgtccatcttattactattctattcactcgagcgtttgtaacacttttcgaagtttctacgattatttattccaacccccgttagaaaaggaagtccgtttttttcagacgaagcacatagcactgtgagcatatcaaggcagacacgttgtggtatttctaacatcaattgcctcattagactgctactagtagctactaacccatgcatgaaaattcaacgtcattaaatacaaggcattgtcattatgctcggggcgagccatgcctctatggcgattttcccaacccaccaaccttttggccaggcgtttcattcattaatcgtgtgatttggaaatcaatagagaaccagtcgtttcctcttcttggactcaagtcatggtcgtcatgtccgatccatatgtatcgaagcaagagggcttgaagacatttatcggcctccaccgaacaacttgctgaagcgaaacttctccttggtggccgtgttcatggatgcgcgaccgaaggactgttgtgagttgatgcggcggttcggcccgtagggtgggcctatgtcgtcgtcatcgacttcttcgtcgtcatcgtcgtcgtgctcaccggacacgaggcgtcgctggtgttcgctcatggggcgctgctggccgttgggcatctgggcgtgcatggtggcgggtctctgcaggggcgacgtgggcagttcgccggacatggcgcgctggacgtcggtatactggcgcctataatcgtcgtgcttggatttggcttcggtgaagcggttgtcggcctcggcacgctgggcttgcaggatgcgtatctcgtcgtccagacgcctcatctcgtcctgttcgcggtgcatgagtgactcgtactcgcggaccttctgctcgagtggcttcaagacgtggtccaccacgctagggctcttcagtcgagggat

SEQ ID NO: 19327 - DNA, 2505 bp, Muscodor strobelii
  misc_feature: SGI cDNA ID NO. 566497
  misc_feature: Encodes the peptide sequence at SEQ ID NO 19328
atgacacgagctgattcgtcaattgtcaactggaaagtttcgcctcaaaaggctagccgtataatactcgcaaataaacttccgccggccatggcgactccagcgacgcccttggtgaagccgaaaccaaacacaacgcctggcaagcgcttgctgtctcagaaatctgtagatcagctctacaaacccttcaagtgtcctggctccgccacaagggctccggcttcagaccggccaactcgcaagcgaagaaaggttgactaccagggtgccgatggtgacaacgacccggataagccttacaccaatgccgaccgtttagcacttgccaacagggacgtcaaccgcttccctgtcttccaggccaaagacaaagacaaggtctttagaaaagcctttgccgtacccttgatcaataagaatgccggtggttacaaccccaaccggcctcctccaactctcggcctgcgtcaaggagctgcatttgtggctaagcctctgcacgatcccagcggcgagtttgccatcgtgcttcacgatcccaccatcgacgacaagccaaagcaaaccccaaaggctgccgaggaccaagatggggaggcagagaagccaaagatagatgcaccccttgttcacaagagcttggctgagatcctcggtatcaagaagaatgtcgagggcgaacgaccgagggtccccgttgttatcgacccgaggctggccaaagtcctgcggccgcatcaaatcgagggtgtcaagttcatgtatcagtgtgttacaggcatgatagaggagaaagcgaacggctgtatcatggccgatgaaatgggcctgggaaagacactccagtgcatcgcattactttggaccctgttgaaacagtcgccggatgctggcaagagcactatccagaaggctattgtggcttgtccatccagtctcgttcgcaattgggccaatgagctcgttaaatggttaggacctgacgccatcacaccttttgcaatcgacggaaaggcgtccaaggaggagctcacccggcagctccgacaatgggctatatcgacaggtcgtgcggtcactcgccctgtcatcattgtttcttacgagacgctgcggctgaacgtcgaggagcttaagaatacccaaatcggcttgatgttgtgcgacgagggccatcgtctgaaaaacggcgatagtcaaactttcacggctctaaacagcctgaatgtcacccgccgggtcattctttcgggcactcccattcaaaatgatctttccgagtatttcgcattgatcagcttcgcgaatcctggtcttctaggctcacgacttgaatttcgaaaaagatatgaaatcccaattcttcggggtcgggatgccgatgcttcggagaaagaacgcgaacgaggggatgagtgcctcggtgaacttcttggcgttgtcaacaagttcattattcgccgaacgaacgatattctctctaaatatcttcccgtcaagtacgaacatgtggtgttttgcaacctcgctgactttcagctggacttgtacaactacttcatcaagagccccgacattcaggccttactgcgtggcaagggcagtcagccattaaaggctattggtctactgaaaaagctttgtaaccacccagatcttctcaaccttgcagaagatctccccggtagtgaacaatattggccagaggattatgtaccgaaggatgcacgtggtcgtgatcgagacatcaagccctggtattctggaaagatgcaggtgcttgatcgtatgcttgcacgtattcgacaagatacaaacgacaagatcgtattaatcagcaactacacacagactctggatttgtttgaaaaactctgtcgacatcgtggatatggctcattccgtcttgatggcacaatgaacgtgaataaacggcagaaattagtcgacaaattcaacgacccggaaggctcagagtttgtcttcttgctatccagcaaagctggtggttgtggtcttaatctcatcggtgcaaaccgtctagtgctcttcgatccagattggaacccagcagcagatcaacaggcattggcacgtgtgtggcgtgacgggcagaagaaggactgtttcgtgtaccgttttattgcgactggtaccatcgaagagaagatcttccagcgacagtctcataagcagtctttatcgagttgtgtcgttgattccgccgaagatgtcgagcgccatttctcgctcgatagtctgcgagagctctttcagtatcgtggtgatacacgctctgacactcacgacaccttcaagtgcaagcgctgtaagcctgatgcccctcgacaatttatcaaagctcctgctttgctgtacggtgatacgagcacgtggaatcattttgtcaatgaaggaatgtcaaatatacaagatctcctcctacgccaagaatgtggcgagaaggaagtttcggctgtattccaatacatctctcattaa

SEQ ID NO: 19328 - protein, 834 aa, Muscodor strobelii
  misc_feature: SGI Peptide ID NO. 566497
  misc_feature (626)..(705): Pfam Id: PF00271 Pfam Desc: Helicase conserved C-terminal domain
  misc_feature (36)..(232): Pfam Id: PF08658 Pfam Desc: Rad54 N terminal
  misc_feature (247)..(555): Pfam Id: PF00176 Pfam Desc: SNF2 family N-terminal domain
  misc_feature (22)..(834): NCBI GI: 145616124 Blast Desc: MGG_03549 [Magnaporthe grisea 70-15] gi|145009888|gb|EDJ94544.1| MGG_03549 [Magnaporthe grisea 70-15]
  misc_feature (46)..(834): NCBI GI: 22775414 Blast Desc: recombinational repair protein [Magnaporthe grisea]
  misc_feature (17)..(834): NCBI GI: 261358918 Blast Desc: DNA repair and recombination protein RAD54 [Verticillium albo-atrum VaMs.102]
  misc_feature (11)..(834): NCBI GI: 46127169 Blast Desc: FG07962.1 [Gibberella zeae PH-1]
  misc_feature (35)..(834): NCBI GI: 256721646 Blast Desc: DNA repair protein, SNF2 family [Nectria haematococca mpVI 77-13-4]
  misc_feature (35)..(834): NCBI GI: 85092588 Blast Desc: DNA repair and recombination protein RAD54 [Neurospora crassa OR74A] gi|28920899|gb|EAA30234.1| DNA repair and recombination protein RAD54 [Neurospora crassa OR74A] Rad54
  misc_feature (55)..(834): NCBI GI: 156039515 Blast Desc: SS1G_11894 [Sclerotinia sclerotiorum 1980] gi|154697631|gb|EDN97369.1| SS1G_11894 [Sclerotinia sclerotiorum 1980]
  misc_feature (35)..(834): NCBI GI: 7384851 Blast Desc: Rad54 homolog [Neurospora crassa]
  misc_feature (34)..(834): NCBI GI: 189091948 Blast Desc: [Podospora anserina] gi|27803083|emb|CAD60786.1| protein product [Podospora anserina] gi|188219327|emb|CAP49307.1| protein product [Podospora anserina]
  misc_feature (36)..(834): NCBI GI: 226293396 Blast Desc: DNA repair and recombination protein RAD54 [Paracoccidioides brasiliensis Pb18]
  misc_feature (216)..(740): SWISSPROT Homolog: EC 1.14.11.6 Thymine dioxygenase
MTRADSSIVNWKVSPQKASRIILANKLPPAMATPATPLVKPKPNTTPGKRLLSQKSVDQLYKPFKCPGSATRAPASDRPTRKRRKVDYQGADGDNDPDKPYTNADRLALANRDVNRFPVFQAKDKDKVFRKAFAVPLINKNAGGYNPNRPPPTLGLRQGAAFVAKPLHDPSGEFAIVLHDPTIDDKPKQTPKAAEDQDGEAEKPKIDAPLVHKSLAEILGIKKNVEGERPRVPVVIDPRLAKVLRPHQIEGVKFMYQCVTGMIEEKANGCIMADEMGLGKTLQCIALLWTLLKQSPDAGKSTIQKAIVACPSSLVRNWANELVKWLGPDAITPFAIDGKASKEELTRQLRQWAISTGRAVTRPVIIVSYETLRLNVEELKNTQIGLMLCDEGHRLKNGDSQTFTALNSLNVTRRVILSGTPIQNDLSEYFALISFANPGLLGSRLEFRKRYEIPILRGRDADASEKERERGDECLGELLGVVNKFIIRRTNDILSKYLPVKYEHVVFCNLADFQLDLYNYFIKSPDIQALLRGKGSQPLKAIGLLKKLCNHPDLLNLAEDLPGSEQYWPEDYVPKDARGRDRDIKPWYSGKMQVLDRMLARIRQDTNDKIVLISNYTQTLDLFEKLCRHRGYGSFRLDGTMNVNKRQKLVDKFNDPEGSEFVFLLSSKAGGCGLNLIGANRLVLFDPDWNPAADQQALARVWRDGQKKDCFVYRFIATGTIEEKIFQRQSHKQSLSSCVVDSAEDVERHFSLDSLRELFQYRGDTRSDTHDTFKCKRCKPDAPRQFIKAPALLYGDTSTWNHFVNEGMSNIQDLLLRQECGEKEVSAVFQYISH

SEQ ID NO: 19329 - DNA, 3094 bp, Muscodor strobelii
  misc_feature: SGI EST ID NO. CUFF.45167.1
  misc_feature: Variant of the nucleotide sequence at SEQ ID NO 19327
cgaaaagtcatgtgacttggtgtcagaaaagcaattaacaggaacgggcggctgtgctacccggtcgcgtctgacgcgctttccaagtcaacaaagctttgggctaggtatccgtctgtttccgcctttgccaccctctatctttctggcaccacccaatcaccttcggaagtggccaggacattttggctcacctcttccgctgagccactctgtcatcctctcaaatatatatcttcgcggtctggtggttgcccttccttttatcgaccttgatttttgttggcgtgattgcaaacaagaccgtgacaggagaggcgctcgcctcgctccaaatagactcgcaaataaacttccgccggccatggcgactccagcgacgcccttggtgaagccgaaaccaaacacaacgcctggcaagcgcttgctgtctcagaaatctgtagatcagctctacaaacccttcaagtgtcctggctccgccacaagggctccggcttcagaccggccaactcgcaagcgaagaaaggttgactaccagggtgccgatggtgacaacgacccggataagccttacaccaatgccgaccgtttagcacttgccaacagggacgtcaaccgcttccctgtcttccaggccaaagacaaagacaaggtctttagaaaagcctttgccgtacccttgatcaataagaatgccggtggttacaaccccaaccggcctcctccaactctcggcctgcgtcaaggagctgcatttgtggctaagcctctgcacgatcccagcggcgagtttgccatcgtgcttcacgatcccaccatcgacgacaagccaaagcaaaccccaaaggctgccgaggaccaagatggggaggcagagaagccaaagatagatgcaccccttgttcacaagagcttggctgagatcctcggtatcaagaagaatgtcgagggcgaacgaccgagggtccccgttgttatcgacccgaggctggccaaagtcctgcggccgcatcaaatcgagggtgtcaagttcatgtatcagtgtgttacaggcatgatagaggagaaagcgaacggctgtatcatggccgatgaaatgggcctgggaaagacactccagtgcatcgcattactttggaccctgttgaaacagtcgccggatgctggcaagagcactatccagaaggctattgtggcttgtccatccagtctcgttcgcaattgggccaatgagctcgttaaatggttaggacctgacgccatcacaccttttgcaatcgacggaaaggcgtccaaggaggagctcacccggcagctccgacaatgggctatatcgacaggtcgtgcggtcactcgccctgtcatcattgtttcttacgagacgctgcggctgaacgtcgaggagcttaagaatacccaaatcggcttgatgttgtgcgacgagggccatcgtctgaaaaacggcgatagtcaaactttcacggctctaaacagcctgaatgtcacccgccgggtcattctttcgggcactcccattcaaaatgatctttccgagtatttcgcattgatcagcttcgcgaatcctggtcttctaggctcacgacttgaatttcgaaaaagatatgaaatcccaattcttcggggtcgggatgccgatgcttcggagaaagaacgcgaacgaggggatgagtgcctcggtgaacttcttggcgttgtcaacaagttcattattcgccgaacgaacgatattctctctaaatatcttcccgtcaagtacgaacatgtggtgttttgcaacctcgctgactttcagctggacttgtacaactacttcatcaagagccccgacattcaggccttactgcgtggcaagggcagtcagccattaaaggctattggtctactgaaaaagctttgtaaccacccagatcttctcaaccttgcagaagatctccccggtagtgaacaatattggccagaggattatgtaccgaaggatgcacgtggtcgtgatcgagacatcaagccctggtattctggaaagatgcaggtgcttgatcgtatgcttgcacgtattcgacaagatacaaacgacaagatcgtattaatcagcaactacacacagactctggatttgtttgaaaaactctgtcgacatcgtggatatggctcattccgtcttgatggcacaatgaacgtgaataaacggcagaaattagtcgacaaattcaacgacccggaaggctcagagtttgtcttcttgctatccagcaaagctggtggttgtggtcttaatctcatcggtgcaaaccgtctagtgctcttcgatccagattggaacccagcagcagatcaacaggcattggcacgtgtgtggcgtgacgggcagaagaaggactgtttcgtgtaccgttttattgcgactggtaccatcgaagagaagatcttccagcgacagtctcataagcagtctttatcgagttgtgtcgttgattccgccgaagatgtcgagcgccatttctcgctcgatagtctgcgagagctctttcagtatcgtggtgatacacgctctgacactcacgacaccttcaagtgcaagcgctgtaagcctgatgcccctcgacaatttatcaaagctcctgctttgctgtacggtgatacgagcacgtggaatcattttgtcaatgaaggaatgtcaaatatacaagatctcctcctacgccaagaatgtggcgagaaggaagtttcggctgtattccaatacatctctcattaagacttcagcgtcttgaaagaagagttaagatggcggtcgtcttccactatagatgggatggagtggtcaaatacagtcggagtttatgaaagcactgcattaggtcatttgctattatgaaagatgagaacagcacggtcacattttagacggtcaacaactgcattggcatggcgctcggcgaatgaagaatgcgtaatagcttaaagttgttcatcttgcttaaaacatatatattataccatcaaatgattgctttaatagaatcatgtcatagcatctgataagctgcaattatatttgcttcgagctgat

SEQ ID NO: 19330 - DNA, 1023 bp, Muscodor strobelii
  misc_feature: SGI cDNA ID NO. 566498
  misc_feature: Encodes the peptide sequence at SEQ ID NO 19331
atgtcggcagatttctgggctggctacctcagcggtgctgtcggtatcattattggcaacccattggacatactcaaagtccgtcttcaagctagtcattcgcaacccgagaatgtcgcatcaacccatatatcgaacctcccgccaacatccgctcttccgagatactttagaacggcatcgtccctcgtgactggttctgcagctccaattctcggatacggcgccctgaatgctatcctcttcgtcacctacaatcgtaccgaggcagctctgaaccatgcttggtccagaaatcaattctccccttattcaccttcgtctcaagtgtcaacaacggggtccaacttgtggatgacatggtttgcgggtgctgctggtggacttgctacctgggtcataagcacgccaacagaattgatcaagtgccaggcacagctcgcagatagaacctcttcatctacgagctcatttcatattgcacgaagaattattcggacggagggagttcgcggtctttactgtggaggcattattactgcgctgagagacagtattggctacggattctatttttgggcgtacgaatttgggggtcgtatcatggcggccaaatcagagcaagacgctatggttcctgagggcgatcatttcatgactgaaatgagttcgacctcgttctcatctaaggaggctgctcgagtgctgctttgtggtggtgttgctggtgtcgttacttgggccagcatatttcctcttgatgttatcaagactcgtgtccagggaagcaaatgtgttctccacaactctagtttggccactgctgcgacgcccttcttggatacgagcaatctaagacgtagaggtgccattgaggtggctagggaaacataccaggagggaggggttcgaatcttcttccgaggcttgacggtttgcagtgctagggcttttattgtcaatgctgttcagtgggcagtttacgagtggattatgctcggagcaagaggcgagaggatatga

SEQ ID NO: 19331 - protein, 340 aa, Muscodor strobelii
  misc_feature: SGI Peptide ID NO. 566498
  misc_feature (231)..(339): Pfam Id: PF00153 Pfam Desc: Mitochondrial carrier protein
  misc_feature (116)..(206): Pfam Id: PF00153 Pfam Desc: Mitochondrial carrier protein
  misc_feature (4)..(96): Pfam Id: PF00153 Pfam Desc: Mitochondrial carrier protein
  misc_feature (1)..(332): NCBI GI: 256721617 Blast Desc: NECHADRAFT_78593 [Nectria haematococca mpVI 77-13-4]
  misc_feature (1)..(340): NCBI GI: 261358917 Blast Desc: solute carrier family 25 member 45 [Verticillium albo-atrum VaMs.102]
  misc_feature (1)..(332): NCBI GI: 39942946 Blast Desc: MGG_03553 [Magnaporthe grisea 70-15] gi|145009884|gb|EDJ94540.1| MGG_03553 [Magnaporthe grisea 70-15]
  misc_feature (1)..(332): NCBI GI: 240105199 Blast Desc: Mitochondrial carrier protein [Coccidioides posadasii C735 delta SOWgp]
  misc_feature (1)..(332): NCBI GI: 85093862 Blast Desc: NCU02352 [Neurospora crassa OR74A] gi|28921227|gb|EAA30537.1| conserved [Neurospora crassa OR74A]
  misc_feature (1)..(332): NCBI GI: 212534458 Blast Desc: mitochondrial carrier protein, [Penicillium marneffei ATCC 18224] gi|210069784|gb|EEA23874.1| mitochondrial carrier protein, [Penicillium marneffei ATCC 18224]
  misc_feature (1)..(338): NCBI GI: 154301208 Blast Desc: BC1G_10274 [Botryotinia fuckeliana B05.10] gi|150856175|gb|EDN31367.1| BC1G_10274 [Botryotinia fuckeliana B05.10]
  misc_feature (1)..(332): NCBI GI: 258568008 Blast Desc: conserved [Uncinocarpus reesii 1704] gi|237906194|gb|EEP80595.1| conserved [Uncinocarpus reesii 1704]
  misc_feature (1)..(332): NCBI GI: 238487358 Blast Desc: mitochondrial carrier protein, [Aspergillus flavus NRRL3357] gi|220699796|gb|EED56135.1| mitochondrial carrier protein, [Aspergillus flavus NRRL3357]
  misc_feature (1)..(332): NCBI GI: 115389992 Blast Desc: conserved [Aspergillus terreus NIH2624] gi|114194897|gb|EAU36597.1| conserved [Aspergillus terreus NIH2624]
MSADFWAGYLSGAVGIIIGNPLDILKVRLQASHSQPENVASTHISNLPPTSALPRYFRTASSLVTGSAAPILGYGALNAILFVTYNRTEAALNHAWSRNQFSPYSPSSQVSTTGSNLWMTWFAGAAGGLATWVISTPTELIKCQAQLADRTSSSTSSFHIARRIIRTEGVRGLYCGGIITALRDSIGYGFYFWAYEFGGRIMAAKSEQDAMVPEGDHFMTEMSSTSFSSKEAARVLLCGGVAGVVTWASIFPLDVIKTRVQGSKCVLHNSSLATAATPFLDTSNLRRRGAIEVARETYQEGGVRIFFRGLTVCSARAFIVNAVQWAVYEWIMLGARGERI

SEQ ID NO: 19332 - DNA, 1662 bp, Muscodor strobelii
  misc_feature: SGI EST ID NO. CUFF.45144.0
  misc_feature: Variant of the nucleotide sequence at SEQ ID NO 19330
cgagaatctattttgctgatggcaagtgtgtgcgcatatcagcggacaagaaactcgttccgtttagcagacactgtagtgacttatgagtaattgtaacactcgaattcatgagctccgcttcactagccgacccctcattagaggggtgcctgttcttcagctttaagaccaccatcttagagatactaccaacaaatgaaatacatgaagacgcttgagcgatcactttccgcgttaatgctcatgtaacgagtaacgttggcccagacgctttacatcactaatgtcgtagtacgaaaaatacttacattatacggctagccttttgaggcgaaactttccagttgacaattgacgaatcagctcgtgtcatgtagatactatctgacttcatgttccgtgaacgagtgatttgcattgaatagattcattagagtcatgtcggcagatttctgggctggctacctcagcggtgctgtcggtatcattattggcaacccattggacatactcaaagtccgtcttcaagctagtcattcgcaacccgagaatgtcgcatcaacccatatatcgaacctcccgccaacatccgctcttccgagatactttagaacggcatcgtccctcgtgactggttctgcagctccaattctcggatacggcgccctgaatgctatcctcttcgtcacctacaatcgtaccgaggcagctctgaaccatgcttggtccagaaatcaattctccccttattcaccttcgtctcaagtgtcaacaacggggtccaacttgtggatgacatggtttgcgggtgctgctggtggacttgctacctgggtcataagcacgccaacagaattgatcaagtgccaggcacagctcgcagatagaacctcttcatctacgagctcatttcatattgcacgaagaattattcggacggagggagttcgcggtctttactgtggaggcattattactgcgctgagagacagtattggctacggattctatttttgggcgtacgaatttgggggtcgtatcatggcggccaaatcagagcaagacgctatggttcctgagggcgatcatttcatgactgaaatgagttcgacctcgttctcatctaaggaggctgctcgagtgctgctttgtggtggtgttgctggtgtcgttacttgggccagcatatttcctcttgatgttatcaagactcgtgtccagggaagcaaatgtgttctccacaactctagtttggccactgctgcgacgcccttcttggatacgagcaatctaagacgtagaggtgccattgaggtggctagggaaacataccaggagggaggggttcgaatcttcttccgaggcttgacggtttgcagtgctagggcttttattgtcaatgctgttcagtgggcagtttacgagtggattatgctcggagcaagaggcgagaggatatgacaacattgtataatttggagactattcaccattggcaaccatctctactgccaataggttcgagtcggatatatgttgttatagaaactacctggttgcgtatccaatcgtctatctaatagttggtagatacatgtacgcatgtgcctcgaaactttctttacagcccgctcattaccgcacccatcttagtcccca

SEQ ID NO: 19333 - DNA, 972 bp, Muscodor strobelii
  misc_feature: SGI cDNA ID NO. 566499
  misc_feature: Encodes the peptide sequence at SEQ ID NO 19334
atgaatgaacaggcagaagcattaggatcgtcctccccgccagcatcagataaggcgagccgtgggagtaaggtagccgaagcaatcatcatcagctccagcgaggatgattccgatgacgagatgttgccaagacgccagacggcagacataaatgataaagccaagcgcatcccgcaagctccacgaagtcgcattttcgagcattcaccccttcgacccgacaacaaggcttctgaccatcggattgcaaaacgatcagtgcaagaccttaccagtgacaataatgaacaactggaggagtacgaattgaaagtcaaagatcttgaagagcgtcttagactagcccaagaagagcttagtcagaagaacgatgagatacgtaatcttatggaaactcgacagagtctctcttcaacaacgaagcaacaagcggccgacttggagactactaaatctgaactgaaagcccaacaagagagctttgtactagccgacagagaggctattgagggagcaaaaagactacaggaggcgtacaaagagaacggtagtcttcgccaagagaacgatggcctgcagcaagaaattagaaaccttcagcacgaagccagccgtcttcaccaagatatcagtgcttcagagaaggcacagtccaacaactccctgatcatagacgaccaatcagcgaaaataaaccaagtcgagtcggatttgcagaaagcccgagatgagatgaaagagctggaggaacggcggattagacttgcggaagaatcgtcatcgaccaaatctaaggtccagggcctgggaaaaagcctagaagagtcgcatgacaagatcaatgagttagagacccagatcaaaaactgtatgttctgcagcaagcctaaggcgttctgggataacatacgcaagaccacagaagaggtggggcgcaacctgcagaatctcttgggtgaccagaagtaa

SEQ ID NO: 19334 - protein, 323 aa, Muscodor strobelii
  misc_feature: SGI Peptide ID NO. 566499
MNEQAEALGSSSPPASDKASRGSKVAEAIIISSSEDDSDDEMLPRRQTADINDKAKRIPQAPRSRIFEHSPLRPDNKASDHRIAKRSVQDLTSDNNEQLEEYELKVKDLEERLRLAQEELSQKNDEIRNLMETRQSLSSTTKQQAADLETTKSELKAQQESFVLADREAIEGAKRLQEAYKENGSLRQENDGLQQEIRNLQHEASRLHQDISASEKAQSNNSLIIDDQSAKINQVESDLQKARDEMKELEERRIRLAEESSSTKSKVQGLGKSLEESHDKINELETQIKNCMFCSKPKAFWDNIRKTTEEVGRNLQNLLGDQK

SEQ ID NO: 19335 - DNA, 2934 bp, Muscodor strobelii
  misc_feature: SGI cDNA ID NO. 566500
  misc_feature: Encodes the peptide sequence at SEQ ID NO 19336
atggcaagtttcctccgaggcaagcaggcgggcatacaaaatgacctgtctgcgaacatcttgcctggtctttttgctccagatgagcgatcacgctatggcatcaactcccagatcagctgtgtggcatttgaccccgttcagtcactcatcgctgttgccaccaacgagtctaaatatggcggtggaaagattcatgtcttcgggcagaatagggttcagaaattcttcagcccagtgcggtcttgctcgttcgaaaatctacaattctgtgcaaaccgcctaatcagcttagacaccaagaatgagatagtcatctggaaccttgatactggcgagaggaccaccgcttttcacgctcccgggaatgttgtctgcatgcttaccgatcccgtattggattggtgctttctcgggatgcatacgggtgaaatattgacttacgatctggaccgtgaaagaatgtccaacttccgactgcctaacttctggacggacaaggacccaagggctagagcagtggctttggtttctctccagatgcatcctcgtgatatcggcaagctactgattggctactcgcatggtgcggtcatctattccttcaagcaaaatcaaccgacacgattttacgaataccaagttcgcccgggtgcgccaggcggtagccatcaaacggtggattcgcaaaggaaaccaaaactcacccatgctctttggcatcctaccggtaccttcgtgctcaccgcacatgacgatgcgagtcttgtcttctgggacacaagtaaagacggtcggttagttatggcaaggacgctatacgatgtaaatgttgatcagcctaacccacacccgcaagcgtccaaaccgaagcatccatacctgaatattgcttggtgctgtaaacgcaacccggaagactccggcttacttatagccggtggccaaccgctcgacggaccaccagcaggattgaccttcatagaccttggcattactccgaattatgctacttcttcctggcaggtcctatcggactacctcaagggcaaaagcacgagcattctcgagacacctgctggtgcggaggtcctcaagttttatctcatcccacgtgtctcgccacattttgctggcgctcaagatccgattgcagtcatggcgctattgtcgtcaagtgaaataatcaccatgagctttcctagcggttacccgatttcgcctaccaatcaactacatccatctttgtcgttagtacagcctttcgctacgaaaattacaagttctacgctaggccgcgaaagatggctcggaatggtcgaaaatcgaaaccaaggcgagctcatcttgaaaggtggcgccgaagctgcacgaccgcgaaggcgctttgaaggtcgaaccatcattcaagtcgcccatgctgatagtaccgttcgtatttgggatgttgggcatggcgatgaaattgagaatcctacacaaatacaggtagacgtcgccagagccttgaaccgatacgacgatgtgcaaatcaccgccatgagcatggcgggagagactggcgagtttgctgttgggacgagtacgggcgaggtgattatctaccgatgggacagtaacaaatactacggccaaaatgcgaatcaggagatagaatcgaacccaggaggaatatcaaacatcagcgccaggtcagagccaaatctgaaaagcggcctgcaaccctcttctctctatgagatgatgcagggcccaatcagtgctatcaaagtatccgatgtgggatttgtggctgccggatctgagaatggcttcttcagcctcatcgatttgagaggtccctctattatgttccatgcctcaatcgttgatctgatcaagccggaaaagaaatcgtcattattcaagaagagtgggagtatatcaactactaaggactggcctgtggctattgagtttgctgtcatgacacttgacgaggataaatactcaagcatatgctgctttattggcacccataccggaaaggtcgtcacgttgaaacttctcccgtctggctcgagcttccaggcgcaagttgcaggcgtgagccagctagacgatcaaatcgtgtccatatccccaatcatcgccgatacaggaaagccagcaagtgcgaccggccacgctgtcgccggcttgcgagagggtaggaatgtgaacggctcccttattgttgttacacgaagcgaagttcgaatatttaagcctgctacagcaaaaggagcatcgaaatccttcggtgactccccatgtagcgctgcctctgtgactgaatttgagctgcatggtatggcacttgttggtgttttcggcgatcgaacaacccgggcattcagcctacccggtctgaaagagctcggaaccgcttcattaccaatgatggacgtgactcgcgtctctgactcgctcgtcaccgaggacggcgaggttttctgttggacaagtccctcggagtttgcagtgttccaagtctgggggactggtaaaggtttagaaaatactgcagatcagctaattaaccccgatctggctctcccaccacgcccaacaatttcgaacatgcagtggatatcggggacgcaatacgtgtcaccagccgatctagatatactgattggcggaccgggcagaccaccgagcaagaggaccgttgcggccaccgcggctatggagcgtcaagcacaagctggaccagcaagtccgagcgaagaaggatggggagactatcttactaggcaattaaacgagcgcacggaaaagttgaacatcgttggcgacagtatgtcgaatatggagacgagcagtcagcagtgggccgagagtgccagtaaattcgtttcccagcaaaagagaaaaatgctgtttggaggcatcactggcaagtttatgtag

SEQ ID NO: 19336 - protein, 977 aa, Muscodor strobelii
  misc_feature: SGI Peptide ID NO. 566500
  misc_feature (508)..(895): Pfam Id: PF08596 Pfam Desc: Lethal giant larvae(Lgl) like, C-terminal
  misc_feature (1)..(976): NCBI GI: 145610747 Blast Desc: MGG_00926 [Magnaporthe grisea 70-15] gi|145018120|gb|EDK02399.1| MGG_00926 [Magnaporthe grisea 70-15]
  misc_feature (1)..(977): NCBI GI: 256735332 Blast Desc: [Nectria haematococca mpVI 77-13-4]
  misc_feature (1)..(977): NCBI GI: 46105430 Blast Desc: FG00343.1 [Gibberella zeae PH-1]
  misc_feature (1)..(959): NCBI GI: 156037925 Blast Desc: SS1G_11718 [Sclerotinia sclerotiorum 1980] gi|154697455|gb|EDN97193.1| SS1G_11718 [Sclerotinia sclerotiorum 1980]
  misc_feature (1)..(977): NCBI GI: 85090786 Blast Desc: NCU09432 [Neurospora crassa OR74A] gi|28919958|gb|EAA29348.1| conserved [Neurospora crassa OR74A]
  misc_feature (1)..(835): NCBI GI: 154310049 Blast Desc: BC1G_06945 [Botryotinia fuckeliana B05.10] gi|150851733|gb|EDN26926.1| BC1G_06945 [Botryotinia fuckeliana B05.10]
  misc_feature (1)..(976): NCBI GI: 145232881 Blast Desc: An02g06780 [Aspergillus niger] gi|134056734|emb|CAK44223.1| protein product [Aspergillus niger]
  misc_feature (1)..(976): NCBI GI: 240108176 Blast Desc: CPC735_005220 [Coccidioides posadasii C735 delta SOWgp]
  misc_feature (1)..(976): NCBI GI: 119491721 Blast Desc: SNARE-dependent exocytosis protein (Sro7), [Neosartorya fischeri NRRL 181] gi|119411515|gb|EAW21458.1| SNARE-dependent exocytosis protein (Sro7), [Neosartorya fischeri
  misc_feature (1)..(976): NCBI GI: 242784221 Blast Desc: SNARE-dependent exocytosis protein (Sro7), [Talaromyces stipitatus ATCC 10500] gi|218720490|gb|EED19909.1| SNARE-dependent exocytosis protein (Sro7), [Talaromyces ATCC
MASFLRGKQAGIQNDLSANILPGLFAPDERSRYGINSQISCVAFDPVQSLIAVATNESKYGGGKIHVFGQNRVQKFFSPVRSCSFENLQFCANRLISLDTKNEIVIWNLDTGERTTAFHAPGNVVCMLTDPVLDWCFLGMHTGEILTYDLDRERMSNFRLPNFWTDKDPRARAVALVSLQMHPRDIGKLLIGYSHGAVIYSFKQNQPTRFYEYQVRPGAPGGSHQTVDSQRKPKLTHALWHPTGTFVLTAHDDASLVFWDTSKDGRLVMARTLYDVNVDQPNPHPQASKPKHPYLNIAWCCKRNPEDSGLLIAGGQPLDGPPAGLTFIDLGITPNYATSSWQVLSDYLKGKSTSILETPAGAEVLKFYLIPRVSPHFAGAQDPIAVMALLSSSEIITMSFPSGYPISPTNQLHPSLSLVQPFATKITSSTLGRERWLGMVENRNQGELILKGGAEAARPRRRFEGRTIIQVAHADSTVRIWDVGHGDEIENPTQIQVDVARALNRYDDVQITAMSMAGETGEFAVGTSTGEVIIYRWDSNKYYGQNANQEIESNPGGISNISARSEPNLKSGLQPSSLYEMMQGPISAIKVSDVGFVAAGSENGFFSLIDLRGPSIMFHASIVDLIKPEKKSSLFKKSGSISTTKDWPVAIEFAVMTLDEDKYSSICCFIGTHTGKVVTLKLLPSGSSFQAQVAGVSQLDDQIVSISPIIADTGKPASATGHAVAGLREGRNVNGSLIVVTRSEVRIFKPATAKGASKSFGDSPCSAASVTEFELHGMALVGVFGDRTTRAFSLPGLKELGTASLPMMDVTRVSDSLVTEDGEVFCWTSPSEFAVFQVWGTGKGLENTADQLINPDLALPPRPTISNMQWISGTQYVSPADLDILIGGPGRPPSKRTVAATAAMERQAQAGPASPSEEGWGDYLTRQLNERTEKLNIVGDSMSNMETSSQQWAESASKFVSQQKRKMLFGGITGKFM

SEQ ID NO: 19337 - DNA, 4281 bp, Muscodor strobelii
  misc_feature: SGI EST ID NO. CUFF.45176.0
  misc_feature: Variant of the nucleotide sequence at SEQ ID NO 19335
ctaattgatttgtccttgtgactttgtgtatgagagtaaagcctcccagctgcctgaacagccgctattccagtatgtggtggtcgcccagaagatcatccgaggacagccacaaacagaccattgccaaaataattacaagacattgacacttgacataattgttgccgccatataagacctctgttatctcaagaatatatacaaagcacaacattgtgcgaactgtctttgttgcaaagtattgtacattgtgggattggaacgggagtccacatgttcgaccttggtaactttacgatcgtggaataaatctgctggtgccaggaattgcttcctattgtttgcacgagaggaagtttgagcattgttgggctgtaaacccacagatactctcaataattaggatgcgaagtcaaaggccttatcatagtatgtttgtcaacatctatttccagccgtgacctgccgtttgagtgtatgttcggatttcgattgagcatgtacgtgagttgttagacctcgtggttatggagtacattaatgattggtgatgaagcggatgactcatcaggactgaccttgctagttttgaacatcattatgtaacatatatgtagctggcaattgtgcagtcttatgctcatgacctggcaacatcaggatcacctgaagtgatctgagtccaagtattcagccagcctacatcctctgcctaaggtggcacacaaaacatctcgacgcacaacctaggtctctggtggctgagccttgtggctgataagcccacccagtgccgccctgccgtcttggcctatctgacattgaggggcatactaaaagtgacgtacacccgtttcagagctatcacatgtagaaacttacatgtatttatagactttgatcaggttcatggttgtcaatcgcatactggatcttggtagttaacattcatctgttgggcgcaatcgcagagcaaaagcgcgctgcctctcaatctctccagatttgtccatgttgttccatgttgactggatagacagctaagatccacctgtttgtcccaaagcgattatggcaagtttcctccgaggcaagcaggcgggcatacaaaatgacctgtctgcgaacatcttgcctggtctttttgctccagatgagcgatcacgctatggcatcaactcccagatcaggtaagttttgcctatgccaaacagaccttcgattaacctgaccgggatcgcgttgtcgcggttagctgtgtggcatttgaccccgttcagtcactcatcgctgttgccaccaacgagtctaaatatggcggtggaaagattcatgtcttcgggcagaatagggttcagaaattcttcagcccagtgcggtcttgctcgttcgaaaatctacaattctgtgcaaaccgcctaatcagcttagacaccaagaatgagatagtcatctggaaccttgatactggcgagaggaccaccgcttttcacgctcccgggaatgttgtctgcatgcttaccgatcccgtattggattggtgctttctcgggatgcatacgggtgaaatattgacttacgatctggaccgtgaaagaatgtccaacttccgactgcctaacttctggacggacaaggacccaagggctagagcagtggctttggtttctctccagatgcatcctcgtgatatcggcaagctactgattggctactcgcatggtgcggtcatctattccttcaagcaaaatcaaccgacacgattttacgaataccaagttcgcccgggtgcgccaggcggtagccatcaaacggtggattcgcaaaggaaaccaaaactcacccatgctctttggcatcctaccggtaccttcgtgctcaccgcacatgacgatgcgagtcttgtcttctgggacacaagtaaagacggtcggttagttatggcaaggacgctatacgatgtaaatgttgatcagcctaacccacacccgcaagcgtccaaaccgaagcatccatacctgaatattgcttggtgctgtaaacgcaacccggaagactccggcttacttatagccggtggccaaccgctcgacggaccaccagcaggattgaccttcatagaccttggcattactccgaattatgctacttcttcctggcaggtcctatcggactacctcaagggcaaaagcacgagcattctcgagacacctgctggtgcggaggtcctcaagttttatctcatcccacgtgtctcgccacattttgctggcgctcaagatccgattgcagtcatggcgctattgtcgtcaagtgaaataatcaccatgagctttcctagcggttacccgatttcgcctaccaatcaactacatccatctttgtcgttagtacagcctttcgctacgaaaattacaagttctacgctaggccgcgaaagatggctcggaatggtcgaaaatcgaaaccaaggcgagctcatcttgaaaggtggcgccgaagctgcacgaccgcgaaggcgctttgaaggtcgaaccatcattcaagtcgcccatgctgatagtaccgttcgtatttgggatgttgggcatggcgatgaaattgagaatcctacacaaatacaggtagacgtcgccagagccttgaaccgatacgacgatgtgcaaatcaccgccatgagcatggcgggagagactggcgagtttgctgttgggacgagtacgggcgaggtgattatctaccgatgggacagtaacaaatactacggccaaaatgcgaatcaggagatagaatcgaacccaggaggaatatcaaacatcagcgccaggtcagagccaaatctgaaaagcggcctgcaaccctcttctctctatgagatgatgcagggcccaatcagtgctatcaaagtatccgatgtgggatttgtggctgccggatctgagaatggcttcttcagcctcatcgatttgagaggtccctctattatgttccatgcctcaatcgttgatctgatcaagccggaaaagaaatcgtcattattcaagaagagtgggagtatatcaactactaaggactggcctgtggctattgagtttgctgtcatgacacttgacgaggataaatactcaagcatatgctgctttattggcacccataccggaaaggtcgtcacgttgaaacttctcccgtctggctcgagcttccaggcgcaagttgcaggcgtgagccagctagacgatcaaatcgtgtccatatccccaatcatcgccgatacaggaaagccagcaagtgcgaccggccacgctgtcgccggcttgcgagagggtaggaatgtgaacggctcccttattgttgttacacgaagcgaagttcgaatatttaagcctgctacagcaaaaggagcatcgaaatccttcggtgactccccatgtagcgctgcctctgtgactgaatttgagctgcatggtatggcacttgttggtgttttcggcgatcgaacaacccgggcattcagcctacccggtctgaaagagctcggaaccgcttcattaccaatgatggacgtgactcgcgtctctgactcgctcgtcaccgaggacggcgaggttttctgttggacaagtccctcggagtttgcagtgttccaagtctgggggactggtaaaggtttagaaaatactgcagatcagctaattaaccccgatctggctctcccaccacgcccaacaatttcgaacatgcagtggatatcggggacgcaatacgtgtcaccagccgatctagatatactgattggcggaccgggcagaccaccgagcaagaggaccgttgcggccaccgcggctatggagcgtcaagcacaagctggaccagcaagtccgagcgaagaaggatggggagactatcttactaggcaattaaacgagcgcacggaaaagttgaacatcgttggcgacagtatgtcgaatatggagacgagcagtcagcagtgggccgagagtgccagtaaattcgtttcccagcaaaagagaaaaatgctgtttggaggcatcactggcaagtttatgtaggtttaaggatcaagattatgattgtagtctgatctctttgctgttgtcggacttgcagtttatacaaagggctaagcaggaacatgccagggatttcgtcccgactaaactaatagctactgtagcaaaaccaatatagaacatgtcatcaaagatatattgactttatcaaaaatggaaagagcgattagatagttgagtcgcgttc

SEQ ID NO: 19338 - DNA, 1350 bp, Muscodor strobelii
  misc_feature: SGI cDNA ID NO. 566501
  misc_feature: Reduced expression when VOC is produced
  misc_feature: Encodes the peptide sequence at SEQ ID NO 19339
atggataccaccgtcgacatcggcagacgcatcgttcagatgttctgggacccggacccgaccaacgatgtcctccgcgaccagcccgtctggtgtctgggccagtcctacagactcaacaacagccccaagcctcgccggccctctccccaccaccccgatccgccacccgcttcagacccccaagtccccgacgtccccgcccctgcgcgtcgcccagaaacgctcccggagacgccccccgactccgtctccagcagcttcgactcttccctggcctacgaagacgcgcccctcgactccggctggcccccggccttcctcgacgacttcgagtcccgcatctggatgacctaccgctccgacttccccccgatccccaagtcccaggatcccaacgctctcgccgccctgtccttctccatgcgcctcaagacccagctgtccgaccagaccggcttcgcctccgacagtggctggggctgcatgatccgctctggccagagcctcctcgccaacgccatggccatgcagcggctcggtcgagcgtggaggagaggcacgcaagaagccgaggagagaaagatcctagcttcgtttgccgacgacccccaggcaccgtattcgatacacaacttcgtgcgtcatggcgcctcggcatgcggcaagtaccccggtgaatggtttggtccctcggccacagccagatgcatccaggcactcaccaacacacacgagcaaacactgcgcgtgtactcgaccggcgacggccccgatgtctacgaggacaatttcatgaaggtcgccaagcccgacggcaccactttccacccgaccgtcattctcgtcggcacgaggctcggcatagataaaatcacgcccgtgtactgggaggccctggttgcctcgctccagatgtcacagtctatcggcatagctggtgggcgcccatcttcgtcgcattatttcatcggggtccaaggattccacttcttctacctggatccccattacacgcgacccgtgcttccctatcgtggtgacgtggccacgtacacgcccgaggagatcgacacttgtcacacccggaggctgcgccgtctgcacgtcaaggaaatggaccccagcatgttgattgggttcttgatccgcgaccaggaggactgggaagactggaggcggggcgtgaagcatgtgcaaggcaaagccatcatccatgtctcggatcacgacccggtggcccagatgctgaagcgtggcaccgacatcctcgacgtggtggagccgctgagcgacgacgacggagagacggtcaaggaagatgcgggcgaaagcacctcgcaggcctag

SEQ ID NO: 19339 - protein, 449 aa, Muscodor strobelii
  misc_feature: SGI Peptide ID NO. 566501
  misc_feature (101)..(397): Pfam Id: PF03416 Pfam Desc: Peptidase family C54
  misc_feature (7)..(438): NCBI GI: 189091768 Blast Desc: [Podospora anserina] gi|188219237|emb|CAP49217.1| protein product [Podospora anserina]
  misc_feature (8)..(438): NCBI GI: 148887340 Blast Desc: [Podospora anserina] gi|188219237|emb|CAP49217.1| protein product [Podospora anserina]
  misc_feature (3)..(438): NCBI GI: 154300262 Blast Desc: BC1G_11320 [Botryotinia fuckeliana B05.10] gi|166990615|sp|A6SDQ3.1|ATG4_BOTFB RecName: Full= cysteine protease atg4; AltName: Full=Autophagy-related protein 4 B05.10]
  misc_feature (8)..(430): NCBI GI: 74665877 Blast Desc: ATG4_CRYPA RecName: Full= cysteine protease ATG4; AltName: Full=Autophagy-related protein 4 gi|66576169|gb|AAY51673.1| cysteine protease Atg4 [Cryphonectria
  misc_feature (8)..(438): NCBI GI: 210063823 Blast Desc: ATG4 protein [Magnaporthe oryzae]
  misc_feature (7)..(438): NCBI GI: 62899783 Blast Desc: ATG4_PODAN RecName: Full= cysteine protease ATG4; AltName: Full=Autophagy-related protein 4 gi|27802993|emb|CAD60696.1| protein product [Podospora anserina]
  misc_feature (7)..(436): NCBI GI: 85067704 Blast Desc: NCU02433 [Neurospora crassa OR74A] gi|62899773|sp|Q7S3X7.1|ATG4_NEUCR RecName: Full= cysteine protease atg-4; AltName: Full=Autophagy-related protein 4 crassa
  misc_feature (7)..(434): NCBI GI: 116179672 Blast Desc: CHGG_00464 [Chaetomium globosum CBS 148.51] gi|88184761|gb|EAQ92229.1| CHGG_00464 [Chaetomium globosum CBS 148.51]
  misc_feature (3)..(438): NCBI GI: 156042330 Blast Desc: SS1G_10962 [Sclerotinia sclerotiorum 1980] gi|154695349|gb|EDN95087.1| SS1G_10962 [Sclerotinia sclerotiorum 1980]
  misc_feature (8)..(438): NCBI GI: 145616088 Blast Desc: MGG_03580 [Magnaporthe grisea 70-15] gi|145009851|gb|EDJ94507.1| MGG_03580 [Magnaporthe grisea 70-15]
  misc_feature: Useful for introducing or modulating the production of volatile compounds
MDTTVDIGRRIVQMFWDPDPTNDVLRDQPVWCLGQSYRLNNSPKPRRPSPHHPDPPPASDPQVPDVPAPARRPETLPETPPDSVSSSFDSSLAYEDAPLDSGWPPAFLDDFESRIWMTYRSDFPPIPKSQDPNALAALSFSMRLKTQLSDQTGFASDSGWGCMIRSGQSLLANAMAMQRLGRAWRRGTQEAEERKILASFADDPQAPYSIHNFVRHGASACGKYPGEWFGPSATARCIQALTNTHEQTLRVYSTGDGPDVYEDNFMKVAKPDGTTFHPTVILVGTRLGIDKITPVYWEALVASLQMSQSIGIAGGRPSSSHYFIGVQGFHFFYLDPHYTRPVLPYRGDVATYTPEEIDTCHTRRLRRLHVKEMDPSMLIGFLIRDQEDWEDWRRGVKHVQGKAIIHVSDHDPVAQMLKRGTDILDVVEPLSDDDGETVKEDAGESTSQA

SEQ ID NO: 19340 - DNA, 3338 bp, Muscodor strobelii
  misc_feature: SGI EST ID NO. CUFF.45834.0
  misc_feature: Variant of the nucleotide sequence at SEQ ID NO 19338
tccacgagctagacgcaccaagccagacagcaagcacgctgcactgtctccctagccgccaccatcgtctcgtcatctcgtcatcccatcatcccatcattccagcatcccgctgcctctcttatctcagcaacactcgagacatcccaatcaccttgtcgtagaataataataatcacgaaacagcaacaacatcaccacctcattcggtcatccagtctctcattcatccggtccgctgtccagactcggccgctgtgtgctcgggatagccttttcaacgcggttctctccagtagtctttcttctcttactatctgactgcctatttgctacttgaaccacctccctccagacgttttggggcctgttcctgctccctcgacgccatggataccaccgtcgacatcggcagacgcatcgttcagatgttctgggacccggacccgaccaacgatgtcctccgcgaccagcccgtctggtgtctgggccagtcctacagactcaacaacagccccaagcctcgccggccctctccccaccaccccgatccgccacccgcttcagacccccaagtccccgacgtccccgcccctgcgcgtcgcccagaaacgctcccggagacgccccccgactccgtctccagcagcttcgactcttccctggcctacgaagacgcgcccctcgactccggctggcccccggccttcctcgacgacttcgagtcccgcatctggatgacctaccgctccgacttccccccgatccccaagtcccaggatcccaacgctctcgccgccctgtccttctccatgcgcctcaagacccagctgtccgaccagaccggcttcgcctccgacagtggctggggctgcatgatccgctctggccagagcctcctcgccaacgccatggccatgcagcggctcggtcgaggttagtctctcactctctccgtcccacagtcccaggcccccgtcgggtctcaccatgtcgttgcgtcactaacgccctgccagcgtggaggagaggcacgcaagaagccgaggagagaaagatcctagcttcgtttgccgacgacccccaggcaccgtattcgatacacaacttcgtgcgtcatggcgcctcggcatgcggcaagtaccccggtgaatggtttggtccctcggccacagccagatgcatccaggcactcaccaacacacacgagcaaacactgcgcgtgtactcgaccggcgacggccccgatgtctacgaggacaatttcatgaaggtcgccaagcccgacggcaccactttccacccgaccgtcattctcgtcggcacgaggctcggcatagataaaatcacgcccgtgtactgggaggccctggttgcctcgctccagatgtcacagtctatcggcatagctggtgggcgcccatcttcgtcgcattatttcatcggggtccaaggattccacttcttctacctggatccccattacacgcgacccgtgcttccctatcgtggtgacgtggccacgtacacgcccgaggagatcgacacttgtcacacccggaggctgcgccgtctgcacgtcaaggaaatggaccccagcatgttgattgggttcttgatccgcgaccaggaggactgggaagactggaggcggggcgtgaagcatgtgcaaggcaaagccatcatccatgtctcggatcacgacccggtggcccagatgctgaagcgtggcaccgacatcctcgacgtggtggagccgctgagcgacgacgacggagagacggtcaaggaagatgcgggcgaaagcacctcgcaggcctagtagactctgatcttgccttgtgggagtgcaccagggaggcgtaaggtttgggcgttcgggtttggtctgcgacgagggtatgattggggaaacaacgatacggttgcgccgagtgggaaacgcaatctcgacttaccagttttggatacggagctcattggcgagaacagctgtagatgttgtctacttttatgtgatagtgcccatcttgccgtccgaacaagagagctgctgatagaaaggtagacgggaaatagtgtgaaacttcagtggctccaaaatttgaacatggggaacagtgactgtatagggtatgatctgcctcgcggcgaaggcggagcacctctcgacgccgtcgtgcctgttcacctcctcttcttcttccccgacttgcccgcaaccgggacgcttttggtggccgcgtgactagggttttccttgagatgctcaaagagcctggtcttggaatcgaacgaagcgttgcaggctaagcactacacgtatcaccggaataagcttcagatgcgaagggcgtctcaattaactaggggacaacgtacactatgaccgctttgctcggcgttggctgcttgcgctgcctttttggctctcttggctttggccttgcccaccttcttggccggcttctcattgccaatggctaaatcggcaatctgctgcttcgtggcttctaggtcatccccgccgtcgacagaggtgtcttgggtgccagctagacgtgattccacgacatctctcgaagcatagtcttcgtcctcgtcctcgctttcgtcaggcgattggggtgctgacgaagtggcctcagtaccaacgtgaagggccgacggcgcctcgccaatgtctggctcctgtggtgcggggctttcggtcccatcgccgtccgtctcgcgctcctcttctaacgtcggcgcagcttgcggtgctgtgtcgacgtcgtcagccagatcgagagcgatgtcgtccttcttcatctgccgcttgagctgctgcacggccttgagatgcttcttgctcttctcgtgggcctggtactgtttctcgctcttgaaggtcttgtcgcagacgacgcattcgatctccttgacctcggatgcctcgtcgctctcggagaactcgccggcatggtcgtcgtcgtcgcgggacctggcccagtctggcacggcgttggcgtcgctcatcttctccagattggcggcgcgggacctggcggcctgggcggcggcggaatcgcgcaggatctgctggcgctccagctcggtctgggtgttggatacgtagcgcggatcgcgtttgcggacgaaggcgaccaaggagcgcacggcgtcgttgaactcgcgagcggcgtcgtcgcgcagcttcctgttctccttgtccatcagacggcggaccctgcggtcgggagcgtcggacaggcgccacttgtccttccaggcgaagctcaggcgggtggcgaagttggaccagcgagcgtagaaggccttggcgaggctgtcgg

SEQ ID NO: 19341 - DNA, 1299 bp, Muscodor strobelii
  misc_feature: SGI cDNA ID NO. 566502
  misc_feature: Reduced expression when VOC is produced
  misc_feature: Encodes the peptide sequence at SEQ ID NO 19342
atgcccgctaagtcgcgattcacgaggcttgatgccttcaccaaaaccgtcgaagatgcccgcatacgcaccacctcgggcggcattgtcaccatcgtctccctcatcgtcgtcctctacctggcctggggcgagtggtccgactaccgtaggatcgtcatccaccccgagctcatcgtcgacaagggccgaggcgagcgcatggagatccacatgaatgtgaccttcccaaagctgccctgcgagctgctcaccctcgacgtcatggatgtctccggcgagcagcagcacggcgtgttgcatggtgtcaggaaggtccgcctgcagcccgccaaccagggcggcgccgtcattgacaccactgccctcgcattgcacagcaaggacgagtctgccgctcacctcgacccagactactgcggcggctgctacggtgccccctccccgcccaacgcggtgaagcccggctgctgcaactcgtgcgacgaggtccgcgaggcctacgcccaagcatcttgggcctttggccgcggtgagggcgtggagcagtgccaacgcgagcactacgctgagaagttggacgagcagcgccacgagggctgccgcatcgagggcgacatccgcgtcaacaaggtcgtcggcaacttccacttcgctccgggtcgtagcttcagcaacggcaacatgcacgtccacgacctcaagaactactgggacagccctgtgagacattcgtttgagcaccagatccaccagctgcgcttcggcccgcagctgcctgaggacctgtccagcaagcactcacgcaacacgggctacacgaaccaccacctgaacccgttggacaacagcaagcagcagacggacgaccccaacttcaacttcatgtactttgtcaaggtggtgccgacagcgtacctgccactgagctcgagcgggtcgaagcaggtcatctcggacggcgggctgggcaacctgggcagcgcgttcgacggcagcctggagacgcaccagtactcggtgacgagccacaagcgcagcctagtgggtggcgacgacaaggccgagggccacgaagagcgcacgcatgccaggggcggcatccccggtgtctttttctcctatgacatctcgccgatgaaggtggtcaaccgggaggagcgggccaagacgtttgcgggcttcctgacggggctctgcgcagtgctgggcggtacgctaactgtagcagcagcggtcgacaggggtgtctacgaagggtcgacccggctgaagaaactgcaatccaagaacctgtag

SEQ ID NO: 19342 - protein, 432 aa, Muscodor strobelii
  misc_feature: SGI Peptide ID NO. 566502
  misc_feature (175)..(430): Pfam Id: PF07970 Pfam Desc: Domain of function (DUF1692)
  misc_feature (333)..(430): Pfam Id: PF07970 Pfam Desc: Domain of function (DUF1692)
  misc_feature (175)..(313): Pfam Id: PF07970 Pfam Desc: Domain of function (DUF1692)
  misc_feature (1)..(432): NCBI GI: 171696240 Blast Desc: protein product [Podospora anserina] gi|170948362|emb|CAP60526.1| protein product [Podospora anserina]
  misc_feature (1)..(432): NCBI GI: 256734592 Blast Desc: [Nectria haematococca mpVI 77-13-4]
  misc_feature (1)..(432): NCBI GI: 46105482 Blast Desc: FG00369.1 [Gibberella zeae PH-1]
  misc_feature (1)..(431): NCBI GI: 85115136 Blast Desc: NCU08607 [Neurospora crassa OR74A] gi|28926610|gb|EAA35579.1| NCU08607 [Neurospora crassa OR74A]
  misc_feature (1)..(432): NCBI GI: 116181584 Blast Desc: CHGG_01420 [Chaetomium globosum CBS 148.51] gi|88185717|gb|EAQ93185.1| CHGG_01420 [Chaetomium globosum CBS 148.51]
  misc_feature (1)..(428): NCBI GI: 226282317 Blast Desc: endoplasmic reticulum-Golgi intermediate compartment protein [Paracoccidioides brasiliensis Pb01]
  misc_feature (1)..(427): NCBI GI: 119189667 Blast Desc: CIMG_04881 [Coccidioides immitis RS]
  misc_feature (1)..(427): NCBI GI: 240111155 Blast Desc: CPC735_069900 [Coccidioides posadasii C735 delta SOWgp]
  misc_feature (1)..(428): NCBI GI: 258565913 Blast Desc: conserved [Uncinocarpus reesii 1704] gi|237907402|gb|EEP81803.1| conserved [Uncinocarpus reesii 1704]
  misc_feature (1)..(426): NCBI GI: 189203047 Blast Desc: endoplasmic reticulum-Golgi intermediate compartment protein 3 [Pyrenophora tritici-repentis Pt-1C-BFP] gi|187984958|gb|EDU50446.1| endoplasmic reticulum-Golgi protein 3
  misc_feature: Useful for introducing or modulating the production of volatile compounds
MPAKSRFTRLDAFTKTVEDARIRTTSGGIVTIVSLIVVLYLAWGEWSDYRRIVIHPELIVDKGRGERMEIHMNVTFPKLPCELLTLDVMDVSGEQQHGVLHGVRKVRLQPANQGGAVIDTTALALHSKDESAAHLDPDYCGGCYGAPSPPNAVKPGCCNSCDEVREAYAQASWAFGRGEGVEQCQREHYAEKLDEQRHEGCRIEGDIRVNKVVGNFHFAPGRSFSNGNMHVHDLKNYWDSPVRHSFEHQIHQLRFGPQLPEDLSSKHSRNTGYTNHHLNPLDNSKQQTDDPNFNFMYFVKVVPTAYLPLSSSGSKQVISDGGLGNLGSAFDGSLETHQYSVTSHKRSLVGGDDKAEGHEERTHARGGIPGVFFSYDISPMKVVNREERAKTFAGFLTGLCAVLGGTLTVAAAVDRGVYEGSTRLKKLQSKNL

SEQ ID NO: 19343 - DNA, 4394 bp, Muscodor strobelii
  misc_feature: SGI EST ID NO. CUFF.45454.1
  misc_feature: Variant of the nucleotide sequence at SEQ ID NO 19341
cacagcggcgcacttccgagtgccctcctcaacaaagccagccttgaccaagacacgtgcgctgcctaggtttccctggaaaacgtgggcctcgatgcgcagcaaatcaggaagctggacgaaggcccagcgcacaaaatgggtgagggccgaggtcaagatacctcgcccccaaaagcggcgcacactatagtacccaatctctcgagtgccggcatagacagagtcgccttgaggagcttctagacctaatgagcctgcaaactcaccatccagggtgaagatgccgaactgcatggccgggggtggcagagccttgcagcgtgcgatccaagcctcgccgtcggctagagtgtagggcgagggaaagcgggagcgcatccgcttagcgatctcgggatcgttggcagcggtggccagtgtttgggcatcagagggctctagaggacgcaaatagcacctatctgttgcaaagatcgccgttctgggcacgacgtgcgatgaagcgggaatttcagccatgttgacagctaggccacgcttcacaatacgggaaaggacaaattcaaagcagcaagagaggatagcacacctgacgcgaaaggccaattcacaacgaggctgcgaagctatctacaggtaggtgagatgccttaatacgaaacaatagaaaagttattaatatagtgtaataagcaatactgcgtatttgacgtgtgacagtgatcataccgtagagacagagcgatctacagatatcataatgagtcactcaccgtgcaggcggcgtatcatagctgagagtcgaggaaactgacaacctagtcatatcgagtgtctccgtcaaccgtgtaatacgggatacttgacagtgatgaattggccgccggtggccggtggtgagagacgcaatgccgcccgccgattcactcacccttctcacagccctacctggattgaagtgcggtagtggaatgagacgccttggtacacttacgcacacatctctcctagtatcgggctacgactatagacacacttgattaccaattcaccacgccggcaaccgcataggggcaggcggtcggaaatacaaggggcagaatgcaatgatatgtgtcggcagtgcagtagagggtcggcctcgatggcaacttattggtctaaacaggcgtgagagagcgatacatgtaaggcaacctggctaattttctttgaaccggcagccatccctatctacttggtgcggtatctggctttagcaggtacagtaggaggtaggtagatgaccttatgtatggaaggtgatgggtgggggatgtgggtgagctggaggtagctagtgttgcgccagaccctggcgagaagcggaggactacatactgtaggtactagaggctgggctcgtagcagggtcaattgggacaggtgattggctgagcgagtggaaaagtgaaggtggcctttctggggtggattggaaggcggaacccacgctattctcagaacgacatatgccagatgtgcaacaccattcgtgtttaaccaatgtcaaccacgatcgagagcttcgttccctcactcgcctctcctctgaggtatatcgtccatattataccacgcatgcccattcctctgctcatttgagagccgtctgatccaaagctactctcattcttccactttgtactcttcattcattcctttctatcactcttgccgcggaccacccacgtccccgcgagctcccaggccctctgcgcatatatccgccatctaccatatcccgatgtcgtcgtgctagggctaatcttgctcacctgctcgacataagtctctggtcgcctcacctgtttgtgccgccgccgtcgccctttacttgctttcgccatgcccgctaagtcgcgattcacgaggcttgatgccttcaccaaaaccgtcgaagatgcccgcatacgcaccacctcgggcggcattgtcaccatcgtctccctcatcgtcgtcctctacctggcctggggcgagtggtccgactaccgtaggatcgtcatccaccccgagctcatcgtcgacaagggccgaggcgagcgcatggagatccacatgaatgtgaccttcccaaagctgccctgcgagctgctcaccctcgacgtcatggatgtctccggcgagcagcagcacggcgtgttgcatggtgtcaggaaggtccgcctgcagcccgccaaccagggcggcgccgtcattgacaccactgccctcgcattgcacagcaaggacgagtctgccgctcacctcgacccagactactgcggcggctgctacggtgccccctccccgcccaacgcggtgaagcccggctgctgcaactcgtgcgacgaggtccgcgaggcctacgcccaagcatcttgggcctttggccgcggtgagggcgtggagcagtgccaacgcgagcactacgctgagaagttggacgagcagcgccacgagggctgccgcatcgagggcgacatccgcgtcaacaaggtcgtcggcaacttccacttcgctccgggtcgtagcttcagcaacggcaacatgcacgtccacgacctcaagaactactgggacagccctgtgagacattcgtttgagcaccagatccaccagctgcgcttcggcccgcagctgcctgaggacctgtccagcaagcactcacgcaacacgggctacacgaaccaccacctgaacccgttggacaacagcaagcagcagacggacgaccccaacttcaacttcatgtactttgtcaaggtggtgccgacagcgtacctgccactgagctcgagcgggtcgaagcaggtcatctcggacggcgggctgggcaacctgggcagcgcgttcgacggcagcctggagacgcaccagtactcggtgacgagccacaagcgcagcctagtgggtggcgacgacaaggccgagggccacgaagagcgcacgcatgccaggggcggcatccccggtgtctttttctcctatgacatctcgccgatgaaggtggtcaaccgggaggagcgggccaagacgtttgcgggcttcctgacggggctctgcgcagtgctgggcggtacgctaactgtagcagcagcggtcgacaggggtgtctacgaagggtcgacccggctgaagaaactgcaatccaagaacctgtagccaggtgtgaagagaggtcaggtatgttcagataggagcctgggttcggcttagtcggtgtttcaagcgtgtcgagtgtggcgagcgtggtcgtctgtctcgtggagtgcatttcaatggagttctggattatttgggtcggtcaagggaataaaggcaaaaaaagactacggagtaactacattacttatttgcgtgttgtcgatcgtgaccggagcttgccgtgttaaggcgtgatccgtgccagtgtctgcacacagatatacatataagatcggaaacccatgcgtatggcatcaggtacctacatatgtaggtaacttacatgtgtgcatcgtctttctcatactagctgtctgttgctagatacatgtaccttaggcatatggagtggagggatatctctaagagatgccaccgaggaaagagttggctctgggcacagacgtacaagcaataggtcgctgcctgctacaagattgaccatacttcagcgggccccttatatcattgcattatactcgacttgacgcatgttcgtctatcctttaccagagcggctcgagatgtctgttctggtattccgacaggcgtggcttgtacgacactggtggcgagatggttggattattgttgtagctcgctcgacctgactcggaggcgtgacagactgacgttggtcatgccaagccgcccccctgttgtcgtggacgagggtgggtactaagtacctgtattgtacgagcagtacctgaggtagggtccctggttttacccctttcttccttcagctgcagttgatgaaagctcacaaaacttgaatcatccggggtactgttagtggtctgtggtcccgcctgcggtccctggaatcccatgctcgatcccataacccccagcccaggccaccccaaagcacaccacatcaacaactcagattccgttgttcacgaccgtcactactgcatttgcacccctaggccacatctatccggagccatcataattaatactactttcatacggtccatcagtgttctaccgcctcccgcccagacctcccagaaacccaatccgcagtcggcagtcggcagtcagtagagtgccagcagcttggacctggcggtgcttcatgtccacgtctcccaccacagcggacaaccccgaccttctcggccttgtcgacatccacgtcctcgaccgcg

SEQ ID NO: 19344 - DNA, 591 bp, Muscodor strobelii
  misc_feature: SGI cDNA ID NO. 566503
  misc_feature: Encodes the peptide sequence at SEQ ID NO 19345
atggctgaaattcccgcttcatcgcacgtcgtgcccagaacggcgatctttgcaacagataggtgctatttgcgtcctctagagccctctgatgcccaaacactggccaccgctgccaacgatcccgagatcgctaagcggatgcgctcccgctttccctcgccctacactctagccgacggcgaggcttggatcgcacgctgcaaggctctgccacccccggccatgcagttcggcatcttcaccctggatggtgagtttgcaggctcattaggtctagaagctcctcaaggcgactctgtctatgccggcactcgagagattgggtactatagtgtgcgccgcttttgggggcgaggtatcttgacctcggccctcacccattttgtgcgctgggccttcgtccagcttcctgatttgctgcgcatcgaggcccacgttttccagggaaacctaggcagcgcacgtgtcttggtcaaggctggctttgttgaggagggcactcggaagtgcgccgctgtgaagtacggcgaggtgttggatgaatcattctttggcctcacacggcgggacttggaatcccatccataa

SEQ ID NO: 19345 - protein, 196 aa, Muscodor strobelii
  misc_feature: SGI Peptide ID NO. 566503
  misc_feature (79)..(164): Pfam Id: PF00583 Pfam Desc: Acetyltransferase (GNAT) family
  misc_feature (5)..(194): NCBI GI: 67522328 Blast Desc: AN1621.2 [Aspergillus nidulans FGSC A4] gi|40745585|gb|EAA64741.1| AN1621.2 [Aspergillus nidulans FGSC A4] gi|259486956|tpe|CBF85237.1| TPA: conserved [Aspergillus FGSC
  misc_feature (14)..(185): NCBI GI: 238507439 Blast Desc: conserved [Aspergillus flavus NRRL3357] gi|220689634|gb|EED45985.1| conserved [Aspergillus flavus NRRL3357]
  misc_feature (16)..(181): NCBI GI: 256720764 Blast Desc: NECHADRAFT_49868 [Nectria haematococca mpVI 77-13-4]
  misc_feature (16)..(181): NCBI GI: 261191632 Blast Desc: acetyltransferase [Ajellomyces dermatitidis SLH14081] gi|239589990|gb|EEQ72633.1| acetyltransferase [Ajellomyces dermatitidis SLH14081] gi|239612601|gb|EEQ89588.1| [Ajellomyces
  misc_feature (24)..(192): NCBI GI: 190575638 Blast Desc: acetyltransferase [Stenotrophomonas maltophilia K279a] gi|190013560|emb|CAQ47195.1| acetyltransferase [Stenotrophomonas maltophilia K279a]
  misc_feature (14)..(193): NCBI GI: 256734587 Blast Desc: NECHADRAFT_75014 [Nectria haematococca mpVI 77-13-4]
  misc_feature (22)..(189): NCBI GI: 160934009 Blast Desc: CLOLEP_02871 [Clostridium leptum DSM 753] gi|156866682|gb|EDO60054.1| CLOLEP_02871 [Clostridium leptum DSM 753]
  misc_feature (24)..(195): NCBI GI: 171696238 Blast Desc: protein product [Podospora anserina] gi|170948361|emb|CAP60525.1| protein product [Podospora anserina]
  misc_feature (24)..(189): NCBI GI: 162449408 Blast Desc: acetyltransferase [Sorangium cellulosum 'So ce 56'] gi|161159990|emb|CAN91295.1| acetyltransferase [Sorangium cellulosum 'So ce 56']
  misc_feature (20)..(192): NCBI GI: 194366974 Blast Desc: GCN5-related N-acetyltransferase [Stenotrophomonas maltophilia R551-3] gi|194349778|gb|ACF52901.1| GCN5-related N-acetyltransferase [Stenotrophomonas maltophilia R551-3]
  misc_feature (22)..(175): SWISSPROT Homolog: EC 2.3.1.128 Ribosomal-protein-alanine N-acetyltransferase
MAEIPASSHVVPRTAIFATDRCYLRPLEPSDAQTLATAANDPEIAKRMRSRFPSPYTLADGEAWIARCKALPPPAMQFGIFTLDGEFAGSLGLEAPQGDSVYAGTREIGYYSVRRFWGRGILTSALTHFVRWAFVQLPDLLRIEAHVFQGNLGSARVLVKAGFVEEGTRKCAAVKYGEVLDESFFGLTRRDLESHP

SEQ ID NO: 19346 - DNA, 5223 bp, Muscodor strobelii
  misc_feature: SGI EST ID NO. CUFF.45453.0
  misc_feature: Variant of the nucleotide sequence at SEQ ID NO 19344
cgcggtcgaggacgtggatgtcgacaaggccgagaaggtcggggttgtccgctgtggtgggagacgtggacatgaagcaccgccaggtccaagctgctggcactctactgactgccgactgccgactgcggattgggtttctgggaggtctgggcgggaggcggtagaacactgatggaccgtatgaaagtagtattaattatgatggctccggatagatgtggcctaggggtgcaaatgcagtagtgacggtcgtgaacaacggaatctgagttgttgatgtggtgtgctttggggtggcctgggctgggggttatgggatcgagcatgggattccagggaccgcaggcgggaccacagaccactaacagtaccccggatgattcaagttttgtgagctttcatcaactgcagctgaaggaagaaaggggtaaaaccagggaccctacctcaggtactgctcgtacaatacaggtacttagtacccaccctcgtccacgacaacaggggggcggcttggcatgaccaacgtcagtctgtcacgcctccgagtcaggtcgagcgagctacaacaataatccaaccatctcgccaccagtgtcgtacaagccacgcctgtcggaataccagaacagacatctcgagccgctctggtaaaggatagacgaacatgcgtcaagtcgagtataatgcaatgatataaggggcccgctgaagtatggtcaatcttgtagcaggcagcgacctattgcttgtacgtctgtgcccagagccaactctttcctcggtggcatctcttagagatatccctccactccatatgcctaaggtacatgtatctagcaacagacagctagtatgagaaagacgatgcacacatgtaagttacctacatatgtaggtacctgatgccatacgcatgggtttccgatcttatatgtatatctgtgtgcagacactggcacggatcacgccttaacacggcaagctccggtcacgatcgacaacacgcaaataagtaatgtagttactccgtagtctttttttgcctttattcccttgaccgacccaaataatccagaactccattgaaatgcactccacgagacagacgaccacgctcgccacactcgacacgcttgaaacaccgactaagccgaacccaggctcctatctgaacatacctgacctctcttcacacctggctacaggttcttggattgcagtttcttcagccgggtcgacccttcgtagacacccctgtcgaccgctgctgctacagttagcgtaccgcccagcactgcgcagagccccgtcaggaagcccgcaaacgtcttggcccgctcctcccggttgaccaccttcatcggcgagatgtcctgggccgtcccgttagcattcgtctctacgccgccgcattgccacccacgccgccactcacggcgccacttgcactgtcacgtgctctcgcgcgctcgcggctgggaaacaagaaaggggacgagaatggtccatctcagtactcacataggagaaaaagacaccggggatgccgcccctggcatgcgtgcgctcttcgtggccctcggccttgtcgtcgccacccactaggctgcgcttgtggctcgtcaccgagtactggtgcgtctccaggctgccgtcgaacgcgctgcccaggttgcccagcccgccgtccgagatgacctgcttcgacccgctcgagctcagtggcaggtacgctgtcggcaccaccttgacaaagtacatgaagttgaagttggggtcgtccgtctgctgcttgctgttgtccaacgggttcaggtggtggttcgtgtagcccgtgttgcgtgagtgcttgctggacaggtcctcaggcagctgcgggccgaagcgcagctggtggatctggtgctcaaacgaatgtctcacagggctgtcccagtagttcttgaggtcgtggacgtgcatgttgccgttgctgaagctacgacccggagcgaagtggaagttgccgacgaccttgttgacgcggatgtcgccctcgatgcggcagccctcgtggcgctgctcgtccaacttctcagcgtagtgctcgcgttggcactgctccacgccctcaccgcggccaaaggcccaagatgcttgggcgtaggcctcgcggacctcgtcgcacgagttgcagcagccgggcttcaccgcgttgggcggggagggggcaccgtagcagccgccgcagtagtctgggtcgaggtgagcggcagactcgtccttgctgtgcaatgcgagggcagtggtgtcaatgacggcgccgccctggttggcgggctgcaggcggaccttcctgacaccatgcaacacgccgtgctgctgctcgccggagacatccatgacgtcgagggtgagcagctcgcagggcagctttgggaaggtcacattcatgtggatctccatgcgctcgcctcggcccttgtcgacgatgagctcggggtggatgacgatcctacggtagtcggaccactcgccccaggccaggtagaggacgacgatgagggagacgatggtgacaatgccgcccgaggtggtgcgtatgcgggcatcttcgacggttttggtgaaggcatcaagcctcgtgaatcgcgacttagcgggcatggcgaaagcaagtaaagggcgacggcggcggcacaaacaggtgaggcgaccagagacttatgtcgagcaggtgagcaagattagccctagcacgacgacatcgggatatggtagatggcggatatatgcgcagagggcctgggagctcgcggggacgtgggtggtccgcggcaagagtgatagaaaggaatgaatgaagagtacaaagtggaagaatgagagtagctttggatcagacggctctcaaatgagcagaggaatgggcatgcgtggtataatatggacgatatacctcagaggagaggcgagtgagggaacgaagctctcgatcgtggttgacattggttaaacacgaatggtgttgcacatctggcatatgtcgttctgagaatagcgtgggttccgccttccaatccaccccagaaaggccaccttcacttttccactcgctcagccaatcacctgtcccaattgaccctgctacgagcccagcctctagtacctacagtatgtagtcctccgcttctcgccagggtctggcgcaacactagctacctccagctcacccacatcccccacccatcaccttccatacataaggtcatctacctacctcctactgtacctgctaaagccagataccgcaccaagtagatagggatggctgccggttcaaagaaaattagccaggttgccttacatgtatcgctctctcacgcctgtttagaccaataagttgccatcgaggccgaccctctactgcactgccgacacatatcattgcattctgccccttgtatttccgaccgcctgcccctatgcggttgccggcgtggtgaattggtaatcaagtgtgtctatagtcgtagcccgatactaggagagatgtgtgcgtaagtgtaccaaggcgtctcattccactaccgcacttcaatccaggtagggctgtgagaagggtgagtgaatcggcgggcggcattgcgtctctcaccaccggccaccggcggccaattcatcactgtcaagtatcccgtattacacggttgacggagacactcgatatgactaggttgtcagtttcctcgactctcagctatgatacgccgcctgcacggtgagtgactcattatgatatctgtagatcgctctgtctctacggtatgatcactgtcacacgtcaaatacgcagtattgcttattacactatattaataacttttctattgtttcgtattaaggcatctcacctacctgtagatagcttcgcagcctcgttgtgaattggcctttcgcgtcaggtgtgctatcctctcttgctgctttgaatttgtcctttcccgtattgtgaagcgtggcctagctgtcaacatggctgaaattcccgcttcatcgcacgtcgtgcccagaacggcgatctttgcaacagataggtgctatttgcgtcctctagagccctctgatgcccaaacactggccaccgctgccaacgatcccgagatcgctaagcggatgcgctcccgctttccctcgccctacactctagccgacggcgaggcttggatcgcacgctgcaaggctctgccacccccggccatgcagttcggcatcttcaccctggatggtgagtttgcaggctcattaggtctagaagctcctcaaggcgactctgtctatgccggcactcgagagattgggtactatagtgtgcgccgcttttgggggcgaggtatcttgacctcggccctcacccattttgtgcgctgggccttcgtccagcttcctgatttgctgcgcatcgaggcccacgttttccagggaaacctaggcagcgcacgtgtcttggtcaaggctggctttgttgaggagggcactcggaagtgcgccgctgtgaagtacggcgaggtgttggatgaatcattctttggcctcacacggcgggacttggaatcccatccataagttttggtagggtgcttctctttgggaattagtccggaagccctgcatcctattcgtctccggagactagtgatgagtacatcacaggataggcaaatcagccgacaagagggctttaatttatttgggttgtggtctgtatcttttatttggtcctcatagccagtcgtgggcttgaacaatgttagaatatgttttgacggctaagtcttcgagaagcgcgccgggcttcccaattcaggagattgcgagggttgccatgtgcctcagccgaggacttgcaccttatcatctctgaccacctctcggaagagaccttacctatactcaaccggcctttacaaaagctcggtgtaaattggctcacagtgtatcatgatatatccaagtcctacattgtgttttgggtcttggaaacaaccaggatacggcgaggcagtgaacatcaacaacatggttttgcacaagacacaatggtttgttcttggtatgatctatagatttaacttcaagtgcagtaggttcatcgtgtaatgatcctcagaacgcggtattgtctgctctgatgttgttggttttgtggtataaactgcgttatggagtgaagtatta

SEQ ID NO: 19347 - DNA, 750 bp, Muscodor strobelii
  misc_feature: SGI cDNA ID NO. 566504
  misc_feature: Encodes the peptide sequence at SEQ ID NO 19348
atgcctggcttcgacttctccaactacaaccgcaatgccgccctgcatgcccgcggggttcctctgcccaaggccaccagcaccggtaccaccatcgtaggctgcatctacgacggcggcgtcgtcatcgccgccgacacgcatctggtgcgccggcgccggcaccgccgccgacaccgagttcaccacggccctcatccctcccagctcgagctgcacgccctctccaccggccgcaagccccgcgtcgtcacctgcatgaccctgctcaagcagcacctcttccgctaccagggccacatcggcgcctacctcgtcgtcgccggcgtcgaccccaccggcacccacctcttcaccgtccacgcccacggcagcaccgacaagctgccctacgtcaccatgggctccggctctctcgccgccatgtccgtcttcgagtcccagtggaagcccaagtgcactaaggacgacgccatgcacctctgctcccaggccatccaggccggcatcttcaacgacctcggctccggctccaacgtcgacatggccgtcatcaccccggacaagaccactctgcaccgcggctacgtcaagcccaacgagcgctcccagaagctcaagaactacaagttcaagcccggcaccaccgccgtcctcaacgagaagatcatcaccaagcacgacatcggcaagtacgtcagcgtccacgacctcgaggccgacgacgagaagatggatgtcgactcttga

SEQ ID NO: 19348 - protein, 249 aa, Muscodor strobelii
  misc_feature: SGI Peptide ID NO. 566504
  misc_feature (26)..(185): Pfam Id: PF00227 Pfam Desc: Proteasome A-type and B-type
  misc_feature (68)..(185): Pfam Id: PF00227 Pfam Desc: Proteasome A-type and B-type
  misc_feature (1)..(249): NCBI GI: 85111648 Blast Desc: proteasome subunit beta type 7 precursor [Neurospora crassa OR74A] gi|28925797|gb|EAA34801.1| proteasome subunit beta type 7 precursor [Neurospora crassa OR74A]
  misc_feature (1)..(249): NCBI GI: 116181580 Blast Desc: proteasome subunit beta type 7 precursor [Chaetomium globosum CBS 148.51] gi|88185715|gb|EAQ93183.1| proteasome subunit beta type 7 precursor [Chaetomium globosum CBS 148.51]
  misc_feature (1)..(249): NCBI GI: 156030953 Blast Desc: conserved [Sclerotinia sclerotiorum 1980] gi|154700648|gb|EDO00387.1| conserved [Sclerotinia sclerotiorum 1980]
  misc_feature (1)..(249): NCBI GI: 171696250 Blast Desc: protein product [Podospora anserina] gi|170948367|emb|CAP60531.1| protein product [Podospora anserina]
  misc_feature (1)..(249): NCBI GI: 256735319 Blast Desc: [Nectria haematococca mpVI 77-13-4]
  misc_feature (1)..(249): NCBI GI: 154297630 Blast Desc: conserved [Botryotinia fuckeliana B05.10] gi|150858483|gb|EDN33675.1| conserved [Botryotinia fuckeliana B05.10]
  misc_feature (1)..(249): NCBI GI: 39945094 Blast Desc: conserved [Magnaporthe grisea 70-15] gi|145021494|gb|EDK05623.1| conserved [Magnaporthe grisea 70-15]
  misc_feature (1)..(249): NCBI GI: 169622693 Blast Desc: SNOG_14573 [Phaeosphaeria nodorum SN15] gi|160704831|gb|EAT78113.2| SNOG_14573 [Phaeosphaeria nodorum SN15]
  misc_feature (1)..(249): NCBI GI: 258574641 Blast Desc: proteasome component PUP1 [Uncinocarpus reesii 1704] gi|237901768|gb|EEP76169.1| proteasome component PUP1 [Uncinocarpus reesii 1704]
  misc_feature (1)..(249): NCBI GI: 261195200 Blast Desc: proteasome component Pup1 [Ajellomyces dermatitidis SLH14081] gi|239587876|gb|EEQ70519.1| proteasome component Pup1 [Ajellomyces dermatitidis SLH14081] gi|239610635|gb|EEQ87622.1|
  misc_feature (3)..(247): SWISSPROT Homolog: EC 3.4.25.1 Proteasome endopeptidase complex
MPGFDFSNYNRNAALHARGVPLPKATSTGTTIVGCIYDGGVVIAADTHLVRRRRHRRRHRVHHGPHPSQLELHALSTGRKPRVVTCMTLLKQHLFRYQGHIGAYLVVAGVDPTGTHLFTVHAHGSTDKLPYVTMGSGSLAAMSVFESQWKPKCTKDDAMHLCSQAIQAGIFNDLGSGSNVDMAVITPDKTTLHRGYVKPNERSQKLKNYKFKPGTTAVLNEKIITKHDIGKYVSVHDLEADDEKMDVDS

SEQ ID NO: 19349 - DNA, 1894 bp, Muscodor strobelii
  misc_feature: SGI EST ID NO. CUFF.45348.1
  misc_feature: Variant of the nucleotide sequence at SEQ ID NO 19347
cgggtctccacctctcagatccagtcgattggggctgaaccgggagccgtgacattgaacctactccagcaaggcagctagctgtccgtcgtaagctccgtcttagtaggtacctgtctatcctgccgctcgacgacgctgcaggagcacaactcgacaccgacaccaacaccaacgacaactacgacacccgcgacacctgcgatactccgtccactctacctcttgcccagtgcctcgtccatcgccatcgtctgcggccctgcttctctcgtctttagagccaggttctctacagcactctccgccgcttgctgcgacccccgccaacccgtctcgttcaacatatccatacccaacccgtccgcctcacatatcacacagcgccgccgccgccgccgtgccgtgccagccagcatgcctggcttcgacttctccaactacaaccgcaatgccgccctgcatgcccgcggggttcctctgcccaaggccaccagcaccggtaccaccatcgtaggctgcatctacgacggcggcgtcgtcatcgccgccgacacgcgtgccaccagcggccccatcgtcgccgacaagaactgcgagaagcttcactacatctccccccagatctggtgcgccggcgccggcaccgccgccgacaccgagttcaccacggccctcatccctcccagctcgagctgcacgccctctccaccggccgcaagccccgcgtcgtcacctgcatgaccctgctcaagcagcacctcttccgctaccagggccacatcggcgcctacctcgtcgtcgccggcgtcgaccccaccggcacccacctcttcaccgtccacgcccacggcagcaccgacaagctgccctacgtcaccatgggctccggctctctcgccgccatgtccgtcttcgagtcccagtggaagcccaagtgcactaaggacgacgccatgcacctctgctcccaggccatccaggccggcatcttcaacgacctcggctccggctccaacgtcgacatggccgtcatcaccccggacaagaccactctgcaccgcggctacgtcaagcccaacgagcgctcccagaagctcaagaactacaagttcaagcccggcaccaccgccgtcctcaacgagaagatcatcaccaagcacgacatcggcaagtacgtcagcgtccacgacctcgaggccgacgacgagaagatggatgtcgactcttgacccacgcgagaccgtggcctgttgtatcattagatggtgtgcagtagaataagagagctcaacccgcctgcccggccatagacatggtacccgttgccagtttccacgaggtgactgataacgcaacacttagtaaagctcatgaccaatccctgctagttaggatcatatgctgcgtcaggggtggaggtaatccttcatagttgtcaagggaattgggtcttccttcgttgcagagatcgatagtcgatagaccgcagtatcgtattacccagtatgatctcaaaatggattgtaagacgaatccgctctatcaagagtcgagtgactacaatgtagtgtttcgattgcttagttaaaatggacgcagaattcgtgatgtgagaggacggagataactcaattgcttgcgtggttaatactatgactggactgccaatgtcataggacagcgacttcaaacacgcatttatggtttgatcatccacgtcaatctcggatgaaatgctctttcccagctactccctagacttgatctcgccctgagtatcgccgttcttaagtcatctaaagttatattagtcaattaagtcccttttataccataacagcgttctgttgtgttgatggagcttttcaaatagatataggagataacgtta

SEQ ID NO: 19350 - DNA, 371 bp, Muscodor strobelii
  misc_feature: SGI cDNA ID NO. 566505
  misc_feature: Reduced expression when VOC is produced
  misc_feature: Encodes the peptide sequence at SEQ ID NO 19351
atgtcgctaccctcgtctaacggccatgccaacgccaacgccaacgggcagcagcagtcgtcgatccgcagcttcttccgcccgaagcagccgacctacgccccccctccgccgtcctcgacgacagcgacagcgacaacgacgacgatagcaaccctgctgcacccgcaggccaccatcgcgcgcatccgggccgagcacatccccgcgctgcggcgcatcacgtcgctgctgctgcccgtcaactaccccgactccttctacgcccgcctcgacgaccccgtctcctcgggcgccttcagccgcgtcgtgctgtggcgtgacgacgacgacgccaacgccagcgaaaaggtcgtcggcggcctcgtctg

SEQ ID NO: 19351 - protein, 123 aa, Muscodor strobelii
  misc_feature: SGI Peptide ID NO. 566505
  misc_feature (18)..(123): NCBI GI: 116192961 Blast Desc: CHGG_06198 [Chaetomium globosum CBS 148.51] gi|88182111|gb|EAQ89579.1| CHGG_06198 [Chaetomium globosum CBS 148.51]
  misc_feature (1)..(123): NCBI GI: 46128795 Blast Desc: FG08775.1 [Gibberella zeae PH-1]
  misc_feature (18)..(123): NCBI GI: 171684009 Blast Desc: protein product [Podospora anserina] gi|170941965|emb|CAP67617.1| protein product [Podospora anserina]
  misc_feature (1)..(123): NCBI GI: 256733512 Blast Desc: NECHADRAFT_36175 [Nectria haematococca mpVI 77-13-4]
  misc_feature (57)..(123): NCBI GI: 85114651 Blast Desc: NCU00576 [Neurospora crassa OR74A] gi|28926529|gb|EAA35501.1| NCU00576 [Neurospora crassa OR74A] gi|38567330|emb|CAE76618.1| [Neurospora crassa]
  misc_feature (51)..(123): NCBI GI: 39971053 Blast Desc: MGG_02993 [Magnaporthe grisea 70-15] gi|145017167|gb|EDK01530.1| MGG_02993 [Magnaporthe grisea 70-15]
  misc_feature (51)..(123): NCBI GI: 149210605 Blast Desc: MGCH7_ch7g775 [Magnaporthe grisea 70-15] gi|86196730|gb|EAQ71368.1| MGCH7_ch7g775 [Magnaporthe grisea 70-15]
  misc_feature (18)..(123): NCBI GI: 156031128 Blast Desc: SS1G_14172 [Sclerotinia sclerotiorum 1980] gi|154700563|gb|EDO00302.1| SS1G_14172 [Sclerotinia sclerotiorum 1980]
  misc_feature (1)..(122): NCBI GI: 226279550 Blast Desc: conserved [Paracoccidioides brasiliensis Pb01]
  misc_feature (27)..(122): NCBI GI: 255950942 Blast Desc: Pc22g23470 [Penicillium chrysogenum Wisconsin 54-1255] gi|211593255|emb|CAP99635.1| Pc22g23470 [Penicillium chrysogenum Wisconsin 54-1255]
  misc_feature: Useful for introducing or modulating the production of volatile compounds
MSLPSSNGHANANANGQQQSSIRSFFRPKQPTYAPPPPSSTTATATTTTIATLLHPQATIARIRAEHIPALRRITSLLLPVNYPDSFYARLDDPVSSGAFSRVVLWRDDDDANASEKVVGGLV

SEQ ID NO: 19352 - DNA, 685 bp, Muscodor strobelii
  misc_feature: SGI EST ID NO. CUFF.45173.0
  misc_feature: Variant of the nucleotide sequence at SEQ ID NO 19350
gctgggcaggccactgtcgaaataaatgacacgattacctttgcctgctctcagtcgcactatcatcaatcaattctgttaccgtgtcgaatgatcagatcaaacattgttcgttgtgttacttagtagctaaggtactattgtacccgttgcggcattcggtggtgcgcgtctgttttcaggattgcgtcgaaagagagcacgacttggtcccgccgggaactctcgtcacgtttcctcatccctcgcagttgcacacaacaaggcgtgctgggcgatatatgcggccgaaacctccagcatccagccttcagccatgtcgctaccctcgtctaacggccatgccaacgccaacgccaacgggcagcagcagtcgtcgatccgcagcttcttccgcccgaagcagccgacctacgccccccctccgccgtcctcgacgacagcgacagcgacaacgacgacgatagcaaccctgctgcacccgcaggccaccatcgcgcgcatccgggccgagcacatccccgcgctgcggcgcatcacgtcgctgctgctgcccgtcaactaccccgactccttctacgcccgcctcgacgaccccgtctcctcgggcgccttcagccgcgtcgtgctgtggcgtgacgacgacgacgccaacgccagcgaaaaggtcgtcggcggcctcgtc

SEQ ID NO: 19353 - DNA, 497 bp, Muscodor strobelii
  misc_feature: SGI cDNA ID NO. 566506
  misc_feature: Encodes the peptide sequence at SEQ ID NO 19354
atggcctatccgacgacgggcaaggcaggggtcatcaaggctgctgacgatgccgggagcatggacaagcttacgcactcggtgctggacgacctgctgtacaacatcgtccacgacctgctgatcaaggtgcaccgcgacgagaagatcgcgcgggcggcgacggcggcgatccgcgtcgagaagctggcccacgacaactcggactcgtcgacgctcgacgcccgccccgacatcaaggtcgagaccgacgccgccgtatacgacgacggcaaggtgctgctgaagggcaacccgctgcagaccaccaaggacatcaagcggccctacatcgacaagcccggctacgacatctacggccagacctgggtcgcccaggggcccggccgcggcaagaagaagaaggacatggagaagaaggtcgaccccaacacgcccaccgactcgcccggcatgacgcccacccccgacggcgccgcccccgccacatctggcac

SEQ ID NO: 19354 - protein, 165 aa, Muscodor strobelii
  misc_feature: SGI Peptide ID NO. 566506
  misc_feature (6)..(150): NCBI GI: 256734018 Blast Desc: NECHADRAFT_35320 [Nectria haematococca mpVI 77-13-4]
  misc_feature (6)..(150): NCBI GI: 46128797 Blast Desc: FG08776.1 [Gibberella zeae PH-1]
  misc_feature (6)..(146): NCBI GI: 171684007 Blast Desc: protein product [Podospora anserina] gi|170941964|emb|CAP67616.1| protein product [Podospora anserina]
  misc_feature (6)..(146): NCBI GI: 85114656 Blast Desc: NCU00577 [Neurospora crassa OR74A] gi|28926530|gb|EAA35502.1| conserved [Neurospora crassa OR74A] gi|38567329|emb|CAE76617.1| [Neurospora crassa]
  misc_feature (3)..(131): NCBI GI: 149210609 Blast Desc: MGCH7_ch7g777 [Magnaporthe grisea 70-15] gi|86196732|gb|EAQ71370.1| MGCH7_ch7g777 [Magnaporthe grisea 70-15]
  misc_feature (9)..(137): NCBI GI: 154305713 Blast Desc: BC1G_07671 [Botryotinia fuckeliana B05.10] gi|150853190|gb|EDN28382.1| BC1G_07671 [Botryotinia fuckeliana B05.10]
  misc_feature (9)..(137): NCBI GI: 156031126 Blast Desc: SS1G_14171 [Sclerotinia sclerotiorum 1980] gi|154700562|gb|EDO00301.1| SS1G_14171 [Sclerotinia sclerotiorum 1980]
  misc_feature (56)..(147): NCBI GI: 116192963 Blast Desc: CHGG_06199 [Chaetomium globosum CBS 148.51] gi|88182112|gb|EAQ89580.1| CHGG_06199 [Chaetomium globosum CBS 148.51]
  misc_feature (50)..(131): NCBI GI: 145609764 Blast Desc: MGG_02996 [Magnaporthe grisea 70-15] gi|145017161|gb|EDK01524.1| MGG_02996 [Magnaporthe grisea 70-15]
  misc_feature (1)..(159): NCBI GI: 258572454 Blast Desc: [Uncinocarpus reesii 1704] gi|237905259|gb|EEP79660.1| [Uncinocarpus reesii 1704]
MAYPTTGKAGVIKAADDAGSMDKLTHSVLDDLLYNIVHDLLIKVHRDEKIARAATAAIRVEKLAHDNSDSSTLDARPDIKVETDAAVYDDGKVLLKGNPLQTTKDIKRPYIDKPGYDIYGQTWVAQGPGRGKKKKDMEKKVDPNTPTDSPGMTPTPDGAAPATSG

SEQ ID NO: 19355 - DNA, 1266 bp, Muscodor strobelii
  misc_feature: SGI EST ID NO. CUFF.45194.1
  misc_feature: Variant of the nucleotide sequence at SEQ ID NO 19353
agataccttaggtacctaggtaggtaggttaggtaccttaggtaggctgcatccactacaatcatccactggcgggcgtcgctagcacctagcatcaggggcactccagccttgcctccacaagtgatactgctgggtcccctgttgatccatctttcatcatcgctgtacagtctaacctgctgtcaattcatgtcgccttgtctgcctctcgcactacccaagtgtcaagctctgcatctggcagcaaggaaaaggaggctgcattgaacgctgggggtgttgctgtctgtgtgccgtctgtgttgcacatccaggatctcgacatcgtctgcgtcgggcgcaggccatcccagcatcgtcgtcagggaagaaaaaaaaaaagaaggaagattgacgtttgtgattatcaatagcaatcttgttgttcacttctacccttttactctgcctcgctgtcacccatcatccccatcacacctcatcaccccaaatctccattttccattctcccttttcccttttcccgttgggtgacatctctctctcgctcttgctcctgcctctcctacgctattcaagccatctccccgtcccatagtcagcatcatcgtcgtcgtcatcatcatcgatcccccgtaccgtcacaggctgtcgctggccctctccgcctggccgccaccatggcctatccgacgacgggcaaggcaggggtcatcaaggctgctgacgatgccgggagcatggacaagcttacgcactcggtgctggacgacctgctgtacaacatcgtccacgacctgctgatcaaggtgcaccgcgacgagaagatcgcgcgggcggcgacggcggcgatccgcgtcgagaagctggcccacgacaactcggactcgtcgacgctcgacgcccgccccgacatcaaggtcgagaccgacgccgccgtatacgacgacggcaaggtgctgctgaagggcaacccgctgcagaccaccaaggacatcgtctgccccatctgccacctgccgcgcctgctctaccccaccgacggccgcggcgcccgcaagccgaccccagcgtcatctactgcaagaagcggccctacatcgacaagcccggctacgacatctacggccagacctgggtcgcccaggggcccggccgcggcaagaagaagaaggacatggagaagaaggtcgaccccaacacgcccaccgactcgcccggcatgacgcccacccccgacggcgccgcccccgccacatctgg

SEQ ID NO: 19356 - DNA, 357 bp, Muscodor strobelii
  misc_feature: SGI cDNA ID NO. 566507
  misc_feature: Reduced expression when VOC is produced
  misc_feature: Encodes the peptide sequence at SEQ ID NO 19357
atggtcccgctggccacgctggccatggccgccagcatcctgtcggcctcgaatctggcgtacgggctctccaccgccgacatcccctccgacaccccgatctcgtcgctcctgtcgtccgcgcagtcgcatctggccaggggcgagaccaccgaggcgctcatctactacgacgccgccatcgctcgcgacccctccgactacctgaccttcttcaagcgcgccaccacctacctctcgctcggccgcgccccgcaggccacctccgacttcaaccgcgtcctcgagctcaagcccggcttcgagggcgcccacctgcagctcggccgcctcaaggccaaggccgccgactgggcc

SEQ ID NO: 19357 - protein, 119 aa, Muscodor strobelii
  misc_feature: SGI Peptide ID NO. 566507
  misc_feature (1)..(118): NCBI GI: 189091788 Blast Desc: [Podospora anserina] gi|188219247|emb|CAP49227.1| protein product [Podospora anserina]
  misc_feature (1)..(118): NCBI GI: 27803004 Blast Desc: protein product [Podospora anserina]
  misc_feature (22)..(118): NCBI GI: 85092996 Blast Desc: NCU02424 [Neurospora crassa OR74A] gi|28921050|gb|EAA30370.1| NCU02424 [Neurospora crassa OR74A]
  misc_feature (2)..(118): NCBI GI: 261361149 Blast Desc: DnaJ and TPR domain-containing protein [Verticillium albo-atrum VaMs.102]
  misc_feature (20)..(118): NCBI GI: 46136665 Blast Desc: FG09848.1 [Gibberella zeae PH-1]
  misc_feature (1)..(118): NCBI GI: 39942970 Blast Desc: MGG_03565 [Magnaporthe grisea 70-15] gi|145009872|gb|EDJ94528.1| MGG_03565 [Magnaporthe grisea 70-15]
  misc_feature (24)..(118): NCBI GI: 256732870 Blast Desc: NECHADRAFT_78614 [Nectria haematococca mpVI 77-13-4]
  misc_feature (2)..(118): NCBI GI: 156042368 Blast Desc: SS1G_10981 [Sclerotinia sclerotiorum 1980] gi|154695368|gb|EDN95106.1| SS1G_10981 [Sclerotinia sclerotiorum 1980]
  misc_feature (2)..(118): NCBI GI: 154300308 Blast Desc: BC1G_11343 [Botryotinia fuckeliana B05.10] gi|150856666|gb|EDN31858.1| BC1G_11343 [Botryotinia fuckeliana B05.10]
  misc_feature (1)..(119): NCBI GI: 226294429 Blast Desc: DnaJ and TPR domain-containing protein [Paracoccidioides brasiliensis Pb18]
  misc_feature: Useful for introducing or modulating the production of volatile compounds
MVPLATLAMAASILSASNLAYGLSTADIPSDTPISSLLSSAQSHLARGETTEALIYYDAAIARDPSDYLTFFKRATTYLSLGRAPQATSDFNRVLELKPGFEGAHLQLGRLKAKAADWA

SEQ ID NO: 19358 - DNA, 1244 bp, Muscodor strobelii
  misc_feature: SGI EST ID NO. CUFF.45179.0
  misc_feature: Variant of the nucleotide sequence at SEQ ID NO 19356
ggcggcgggcgcctcttggtgggcaggtgggcgtacttggcgcgcagccagccgtcgatgtaggcccagtctttggccgtcgacgcggcggcgcgggcgaccgacggcgagaagatggcgtcgtggggcgccagacgggacatggccggtttggatagggtatatcgtatatacctatgtacgtgtgcacgtgtgcgggagaagctggcgttgttttgctcagtgccgtcttgggttcttttcccctgtcgaccttgtctaaggtacaatttggagatttggagacaggacgacagttatccgacttatgttgacaaccccacccccgttagctgtggggagatctggacccacgtgcagctaccctgcaacggagcctgcatggatgtggattatcagtagtggccagctggtcaatactacaagcatctggggcgacattcagcagactatgctacgcagcgactttgcatttctacgcctaccccacgtactgagcatgtactcagctatctaccgacccttgtctcgtctagagaacacttgttccctcggccctttcccagaggctctacttcttgctcccgccttcactccattccattcgccctatttattcaacaatagaggacatccttctttggacaccgttgtcgtcctgtcgtctgaagcgacgccgtggcagcttgtctcttctctcgtctgcgcagccccattgtccccttgcgatctttcctcgaccttctattgtttatttcaccatcacgactagcacttcctcccatgtcgctctagataacccccccttactcgccgcatacctgtcgcatctctgcgtcgtcgcatttctgccatctgtcatagacctgacgacgttatctgccatgatggtcccgctggccacgctggccatggccgccagcatcctgtcggcctcgaatctggcgtacgggctctccaccgccgacatcccctccgacaccccgatctcgtcgctcctgtcgtccgcgcagtcgcatctggccaggggcgagaccaccgaggcgctcatctactacgacgccgccatcgctcgcgacccctccgactacctgaccttcttcaagcgcgccaccacctacctctcgctcggccgcgccccgcaggccacctccgacttcaaccgcgtcctcgagctcaagcccggcttcgagggcgcccacctgcagctcggccgcctcaaggccaaggccgccgactgggcc

SEQ ID NO: 19359 - DNA, 372 bp, Muscodor strobelii
  misc_feature: SGI cDNA ID NO. 566508
  misc_feature: Encodes the peptide sequence at SEQ ID NO 19360
atgtctgccgccccgtccgtcaaggcaccggccctgccgcccaaccagaccctttacatcaccaacctgccctcctccaagatcaacaaggccgacctcaagaccgccctctatctcctcttctccacctacggccccgtcctcgacgtcgtcgccctcaagaccaccaagatgcgcggccaggcccacgtcgtcttccgcgacacccacgctgccacccaggccatgcgctccctcaacgccttcagctttctcggcagagacctcgtcatacagtatgccaagaccaagtccgacatcgtcgccaagcttgacggcacttacaagctggccggccccggtggtgctgcggccaacgtcgagatgaccgag

SEQ ID NO: 19360 - protein, 124 aa, Muscodor strobelii
  misc_feature: SGI Peptide ID NO. 566508
  misc_feature (18)..(91): Pfam Id: PF00076 Pfam Desc: RNA recognition motif. (a.k.a. RRM, RBD, or RNP domain)
  misc_feature (8)..(124): NCBI GI: 256735200 Blast Desc: NECHADRAFT_90073 [Nectria haematococca mpVI 77-13-4]
  misc_feature (8)..(124): NCBI GI: 116181854 Blast Desc: CHGG_01555 [Chaetomium globosum CBS 148.51] gi|88185852|gb|EAQ93320.1| CHGG_01555 [Chaetomium globosum CBS 148.51]
  misc_feature (3)..(124): NCBI GI: 39944738 Blast Desc: MGG_04351 [Magnaporthe grisea 70-15] gi|145021614|gb|EDK05743.1| MGG_04351 [Magnaporthe grisea 70-15]
  misc_feature (13)..(107): NCBI GI: 85112108 Blast Desc: NCU02780 [Neurospora crassa OR74A] gi|28926050|gb|EAA35039.1| conserved [Neurospora crassa OR74A]
  misc_feature (8)..(124): NCBI GI: 171696032 Blast Desc: protein product [Podospora anserina] gi|170948258|emb|CAP60422.1| protein product [Podospora anserina]
  misc_feature (14)..(113): NCBI GI: 189205583 Blast Desc: U2 small nuclear ribonucleoprotein B [Pyrenophora tritici-repentis Pt-1C-BFP] gi|187975219|gb|EDU41845.1| U2 small nuclear ribonucleoprotein B [Pyrenophora tritici-repentis
  misc_feature (14)..(110): NCBI GI: 169601282 Blast Desc: SNOG_03502 [Phaeosphaeria nodorum SN15] gi|111067587|gb|EAT88707.1| SNOG_03502 [Phaeosphaeria nodorum SN15]
  misc_feature (14)..(108): NCBI GI: 242786438 Blast Desc: U1 small nuclear ribonucleoprotein A, [Talaromyces stipitatus ATCC 10500] gi|218720952|gb|EED20371.1| U1 small nuclear ribonucleoprotein A, [Talaromyces stipitatus ATCC 10500]
  misc_feature (14)..(108): NCBI GI: 154278922 Blast Desc: conserved [Ajellomyces capsulatus NAm1] gi|150412217|gb|EDN07604.1| conserved [Ajellomyces capsulatus NAm1]
  misc_feature (14)..(108): NCBI GI: 225554392 Blast Desc: RNA binding domain-containing protein [Ajellomyces capsulatus G186AR]
MSAAPSVKAPALPPNQTLYITNLPSSKINKADLKTALYLLFSTYGPVLDVVALKTTKMRGQAHVVFRDTHAATQAMRSLNAFSFLGRDLVIQYAKTKSDIVAKLDGTYKLAGPGGAAANVEMTE

SEQ ID NO: 19361 - DNA, 762 bp, Muscodor strobelii
  misc_feature: SGI EST ID NO. CUFF.45210.0
  misc_feature: Variant of the nucleotide sequence at SEQ ID NO 19359
aatgcattcgctctctttgacgcatatatctgctttgcagctttaatcaacggattcaatgtcaatgttgcccctacctcatgtacccaccttctaaggttagataggtacatgcacagggcggaacctagctctcaaagcccacctcaaaacaagcaggtaggtcgaatcgcactctctccacaaaccataggctgtgttgcgtcgaccttcttcaacctcgtcgacccccggcatcctcaaccaccgtcgcccacgcagtcaagagagagcacgcacaacctgctttcatttccctttcatttcccgccgccatgtctgccgccccgtccgtcaaggcaccggccctgccgcccaaccagaccctttacatcaccaacctgccctcctccaagatcaacaaggccgacctcaagaccgccctctatctcctcttctccacctacggccccgtcctcgacgtcgtcgccctcaagaccaccaagatgcgcggccaggcccacgtcgtcttccgcgacacccacgctgccacccaggccatgcgctccctcaacgccttcagctttctcggcagagacctcgtaagttgttcgctcccccgataaaccccctgtgatggccccgatctgacgattcttttcttctccgcgcccacaggtcatacagtatgccaagaccaagtccgacatcgtcgccaagcttgacggcacttacaagctggccggccccggtggtgctgcggccaacgtcgagatgaccgag

SEQ ID NO: 19362 - DNA, 412 bp, Muscodor strobelii
  misc_feature: SGI cDNA ID NO. 566509
  misc_feature: Encodes the peptide sequence at SEQ ID NO 19363
atggcgtcgcccgaggtccaccatctcttccaccgccccatcgcggatcactccttctcggcggaccgcgacacgctcgccgtcgccaaggacgccaccgtcgagctgtaccatagggcgggcaacgggttcaagctgcaggacacgctcagcggccacgacaagacggtcaccagcgtcgacatcgccccgggctcaggccgcatcgtcacgtgctcgcaggaccgcaacgccctcgtctgggagccctcgcccgccggctacaagcccaccctcgtgctgctgcgcatcgcccgcgccgccaccttcgtccgctgggcccccgccgagtccaagttcgccgtcggctccggcgaccgcgtcatcgccgtctgctacttcgaggaggagaacgactggtgggtctccaagc

SEQ ID NO: 19363 - protein, 137 aa, Muscodor strobelii
  misc_feature: SGI Peptide ID NO. 566509
  misc_feature (44)..(82): Pfam Id: PF00400 Pfam Desc: WD domain, G-beta repeat
  misc_feature (1)..(137): NCBI GI: 171696034 Blast Desc: protein product [Podospora anserina] gi|170948259|emb|CAP60423.1| protein product [Podospora anserina]
  misc_feature (1)..(137): NCBI GI: 261357484 Blast Desc: ARP2/3 actin-organizing complex subunit Sop2 [Verticillium albo-atrum VaMs.102]
  misc_feature (1)..(137): NCBI GI: 85112110 Blast Desc: NCU02781 [Neurospora crassa OR74A] gi|28926051|gb|EAA35040.1| NCU02781 [Neurospora crassa OR74A]
  misc_feature (1)..(137): NCBI GI: 154323984 Blast Desc: actin related protein 2/3 complex subunit [Botryotinia fuckeliana B05.10] gi|150842620|gb|EDN17813.1| actin related protein 2/3 complex subunit [Botryotinia fuckeliana B05.10]
  misc_feature (1)..(137): NCBI GI: 156057557 Blast Desc: conserved [Sclerotinia sclerotiorum 1980] gi|154702295|gb|EDO02034.1| conserved [Sclerotinia sclerotiorum 1980]
  misc_feature (1)..(137): NCBI GI: 256734480 Blast Desc: [Nectria haematococca mpVI 77-13-4]
  misc_feature (1)..(137): NCBI GI: 46107454 Blast Desc: FG00610.1 [Gibberella zeae PH-1]
  misc_feature (1)..(137): NCBI GI: 116181852 Blast Desc: conserved [Chaetomium globosum CBS 148.51] gi|88185851|gb|EAQ93319.1| conserved [Chaetomium globosum CBS 148.51]
  misc_feature (1)..(137): NCBI GI: 145614718 Blast Desc: conserved [Magnaporthe grisea 70-15] gi|145021613|gb|EDK05742.1| conserved [Magnaporthe grisea 70-15]
  misc_feature (1)..(137): NCBI GI: 169601000 Blast Desc: SNOG_03354 [Phaeosphaeria nodorum SN15] gi|160705852|gb|EAT88559.2| SNOG_03354 [Phaeosphaeria nodorum SN15]
MASPEVHHLFHRPIADHSFSADRDTLAVAKDATVELYHRAGNGFKLQDTLSGHDKTVTSVDIAPGSGRIVTCSQDRNALVWEPSPAGYKPTLVLLRIARAATFVRWAPAESKFAVGSGDRVIAVCYFEEENDWWVSK

SEQ ID NO: 19364 - DNA, 637 bp, Muscodor strobelii
  misc_feature: SGI EST ID NO. CUFF.45191.0
  misc_feature: Variant of the nucleotide sequence at SEQ ID NO 19362
ggcaaagccaggcgaggggctgatcgtacgtgcaggcagccgtccgatacagcattctaatctcccacaccaacgtcaccgtcgacaacacccaagaacatcgacgtggttcaaggtagtagagagctcctcctacccgcgggcccgcgatattcatccgaccacgtcccaagccccctcaacctttgcatctactcgcaagagcccccgcgtccatatcgcaccatggcgtcgcccgaggtccaccatctcttccaccgccccatcgcggatcactccttctcggcggaccgcgacacgctcgccgtcgccaaggacgccaccgtcgagctgtaccatagggcgggcaacgggttcaagctgcaggacacgctcagcggccacgacaagacggtcaccagcgtcgacatcgccccgggctcaggccgcatcgtcacgtgctcgcaggaccgcaacgccctcgtctgggagccctcgcccgccggctacaagcccaccctcgtgctgctgcgcatcgcccgcgccgccaccttcgtccgctgggcccccgccgagtccaagttcgccgtcggctccggcgaccgcgtcatcgccgtctgctacttcgaggaggagaacgactggtgggtctccaagc

SEQ ID NO: 19365 - DNA, 3283 bp, Muscodor strobelii
  misc_feature: SGI cDNA ID NO. 566510
  misc_feature: Reduced expression when VOC is produced
  misc_feature: Encodes the peptide sequence at SEQ ID NO 19366
atgtccggcgagaaggcacgggatctgctgctgaggtcgcggcttgacggcgatgctttgtccaacatctggactctctccgacacgactcgctcaggtgaactgcacttccccgaattcgcccttgctatgtacctctgcaacctcaagctggttggcaagcctctgccacaaagtcttcccgagaatatcaaaaacgaggtttccagcatggtcgacatcatcaacttcagtgtcgccgaagaagccgcttcgggaggtgcaaccaacgcccccgacttcaccaggcaaaatacagccacgcctcccaccatacaacatccgcagcctcagcagtcaaactcctcgcttttacaggcgcagatgactggttttcccggtcaccagtcgggcatgcaatcccagcaaactggatttcctggcggcatgacgaacccccaggccactggttattccggtcctctcccgcccatgcctcctatgcccaccggttttcccggcggccttaatccagccagcgccgcgccgctcaatgctcagccgactggtagaccgggccagtggggtctcgtcaatgcgcctgcatcaggtcttcccaatatcgacgcattgcaagctcgcatgatgcctcaatcgggccgcgaacagcagaattacacgactgctggtctctcgggaaatgctgtcataccctgggccatcaccaaagatgagaagactcggtacgaccaactatttcgggcttgggatggcttaggaaagggctatattggaggggaccaagcaatcgaaatcatgggccagagtggcctgcagaaaaatgatctggagcgtatatggacactctcagacaatggaaataagggtcgtctagatctcgacgaatttgctgttgccatgcatctgatttatcgaaaactcaacggctaccctattcccaactccctgcccgccgagcttgtcccaccatcgacaagaaggctgaacgactctctaggcacaatcagatctatgctcaaccaggagtcggatttccgaaaggcttctggagccaccctgcttcctcaaaagactggtgttagctatatgaaaaaccactcgtttagaggaaatacgggtaccagcgtaggacgaaaggacgggacagtcttcaaaaacaatgacgacgacgtgggatataagtcttcggcacgtcgcagggtgggtaatgcctctccccgcccagagtcgccagcatctgtagcttcgaacgaagatctctccgttgaacagctgaggaagaagattcgcgagaagcaggttcttcttgatgccatggatttcaaagatgaggcggctgctgaagaagatgatatcttggatagacgtgatcggcgtgaagcggaagagttatatcgtcgtattcgccgcatacaagacgatattgacggtcacccagatgcggccttcgccagcggcgattcggacgccgagcgacgggctcttaaaaggcaattgcagaatctcactgacaaaatccccgaactcgcatcacaagttagaaagacggaaaaggcaatcgctgatgcaaagctggagcttttccgcctcaaagatgctaaggcccatccaggcagtgcctctaccatcatcggcaccgggcctggtggggcgatcactgagtctgaccgtctcaaagctcgggctaaggccatgatgcaacagcggactgccgcgttgactggcaagaaggtagatgtcggtggagacgatctcgatgcgcctaagcgtttagaagaagaaagcatcaaggcgagaacggagaaggaaaacaacgagcgtatggtgcgcgacgttgaggacagcgttcgagactttgctcagggcatcgaagacaatctcaaagaaggcgggcagacatccgctaatcagcacgaaaaacgccgatgggaagatgcgcttggtgtcgaagatgaggtgcgcgacttcatcttcgacctacagcgctcgagccgagcggctcgcgttcgatcccaggatcgcagtggcggccgggcagccaccgccgagccggtgcgagccgaggcaccaccaacacgggttgagagcccatccgcagcccgcacagctacgccgccggtgtctggatctccggccccaagtggaggttcatattcttcctacaagactcctgaagagcgggcagcatttatcaaacagcaagctcagcaaaagatggctgaccgtcttgccgctcttgggattaaagctccctcttccaaccctggagagtctgcaacccagcgaatggagcgtgaaaaggctgaacgtgaggctaagcggcggcaagccgaagaggaagacgctcagcgtgaggccgcacatcaggcacgactagcggaggagcagggcatcccgccgcctgcccccaaggcagaagttaagaagcctccaccgccaccatcacgaaaagccggcaagagtgaggatgccgctaagaaggccgaagagcacgaagctgcgaaaagggcagaggcggagcgattgacgaaggagcatgaggagcagcagcgcgtcgcacagcaaatgcaaaatgaaagcaatcaacaggaagatgagcttgctcatgaacgagatgccgcctcagctcgtgtcaaggagctggaagagcaggtgctacaaggtaaactgagaaaagaggaagcaaagaagaagaagaaagctgctctagccgaagctaaagagaaagaagctaaactggctgcgcaacgagccgagatggaagccgcacgacagcgggagcttgaactccagcgacaacttgaagcaatgaacgatgaagactcttcatccgacgatgaggacgggcctgagcaaataaccccacaagcatctactcccacgcatggtgggagccagcttggtactgtggaaccagaaaggaagtcgagcccaccgcctcctgtgccggcgaatcctgtagtatcgccgccagctgctgtgaccagcccttcggcagagacagagagccgaaacccatacttccgcatgatgacgcagtcttcagaatcacctgcggcgccagctccggctgcctccgctgcatcagctacgcctccccctcctcctccacaaccaccagtcgaggcgccttcatccacaaacccattccaccgaatgacccaagatcacaaggccgctcctgcagcggcgccggttattccgcaaccaaccggaaacgtgtcccgacggcgtccggggagtgatgatgagtggggttcggacaacgaagactccggtgatg

SEQ ID NO: 19366 - protein, 1094 aa, Muscodor strobelii
  misc_feature: SGI Peptide ID NO. 566510
  misc_feature (132)..(213): Pfam Id: PF08226 Pfam Desc: Domain of function (DUF1720)
  misc_feature (140)..(212): Pfam Id: PF08226 Pfam Desc: Domain of function (DUF1720)
  misc_feature (1)..(1086): NCBI GI: 46125135 Blast Desc: FG06945.1 [Gibberella zeae PH-1]
  misc_feature (1)..(1086): NCBI GI: 116207978 Blast Desc: CHGG_03282 [Chaetomium globosum CBS 148.51] gi|121932717|sp|Q2H922.1|PAN1_CHAGB RecName: Full=Actin cytoskeleton-regulatory complex protein PAN1 CHGG_03282 globosum
  misc_feature (1)..(1058): NCBI GI: 256733152 Blast Desc: NECHADRAFT_100132 [Nectria haematococca mpVI 77-13-4]
  misc_feature (1)..(1086): NCBI GI: 171686466 Blast Desc: protein product [Podospora anserina] gi|205829278|sp|B2AWS3.1|PAN1_PODAN RecName: Full=Actin cytoskeleton-regulatory complex protein PAN1 protein product
  misc_feature (1)..(1086): NCBI GI: 145608724 Blast Desc: MGG_12839 [Magnaporthe grisea 70-15] gi|205829276|sp|A4R8N4.1|PAN1_MAGGR RecName: Full=Actin cytoskeleton-regulatory complex protein PAN1 MGG_12839 grisea
  misc_feature (1)..(1085): NCBI GI: 154303331 Blast Desc: BC1G_09414 [Botryotinia fuckeliana B05.10] gi|205829274|sp|A6S9N4.1|PAN1_BOTFB RecName: Full=Actin cytoskeleton-regulatory complex protein pan1 BC1G_09414 B05.10]
  misc_feature (1)..(1055): NCBI GI: 85109092 Blast Desc: NCU06171 [Neurospora crassa OR74A] gi|74696566|sp|Q7SAT8.1|PAN1_NEUCR RecName: Full=Actin cytoskeleton-regulatory complex protein pan-1 [Neurospora crassa
  misc_feature (1)..(1085): NCBI GI: 156054278 Blast Desc: SS1G_05987 [Sclerotinia sclerotiorum 1980] gi|205829279|sp|A7EKZ0.1|PAN1_SCLS1 RecName: Full=Actin cytoskeleton-regulatory complex protein pan1 SS1G_05987 1980]
  misc_feature (1)..(1077): NCBI GI: 189193789 Blast Desc: polyA nuclease [Pyrenophora tritici-repentis Pt-1C-BFP] gi|187978797|gb|EDU45423.1| polyA nuclease [Pyrenophora tritici-repentis Pt-1C-BFP]
  misc_feature (1)..(1085): NCBI GI: 238495813 Blast Desc: actin cortical patch assembly protein Pan1, [Aspergillus flavus NRRL3357] gi|220694022|gb|EED50366.1| actin cortical patch assembly protein Pan1, [Aspergillus flavus
  misc_feature: Useful for introducing or modulating the production of volatile compounds
MSGEKARDLLLRSRLDGDALSNIWTLSDTTRSGELHFPEFALAMYLCNLKLVGKPLPQSLPENIKNEVSSMVDIINFSVAEEAASGGATNAPDFTRQNTATPPTIQHPQPQQSNSSLLQAQMTGFPGHQSGMQSQQTGFPGGMTNPQATGYSGPLPPMPPMPTGFPGGLNPASAAPLNAQPTGRPGQWGLVNAPASGLPNIDALQARMMPQSGREQQNYTTAGLSGNAVIPWAITKDEKTRYDQLFRAWDGLGKGYIGGDQAIEIMGQSGLQKNDLERIWTLSDNGNKGRLDLDEFAVAMHLIYRKLNGYPIPNSLPAELVPPSTRRLNDSLGTIRSMLNQESDFRKASGATLLPQKTGVSYMKNHSFRGNTGTSVGRKDGTVFKNNDDDVGYKSSARRRVGNASPRPESPASVASNEDLSVEQLRKKIREKQVLLDAMDFKDEAAAEEDDILDRRDRREAEELYRRIRRIQDDIDGHPDAAFASGDSDAERRALKRQLQNLTDKIPELASQVRKTEKAIADAKLELFRLKDAKAHPGSASTIIGTGPGGAITESDRLKARAKAMMQQRTAALTGKKVDVGGDDLDAPKRLEEESIKARTEKENNERMVRDVEDSVRDFAQGIEDNLKEGGQTSANQHEKRRWEDALGVEDEVRDFIFDLQRSSRAARVRSQDRSGGRAATAEPVRAEAPPTRVESPSAARTATPPVSGSPAPSGGSYSSYKTPEERAAFIKQQAQQKMADRLAALGIKAPSSNPGESATQRMEREKAEREAKRRQAEEEDAQREAAHQARLAEEQGIPPPAPKAEVKKPPPPPSRKAGKSEDAAKKAEEHEAAKRAEAERLTKEHEEQQRVAQQMQNESNQQEDELAHERDAASARVKELEEQVLQGKLRKEEAKKKKKAALAEAKEKEAKLAAQRAEMEAARQRELELQRQLEAMNDEDSSSDDEDGPEQITPQASTPTHGGSQLGTVEPERKSSPPPPVPANPVVSPPAAVTSPSAETESRNPYFRMMTQSSESPAAPAPAASAASATPPPPPPQPPVEAPSSTNPFHRMTQDHKAAPAAAPVIPQPTGNVSRRRPGSDDEWGSDNEDSGD

SEQ ID NO: 19367 - DNA, 3383 bp, Muscodor strobelii
  misc_feature: SGI EST ID NO. CUFF.45488.1
  misc_feature: Variant of the nucleotide sequence at SEQ ID NO 19365
taacaagatccctaacatgcgtctgtcgttcatcaccgcccaagaccaggccaagttcgagaccctgttcaagtcggccgtcggggatggccacaccaccatgtccggcgagaaggcacgggatctgctgctgaggtcgcggcttgacggcgatgctttgtccaacatctggactctctccgacacgactcgctcaggtgaactgcacttccccgaattcgcccttgctatgtacctctgcaacctcaagctggttggcaagcctctgccacaaagtcttcccgagaatatcaaaaacgaggtttccagcatggtcgacatcatcaacttcagtgtcgccgaagaagccgcttcgggaggtgcaaccaacgcccccgacttcaccaggcaaaatacagccacgcctcccaccatacaacatccgcagcctcagcagtcaaactcctcgcttttacaggcgcagatgactggttttcccggtcaccagtcgggcatgcaatcccagcaaactggatttcctggcggcatgacgaacccccaggccactggttattccggtcctctcccgcccatgcctcctatgcccaccggttttcccggcggccttaatccagccagcgccgcgccgctcaatgctcagccgactggtagaccgggccagtggggtctcgtcaatgcgcctgcatcaggtcttcccaatatcgacgcattgcaagctcgcatgatgcctcaatcgggccgcgaacagcagaattacacgactgctggtctctcgggaaatgctgtcataccctgggccatcaccaaagatgagaagactcggtacgaccaactatttcgggcttgggatggcttaggaaagggctatattggaggggaccaagcaatcgaaatcatgggccagagtggcctgcagaaaaatgatctggagcgtatatggacactctcagacaatggaaataagggtcgtctagatctcgacgaatttgctgttgccatgcatctgatttatcgaaaactcaacggctaccctattcccaactccctgcccgccgagcttgtcccaccatcgacaagaaggctgaacgactctctaggcacaatcagatctatgctcaaccaggagtcggatttccgaaaggcttctggagccaccctgcttcctcaaaagactggtgttagctatatgaaaaaccactcgtttagaggaaatacgggtaccagcgtaggacgaaaggacgggacagtcttcaaaaacaatgacgacgacgtgggatataagtcttcggcacgtcgcagggtgggtaatgcctctccccgcccagagtcgccagcatctgtagcttcgaacgaagatctctccgttgaacagctgaggaagaagattcgcgagaagcaggttcttcttgatgccatggatttcaaagatgaggcggctgctgaagaagatgatatcttggatagacgtgatcggcgtgaagcggaagagttatatcgtcgtattcgccgcatacaagacgatattgacggtcacccagatgcggccttcgccagcggcgattcggacgccgagcgacgggctcttaaaaggcaattgcagaatctcactgacaaaatccccgaactcgcatcacaagttagaaagacggaaaaggcaatcgctgatgcaaagctggagcttttccgcctcaaagatgctaaggcccatccaggcagtgcctctaccatcatcggcaccgggcctggtggggcgatcactgagtctgaccgtctcaaagctcgggctaaggccatgatgcaacagcggactgccgcgttgactggcaagaaggtagatgtcggtggagacgatctcgatgcgcctaagcgtttagaagaagaaagcatcaaggcgagaacggagaaggaaaacaacgagcgtatggtgcgcgacgttgaggacagcgttcgagactttgctcagggcatcgaagacaatctcaaagaaggcgggcagacatccgctaatcagcacgaaaaacgccgatgggaagatgcgcttggtgtcgaagatgaggtgcgcgacttcatcttcgacctacagcgctcgagccgagcggctcgcgttcgatcccaggatcgcagtggcggccgggcagccaccgccgagccggtgcgagccgaggcaccaccaacacgggttgagagcccatccgcagcccgcacagctacgccgccggtgtctggatctccggccccaagtggaggttcatattcttcctacaagactcctgaagagcgggcagcatttatcaaacagcaagctcagcaaaagatggctgaccgtcttgccgctcttgggattaaagctccctcttccaaccctggagagtctgcaacccagcgaatggagcgtgaaaaggctgaacgtgaggctaagcggcggcaagccgaagaggaagacgctcagcgtgaggccgcacatcaggcacgactagcggaggagcagggcatcccgccgcctgcccccaaggcagaagttaagaagcctccaccgccaccatcacgaaaagccggcaagagtgaggatgccgctaagaaggccgaagagcacgaagctgcgaaaagggcagaggcggagcgattgacgaaggagcatgaggagcagcagcgcgtcgcacagcaaatgcaaaatgaaagcaatcaacaggaagatgagcttgctcatgaacgagatgccgcctcagctcgtgtcaaggagctggaagagcaggtgctacaaggtaaactgagaaaagaggaagcaaagaagaagaagaaagctgctctagccgaagctaaagagaaagaagctaaactggctgcgcaacgagccgagatggaagccgcacgacagcgggagcttgaactccagcgacaacttgaagcaatgaacgatgaagactcttcatccgacgatgaggacgggcctgagcaaataaccccacaagcatctactcccacgcatggtgggagccagcttggtactgtggaaccagaaaggaagtcgagcccaccgcctcctgtgccggcgaatcctgtagtatcgccgccagctgctgtgaccagcccttcggcagagacagagagccgaaacccatacttccgcatgatgacgcagtcttcagaatcacctgcggcgccagctccggctgcctccgctgcatcagctacgcctccccctcctcctccacaaccaccagtcgaggcgccttcatccacaaacccattccaccgaatgacccaagatcacaaggccgctcctgcagcggcgccggttattccgcaaccaaccggaaacgtgtcccgacggcgtccggggagtgatgatgagtggggttcggacaacgaagactccggtgatg

SEQ ID NO: 19368 - DNA, 2619 bp, Muscodor strobelii
  misc_feature: SGI cDNA ID NO. 566511
  misc_feature: Reduced expression when VOC is produced
  misc_feature: Encodes the peptide sequence at SEQ ID NO 19369
ccctcgggcggccgcgcgcgcgagcccgactacttctccatcgccaagtgcatcgtctacctcgccaaggacgaccaggcccgcaaggtcatccgccacctgatcgaggccgacgggtcgagccgcgctaccgccgtcgcctaccagttcgccttcgacctctacgacaacggcacccaggagttcctcggccgcgtcatctacggcctgcctaagagcgacgccgcagcgtccggcgacgacgacgacggcagtaacaacggcagccacaacagcggcgccacccccgacgaccgcgacagcgaggcgcccacgctgcctaccacgtccgacgaggccagccagcgcaccagcttcgacacgcgcgtcgaccgcttcatcgagaagtacaagaacatccgctccatcctcgacggcaccaccaccatccgcctcaacctcgagttcctctaccgcaacaaccgcaccgacctcagcatcctcaacaaggtccgcgacagcctcgagggccgcaactccatcttccacaccgccgtcaccttctgcaacgccttcatgaaccagggcaccaccaacgacaagttcttccgcgacaacctcgagtggctcggcaaggccgtcaactggtccaagttcaccgccaccgccgccctcggcgtcatccaccgcggcaacctctcccagtccaagaagctgctcgacccctatctgccccgcggcgccggcggcatcagcagcggctcgccctattcccagggcggcgccctctacgcctacggtctcatccacgccaaccacggcgcggacgccctcgagtatctcaagcagcagttctcgtccgccgaggaggaggtcatccagcacggtggcgcgctgggcctgggtctggcgggcatggccagtggaaacgaggagatcttcgacagcctcaagtccactctgtatgcggactcggcgctgaacggcgaagctgttggcttggccatgggtctgataatgttgggcactggcaacgtcaaggcgctggaagacatggttacttatgcccacgagacgtcgcacgagaagagcgtgcgtggcttggctctcggcatgtccctcatcatgtacggcagacaagagggcgccgatgtcatgattgaaggcctcctgaacgaccccgacccgactctgcgctacggcggtatcatgaccgtcgccatggcctactgcggcaccggcagcaacaaggccgtgcggaagctgctccacgtggccgtgagcgacgtcaacgacgatgttcgccgcatcgccgtcatgagcttaggcttcatcttgttccggaagcccaacagcgtccctcgcatggtcgagctcctttccgagtcctacaacccccacgtccgatatggctctgccatggctctcggtatctcctgcgctggaaccggactggatgaagccatcgacctactggagcctatgatgaaggacccaaccgactttgttcgccagggcgccctcattgccttgtccatgatcatgatccaacagaatgaggccatgaaccccaaggtaaccgagattcgcaagacgctcaagaaggtggtgggcgaccgacacgaggatgccatgaccaaattcggtgctgctctggctctgggcatcatcgatgctggcggacgcaactgcaccatcgggttgcaaacacagacgggtaatctcaacatggccggtgttgttggcatggctgtcttcacgcagtactggtactggttccccttcacccactttttgtctctggccttcagcccaacctcgatcattgctctggatcacgacttggacatcattgacgtgaaattccactgcgctactaagcccagtctattcgactaccctccggaacaagaggtcaaggctgagcaaggcccggccatgattgcgacggcgatcctatcgacgacggcacaggccaaacgccgcgctcagaagaaggagcgtgcgcagcgtcgcgacagcatggacatcgacagtacgcccaccgtgtcgaagcctgcggctggtgacgacaagatggaagtagacgagaaaaagacggaggagagcaaagacaagaaggagcagaccccggcacccagtgacaaggagacttcagcaccgcccgacgccaagaagaagctggagaaggagaagccagggtacgagatcgagaacatgacgcgtgtgttgcccgagcagctcaagtacatcagtctcgccaagggccgatactggcctgtcaagcttgtgagaccgggaccattgccaacgggtggtcctctgctgctggacgacaacagtcccgaggagaagaaggcgacgattgaggagaagcttaagaaggtagctaccgagaaggcgccggtggtggcaccgacgggacagcagggccgcaaccagcgctctgtggaggaagccctgctgcgtaggataggcgggggcttggtaccgccggtgacgcccgggagaaacgagagcggcgcggcggcggctgccggtgtattgacggcggtggacgaggacaacgaaggggacaacgaggcgacggcgccacgggacttcgactactacacggaagacgagggcgaggaggaatag

SEQ ID NO: 19369 - protein, 872 aa, Muscodor strobelii
  misc_feature: SGI Peptide ID NO. 566511
  misc_feature (464)..(498): Pfam Id: PF01851 Pfam Desc: Proteasome/cyclosome repeat
  misc_feature (324)..(358): Pfam Id: PF01851 Pfam Desc: Proteasome/cyclosome repeat
  misc_feature (254)..(287): Pfam Id: PF01851 Pfam Desc: Proteasome/cyclosome repeat
  misc_feature (289)..(323): Pfam Id: PF01851 Pfam Desc: Proteasome/cyclosome repeat
  misc_feature (213)..(246): Pfam Id: PF01851 Pfam Desc: Proteasome/cyclosome repeat
  misc_feature (9)..(866): NCBI GI: 256724823 Blast Desc: NECHADRAFT_63310 [Nectria haematococca mpVI 77-13-4]
  misc_feature (9)..(871): NCBI GI: 171681561 Blast Desc: protein product [Podospora anserina] gi|170940739|emb|CAP65967.1| protein product [Podospora anserina]
  misc_feature (9)..(865): NCBI GI: 46126243 Blast Desc: FG07499.1 [Gibberella zeae PH-1]
  misc_feature (9)..(871): NCBI GI: 145603522 Blast Desc: MGG_05991 [Magnaporthe grisea 70-15] gi|145011736|gb|EDJ96392.1| MGG_05991 [Magnaporthe grisea 70-15]
  misc_feature (9)..(872): NCBI GI: 156057609 Blast Desc: SS1G_04536 [Sclerotinia sclerotiorum 1980] gi|154702321|gb|EDO02060.1| SS1G_04536 [Sclerotinia sclerotiorum 1980]
  misc_feature (9)..(872): NCBI GI: 154297920 Blast Desc: BC1G_11934 [Botryotinia fuckeliana B05.10] gi|150858375|gb|EDN33567.1| BC1G_11934 [Botryotinia fuckeliana B05.10]
  misc_feature (9)..(872): NCBI GI: 116203885 Blast Desc: CHGG_09826 [Chaetomium globosum CBS 148.51] gi|88175954|gb|EAQ83422.1| CHGG_09826 [Chaetomium globosum CBS 148.51]
  misc_feature (9)..(872): NCBI GI: 85089629 Blast Desc: NCU09450 [Neurospora crassa OR74A] gi|28919347|gb|EAA28800.1| NCU09450 [Neurospora crassa OR74A]
  misc_feature (9)..(868): NCBI GI: 119180402 Blast Desc: CIMG_08839 [Coccidioides immitis RS]
  misc_feature (9)..(868): NCBI GI: 240110328 Blast Desc: 26S proteasome non-ATPase regulatory subunit 1, [Coccidioides posadasii C735 delta SOWgp]
  misc_feature: Useful for introducing or modulating the production of volatile compounds
PSGGRAREPDYFSIAKCIVYLAKDDQARKVIRHLIEADGSSRATAVAYQFAFDLYDNGTQEFLGRVIYGLPKSDAAASGDDDDGSNNGSHNSGATPDDRDSEAPTLPTTSDEASQRTSFDTRVDRFIEKYKNIRSILDGTTTIRLNLEFLYRNNRTDLSILNKVRDSLEGRNSIFHTAVTFCNAFMNQGTTNDKFFRDNLEWLGKAVNWSKFTATAALGVIHRGNLSQSKKLLDPYLPRGAGGISSGSPYSQGGALYAYGLIHANHGADALEYLKQQFSSAEEEVIQHGGALGLGLAGMASGNEEIFDSLKSTLYADSALNGEAVGLAMGLIMLGTGNVKALEDMVTYAHETSHEKSVRGLALGMSLIMYGRQEGADVMIEGLLNDPDPTLRYGGIMTVAMAYCGTGSNKAVRKLLHVAVSDVNDDVRRIAVMSLGFILFRKPNSVPRMVELLSESYNPHVRYGSAMALGISCAGTGLDEAIDLLEPMMKDPTDFVRQGALIALSMIMIQQNEAMNPKVTEIRKTLKKVVGDRHEDAMTKFGAALALGIIDAGGRNCTIGLQTQTGNLNMAGVVGMAVFTQYWYWFPFTHFLSLAFSPTSIIALDHDLDIIDVKFHCATKPSLFDYPPEQEVKAEQGPAMIATAILSTTAQAKRRAQKKERAQRRDSMDIDSTPTVSKPAAGDDKMEVDEKKTEESKDKKEQTPAPSDKETSAPPDAKKKLEKEKPGYEIENMTRVLPEQLKYISLAKGRYWPVKLVRPGPLPTGGPLLLDDNSPEEKKATIEEKLKKVATEKAPVVAPTGQQGRNQRSVEEALLRRIGGGLVPPVTPGRNESGAAAAAGVLTAVDEDNEGDNEATAPRDFDYYTEDEGEEE

SEQ ID NO: 19370 - DNA, 2914 bp, Muscodor strobelii
  misc_feature: SGI EST ID NO. CUFF.45198.0
  misc_feature: Variant of the nucleotide sequence at SEQ ID NO 19368
gaccctcgggcggccgcgcgcgcgagcccgactacttctccatcgccaagtgcatcgtctacctcgccaaggacgaccaggcccgcaaggtcatccgccacctgatcgaggccgacgggtcgagccgcgctaccgccgtcgcctaccagttcgccttcgacctctacgacaacggcacccaggagttcctcggccgcgtcatctacggcctgcctaagagcgacgccgcagcgtccggcgacgacgacgacggcagtaacaacggcagccacaacagcggcgccacccccgacgaccgcgacagcgaggcgcccacgctgcctaccacgtccgacgaggccagccagcgcaccagcttcgacacgcgcgtcgaccgcttcatcgagaagtacaagaacatccgctccatcctcgacggcaccaccaccatccgcctcaacctcgagttcctctaccgcaacaaccgcaccgacctcagcatcctcaacaaggtccgcgacagcctcgagggccgcaactccatcttccacaccgccgtcaccttctgcaacgccttcatgaaccagggcaccaccaacgacaagttcttccgcgacaacctcgagtggctcggcaaggccgtcaactggtccaagttcaccgccaccgccgccctcggcgtcatccaccgcggcaacctctcccagtccaagaagctgctcgacccctatctgccccgcggcgccggcggcatcagcagcggctcgccctattcccagggcggcgccctctacgcctacggtctcatccacgccaaccacggcgcggacgccctcgagtatctcaagcagcagttctcgtccgccgaggaggaggtcatccagcacggtggcgcgctgggcctgggtctggcgggcatggccagtggaaacgaggagatcttcgacagcctcaagtccactctgtatgcggactcggcgctgaacggcgaagctgttggcttggccatgggtctgataatgttgggcactggcaacgtcaaggcgctggaagacatggttacttatgcccacgagacgtcgcacgagaagagcgtgcgtggcttggctctcggcatgtccctcatcatgtacggcagacaagagggcgccgatgtcatgattgaaggcctcctgaacgaccccgacccgactctgcgctacggcggtatcatgaccgtcgccatggcctactgcggcaccggcagcaacaaggccgtgcggaagctgctccacgtggccgtgagcgacgtcaacgacgatgttcgccgcatcgccgtcatgagcttaggcttcatcttgttccggaagcccaacagcgtccctcgcatggtcgagctcctttccgagtcctacaacccccacgtccgatatggctctgccatggctctcggtatctcctgcgctggaaccggactggatgaagccatcgacctactggagcctatgatgaaggacccaaccgactttgttcgccagggcgccctcattgccttgtccatgatcatgatccaacagaatgaggccatgaaccccaaggtaaccgagattcgcaagacgctcaagaaggtggtgggcgaccgacacgaggatgccatgaccaaattcggtgctgctctggctctgggcatcatcgatgctggcggacgcaactgcaccatcgggttgcaaacacagacgggtaatctcaacatggccggtgttgttggcatggctgtcttcacgcagtactggtactggttccccttcacccactttttgtctctggccttcagcccaacctcgatcattgctctggatcacgacttggacatcattgacgtgaaattccactgcgctactaagcccagtctattcgactaccctccggaacaagaggtcaaggctgagcaaggcccggccatgattgcgacggcgatcctatcgacgacggcacaggccaaacgccgcgctcagaagaaggagcgtgcgcagcgtcgcgacagcatggacatcgacagtacgcccaccgtgtcgaagcctgcggctggtgacgacaagatggaagtagacgagaaaaagacggaggagagcaaagacaagaaggagcagaccccggcacccagtgacaaggagacttcagcaccgcccgacgccaagaagaagctggagaaggagaagccagggtacgagatcgagaacatgacgcgtgtgttgcccgagcagctcaagtacatcagtctcgccaagggccgatactggcctgtcaagcttgtgagaccgggaccattgccaacgggtggtcctctgctgctggacgacaacagtcccgaggagaagaaggcgacgattgaggagaagcttaagaaggtagctaccgagaaggcgccggtggtggcaccgacgggacagcagggccgcaaccagcgctctgtggaggaagccctgctgcgtaggataggcgggggcttggtaccgccggtgacgcccgggagaaacgagagcggcgcggcggcggctgccggtgtattgacggcggtggacgaggacaacgaaggggacaacgaggcgacggcgccacgggacttcgactactacacggaagacgagggcgaggaggaatagacgatagacatcactttgcaccactggcgttggacgctgaagaggaaaagcatgtatattgtaataatagtggtgtggaatacaattgatcccctagagtggtattttatccgttgcttgtcatgagccaaccttggaactgcatgcctactattgacgctggatgcgttgtccatctgcatcaccttggtgaggttgtaccgaatgactgatatttcgaggtgatcatctgtattcaaccttcgcgcatgaacgctgctatgtatgtgaatgaacacaatgcagagaattgt

SEQ ID NO: 19371 - DNA, 2292 bp, Muscodor strobelii
  misc_feature: SGI cDNA ID NO. 566512
  misc_feature: Encodes the peptide sequence at SEQ ID NO 19372
aacaacatccccgccagcgccgagagtctcaccagcaccggcctgccgcttggtctggttctgcagccactggcgcctctccagcctggcgagatggagatcccagtgctggactttggcgagcagggccctcccaggtgtcgcaggtgccgcgcctacatcaacccctttatgatgttccgctccggcgggagcaagtttgtctgcaatctctgcacctaccccaacgagacgccctcggaatatttctgtgccacgaacccgcagggccttcgcgtcgaccgcgaccagcgcccagagctgaccagaggtaccgtcgagttcactgtgcccaaagagtactggaccaaggaacccgtggggctcaactggctgttcgtcatcgatgtcacccaagaggcattcaacaaggggttcctggaggccttctgcgagggcatcctggctgcgctctacacgtctagccgcagcgaggacacagacgagaatggggagctcaagcgccagataccgcctggcgccaaggttggcttcgtcacctacgacaaagatgttcacttctacaactgcaaccctgctctggagcaagcacagatgatgatcatgcccgacatcgaggatccctttgtccctctgagcgacgggctattcgtcgatccctacgaatcgcaagctatcatcacgtcgcttctaactaggctacccactctcttcgctgatatcaagaatgccgagccggcgttactgcctacgctgaactcctgtttagcggctttggagaagacgggaggaaagatgatatgttccttatcggcgcttcctacgtggggcccagggcggctcttcatgcgagacgatggcaagtatccaggaggcgagatagacaagaagctgttcacaaccgagcatccaggatggaaaaaggcggcagagaaaatggtggctgctggtgtcggtgctgatttcttcctcgccgctccctccggtggttacttggacatcgcgactattggccatgtgtcttctaccacaggcggagagaccttctactatcctaacttcgtagctggccgagacaatgccaaactctcgcaggagatcaagcacacagtgaccagagagacgggattccaggccctcatgaaagttcggtgctccaatgggctccaaatatcggcctatcacggcaatttcattcaacacaccttcggagccgacttggagattggtgtcatcgacgccgacaaagccattggtgtcacgttcggttacgacggtaagctggacgcgaaactagatgctcacttccagtctgctcttctctacacgacggccactggtcagcgtcgtgtaaggtgctgcaatgtagtggctagcattagcgaccatgcccgcgaaagcatgaagttcatcgaccaggatgcggtgtatacaatcattgcgaaagaggcggctacgaagctctccacaacctccagtacactcaaggatataagactagatctcaccgagaagaccatagatattctcgcgggctatcgcaagaatttctcgtctcagcaacatccaccgggacaattggtcatgcccgagaagcttaaggagttctctatgtacatccttggcctcatgaaatcccgggcgttcaaaggcggcaatgaaacctcagatcggagagtacatgagatgcgcatgatccggtcgatgggcgcttcagagctcagtctctacctttatccgaggatgatccccatacataaccttaaccccgaagatggcttcaccgacgaagccactggtcacttgaagctaccccccgcgattcggacctcattcagccgggtggagccgggaggcgtctatttagtagacaacgggcaacaatgtctgttatggcttcattcacagacttcgccgaacttactcgtagacctgtttggtgaaggcaaagatagtctcggcgcgctggatccctatagttcgtctctaccggtcctcgagacacacctgaatgcccaagtccggaatatcatcgagtttctcaggtcacttcgcggctcaaaggctttaacgatccaattggctagacaaggcatggatggcgccgagtacgaattcgccaggctattatttgaagatcgaaacaatgaggctcagagctatgtggactggctagtacacattcataagggtgtccaacttgagctggcggggcagaggcgaaaagaaaacgatgaatcaagttcctcattagcatctacgttcactgggttacgtccaaactactggtag

SEQ ID NO: 19372 - protein, 763 aa, Muscodor strobelii
  misc_feature: SGI Peptide ID NO. 566512
  misc_feature (601)..(678): Pfam Id: PF00626 Pfam Desc: Gelsolin repeat
  misc_feature (376)..(461): Pfam Id: PF08033 Pfam Desc: Sec23/Sec24 beta-sandwich domain
  misc_feature (473)..(578): Pfam Id: PF04815 Pfam Desc: Sec23/Sec24 helical domain
  misc_feature (119)..(371): Pfam Id: PF04811 Pfam Desc: Sec23/Sec24 trunk domain
  misc_feature (43)..(82): Pfam Id: PF04810 Pfam Desc: Sec23/Sec24 zinc finger
  misc_feature (601)..(647): Pfam Id: PF00626 Pfam Desc: Gelsolin repeat
  misc_feature (1)..(763): NCBI GI: 145608518 Blast Desc: MGG_06569 [Magnaporthe grisea 70-15] gi|145015990|gb|EDK00480.1| MGG_06569 [Magnaporthe grisea 70-15]
  misc_feature (2)..(763): NCBI GI: 116203609 Blast Desc: CHGG_09688 [Chaetomium globosum CBS 148.51] gi|88175816|gb|EAQ83284.1| CHGG_09688 [Chaetomium globosum CBS 148.51]
  misc_feature (1)..(763): NCBI GI: 261354912 Blast Desc: transport protein sec24 [Verticillium albo-atrum VaMs.102]
  misc_feature (2)..(742): NCBI GI: 171679505 Blast Desc: protein product [Podospora anserina] gi|170939378|emb|CAP64606.1| protein product [Podospora anserina]
  misc_feature (1)..(763): NCBI GI: 256728934 Blast Desc: [Nectria haematococca mpVI 77-13-4]
  misc_feature (1)..(763): NCBI GI: 85089718 Blast Desc: NCU06868 [Neurospora crassa OR74A] gi|28919396|gb|EAA28841.1| NCU06868 [Neurospora crassa OR74A]
  misc_feature (1)..(763): NCBI GI: 46138569 Blast Desc: FG10799.1 [Gibberella zeae PH-1]
  misc_feature (1)..(763): NCBI GI: 156042702 Blast Desc: SS1G_11149 [Sclerotinia sclerotiorum 1980] gi|154695535|gb|EDN95273.1| SS1G_11149 [Sclerotinia sclerotiorum 1980]
  misc_feature (1)..(763): NCBI GI: 189191480 Blast Desc: Sec23/Sec24 family protein [Pyrenophora tritici-repentis Pt-1C-BFP] gi|187973685|gb|EDU41184.1| Sec23/Sec24 family protein [Pyrenophora tritici-repentis
  misc_feature (1)..(763): NCBI GI: 239610979 Blast Desc: Sec23/Sec24 family protein [Ajellomyces dermatitidis ER-3]
NNIPASAESLTSTGLPLGLVLQPLAPLQPGEMEIPVLDFGEQGPPRCRRCRAYINPFMMFRSGGSKFVCNLCTYPNETPSEYFCATNPQGLRVDRDQRPELTRGTVEFTVPKEYWTKEPVGLNWLFVIDVTQEAFNKGFLEAFCEGILAALYTSSRSEDTDENGELKRQIPPGAKVGFVTYDKDVHFYNCNPALEQAQMMIMPDIEDPFVPLSDGLFVDPYESQAIITSLLTRLPTLFADIKNAEPALLPTLNSCLAALEKTGGKMICSLSALPTWGPGRLFMRDDGKYPGGEIDKKLFTTEHPGWKKAAEKMVAAGVGADFFLAAPSGGYLDIATIGHVSSTTGGETFYYPNFVAGRDNAKLSQEIKHTVTRETGFQALMKVRCSNGLQISAYHGNFIQHTFGADLEIGVIDADKAIGVTFGYDGKLDAKLDAHFQSALLYTTATGQRRVRCCNVVASISDHARESMKFIDQDAVYTIIAKEAATKLSTTSSTLKDIRLDLTEKTIDILAGYRKNFSSQQHPPGQLVMPEKLKEFSMYILGLMKSRAFKGGNETSDRRVHEMRMIRSMGASELSLYLYPRMIPIHNLNPEDGFTDEATGHLKLPPAIRTSFSRVEPGGVYLVDNGQQCLLWLHSQTSPNLLVDLFGEGKDSLGALDPYSSSLPVLETHLNAQVRNIIEFLRSLRGSKALTIQLARQGMDGAEYEFARLLFEDRNNEAQSYVDWLVHIHKGVQLELAGQRRKENDESSSSLASTFTGLRPNYW

SEQ ID NO: 19373 - DNA, 2692 bp, Muscodor strobelii
  misc_feature: SGI EST ID NO. CUFF.45236.0
  misc_feature: Variant of the nucleotide sequence at SEQ ID NO 19371
ccccgccagcgccgagagtctcaccagcaccggcctgccgcttggtctggttctgcagccactggcgcctctccagcctggcgagatggagatcccagtgctggactttggcgagcagggccctcccaggtgtcgcaggtgccgcgcctacatcaacccctttatgatgttccgctccggcgggagcaagtttgtctgcaatctctgcacctaccccaacgagacgccctcggaatatttctgtgccacgaacccgcagggccttcgcgtcgaccgcgaccagcgcccagagctgaccagaggtaccgtcgagttcactgtgcccaaagagtactggaccaaggaacccgtggggctcaactggctgttcgtcatcgatgtcacccaagaggcattcaacaaggggttcctggaggccttctgcgagggcatcctggctgcgctctacacgtctagccgcagcgaggacacagacgagaatggggagctcaagcgccagataccgcctggcgccaaggttggcttcgtcacctacgacaaagatgttcacttctacaactgcaaccctgctctggagcaagcacagatgatgatcatgcccgacatcgaggatccctttgtccctctgagcgacgggctattcgtcgatccctacgaatcgcaagctatcatcacgtcgcttctaactaggctacccactctcttcgctgatatcaagaatgccgagccggcgttactgcctacgctgaactcctgtttagcggctttggagaagacgggaggaaagatgatatgttccttatcggcgcttcctacgtggggcccagggcggctcttcatgcgagacgatggcaagtatccaggaggcgagatagacaagaagctgttcacaaccgagcatccaggatggaaaaaggcggcagagaaaatggtggctgctggtgtcggtgctgatttcttcctcgccgctccctccggtggttacttggacatcgcgactattggccatgtgtcttctaccacaggcggagagaccttctactatcctaacttcgtagctggccgagacaatgccaaactctcgcaggagatcaagcacacagtgaccagagagacgggattccaggccctcatgaaagttcggtgctccaatgggctccaaatatcggcctatcacggcaatttcattcaacacaccttcggagccgacttggagattggtgtcatcgacgccgacaaagccattggtgtcacgttcggttacgacggtaagctggacgcgaaactagatgctcacttccagtctgctcttctctacacgacggccactggtcagcgtcgtgtaaggtgctgcaatgtagtggctagcattagcgaccatgcccgcgaaagcatgaagttcatcgaccaggatgcggtgtatacaatcattgcgaaagaggcggctacgaagctctccacaacctccagtacactcaaggatataagactagatctcaccgagaagaccatagatattctcgcgggctatcgcaagaatttctcgtctcagcaacatccaccgggacaattggtcatgcccgagaagcttaaggagttctctatgtacatccttggcctcatgaaatcccgggcgttcaaaggcggcaatgaaacctcagatcggagagtacatgagatgcgcatgatccggtcgatgggcgcttcagagctcagtctctacctttatccgaggatgatccccatacataaccttaaccccgaagatggcttcaccgacgaagccactggtcacttgaagctaccccccgcgattcggacctcattcagccgggtggagccgggaggcgtctatttagtagacaacgggcaacaatgtctgttatggcttcattcacagacttcgccgaacttactcgtagacctgtttggtgaaggcaaagatagtctcggcgcgctggatccctatagttcgtctctaccggtcctcgagacacacctgaatgcccaagtccggaatatcatcgagtttctcaggtcacttcgcggctcaaaggctttaacgatccaattggctagacaaggcatggatggcgccgagtacgaattcgccaggctattatttgaagatcgaaacaatgaggctcagagctatgtggactggctagtacacattcataagggtgtccaacttgagctggcggggcagaggcgaaaagaaaacgatgaatcaagttcctcattagcatctacgttcactgggttacgtccaaactactggtagctagaatatatcgacggacctgcacgcatagcatcggggcgcattagaatcttattgagcgtgggtctgaaaaaggcaggacggtccaaagatttttcaaactcgaataaacaacacagaccaatgacattttcgtggttgtctgcgcactcgatgatacagtgccttggtctatgtacgcttggcactaagacctgcatatgtgatttgcgttaacctgcagccattgcattgatacatggaggtccgcagcggcatgcagggccaggggataaataaatagacatacgtatctatctcaaatccaacaagaattacctgtgcattagagggacgatgggacaacatgacggctagcactgcgatcaagcaggtatcccgatggcctcgatggggctactttacccc

SEQ ID NO: 19374 - DNA, 1029 bp, Muscodor strobelii
  misc_feature: SGI cDNA ID NO. 566513
  misc_feature: Encodes the peptide sequence at SEQ ID NO 19375
atggcaaccacaaacgaacagaagaaactgcttccccagggacattacaaaggctgcgatccgatagagtcatattgccaggcaaacgggtatgcacttcccgactctcatccgaaaacaccgttcgaagacgatgatttccaatatgagcaaaatcttgatgctgggtacgacatatcaggcgaggacccacaagagcagcttgtgagcaatgatttggtcgacgggctcgatgccgctgccgccactgagtacaagaaggattgggatgcattctacacggaccatggcttctatctcgtacgcatttgggtctacaaagatgcccatgttcccaatctcagtcagcaagctgcgtaccttagctattcccaaagccaagatgggatcaacaaatatatctatttccttggcaaccccgatccggcaaaagaagaacgacatatcttccctcgtgacctggaagactactacagagcttatgtcgtgtacgtcgcctttggcaccaagatgaaaggatggcaaatacagcctgacgacagcacctggcactcagccgatcagagccggctgcaagacgaagcatggaaatattaccaaaccttgaccgatgaagaaaagggtctttacgacatacgacatgcgattataatgaccgaaatgcggaatatgttgcagagcgaccacgagcttgcagcacaattaccacctttggcaaggactgagcgcgagcaggtactgctggactgctggactgctggactgcttgggtggtatcggcaatgcacgaggcttgcgattagggaactagagcctcgagctctaccgctgcttgacggagacggcaataaacaaaagacgaagtttgcttttgcagcggcgaagtgggataggaacgagcaagttgccgagcaagtcaacgcagcaaccacggccatgcgatcacagcaacgcgacgactgcataaacttgagcgacgagttctttggcgccaacgacacgactgggttgaggcggctcagatgttag

SEQ ID NO: 19375 - protein, 342 aa, Muscodor strobelii
  misc_feature: SGI Peptide ID NO. 566513
MATTNEQKKLLPQGHYKGCDPIESYCQANGYALPDSHPKTPFEDDDFQYEQNLDAGYDISGEDPQEQLVSNDLVDGLDAAAATEYKKDWDAFYTDHGFYLVRIWVYKDAHVPNLSQQAAYLSYSQSQDGINKYIYFLGNPDPAKEERHIFPRDLEDYYRAYVVYVAFGTKMKGWQIQPDDSTWHSADQSRLQDEAWKYYQTLTDEEKGLYDIRHAIIMTEMRNMLQSDHELAAQLPPLARTEREQVLLDCWTAGLLGWYRQCTRLAIRELEPRALPLLDGDGNKQKTKFAFAAAKWDRNEQVAEQVNAATTAMRSQQRDDCINLSDEFFGANDTTGLRRLRC

SEQ ID NO: 19376 - DNA, 1338 bp, Muscodor strobelii
  misc_feature: SGI cDNA ID NO. 566514
  misc_feature: Encodes the peptide sequence at SEQ ID NO 19377
atgctttccctctcgtctctactcaatcctgcccctccagggcgccctgctaccaacaggtttcctcctagtccagcatcttcatccccgacagactcttgtgtagaagactcttcgtatcaaaatcgacctggtatgccaaagcacaagatgccgaaagatgccgctgtcttcaccaagagtaaaccaaagggatcgatcaacttccagcctttcgagagattagatgaggtttcgctccgctcggttcgaaagttccatgtgtaccccctcggcaagatacaagagtattcccggcacattccatataatagtggcaaaaaggacttctatgaaaagacgggccgggagagcttcgaggtatttcagtatgttttcaagattcccggcaacgataccgagtatgccgttatgtgggactacaacgttggccttgttcgtatgactccgttttttaaatgctgcaaatatcccaagacaacacccgccaagatgctgaactcaaatcctgggctcaaagaaataacccatagcatcactggtggctctatcatggctcaaggctactggatgccataccaatgtgcaaaagctgtgtgtgcgactttctgctggggtatcgctggggcactcattcctatcttcggtcccgacttcccatctttgtgtattgctcccgaagcaccagattatggtcgaatgatcatcgagccagccatcatcatccagtctactcgtgaagcagaacactttcgtcggctctatagtagcaatgcaaactcgcaacccggaccaaaaccggacgatggaaatatcagtcccaggcgtgaccgtcgtatgttccggagcggatatgatgatgcatcaagaacccatccacgatatcgcatccgcaagtcctacctcccaacaccaggcgatgaaagtatagtgtacacaacagatacggatggagaaatatcgcctaatgtggagcgaggtaacccaccacaacgtcccagagatcgcgacggccaaacatcagtcagcggaccagggggcgcagacaagaaagccgcgcttcttctcatgaacctgagcgttcgcgatacactctggaagaccgcgggtaaacttgagcccgccgaggaggcggcaagggagaacaatcgagctttcaatagtaatcgtcgagatggaagatttgagggggagtatgaggagaaagagagaggaaagggaaaggagaagagtgtcgtgagggtggcgagtggtgtgagctcggagactagtacgccgcttgagggacagtttccgaattgtcacaggatcaagagggttaggtctaattctatgtag

SEQ ID NO: 19377 - protein, 445 aa, Muscodor strobelii
  misc_feature: SGI Peptide ID NO. 566514
  misc_feature (1)..(328): NCBI GI: 156063618 Blast Desc: SS1G_01927 [Sclerotinia sclerotiorum 1980] gi|154697261|gb|EDN96999.1| SS1G_01927 [Sclerotinia sclerotiorum 1980]
  misc_feature (1)..(271): NCBI GI: 256726976 Blast Desc: NECHADRAFT_33402 [Nectria haematococca mpVI 77-13-4]
  misc_feature (1)..(319): NCBI GI: 261352420 Blast Desc: conserved [Verticillium albo-atrum VaMs.102]
  misc_feature (1)..(285): NCBI GI: 46136573 Blast Desc: FG09802.1 [Gibberella zeae PH-1]
  misc_feature (1)..(289): NCBI GI: 119473121 Blast Desc: APSES transcription factor Xbp1, [Neosartorya fischeri NRRL 181] gi|119406659|gb|EAW16610.1| APSES transcription factor Xbp1, [Neosartorya fischeri NRRL 181]
  misc_feature (1)..(254): NCBI GI: 225555590 Blast Desc: conserved [Ajellomyces capsulatus G186AR]
  misc_feature (1)..(254): NCBI GI: 154270941 Blast Desc: [Ajellomyces capsulatus NAm1] gi|150409547|gb|EDN04991.1| [Ajellomyces capsulatus NAm1]
  misc_feature (1)..(254): NCBI GI: 240280877 Blast Desc: APSES transcription factor Xbp1 [Ajellomyces capsulatus H143]
  misc_feature (1)..(265): NCBI GI: 226294838 Blast Desc: conserved [Paracoccidioides brasiliensis Pb18]
  misc_feature (1)..(259): NCBI GI: 115390188 Blast Desc: conserved [Aspergillus terreus NIH2624] gi|114194995|gb|EAU36695.1| conserved [Aspergillus terreus NIH2624]
MLSLSSLLNPAPPGRPATNRFPPSPASSSPTDSCVEDSSYQNRPGMPKHKMPKDAAVFTKSKPKGSINFQPFERLDEVSLRSVRKFHVYPLGKIQEYSRHIPYNSGKKDFYEKTGRESFEVFQYVFKIPGNDTEYAVMWDYNVGLVRMTPFFKCCKYPKTTPAKMLNSNPGLKEITHSITGGSIMAQGYWMPYQCAKAVCATFCWGIAGALIPIFGPDFPSLCIAPEAPDYGRMIIEPAIIIQSTREAEHFRRLYSSNANSQPGPKPDDGNISPRRDRRMFRSGYDDASRTHPRYRIRKSYLPTPGDESIVYTTDTDGEISPNVERGNPPQRPRDRDGQTSVSGPGGADKKAALLLMNLSVRDTLWKTAGKLEPAEEAARENNRAFNSNRRDGRFEGEYEEKERGKGKEKSVVRVASGVSSETSTPLEGQFPNCHRIKRVRSNSM

SEQ ID NO: 19378 - DNA, 1305 bp, Muscodor strobelii
  misc_feature: SGI cDNA ID NO. 566515
  misc_feature: Encodes the peptide sequence at SEQ ID NO 19379
atgtcacccatgcacatcgaagaaatcagcgacgacgtcgccgagcgcctcaagctcaatgagacgaaacctcagtcgcaaccgcctgccagccaagagacccaaaatggcccaacaccacccccgaaagtcggtccggagctctcacccggccgggcaatgacatcctcaaaaacaatagatgaagtagtcgccgagttaaaggccacacccttctttatgacagagcttgaagaaaacgacgaaacagaagccttcaaagcactagcctatgagggaactcccttagaaaatggcacagatttcaaagaacgcggcaacgaatgcttcaagctcgagcagtgggtcgatgctaaggagttctacactaagggcatcctgatcctcgccgctgaggagcggatgaggaagcaagatgctgagctcgatgccgcgaagccaagagcagacccaaaattagtggcagagggagagaatagtgcaaagggtgaagtgacagaggaagaaatccaacaacataaatcagtcttagaatcactctacggaaacagagcagcctgtcacctagagctgaagaactaccgctcagcttggctcgacgggtccgcagccttacgcctaaaccccaaaaacatcaaagcctactaccgctccgcccgcgcattcctcgccgtggggcgcatagcagaagcagacgatgcctgttcacggggtctcgagctcgattctacaaacagctctctaaaagccgtggcaagggatatcatcaaacgcgctgaagatgccgatgccaaagcccgtaaagaagcggagagacacgcaaaggaaaatagacggaaaaccttgatcaaggcagcactggctgcaagacagatcagtacgaggacaacggcgcagccacccgagatggaggatgcggggttgaggctcgagcctgatcctgatgaccctgcgagtaatcttgcgtttcccacggtgttgttgtatccttgtcatttggagagtgatttcattaagagtttcaatgagacgcattctctatctgatcatttatcgtacgtcttcccattaccgtgggataaggagggagtctacaggttggcgggcgttgagtgctttatggaaactgttacgggtggattgataaaagtcgggaagaaagtgccgttgttgaagatgttggcaggtggcaaggttgaggttgtcgatgaggttgtacggatatttgttgtgccgaaggataaggcccctgagtgggtagaggagttcaagatgaagagggcggcggagaagggtgcaaattga

SEQ ID NO: 19379 - protein, 434 aa, Muscodor strobelii
  misc_feature: SGI Peptide ID NO. 566515
  misc_feature (212)..(245): Pfam Id: PF00515 Pfam Desc: Tetratricopeptide repeat
  misc_feature (4)..(432): NCBI GI: 46136575 Blast Desc: FG09803.1 [Gibberella zeae PH-1]
  misc_feature (4)..(432): NCBI GI: 256727549 Blast Desc: [Nectria haematococca mpVI 77-13-4]
  misc_feature (25)..(429): NCBI GI: 116194672 Blast Desc: CHGG_03934 [Chaetomium globosum CBS 148.51] gi|88179847|gb|EAQ87315.1| CHGG_03934 [Chaetomium globosum CBS 148.51]
  misc_feature (46)..(431): NCBI GI: 171683283 Blast Desc: protein product [Podospora anserina] gi|170941601|emb|CAP67255.1| protein product [Podospora anserina]
  misc_feature (1)..(423): NCBI GI: 145603262 Blast Desc: MGG_06164 [Magnaporthe grisea 70-15] gi|145011526|gb|EDJ96182.1| MGG_06164 [Magnaporthe grisea 70-15]
  misc_feature (48)..(431): NCBI GI: 85107452 Blast Desc: NCU06340 [Neurospora crassa OR74A] gi|28923979|gb|EAA33138.1| conserved [Neurospora crassa OR74A]
  misc_feature (4)..(429): NCBI GI: 239610319 Blast Desc: tetratricopeptide repeat domain-containing protein [Ajellomyces dermatitidis ER-3]
  misc_feature (41)..(431): NCBI GI: 154297037 Blast Desc: BC1G_12607 [Botryotinia fuckeliana B05.10] gi|150843134|gb|EDN18327.1| BC1G_12607 [Botryotinia fuckeliana B05.10]
  misc_feature (4)..(429): NCBI GI: 261188759 Blast Desc: tetratricopeptide repeat domain-containing protein [Ajellomyces dermatitidis SLH14081] gi|239592025|gb|EEQ74606.1| tetratricopeptide repeat domain-containing protein [Ajellomyces
  misc_feature (5)..(427): NCBI GI: 119473105 Blast Desc: TPR repeat protein [Neosartorya fischeri NRRL 181] gi|119406651|gb|EAW16602.1| TPR repeat protein [Neosartorya fischeri NRRL 181]
MSPMHIEEISDDVAERLKLNETKPQSQPPASQETQNGPTPPPKVGPELSPGRAMTSSKTIDEVVAELKATPFFMTELEENDETEAFKALAYEGTPLENGTDFKERGNECFKLEQWVDAKEFYTKGILILAAEERMRKQDAELDAAKPRADPKLVAEGENSAKGEVTEEEIQQHKSVLESLYGNRAACHLELKNYRSAWLDGSAALRLNPKNIKAYYRSARAFLAVGRIAEADDACSRGLELDSTNSSLKAVARDIIKRAEDADAKARKEAERHAKENRRKTLIKAALAARQISTRTTAQPPEMEDAGLRLEPDPDDPASNLAFPTVLLYPCHLESDFIKSFNETHSLSDHLSYVFPLPWDKEGVYRLAGVECFMETVTGGLIKVGKKVPLLKMLAGGKVEVVDEVVRIFVVPKDKAPEWVEEFKMKRAAEKGAN

SEQ ID NO: 19380 - DNA, 3493 bp, Muscodor strobelii
  misc_feature: SGI EST ID NO. CUFF.45250.0
  misc_feature: Variant of the nucleotide sequence at SEQ ID NO 19378
gcgagagcgacaacgtcggtgataatcacaatagcgttgacgatgacaagatcgagcacaacgcggcgctcgcgaatgcgtaagctccgtttcaacagtctccctgtgaaccagatataaagcgaggatatggtcgcctcctgcgccaggaatgcaaacaactggatgcgtgtctcgatcgagtcgcgcggtgaccaacgcgcactcacagctagatcgcgatcgactgccggtatagatgtgacccagttaggcacttgtacaaataaggccgtgaatataatcatgccaagaacgaaacgcaggatccgccggcttctggtcacaaggtgcattcgcgaccataacaccaagctttctccagtcaccagcatcgaccagccgatagcgctgatgagtgcgtacagccaccatgggcagcccggtgcgaaccagttcagcagatagcccaggcagtgcagaattattccccaggccaagatgagcaggctccagaagtacaatgtccgatacgccgtgaagactcggaaaatctgcacgtgcaattccagcgcgatccacagcgagatagtcatgaatgatgtgagaatgcatagctgcgttggcgtaatgataggaatcgatccatgagctccatcgtttatggacgagtttggcattgtggatgatatttcgcatatgacttcaatgtgcaacgcgcaaaggtcgcgtgtatgtgcggctcaaaactagtcagagcatactaaaaagtgagaatgggcagactaccagaagtatggccatgaaagtgatcatcttagctgaggctcaaggaatctaggacctctctcctaaatgtgaatcgagttacgatctacatcctttcattctgaatcagtacacgaagcgatacgtaagccgtcctgtagctgcgaggtgttcgatgcaagcaaaacctaacgcttcattcctcttgcgaatgggacaatacgcgtgggctctgactgatgcacaggcagcatgctgcatctgtcaagaggctggcaagctgagcgagtagctgcgaatctggagtgcaatcgaacgttacatagcgcgatggaggatgcggaaaatgcatgcgtgtgatgtaatcgagcatgctgttttgatagaatccattgcttgattaggtcgccaccagccagcctgcttgctcaattgccattcttgttgcccatcctttccaggcctgagtgcagcctgcttccgtctctgcacgatgcgtggggtctatgtacaggctcagtcagctcaggcatactggagttgcatccttttttaggatcgtctcaatagagtagggaacgacaggatgtcgcgaaacaccaaagaattaaagcgatggaccagaccaggaggaagaaacacatggcgataatttgataatcctgcttagatgcatattctgacgtactgccttgacagcccactttgcccctccaaacactgagaattttggtggggtggctttcagtcgcatgcgactggcatcaactacggaatttccacatgagatcaagatcgccagtgaaagacagattaaatactcaaatctgtagtgaaacattttatggcggcaggcaaatgtgccttaagcgatgtcacccatgcacatcgaagaaatcagcgacgacgtcgccgagcgcctcaagctcaatgagacgaaacctcagtcgcaaccgcctgccagccaagagacccaaaatggcccaacaccacccccgaaagtcggtccggagctctcacccggccgggcaatgacatcctcaaaaacaatagatgaagtagtcgccgagttaaaggccacacccttctttatgacagagcttgaagaaaacgacgaaacagaagccttcaaagcactagcctatgagggaactcccttagaaaatggcacagatttcaaagaacgcggcaacgaatgcttcaagctcgagcagtgggtcgatgctaaggagttctacactaagggcatcctgatcctcgccgctgaggagcggatgaggaagcaagatgctgagctcgatgccgcgaagccaagagcagacccaaaattagtggcagagggagagaatagtgcaaagggtgaagtgacagaggaagaaatccaacaacataaatcagtcttagaatcactctacggaaacagagcagcctgtcacctagagctgaagaactaccgctcagcttggctcgacgggtccgcagccttacgcctaaaccccaaaaacatcaaagcctactaccgctccgcccgcgcattcctcgccgtggggcgcatagcagaagcagacgatgcctgttcacggggtctcgagctcgattctacaaacagctctctaaaagccgtggcaagggatatcatcaaacgcgctgaagatgccgatgccaaagcccgtaaagaagcggagagacacgcaaaggaaaatagacggaaaaccttgatcaaggcagcactggctgcaagacagatcagtacgaggacaacggcgcagccacccgagatggaggatgcggggttgaggctcgagcctgatcctgatgaccctgcgagtaatcttgcgtttcccacggtgttgttgtatccttgtcatttggagagtgatttcattaagagtttcaatgagacgcattctctatctgatcatttatcgtacgtcttcccattaccgtgggataaggagggagtctacaggttggcgggcgttgagtgctttatggaaactgttacgggtggattgataaaagtcgggaagaaagtgccgttgttgaagatgttggcaggtggcaaggttgaggttgtcgatgaggttgtacggatatttgttgtgccgaaggataaggcccctgagtgggtagaggagttcaagatgaagagggcggcggagaagggtgcaaattgagcaacggcataatacctgggtagtggatgagcagatgaaggcaggagaaaataatgcaagttgatcaatgtggaggtcttgattacctatgtctgtaagctcatgcatcgcgcccgggaagccggaggggagaagtagataagagggcgcgatgcgagttagcacaccacatgatcaccatgttgtacaggaataagcggcatgcattgcgtatctaatattcaaatgttcaaaatagataaaatagaatgaaataattaagaaaaaaaagacagtcaacctctctgtgacaattgtgacctcagtgtacactgcgggagccaccctgcaaatgcaccgagaaaagtcctctggaagattgaccgggctgggactcgaacccctgaccggagagatattgcagttgaggtattgcgtgaacagatacacaagctgcttcgttgcccactgggctaggacgccactccattggagattcggttagttattgtgccttatgaggacgcgcttctttgtgcgtggtggttgaccggggcaacgtcgggtgggtggatggtgccttcctgggc

SEQ ID NO: 19381 - DNA, 1236 bp, Muscodor strobelii
  misc_feature: SGI cDNA ID NO. 566516
  misc_feature: Encodes the peptide sequence at SEQ ID NO 19382
atgccaaactcgtccataaacgatggagctcatggatcgattcctatcattacgccaacgcagctatgcattctcacatcattcatgactatctcgctgtggatcgcgctggaattgcacgtgcagattttccgagtcttcacggcgtatcggacattgtacttctggagcctgctcatcttggcctggggaataattctgcactgcctgggctatctgctgaactggttcgcaccgggctgcccatggtggctgtacgcactcatcagcgctatcggctggtcgatgctggtgactggagaaagcttggtgttatggtcgcgaatgcaccttgtgaccagaagccggcggatcctgcgtttcgttcttggcatgattatattcacggccttatttgtacaagtgcctaactgggtcacatctataccggcagtcgatcgcgatctagctgtgagtgcgcgttggtcaccgcgcgactcgatcgagacacgcatccagttgtttgcattcctggcgcaggaggcgaccatatcctcgctttatatctggttcacagggagactgttgaaacggagcttacgcattcgcgagcgccgcgttgtgctcgatcttgtcatcgtcaacgctattgtgattatcaccgacgttgtcgctctcgcttttgccttcaccaaccagcatgtcctcaagcagcccctacagaacctcagctacgctctcaagcttaaatttgagtttctagtactcaaccagctgaccagtctgtcccgcgatggctttggcctgtcgggctgccgacagcagcaggagaacgcagcgacgagaaatcggtatctggtcgagagaaatggcaaagacaacaacggcgctgcccttggtatcgagccgccgatgacggcaccgtcaaatgcgagtgcgactcgaaaagagagtggaaacgaggaatataactgcgaaagggcccagaatgtccacttttggtctccccttcctagtcaaatgattctgaccaatatcactgccgagcagagaagtcctcgcctcccggatatggtatacaccggatctgacaacgttcatcgcctaagggattccaattcggtccagagcacatgcatctatccaggagctggattggcatcgccgcctgcccaggacaaggttacaatcttcgccaggaacattatgcgccatgcggttaaggccgactataatcagaataacaaagttgactag

SEQ ID NO: 19382 - protein, 411 aa, Muscodor strobelii
  misc_feature: SGI Peptide ID NO. 566516
  misc_feature (20)..(293): NCBI GI: 256724066 Blast Desc: NECHADRAFT_51340 [Nectria haematococca mpVI 77-13-4]
  misc_feature (7)..(255): NCBI GI: 226284072 Blast Desc: integral membrane protein [Paracoccidioides brasiliensis Pb01]
  misc_feature (7)..(255): NCBI GI: 225681565 Blast Desc: conserved [Paracoccidioides brasiliensis Pb03]
  misc_feature (24)..(305): NCBI GI: 145231190 Blast Desc: An01g14710 [Aspergillus niger] gi|134055989|emb|CAK44168.1| protein product [Aspergillus niger]
  misc_feature (7)..(255): NCBI GI: 226288708 Blast Desc: integral membrane protein [Paracoccidioides brasiliensis Pb18]
  misc_feature (25)..(256): NCBI GI: 261197567 Blast Desc: integral membrane protein [Ajellomyces dermatitidis SLH14081] gi|239595816|gb|EEQ78397.1| integral membrane protein [Ajellomyces dermatitidis SLH14081] gi|239606813|gb|EEQ83800.1|
  misc_feature (28)..(295): NCBI GI: 242778478 Blast Desc: conserved [Talaromyces stipitatus ATCC 10500] gi|218722866|gb|EED22284.1| conserved [Talaromyces stipitatus ATCC 10500]
  misc_feature (17)..(288): NCBI GI: 169779747 Blast Desc: [Aspergillus oryzae RIB40] gi|83773077|dbj|BAE63205.1| protein product [Aspergillus oryzae]
  misc_feature (17)..(288): NCBI GI: 238500419 Blast Desc: AFLA_096250 [Aspergillus flavus NRRL3357] gi|220693197|gb|EED49543.1| AFLA_096250 [Aspergillus flavus NRRL3357]
  misc_feature (17)..(288): NCBI GI: 49409603 Blast Desc: [Aspergillus flavus]
MPNSSINDGAHGSIPIITPTQLCILTSFMTISLWIALELHVQIFRVFTAYRTLYFWSLLILAWGIILHCLGYLLNWFAPGCPWWLYALISAIGWSMLVTGESLVLWSRMHLVTRSRRILRFVLGMIIFTALFVQVPNWVTSIPAVDRDLAVSARWSPRDSIETRIQLFAFLAQEATISSLYIWFTGRLLKRSLRIRERRVVLDLVIVNAIVIITDVVALAFAFTNQHVLKQPLQNLSYALKLKFEFLVLNQLTSLSRDGFGLSGCRQQQENAATRNRYLVERNGKDNNGAALGIEPPMTAPSNASATRKESGNEEYNCERAQNVHFWSPLPSQMILTNITAEQRSPRLPDMVYTGSDNVHRLRDSNSVQSTCIYPGAGLASPPAQDKVTIFARNIMRHAVKADYNQNNKVD

SEQ ID NO: 19383 - DNA, 1368 bp, Muscodor strobelii
  misc_feature: SGI cDNA ID NO. 566517
  misc_feature: Encodes the peptide sequence at SEQ ID NO 19384
atgttcataaacaaccctgcgcatggcgttgtcttcccacgggccattactgcgccacgagtcctcgatatcaatgaccatgattcaattcgctcggttgccagtactttggcttacggcgtccagagctattatacgggaaatctaacaaatactccggaaacgattgctattttcccagcgcctgtctactggtgggaagcgggtgcttgctggggagccatgctggattactctcactacactggagatacgagctacgatgaagtgacaacacaagcgcttctcagtcaagttgggccggacttcgacttcatggatcctctgtactacggcagcgaaggaaatgatgatcaagccttttggtcatttactatcttagatgcggcagaaagaaatttcccacagccgaatagcacaataccgccatggcttacaattgccgaaaacatatggaatacgatggtagtccgctgggacgatacgagctgcggtggtgggcttcactggcagatctttgaggataatgtcaacggccttgactataagaactccgtctccaacggtgggttcttccaactatcggcgcgtcttgctcgagcgacgaacaacgatacctatttcaaatgggctgagaaggtgtataactggtcgacagacgttgggttcatcgactcggatttcctcatacgcgatggggctagttctggagaagattgtaagaagataaatccaatcagcttctcgtactcccagggtatctacctatacggagcagcggtactctacaactatacagatggagatttgaaatggggaaaacggaccaaagggctcctacaaggagccaagtcatactttactcccttcgataatggtacgaacaacatcatgtatgagcacgcctgcgagccgatcgacaattgcaacaccgaccagaagtcattcaagggctacctttcacgattcatgggagcgacgacacagatgatgccctcaactctcagcaacgttcaaacttggcttaatgcgtctgccgttgcggctggtaaggcgtgttcaggaggcgatgacgaaaccacatgcggtatgaagtggtacgttggtgggtacgacgggaatccgggattaggccagtcgatgagtgcacttgagacagtgcaggcgcttcttgcttttgattcccagccacctttcaaagctggcgaaattaagcatgtcggtaataccagtacgactacaccgacggccagcccaacaagttcgcctgcgccgacggatactgattctgcagggtttgcacttgtacctgactatggactgggttggatgacactcatctctgcgttgatgtttggcttagcataa

SEQ ID NO: 19384 - protein, 455 aa, Muscodor strobelii
  misc_feature: SGI Peptide ID NO. 566517
  misc_feature (21)..(403): Pfam Id: PF03663 Pfam Desc: Glycosyl hydrolase family 76
  misc_feature (10)..(428): NCBI GI: 171683271 Blast Desc: protein product [Podospora anserina] gi|170941595|emb|CAP67249.1| protein product [Podospora anserina]
  misc_feature (19)..(407): NCBI GI: 116194654 Blast Desc: CHGG_03925 [Chaetomium globosum CBS 148.51] gi|88179838|gb|EAQ87306.1| CHGG_03925 [Chaetomium globosum CBS 148.51]
  misc_feature (22)..(403): NCBI GI: 156030546 Blast Desc: SS1G_14497 [Sclerotinia sclerotiorum 1980] gi|154700888|gb|EDO00627.1| SS1G_14497 [Sclerotinia sclerotiorum 1980]
  misc_feature (17)..(455): NCBI GI: 256727626 Blast Desc: NECHADRAFT_34132 [Nectria haematococca mpVI 77-13-4]
  misc_feature (19)..(414): NCBI GI: 164429287 Blast Desc: NCU09937 [Neurospora crassa OR74A] gi|157073014|gb|EAA28695.2| conserved [Neurospora crassa OR74A]
  misc_feature (15)..(407): NCBI GI: 145612399 Blast Desc: conserved [Magnaporthe grisea 70-15] gi|145019570|gb|EDK03798.1| conserved [Magnaporthe grisea 70-15]
  misc_feature (17)..(455): NCBI GI: 46136265 Blast Desc: FG09648.1 [Gibberella zeae PH-1]
  misc_feature (29)..(422): NCBI GI: 261352449 Blast Desc: mannan endo-1,6-alpha-mannosidase DCW1 [Verticillium albo-atrum VaMs.102]
  misc_feature (11)..(407): NCBI GI: 59803166 Blast Desc: mannan endo-1,6-alpha-mannosidase-like protein [Magnaporthe grisea]
  misc_feature (19)..(414): NCBI GI: 16945412 Blast Desc: conserved [Neurospora crassa]
  misc_feature (9)..(401): SWISSPROT Homolog: EC 3.2.1.101 Mannan endo-1,6-alpha-mannosidase
MFINNPAHGVVFPRAITAPRVLDINDHDSIRSVASTLAYGVQSYYTGNLTNTPETIAIFPAPVYWWEAGACWGAMLDYSHYTGDTSYDEVTTQALLSQVGPDFDFMDPLYYGSEGNDDQAFWSFTILDAAERNFPQPNSTIPPWLTIAENIWNTMVVRWDDTSCGGGLHWQIFEDNVNGLDYKNSVSNGGFFQLSARLARATNNDTYFKWAEKVYNWSTDVGFIDSDFLIRDGASSGEDCKKINPISFSYSQGIYLYGAAVLYNYTDGDLKWGKRTKGLLQGAKSYFTPFDNGTNNIMYEHACEPIDNCNTDQKSFKGYLSRFMGATTQMMPSTLSNVQTWLNASAVAAGKACSGGDDETTCGMKWYVGGYDGNPGLGQSMSALETVQALLAFDSQPPFKAGEIKHVGNTSTTTPTASPTSSPAPTDTDSAGFALVPDYGLGWMTLISALMFGLA

SEQ ID NO: 19385 - DNA, 1524 bp, Muscodor strobelii
  misc_feature: SGI EST ID NO. CUFF.45253.0
  misc_feature: Variant of the nucleotide sequence at SEQ ID NO 19383
ccggacttcgacttcatggatcctctgtactacggcagcgaaggaaatgatgatcaagccttttggtcatttactatcttagatgcggcagaaagaaatttcccacagccgaatagcacaataccgccatggcttacaattgccgaaaacatatggaatacgatggtagtccgctgggacgatacgagctgcggtggtgggcttcactggcagatctttgaggataatgtcaacggccttgactataagaactccgtctccaacggtgggttcttccaactatcggcgcgtcttgctcgagcgacgaacaacgatacctatttcaaatgggctgagaaggtgtataactggtcgacagacgttgggttcatcgactcggatttcctcatacgcgatggggctagttctggagaagattgtaagaagataaatccaatcagcttctcgtactcccagggtatctacctatacggagcagcggtactctacaactatacagatggagatttgaaatggggaaaacggaccaaagggctcctacaaggagccaagtcatactttactcccttcgataatggtacgaacaacatcatgtatgagcacgcctgcgagccgatcgacaattgcaacaccgaccagaagtcattcaagggctacctttcacgattcatgggagcgacgacacagatgatgccctcaactctcagcaacgttcaaacttggcttaatgcgtctgccgttgcggctggtaaggcgtgttcaggaggcgatgacgaaaccacatgcggtatgaagtggtacgttggtgggtacgacgggaatccgggattaggccagtcgatgagtgcacttgagacagtgcaggcgcttcttgcttttgattcccagccacctttcaaagctggcgaaattaagcatgtcggtaataccagtacgactacaccgacggccagcccaacaagttcgcctgcgccgacggatactgattctgcagggtttgcacttgtacctgactatggactgggttggatgacactcatctctgcgttgatgtttggcttagcataaagcgtctgattgcggacacgatgtttcacgggtatgagactggcgaacttggaagcataaggaagtgcaggggacgctcatatagaaagaatacctaagtaatgagatgagtcttcctagtcaacttcccaacagaccggcgaaccaggctggtctgtatgcacaactatacccctgtatcatgctcccagaagcatacttaccgcctcacctcgaagggggaactcgaataggcgggccatctcgtgcacgatggattggacaatggtgatttgctaggctctgaatgacttgacttgtatatagaattggtgtgatttccatcagcatacgagcgagcgcgcagcaactgttacgatgatgttgatgtcatgagaggacaagctgttgtttcatgatgattggtttaatgttgcaggaaagcagtgttgtgcatgcacttaaacagaaaactac

SEQ ID NO: 19386 - DNA, 1263 bp, Muscodor strobelii
  misc_feature: SGI cDNA ID NO. 566518
  misc_feature: Reduced expression when VOC is produced
  misc_feature: Encodes the peptide sequence at SEQ ID NO 19387
atgccagcgtttaatctcgagacctgtgctcgggccaacatcttggcattagaaccctaccgttgtgctagagatgattataaagatgatggcacaaacgtcctattagacgcaaatgagaatgcctacggaccttcgttgactgcgtccattgcgagagacggaagctctggccctgagattgacttcttagggcttcacagataccccgatccgcaccagcgggagttgaagcagttactgtgtgatctgagaaacacccaccatcacacagaaaagaagattaccccagataacttatttgtcggagttggaagcgacgaagccatcgatggattgatgaggtgcttctgcgccccgggacgcgataagattttagtctgtccgcctacttacggcatgtattccgtttctgcgcagatcaacgatgtcggattggtgaagataccgcttcttcccgcgcccacattcgcacttgatgttgagaagatcaaagatgcactgtcaaatgagccaaatattaaactcatctacctctgcacccccggaaatccgactggctcacggctatcgaagggtgacataagacaaattctggaacacccgacatggaacggagttgtcattgtcgatgaggcttatgttgacttctcacctgagggttcatcactcgctgaatgggtagctgaatggccgaacttggctgtcatgcagacgagttcgaaagggttcggtatggctggtatccggttgggatccgttttcacatcggtgcccattgcgcagctactgaacaacttgaaagcgccatacaacatccccagtcctacgagtgcgctcgcgaactacgcattttcggcccctggcttagcggtgatgcgtgcgaacagagagaaactcgtgacacagcgagagcgtttacttcgagaactaccaaaagtcaagggtgtcgggcgactgcgtggtggcacggagagcaactttctgctatttgagatgttgaacaaggacggtcaaccggataatgccacggcactagctgtgtatgagatgttggctgagaataagggcgtggtcgtgcggtttagaggcaaggagcatgggtgccttggttgcttacggattacagtcggaacagagacggaggttacaaggttcttagaggcgcttacgaagtctctagcagaggtcaatggacacgatgttgtcaattcgccggacgaggaaaagagggagatagatgctaatgctgttattgcttag

SEQ ID NO: 19387 - protein, 420 aa, Muscodor strobelii
  misc_feature: SGI Peptide ID NO. 566518
  misc_feature (31)..(390): Pfam Id: PF00155 Pfam Desc: Aminotransferase class I and II
  misc_feature (65)..(390): Pfam Id: PF00155 Pfam Desc: Aminotransferase class I and II
  misc_feature (1)..(400): NCBI GI: 85107531 Blast Desc: histidinol-phosphate aminotransferase [Neurospora crassa OR74A] gi|28923999|gb|EAA33158.1| histidinol-phosphate aminotransferase [Neurospora crassa OR74A]
  misc_feature (1)..(420): NCBI GI: 261352450 Blast Desc: histidinol-phosphate aminotransferase [Verticillium albo-atrum VaMs.102]
  misc_feature (1)..(400): NCBI GI: 256727053 Blast Desc: NECHADRAFT_66637 [Nectria haematococca mpVI 77-13-4]
  misc_feature (1)..(420): NCBI GI: 171683269 Blast Desc: protein product [Podospora anserina] gi|170941594|emb|CAP67248.1| protein product [Podospora anserina]
  misc_feature (23)..(399): NCBI GI: 46136263 Blast Desc: FG09647.1 [Gibberella zeae PH-1]
  misc_feature (4)..(397): NCBI GI: 156063710 Blast Desc: SS1G_01973 [Sclerotinia sclerotiorum 1980] gi|154697307|gb|EDN97045.1| SS1G_01973 [Sclerotinia sclerotiorum 1980]
  misc_feature (3)..(420): NCBI GI: 242778537 Blast Desc: histidinol-phosphate aminotransferase [Talaromyces stipitatus ATCC 10500] gi|218722878|gb|EED22296.1| histidinol-phosphate aminotransferase [Talaromyces stipitatus
  misc_feature (4)..(412): NCBI GI: 212533627 Blast Desc: histidinol-phosphate aminotransferase [Penicillium marneffei ATCC 18224] gi|210072334|gb|EEA26423.1| histidinol-phosphate aminotransferase [Penicillium marneffei ATCC
  misc_feature (1)..(420): NCBI GI: 116194656 Blast Desc: CHGG_03926 [Chaetomium globosum CBS 148.51] gi|88179839|gb|EAQ87307.1| CHGG_03926 [Chaetomium globosum CBS 148.51]
  misc_feature (4)..(397): NCBI GI: 258563344 Blast Desc: histidinol-phosphate aminotransferase [Uncinocarpus reesii 1704] gi|237907924|gb|EEP82325.1| histidinol-phosphate aminotransferase [Uncinocarpus reesii 1704]
  misc_feature (4)..(396): SWISSPROT Homolog: EC 2.6.1.9 Histidinol-phosphate transaminase
  misc_feature: Useful for introducing or modulating the production of volatile compounds
MPAFNLETCARANILALEPYRCARDDYKDDGTNVLLDANENAYGPSLTASIARDGSSGPEIDFLGLHRYPDPHQRELKQLLCDLRNTHHHTEKKITPDNLFVGVGSDEAIDGLMRCFCAPGRDKILVCPPTYGMYSVSAQINDVGLVKIPLLPAPTFALDVEKIKDALSNEPNIKLIYLCTPGNPTGSRLSKGDIRQILEHPTWNGVVIVDEAYVDFSPEGSSLAEWVAEWPNLAVMQTSSKGFGMAGIRLGSVFTSVPIAQLLNNLKAPYNIPSPTSALANYAFSAPGLAVMRANREKLVTQRERLLRELPKVKGVGRLRGGTESNFLLFEMLNKDGQPDNATALAVYEMLAENKGVVVRFRGKEHGCLGCLRITVGTETEVTRFLEALTKSLAEVNGHDVVNSPDEEKREIDANAVIA

SEQ ID NO: 19388 - DNA, 1666 bp, Muscodor strobelii
  misc_feature: SGI EST ID NO. CUFF.45268.0
  misc_feature: Variant of the nucleotide sequence at SEQ ID NO 19386
tggaaccgcaattcttgactcaattactgaaagaacttgtcttgatgatctgatttgaaaatactctcgtctgtatcacgaaatcataagtatttccgaaaaagatcgatctcaaattcgtggctgcgagcgcaactcagtcatcatgccagcgtttaatctcgagacctgtgctcgggccaacatcttggcattagaaccctaccgttgtgctagagatgattataaagatgatggcacaaacgtcctattagacgcaaatgagaatgcctacggaccttcgttgactgcgtccattgcgagagacggaagctctggccctgagattgacttcttagggcttcacagataccccgatccgcaccagcgggagttgaagcagttactgtgtgatctgagaaacacccaccatcacacagaaaagaagattaccccagataacttatttgtcggagttggaagcgacgaagccatcgatggattgatgaggtgcttctgcgccccgggacgcgataagattttagtctgtccgcctacttacggcatgtattccgtttctgcgcagatcaacgatgtcggattggtgaagataccgcttcttcccgcgcccacattcgcacttgatgttgagaagatcaaagatgcactgtcaaatgagccaaatattaaactcatctacctctgcacccccggaaatccgactggctcacggctatcgaagggtgacataagacaaattctggaacacccgacatggaacggagttgtcattgtcgatgaggcttatgttgacttctcacctgagggttcatcactcgctgaatgggtagctgaatggccgaacttggctgtcatgcagacgagttcgaaagggttcggtatggctggtatccggttgggatccgttttcacatcggtgcccattgcgcagctactgaacaacttgaaagcgccatacaacatccccagtcctacgagtgcgctcgcgaactacgcattttcggcccctggcttagcggtgatgcgtgcgaacagagagaaactcgtgacacagcgagagcgtttacttcgagaactaccaaaagtcaagggtgtcgggcgactgcgtggtggcacggagagcaactttctgctatttgagatgttgaacaaggacggtcaaccggataatgccacggcactagctgtgtatgagatgttggctgagaataagggcgtggtcgtgcggtttagaggcaaggagcatgggtgccttggttgcttacggattacagtcggaacagagacggaggttacaaggttcttagaggcgcttacgaagtctctagcagaggtcaatggacacgatgttgtcaattcgccggacgaggaaaagagggagatagatgctaatgctgttattgcttagatttcggatagacactgaagcttagaaggggccagaaagattagagaaaaacattgtgatcgaatttaactctatcgctgttgcgatcccggatcgtagtcttcttcatcctcgtcctcgtcgtcttgcagttgtttctcggcttctaattgagccctctatagctcggtcatgccatcttcccccacataaccattgcgatccctagtgtttgttgctcatggatcggccttcaactccgttacgcccaagttcttg

SEQ ID NO: 19389 - DNA, 687 bp, Muscodor strobelii
  misc_feature: SGI cDNA ID NO. 566519
  misc_feature: Encodes the peptide sequence at SEQ ID NO 19390
atggaatcgagataccatggggtaagtttgggccctgtacctgaccacaatctaagagagagggctattgagctcaaccgaattttatatgcagccaaagaattgatgggtgcgctgtcaaaggagcccattcgattcagcggagccttcaactttaccaataagtatcgaggccctcctagtcccgaaatcgacgcggcatggaaacgttatgatttcaatcccatgctgcgggtttctgcggaggatatcaacaccgctgtgcgaggacaagaagggtacattgacactgccattgagattgaaggcggcggatatctagcgacgattgaagtctttcatcagtttcactgtctcaatatgatccgcatggcaacatatcatgaatactataaagacaagggaatgtatggcaatcaaacgtacgatgtctggcgtacccatatagatcattgcatcgagataatgcgtcaaatcatcacatgcaatagcgacactggcctcatagtatttcactgggtagaaggcaatccaaacccttatcctgatctgaacacctggcatcagtgcagagatgtggaagtggtgcatgactgggcgatgaagaagcagtccaacaccgacatcgaccccgtcaagggtgttgtcaagaacttgggcgtaacggagttgaaggccgatccatga

SEQ ID NO: 19390 - protein, 228 aa, Muscodor strobelii
  misc_feature: SGI Peptide ID NO. 566519
  misc_feature (27)..(194): NCBI GI: 242215559 Blast Desc: POSPLDRAFT_130143 [Postia placenta Mad-698-R] gi|220727314|gb|EED81237.1| POSPLDRAFT_130143 [Postia placenta Mad-698-R]
  misc_feature (27)..(213): NCBI GI: 212534390 Blast Desc: conserved [Penicillium marneffei ATCC 18224] gi|210069750|gb|EEA23840.1| conserved [Penicillium marneffei ATCC 18224]
  misc_feature (33)..(208): NCBI GI: 154302917 Blast Desc: [Botryotinia fuckeliana B05.10] gi|150855126|gb|EDN30318.1| [Botryotinia fuckeliana B05.10]
  misc_feature (46)..(228): NCBI GI: 242214710 Blast Desc: [Postia placenta Mad-698-R] gi|220727755|gb|EED81665.1| [Postia placenta Mad-698-R]
  misc_feature (45)..(228): NCBI GI: 145244821 Blast Desc: An11g07050 [Aspergillus niger] gi|134079372|emb|CAK97001.1| protein product [Aspergillus niger]
  misc_feature (29)..(202): NCBI GI: 67902778 Blast Desc: AN8376.2 [Aspergillus nidulans FGSC A4] gi|40747740|gb|EAA66896.1| AN8376.2 [Aspergillus nidulans FGSC A4] gi|259484308|tpe|CBF80416.1| TPA: [Aspergillus nidulans FGSC
  misc_feature (39)..(209): NCBI GI: 121704262 Blast Desc: conserved [Aspergillus clavatus NRRL 1] gi|119398539|gb|EAW08969.1| conserved [Aspergillus clavatus NRRL 1]
  misc_feature (39)..(210): NCBI GI: 240277353 Blast Desc: conserved [Ajellomyces capsulatus H143]
  misc_feature (15)..(208): NCBI GI: 226288946 Blast Desc: conserved [Paracoccidioides brasiliensis Pb18]
  misc_feature (38)..(211): NCBI GI: 238505104 Blast Desc: conserved [Aspergillus flavus NRRL3357] gi|220689895|gb|EED46245.1| conserved [Aspergillus flavus NRRL3357]
MESRYHGVSLGPVPDHNLRERAIELNRILYAAKELMGALSKEPIRFSGAFNFTNKYRGPPSPEIDAAWKRYDFNPMLRVSAEDINTAVRGQEGYIDTAIEIEGGGYLATIEVFHQFHCLNMIRMATYHEYYKDKGMYGNQTYDVWRTHIDHCIEIMRQIITCNSDTGLIVFHWVEGNPNPYPDLNTWHQCRDVEVVHDWAMKKQSNTDIDPVKGVVKNLGVTELKADP

SEQ ID NO: 19391 - DNA, 369 bp, Muscodor strobelii
  misc_feature: SGI cDNA ID NO. 566520
  misc_feature: Encodes the peptide sequence at SEQ ID NO 19392
atgagaaccaccaccttcaccttcctgcttgtccaagccattgctctcgctgcagctgctcccgcggcagattccaatgcgaaactagtccagaagagccaggagagtaccgacgctgcctggcagggagccaactactaccagaagaagagagagggggatgttgatgctgcttggcagggcgccaactattaccagaagaagagggagggagatgctgatgctgcctggcaaggcgccaactattaccagaagaagagggacgagaacactgatgctgcctggcagggggctaactactatcagaagaaaagggacgacaacactgatgctgcttggcagggcgccaactactaccagaaggagtag

SEQ ID NO: 19392 - protein, 122 aa, Muscodor strobelii
  misc_feature: SGI Peptide ID NO. 566520
MRTTTFTFLLVQAIALAAAAPAADSNAKLVQKSQESTDAAWQGANYYQKKREGDVDAAWQGANYYQKKREGDADAAWQGANYYQKKRDENTDAAWQGANYYQKKRDDNTDAAWQGANYYQKE

SEQ ID NO: 19393 - DNA, 595 bp, Muscodor strobelii
  misc_feature: SGI EST ID NO. CUFF.45265.0
  misc_feature: Variant of the nucleotide sequence at SEQ ID NO 19391
catccgtctgccttcaagccagtccaaatcattcacaaacttctataccttacaatctgaagaccaattgtctccaaaacaacattcaccatgagaaccaccaccttcaccttcctgcttgtccaagccattgctctcgctgcagctgctcccgcggcagattccaatgcgaaactagtccagaagagccaggagagtaccgacgctgcctggcagggagccaactactaccagaagaagagagagggggatgttgatgctgcttggcagggcgccaactattaccagaagaagagggagggagatgctgatgctgcctggcaaggcgccaactattaccagaagaagagggacgagaacactgatgctgcctggcagggggctaactactatcagaagaaaagggacgacaacactgatgctgcttggcagggcgccaactactaccagaaggagtagggaaatgaagattgtttcgctttagtccagttctagatgtactctggcaagagacttcacaatggcaatctttggtgccttaaagtagcggggtccatagggcatattcatccctcaattcaatcattatcccctc

SEQ ID NO: 19394 - DNA, 1665 bp, Muscodor strobelii
  misc_feature: SGI cDNA ID NO. 566521
  misc_feature: Encodes the peptide sequence at SEQ ID NO 19395
atgatcatgacgatacgcacgaagcaattgattctcgtcgctggggtcatccataacaatcttgatgtgatttgggcacattcgtggagcagtgatgattctggtctggccactttcatttctagacctgatctgcggccgcaaacttggaacatcaccactcacgagcctgatctggtgagccccggatattatttctcggctccgtactacaaactgaacaaaggcgatgccgctgatgaattccgacctggacaagttgggccgcatatatatgatagcgatggggaattaatatggagcggggcagtagaagaaaaccatcaaactgcctttgatttccgagtcaatctatacaacgggatcccacacttatccttcattgtcgaaaaacaattcaacggagagggcgggaagaaatacgaaggtatcattatggacaatacctatcgtgtcatcaagcgagtccgctccaacgacggccaggattcaattgatttgcacgaattcaatgttcttcctgggcaagatggcgacaaccgtgccttaataacaattacgcggcagcagctaggaaactctactgatcttgatgtcagcgctgaccgggttgtcgtggattgcggattcgaagaagtcgacatcgacacaggcaagaccttatttagatggtgggcagacgaacacatccaatattccgattcattggattggcagagagagaaaggcacccttgatccctatgattttaaactactcaacttcgacttctgctttcaacatcatgtccgcgttttggaagagaacagcacctatatgataatctcgctattcaatgatgcggccaataatttcaagcagacagatgaccactcttcagcgctgttcatcgttctcaaaatggccgacatgactgccgaggcaacccatatctggaatagacccgacggcgatctgacgcaggttaggggaagcgttcaacggctctcaaatgggaacgtgcttgtcggctggagcaaattcgcatacaccagtgagttcacaatggacggaaagctggtgaaagaattagtatactcgactgagcgaatgagcgactaccgaacatacaagttcgacttcaaagggtttcccaccgagcctccggcattgaaagtacacgcattcggaacttcgaaagctgtgactagcgttcatcacgtcagttggaacggcgccactgaagttgcctcttggaagttctactccgcaagctccctctcaagtgccgctaatgattcctctggcctcctgggaagcagagagcgaaccgggtacgagacgatgttcatcacagacggatatcaccgatacacgtatgcggaggcttttgacaaggacgggaaaagcttggcaaagtcacctatcaaagagacagtagtcccgcagggggacgagtatgaagatggtggctcgcagaaaatatcgctgcgggtttacgaagtcaactccatagcgatagccttggttttcattatgattgtcatgcttgtaactctgctgtataactcaggcgttaactactgcagcagttgttgtggcctacgcaatacttacagccttttgcggccagactcaggatctgcgggagattttagctcagcagattcagagtcaaatggctga

SEQ ID NO: 19395 - protein, 554 aa, Muscodor strobelii
  misc_feature: SGI Peptide ID NO. 566521
  misc_feature (30)..(475): NCBI GI: 238495847 Blast Desc: conserved [Aspergillus flavus NRRL3357] gi|220694039|gb|EED50383.1| conserved [Aspergillus flavus NRRL3357]
  misc_feature (30)..(475): NCBI GI: 67528041 Blast Desc: AN4257.2 [Aspergillus nidulans FGSC A4] gi|40739735|gb|EAA58925.1| AN4257.2 [Aspergillus nidulans FGSC A4] gi|259481130|tpe|CBF74378.1| TPA: conserved [Aspergillus FGSC
  misc_feature (33)..(475): NCBI GI: 119482588 Blast Desc: NFIA_024970 [Neosartorya fischeri NRRL 181] gi|119409477|gb|EAW19425.1| conserved [Neosartorya fischeri NRRL 181]
  misc_feature (43)..(475): NCBI GI: 169775495 Blast Desc: [Aspergillus oryzae RIB40] gi|83770078|dbj|BAE60213.1| protein product [Aspergillus oryzae]
  misc_feature (33)..(476): NCBI GI: 145247875 Blast Desc: An13g00460 [Aspergillus niger] gi|134080931|emb|CAK41447.1| protein product [Aspergillus niger]
  misc_feature (43)..(475): NCBI GI: 70987257 Blast Desc: conserved [Aspergillus fumigatus Af293] gi|66846737|gb|EAL87069.1| conserved [Aspergillus fumigatus Af293]
  misc_feature (43)..(475): NCBI GI: 159123120 Blast Desc: conserved [Aspergillus fumigatus A1163]
  misc_feature (33)..(475): NCBI GI: 255953547 Blast Desc: Pc21g04800 [Penicillium chrysogenum Wisconsin 54-1255] gi|211589237|emb|CAP95377.1| Pc21g04800 [Penicillium chrysogenum Wisconsin 54-1255]
  misc_feature (33)..(476): NCBI GI: 255954359 Blast Desc: Pc21g08930 [Penicillium chrysogenum Wisconsin 54-1255] gi|211589643|emb|CAP95790.1| Pc21g08930 [Penicillium chrysogenum Wisconsin 54-1255]
  misc_feature (33)..(475): NCBI GI: 119472568 Blast Desc: NFIA_058200 [Neosartorya fischeri NRRL 181] gi|119406519|gb|EAW16470.1| conserved [Neosartorya fischeri NRRL 181]
MIMTIRTKQLILVAGVIHNNLDVIWAHSWSSDDSGLATFISRPDLRPQTWNITTHEPDLVSPGYYFSAPYYKLNKGDAADEFRPGQVGPHIYDSDGELIWSGAVEENHQTAFDFRVNLYNGIPHLSFIVEKQFNGEGGKKYEGIIMDNTYRVIKRVRSNDGQDSIDLHEFNVLPGQDGDNRALITITRQQLGNSTDLDVSADRVVVDCGFEEVDIDTGKTLFRWWADEHIQYSDSLDWQREKGTLDPYDFKLLNFDFCFQHHVRVLEENSTYMIISLFNDAANNFKQTDDHSSALFIVLKMADMTAEATHIWNRPDGDLTQVRGSVQRLSNGNVLVGWSKFAYTSEFTMDGKLVKELVYSTERMSDYRTYKFDFKGFPTEPPALKVHAFGTSKAVTSVHHVSWNGATEVASWKFYSASSLSSAANDSSGLLGSRERTGYETMFITDGYHRYTYAEAFDKDGKSLAKSPIKETVVPQGDEYEDGGSQKISLRVYEVNSIAIALVFIMIVMLVTLLYNSGVNYCSSCCGLRNTYSLLRPDSGSAGDFSSADSESNG

SEQ ID NO: 19396 - DNA, 282 bp, Muscodor strobelii
  misc_feature: SGI cDNA ID NO. 566522
  misc_feature: Encodes the peptide sequence at SEQ ID NO 19397
atgtgcgaggtaatcctcttcatttgcggggagcacgacaatatccgcaagttcagtctcatccgctgcgacaaggctgtccaagagagcggccttcccaagtactcccctgacaacttcgtcaacaagatgcctcgtcttcgtgctgagcagggatgtgacgacgttccgaagatcatctccaaggtccagaccctccgtggtgtttgcccggcttccgtcgccggtagcacttccgtctgccgtttcgaacagcagcaagaggaggatgagagagagtaa

SEQ ID NO: 19397 - protein, 93 aa, Muscodor strobelii
  misc_feature: SGI Peptide ID NO. 566522
MCEVILFICGEHDNIRKFSLIRCDKAVQESGLPKYSPDNFVNKMPRLRAEQGCDDVPKIISKVQTLRGVCPASVAGSTSVCRFEQQQEEDERE

SEQ ID NO: 19398 - DNA, 3042 bp, Muscodor strobelii
  misc_feature: SGI cDNA ID NO. 566523
  misc_feature: Elevated expression when VOC is produced
  misc_feature: Encodes the peptide sequence at SEQ ID NO 19399
atgtcggcttctaagaacatcttgttgttgatcatagcagcggtgagctctgcgcacacaatacgccacaacaagcggtatgacagtcaagacagctccagcacggcagtggtcgagcacctcggcggttcgttgtatagcacgagataccctggcgtcacatgggacaacgatgcccggacactcacgaacacgatccccgacaacgctgattggcgcgcgcaatcattcgtctcaaatggttacgtcggctccagtttcgcatcaacaggcccattcccttacttctacaatgcttcggccggatggcccctcttcgattcccgcataaccttcggaaccatcgcgggatttttcgatgaacaacccactacttcgggttctaattacccgtggctataccaatatggaggtgacagtgttatttcgggcattccaaactggggtcctttggttcttgaccttggcgatggagtttaccttgacggcacagtcgatcaatccctcctctccaacgtcttgctcgttcaggattttcggcagggactggcttcgtacagttatacttggacaccagagaactcgtgtggcttcaatgtttcgttcgtcgttgcggctgataagctacacataaacagagcatatgttcagatgcaagtgacttcagaggaggatgtcaatgcgaccattttcaacattctcgatggtgcgacggctttacgtacagacttcgttgagaaaggaaccagcggaagtgccatatattccgctgtgagtccacttggtgtcagcaacgtaacggcatggatattcgcggccttagacagctctgatgtagatcttacgcagctgtctgatagcgcagatcagcctttcatcagtaataatggttctactatcgcacaaagtttgcctgtcttcttggaggctggtaagaccatcaccattaccaaatatgttggcgtcgcatcaactgatgcatttcccactcccaagcagcaggctcatgacgaaatgagtttcgctctggaggcaggattcgaacaagcgttgctagatcatgcccaagaatggtctatggtaatgcccgatcactcagtgacgagcttctctgacccagacactggccttttaccactcaacttgatagagcgacagatcactaatgtcgtggcgctgtttatgctgttgatgaatacggtcagcgagaatgcgttcaatcatgtcgatcaagcgcctgtcaatatctgggggatcagtgtatgtggtcttacttctgattgctatgcaggacaaaaattttgggacgaggatgtttggatgcagcctttcctggctgcgtcgcatccattcccggccaagcaaattgccctctcgcgcacttcacaatacgcgcaagcactggctaatgcgcacacctcatatacatcctcaaagagcaacacgacgttctcttcaaatgcagctgcctacccgtggacctctggccgtgatggaaactgcactgccactggtccgtgttttgactacgagtaccacttaaatggggatatcgttagatcatttatcaactattggagctcatcgggcgacgattcatttttccaggagagcctcctagatgttacgaattctgttgcgacattctactcggagctgttagaactgaacagcacgacgaatacgtgggaactcaagaatatgactgatcccgatgagtacgctaataatgttgataatggcggtttcacaatggcattgatcagagagacactcctcgccgcgaacttcttcaatgcccgttttaatcagtcaatcaatgaaacttggaacgcgcaagcttatgcagtcgaaattccaatttccgacgatgataagatctcgctcgagtacactggtatgccgggctccatcgctgtcaaacaagcagatgtcattctgcgcacatatccactgaatgatcagatcaactactcggtcgcgagacaacagagtgatttgaactattacgcagcaaaacaatctccggacggacctggaatgacatgggcaatcttcagcattgatgcctccgcgatcgagtcgtcggggtgcgccgcatacacttatgatctagatgcatggtctccttacattcgaggaccttatttcactttcagtgagcagcaaattgatgaatacgacttgaacggcggcacaaatccggcttatccattcctgactggattcggagggttcttgcagatggatctttcaggttatctgggactgcgatacaactatagccacgtcatggaggtgcatcctaatctgccaccccagataccatatatcaagtatccggttttctacttccaaggatggcccattgacgccttctcaaatcagacacataccacgctcacgcgactaagtgctccattggatacagcgaacccagattatgccagcgagaatattacagtgcaaattggacacgacgagacgaatactattcaatttgctcctaatgctacaatcgttttggtcaattatccctctttcaacaacttgactatcgcaaacaacattctgcagtgtcaaccaatctttagcaacgagggtgacctggtcccaggacagttcgccgaaggggctctagatggtgcctcgtccacgacctggcaggcagcatccgtcaacacgacgaacactctgacggtcgacttgacaaatgctgcctttgcgcttgtcgaccacctatattttgactgggctggagcgccgcctattaatgcttctgtcatcttccacaattccacgagctacaccgatgcaacagcaagaattgacgtgacaaacatcgagcccagcatcccgtatgatccctcttctattaacatagtccaagagtacattggaaacacaacaaacgtcagcgtattagaccaaggtatatacaccggaatttatgccacactggtcgtggttggcaatgctgcggacgactctagcgacgctgtggcggcgagcgtcgcggaatgggctgtgattgtccaataa

SEQ ID NO: 19399 - protein, 1013 aa, Muscodor strobelii
  misc_feature: SGI Peptide ID NO. 566523
  misc_feature (769)..(819): Pfam Id: PF03633 Pfam Desc: Glycosyl hydrolase family 65, C-terminal domain
  misc_feature (390)..(760): Pfam Id: PF03632 Pfam Desc: Glycosyl hydrolase family 65 central catalytic domain
  misc_feature (61)..(327): Pfam Id: PF03636 Pfam Desc: Glycosyl hydrolase family 65, N-terminal domain
  misc_feature (391)..(759): Pfam Id: PF03632 Pfam Desc: Glycosyl hydrolase family 65 central catalytic domain
  misc_feature (78)..(327): Pfam Id: PF03636 Pfam Desc: Glycosyl hydrolase family 65, N-terminal domain
  misc_feature (44)..(1013): NCBI GI: 121712098 Blast Desc: glycosyl hydrolase family 65 protein [Aspergillus clavatus NRRL 1] gi|119401816|gb|EAW12238.1| glycosyl hydrolase family 65 protein [Aspergillus clavatus NRRL 1]
  misc_feature (45)..(1011): NCBI GI: 70986106 Blast Desc: alpha,alpha-trehalose glucohydrolase TreA/Ath1 [Aspergillus fumigatus Af293] gi|66846180|gb|EAL86513.1| alpha,alpha-trehalose glucohydrolase TreA/Ath1 [Aspergillus
  misc_feature (45)..(1011): NCBI GI: 159128314 Blast Desc: alpha,alpha-trehalose glucohydrolase TreA/Ath1 [Aspergillus fumigatus A1163]
  misc_feature (45)..(1011): NCBI GI: 119474021 Blast Desc: glycosyl hydrolase family 65 protein [Neosartorya fischeri NRRL 181] gi|119407039|gb|EAW16989.1| glycosyl hydrolase family 65 protein [Neosartorya fischeri NRRL 181]
  misc_feature (7)..(1013): NCBI GI: 255941436 Blast Desc: Pc16g11870 [Penicillium chrysogenum Wisconsin 54-1255] gi|211586110|emb|CAP93857.1| Pc16g11870 [Penicillium chrysogenum Wisconsin 54-1255]
  misc_feature (42)..(1011): NCBI GI: 78714463 Blast Desc: acid trehalase [Metarhizium acridum] gi|78714465|gb|ABB51159.1| acid trehalase [Metarhizium acridum]
  misc_feature (42)..(1011): NCBI GI: 144227408 Blast Desc: acid trehalase [Metarhizium anisopliae]
  misc_feature (25)..(1011): NCBI GI: 239609159 Blast Desc: acid trehalase [Ajellomyces dermatitidis ER-3]
  misc_feature (25)..(1011): NCBI GI: 261188935 Blast Desc: acid trehalase [Ajellomyces dermatitidis SLH14081] gi|239591884|gb|EEQ74465.1| acid trehalase [Ajellomyces dermatitidis SLH14081]
  misc_feature (24)..(1011): NCBI GI: 240110102 Blast Desc: Acid trehalase precursor , [Coccidioides posadasii C735 delta SOWgp]
  misc_feature (46)..(987): SWISSPROT Homolog: EC 3.2.1.28 Alpha,alpha-trehalase
  misc_feature: Useful for introducing or modulating the production of volatile compounds
MSASKNILLLIIAAVSSAHTIRHNKRYDSQDSSSTAVVEHLGGSLYSTRYPGVTWDNDARTLTNTIPDNADWRAQSFVSNGYVGSSFASTGPFPYFYNASAGWPLFDSRITFGTIAGFFDEQPTTSGSNYPWLYQYGGDSVISGIPNWGPLVLDLGDGVYLDGTVDQSLLSNVLLVQDFRQGLASYSYTWTPENSCGFNVSFVVAADKLHINRAYVQMQVTSEEDVNATIFNILDGATALRTDFVEKGTSGSAIYSAVSPLGVSNVTAWIFAALDSSDVDLTQLSDSADQPFISNNGSTIAQSLPVFLEAGKTITITKYVGVASTDAFPTPKQQAHDEMSFALEAGFEQALLDHAQEWSMVMPDHSVTSFSDPDTGLLPLNLIERQITNVVALFMLLMNTVSENAFNHVDQAPVNIWGISVCGLTSDCYAGQKFWDEDVWMQPFLAASHPFPAKQIALSRTSQYAQALANAHTSYTSSKSNTTFSSNAAAYPWTSGRDGNCTATGPCFDYEYHLNGDIVRSFINYWSSSGDDSFFQESLLDVTNSVATFYSELLELNSTTNTWELKNMTDPDEYANNVDNGGFTMALIRETLLAANFFNARFNQSINETWNAQAYAVEIPISDDDKISLEYTGMPGSIAVKQADVILRTYPLNDQINYSVARQQSDLNYYAAKQSPDGPGMTWAIFSIDASAIESSGCAAYTYDLDAWSPYIRGPYFTFSEQQIDEYDLNGGTNPAYPFLTGFGGFLQMDLSGYLGLRYNYSHVMEVHPNLPPQIPYIKYPVFYFQGWPIDAFSNQTHTTLTRLSAPLDTANPDYASENITVQIGHDETNTIQFAPNATIVLVNYPSFNNLTIANNILQCQPIFSNEGDLVPGQFAEGALDGASSTTWQAASVNTTNTLTVDLTNAAFALVDHLYFDWAGAPPINASVIFHNSTSYTDATARIDVTNIEPSIPYDPSSINIVQEYIGNTTNVSVLDQGIYTGIYATLVVVGNAADDSSDAVAASVAEWAVIVQ

SEQ ID NO: 19400 - DNA, 1658 bp, Muscodor strobelii
  misc_feature: SGI EST ID NO. CUFF.45307.0
  misc_feature: Variant of the nucleotide sequence at SEQ ID NO 19398
cgtgttttgactacgagtaccacttaaatggggatatcgttagatcatttatcaactattggagctcatcgggcgacgattcatttttccaggagagcctcctagatgttacgaattctgttgcgacattctactcggagctgttagaactgaacagcacgacgaatacgtgggaactcaagaatatgactgatcccgatgagtacgctaataatgttgataatggcggtttcacaatggcattgatcagagagacactcctcgccgcgaacttcttcaatgcccgttttaatcagtcaatcaatgaaacttggaacgcgcaagcttatgcagtcgaaattccaatttccgacgatgataagatctcgctcgagtacactggtatgccgggctccatcgctgtcaaacaagcagatgtcattctgcgcacatatccactgaatgatcagatcaactactcggtcgcgagacaacagagtgatttgaactattacgcagcaaaacaatctccggacggacctggaatgacatgggcaatcttcagcattgatgcctccgcgatcgagtcgtcggggtgcgccgcatacacttatgatctagatgcatggtctccttacattcgaggaccttatttcactttcagtgagcagcaaattgatgaatacgacttgaacggcggcacaaatccggcttatccattcctgactggattcggagggttcttgcagatggatctttcaggttatctgggactgcgatacaactatagccacgtcatggaggtgcatcctaatctgccaccccagataccatatatcaagtatccggttttctacttccaaggatggcccattgacgccttctcaaatcagacacataccacgctcacgcgactaagtgctccattggatacagcgaacccagattatgccagcgagaatattacagtgcaaattggacacgacgagacgaatactattcaatttgctcctaatgctacaatcgttttggtcaattatccctctttcaacaacttgactatcgcaaacaacattctgcagtgtcaaccaatctttagcaacgagggtgacctggtcccaggacagttcgccgaaggggctctagatggtgcctcgtccacgacctggcaggcagcatccgtcaacacgacgaacactctgacggtcgacttgacaaatgctgcctttgcgcttgtcgaccacctatattttgactgggctggagcgccgcctattaatgcttctgtcatcttccacaattccacgagctacaccgatgcaacagcaagaattgacgtgacaaacatcgagcccagcatcccgtatgatccctcttctattaacatagtccaagagtacattggaaacacaacaaacgtcagcgtattagaccaaggtatatacaccggaatttatgccacactggtcgtggttggcaatgctgcggacgactctagcgacgctgtggcggcgagcgtcgcggaatgggctgtgattgtccaataatacttgaaaaaaattgatcttatgtgttggattaaaatgatactttgaagactagataagattacacacatatatgatatagcatagaattaggaccgaatatctatttgggggttttgagatcgacctcct

SEQ ID NO: 19401 - DNA, 1011 bp, Muscodor strobelii
  misc_feature: SGI cDNA ID NO. 566524
  misc_feature: Encodes the peptide sequence at SEQ ID NO 19402
atggccgcagacctccgtttcacaatgaaggcggctcgccgagtcggggctggaccattagacgagacccttgtcgtatcatcagacgtccctataccgcaacatgcaaactcactacccggcggccacgtccttgtgaaagtggcgttcacatcacttaatccattcgactacaaggtcgcagaggcaccgatcatcggcactcgtgtcttcaaaggaataccttgtctagactttgccggcacagtcataaagtcgaattcgagcagcgtcgcagaaggcgatagagtattcggacagacacagccaatgaactttggtgcttgcgcagagtatatcgtggtgtctcatactctgtgcatgccggttcctgaaggcgtgaggctcgaagatgctgcgactgttgggattgcgggtctcacagcttaccagaccatcgcgccgtttgtgaagccgggcgcgagtgttttcatcaatggtggtagtggtggcttgggaacgttcagcattcaattcgcgaaagcgcttgggtgctctgttactgcgacgtgttccggcgccaatgcggagctgtgccggaatatcggggcagatgagatcgtggattatcgcgcaggtgatgtggtggagacattgaaaaagcagggaaagaaatatgatctgataattgattatatcttctcggacgctcggttatactggtctagtcacgagtatttactgccgactgggaagttcgtcaccattgtcggtggtctcagtttccggttcgtcaaagatctattcgcaatcaagctttggccgagtgtcctcgggggcggaaaaagaaaattccagctagtgggccgtacaactaaagcagaagattacaagcagattgccacttggatccgagatggagtcgtgaagccggtcattgaggagatatacgacatcgaggatgtcagggcagccttttcgaggataaaggccggtcgggcgcgtggtaaaatcgtggttcgggtaacttga

SEQ ID NO: 19402 - protein, 336 aa, Muscodor strobelii
  misc_feature: SGI Peptide ID NO. 566524
  misc_feature (41)..(123): Pfam Id: PF08240 Pfam Desc: Alcohol dehydrogenase GroES-like domain
  misc_feature (152)..(287): Pfam Id: PF00107 Pfam Desc: Zinc-binding dehydrogenase
  misc_feature (152)..(226): Pfam Id: PF00107 Pfam Desc: Zinc-binding dehydrogenase
  misc_feature (4)..(335): NCBI GI: 256723543 Blast Desc: NECHADRAFT_42213 [Nectria haematococca mpVI 77-13-4]
  misc_feature (7)..(336): NCBI GI: 46116142 Blast Desc: FG03913.1 [Gibberella zeae PH-1]
  misc_feature (20)..(336): NCBI GI: 169613611 Blast Desc: SNOG_09936 [Phaeosphaeria nodorum SN15] gi|160707197|gb|EAT82271.2| SNOG_09936 [Phaeosphaeria nodorum SN15]
  misc_feature (20)..(335): NCBI GI: 189200006 Blast Desc: oxidoreductase domain containing protein [Pyrenophora tritici-repentis Pt-1C-BFP] gi|187983439|gb|EDU48927.1| oxidoreductase domain containing protein [Pyrenophora Pt-1C-BFP]
  misc_feature (1)..(336): NCBI GI: 85092425 Blast Desc: NCU04940 [Neurospora crassa OR74A] gi|28920793|gb|EAA30152.1| [Neurospora crassa OR74A]
  misc_feature (18)..(335): NCBI GI: 242772120 Blast Desc: zinc alcohol dehydrogenase, [Talaromyces stipitatus ATCC 10500] gi|218721596|gb|EED21014.1| zinc alcohol dehydrogenase, [Talaromyces stipitatus ATCC 10500]
  misc_feature (1)..(335): NCBI GI: 171676846 Blast Desc: protein product [Podospora anserina] gi|170936490|emb|CAP61150.1| protein product [Podospora anserina]
  misc_feature (38)..(335): NCBI GI: 255932089 Blast Desc: Pc12g07660 [Penicillium chrysogenum Wisconsin 54-1255] gi|211582220|emb|CAP80393.1| Pc12g07660 [Penicillium chrysogenum Wisconsin 54-1255]
  misc_feature (18)..(335): NCBI GI: 256720837 Blast Desc: NECHADRAFT_50493 [Nectria haematococca mpVI 77-13-4]
  misc_feature (43)..(335): NCBI GI: 212531139 Blast Desc: zinc alcohol dehydrogenase, [Penicillium marneffei ATCC 18224] gi|210071090|gb|EEA25179.1| zinc alcohol dehydrogenase, [Penicillium marneffei ATCC 18224]
  misc_feature (18)..(333): SWISSPROT Homolog: EC 1.6.5.5 NADPH:quinone reductase
MAADLRFTMKAARRVGAGPLDETLVVSSDVPIPQHANSLPGGHVLVKVAFTSLNPFDYKVAEAPIIGTRVFKGIPCLDFAGTVIKSNSSSVAEGDRVFGQTQPMNFGACAEYIVVSHTLCMPVPEGVRLEDAATVGIAGLTAYQTIAPFVKPGASVFINGGSGGLGTFSIQFAKALGCSVTATCSGANAELCRNIGADEIVDYRAGDVVETLKKQGKKYDLIIDYIFSDARLYWSSHEYLLPTGKFVTIVGGLSFRFVKDLFAIKLWPSVLGGGKRKFQLVGRTTKAEDYKQIATWIRDGVVKPVIEEIYDIEDVRAAFSRIKAGRARGKIVVRVT

SEQ ID NO: 19403 - DNA, 608 bp, Muscodor strobelii
  misc_feature: SGI EST ID NO. CUFF.45338.0
  misc_feature: Variant of the nucleotide sequence at SEQ ID NO 19401
agcattcaattcgcgaaagcgcttgggtgctctgttactgcgacgtgttccggcgccaatgcggagctgtgccggaatatcggggcagatgagatcgtggattatcgcgcaggtgatgtggtggagacattgaaaaagcagggaaagaaatatgatctgataattgattatatcttctcggacgctcggttatactggtctagtcacgagtatttactgccgactgggaagttcgtcaccattgtcggtggtctcagtttccggttcgtcaaagatctattcgcaatcaagctttggccgagtgtcctcgggggcggaaaaagaaaattccagctagtgggccgtacaactaaagcagaagattacaagcagattgccacttggatccgagatggagtcgtgaagccggtcattgaggagatatacgacatcgaggatgtcagggcagccttttcgaggataaaggccggtcgggcgcgtggtaaaatcgtggttcgggtaacttgattccaattcagagatgtaagtctcattgtctcacagctgtgagttggagaaaggagtcgatgatatcacctcattgcttcaagtttgtctgaagtagccca

SEQ ID NO: 19404 - DNA, 390 bp, Muscodor strobelii
  misc_feature: SGI cDNA ID NO. 566525
  misc_feature: Encodes the peptide sequence at SEQ ID NO 19405
atggccactcccgaagtgtcccatggccgcggtggtgcaggcaacatcaatccagatgacaccaaatatgtcgatggagaaatcgtgcgacagggaaacgaggggacgcacaatgacggcccgcactcgaccggacgaggaggcgcagcaaacatcgccgacaaagaaacgcctgtagcaccacgtagcgatagcgagttcgttcctgcggaggctgtccgcgcctcagtcgacgaagatcaccacaccggacgcggtggcgcgggaaacacgcagctctcggacaagcacgcagcggagcgtgggatgacgcagagtggcgcaaggaacccaaatcaagggctcgcggacaagttgaaggacaagctgttcggagctttcaaaaaatag

SEQ ID NO: 19405 - protein, 129 aa, Muscodor strobelii
  misc_feature: SGI Peptide ID NO. 566525
  misc_feature (2)..(129): NCBI GI: 171696362 Blast Desc: protein product [Podospora anserina] gi|170948423|emb|CAP60587.1| protein product [Podospora anserina]
  misc_feature (4)..(129): NCBI GI: 145605385 Blast Desc: MGG_09899 [Magnaporthe grisea 70-15] gi|145013203|gb|EDJ97844.1| MGG_09899 [Magnaporthe grisea 70-15]
  misc_feature (1)..(129): NCBI GI: 116180874 Blast Desc: CHGG_01065 [Chaetomium globosum CBS 148.51] gi|88185362|gb|EAQ92830.1| CHGG_01065 [Chaetomium globosum CBS 148.51]
  misc_feature (3)..(129): NCBI GI: 256735073 Blast Desc: NECHADRAFT_98693 [Nectria haematococca mpVI 77-13-4]
  misc_feature (1)..(128): NCBI GI: 85116403 Blast Desc: NCU07503 [Neurospora crassa OR74A] gi|28926851|gb|EAA35814.1| [Neurospora crassa OR74A]
  misc_feature (2)..(125): NCBI GI: 261356416 Blast Desc: conserved [Verticillium albo-atrum VaMs.102]
  misc_feature (1)..(125): NCBI GI: 46108684 Blast Desc: FG01224.1 [Gibberella zeae PH-1]
  misc_feature (4)..(125): NCBI GI: 145233927 Blast Desc: An02g12080 [Aspergillus niger] gi|134057275|emb|CAK37889.1| [Aspergillus niger]
  misc_feature (4)..(125): NCBI GI: 259486076 Blast Desc: TPA: conserved [Aspergillus nidulans FGSC A4]
  misc_feature (4)..(125): NCBI GI: 121705202 Blast Desc: conserved [Aspergillus clavatus NRRL 1] gi|119399010|gb|EAW09438.1| conserved [Aspergillus clavatus NRRL 1]
MATPEVSHGRGGAGNINPDDTKYVDGEIVRQGNEGTHNDGPHSTGRGGAANIADKETPVAPRSDSEFVPAEAVRASVDEDHHTGRGGAGNTQLSDKHAAERGMTQSGARNPNQGLADKLKDKLFGAFKK

SEQ ID NO: 19406 - DNA, 1169 bp, Muscodor strobelii
  misc_feature: SGI EST ID NO. CUFF.45342.0
  misc_feature: Variant of the nucleotide sequence at SEQ ID NO 19404
ttttccgataactcattccgcgctagccaatgacagcactccatcttatcagtaccttaattacgtcacacttttgacagctcccttatctcaagattagctccccacggtgcattttgaccttggaaccattcttggttttctcgaacacgcgccgacagggtgattatgtcgagcgtgacggaaacgagctgaaatagctgaagggatcggagaattggctgcctgtgattgggtctgtaagccttggccaagacatgcacgtagaaattggctatgactgggatcggatgttatctacatgtgtcacgtcgttcatcacatcataactgacgcctctgagaaatctgaatttctcacacgtaccagaccctcagactaagtaaaacgactatcgaatttatctaataactacgacactgttgtatttgtcgttatccagaatagtcgcggcgaagtaagttctcgtcaagatggccactcccgaagtgtcccatggccgcggtggtgcaggcaacatcaatccagatgacaccaaatatgtcgatggagaaatcgtgcgacagggaaacgaggggacgcacaatgacggcccgcactcgaccggacgaggaggcgcagcaaacatcgccgacaaagaaacgcctgtagcaccacgtagcgatagcgagttcgttcctgcggaggctgtccgcgcctcagtcgacgaagatcaccacaccggacgcggtggcgcgggaaacacgcagctctcggacaagcacgcagcggagcgtgggatgacgcagagtggcgcaaggaacccaaatcaagggctcgcggacaagttgaaggacaagctgttcggagctttcaaaaaatagatcatcgagttggttgctcgatagactgcgatggcgtgatcaatgattcgatgaggaggctttaactacgcatgttgtatttgatactactggagtacggtcgcaatatgttgacctctacaaatattcttgagatgattgacgggtcgccgaattgtctgagcactattgaccaacacactggatattctcaaagctcaatacacttgaccataaaaagccccagcagaacgatggcccctcgcatgtgacattgggaacccacatgatgatcacctatagtgaacattgagatacagattgcga

SEQ ID NO: 19407 - DNA, 363 bp, Muscodor strobelii
  misc_feature: SGI cDNA ID NO. 566526
  misc_feature: Encodes the peptide sequence at SEQ ID NO 19408
atgcgcatctcaaccaccgcagctatcgccctcggtagtcggatcctcgggcctcgcgctgtagaccccggagactgttacgtgtccggccaacaagggtccttgaaggatctcgaccgagccaccaacatcgcttgcaccacgaccttgaacggcacttatgttgatgcccaaagtaggaacacgtgcatcgataaccttccccaaaactataactggctcttagaagtgagataccacggcaatggcaacccaaccgacttttcattcgaggattgcaaaacagcgctgatggagacatatcacatttgcccttacaaccaaggtggcaccgccagctacaataattttgggctcaagtaa

SEQ ID NO: 19408 - protein, 120 aa, Muscodor strobelii
  misc_feature: SGI Peptide ID NO. 566526
MRISTTAAIALGSRILGPRAVDPGDCYVSGQQGSLKDLDRATNIACTTTLNGTYVDAQSRNTCIDNLPQNYNWLLEVRYHGNGNPTDFSFEDCKTALMETYHICPYNQGGTASYNNFGLK

SEQ ID NO: 19409 - DNA, 987 bp, Muscodor strobelii
  misc_feature: SGI cDNA ID NO. 566527
  misc_feature: Encodes the peptide sequence at SEQ ID NO 19410
atgaagtcctctttgttgatgttattggcgcccatagtggcattggctacgccgataactgatatctcggaacgacaagctgcggatagtcttgacgccttgttcaaagccaaaggaaagcagtatttcggaacatgcaccgatcagaaccgcctaagcaccgggaagtctgcggctgtgatccaggccgacttcggccaggtgacgccagaaaacagcatgaagtgggatgcaacagaaccaagtcgaggaaacttcaacttcgctcaggccgattaccttgtggactgggccactaaaaacaacaagcttatccgtggccacaatctttgctggcattcacagctaccatcatgggttagcgctatcaaggacaaggcgacgctgacttccgtcctacaaaaccacgttactacccttgtgacacggtataagggcaagatcctgcaatgggacgttgtaaacgagattttcaacgaggacggatcgatgcgaagctccgtgttctctcaagtactgggagaggacttcgtccgcattgcattcgaagccgcgcgagccgcagatccaaatgccaagctctacatcaatgactacaacctcgaccagcccaactacgccaagctcaccaccggcatggttgcccacgtcaacaagtgggttgcggccggcgtgccaatcgacggtattggctcgcaaggtcatctcaccgcgggtctagcttctcaagccggtgcctccatcaaagcactcgctgctgcgaacgtggaggaggtcgcttttactgaagtcgatattgtcaatgcggccgcgaatgactatgtacaggtcactcaggcgtgtcttaatgagccgaagtgtgttggtattacggtttggggcgttcgggatccggactcgtggagagcaagcagcaacccgttgctgtttgactctaacttcaatcctaagccagcttatactgccattgtcaacgcattgaagtaa

SEQ ID NO: 19410 - protein, 328 aa, Muscodor strobelii
  misc_feature: SGI Peptide ID NO. 566527
  misc_feature (30)..(327): Pfam Id: PF00331 Pfam Desc: Glycosyl hydrolase family 10
  misc_feature (26)..(327): NCBI GI: 53636303 Blast Desc: family 10 xylanase [Cryptovalsa sp. BCC 7197]
  misc_feature (7)..(328): NCBI GI: 6690415 Blast Desc: AF127529_1 endo-1,4-beta-xylanase A precursor [Thermoascus aurantiacus] gi|6689357|emb|CAB65468.1| xylanase A [Thermoascus aurantiacus]
  misc_feature (7)..(328): NCBI GI: 13432255 Blast Desc: AF127529_1 endo-1,4-beta-xylanase A precursor [Thermoascus aurantiacus] gi|6689357|emb|CAB65468.1| xylanase A [Thermoascus aurantiacus]
  misc_feature (21)..(328): NCBI GI: 85090053 Blast Desc: endo-1,4-beta-xylanase [Neurospora crassa OR74A] gi|28919574|gb|EAA28999.1| endo-1,4-beta-xylanase [Neurospora crassa OR74A]
  misc_feature (17)..(328): NCBI GI: 39951799 Blast Desc: xylanase III, [Magnaporthe grisea 70-15] gi|145020614|gb|EDK04743.1| xylanase III, [Magnaporthe grisea 70-15]
  misc_feature (1)..(327): NCBI GI: 169159203 Blast Desc: endo-1,4-beta-xylanase [Penicillium citrinum]
  misc_feature (1)..(327): NCBI GI: 116201375 Blast Desc: CHGG_08572 [Chaetomium globosum CBS 148.51] gi|88177090|gb|EAQ84558.1| CHGG_08572 [Chaetomium globosum CBS 148.51]
  misc_feature (6)..(327): NCBI GI: 15823785 Blast Desc: xylanseF3 [Aspergillus oryzae] gi|212524194|gb|ACJ26383.1| xylanase f3 [Aspergillus oryzae]
  misc_feature (6)..(327): NCBI GI: 7328942 Blast Desc: endo-1,4 beta-D-xylanase [Aspergillus sojae]
  misc_feature (3)..(327): NCBI GI: 145234695 Blast Desc: endo-1,4-beta-xylanase A precursor [Aspergillus niger] gi|134057669|emb|CAK38067.1| endo-1,4-beta-xylanase A precursor xynA-Aspergillus niger [ sequencing error]
  misc_feature (7)..(328): SWISSPROT Homolog: EC 3.2.1.8 Endo-1,4-beta-xylanase
MKSSLLMLLAPIVALATPITDISERQAADSLDALFKAKGKQYFGTCTDQNRLSTGKSAAVIQADFGQVTPENSMKWDATEPSRGNFNFAQADYLVDWATKNNKLIRGHNLCWHSQLPSWVSAIKDKATLTSVLQNHVTTLVTRYKGKILQWDVVNEIFNEDGSMRSSVFSQVLGEDFVRIAFEAARAADPNAKLYINDYNLDQPNYAKLTTGMVAHVNKWVAAGVPIDGIGSQGHLTAGLASQAGASIKALAAANVEEVAFTEVDIVNAAANDYVQVTQACLNEPKCVGITVWGVRDPDSWRASSNPLLFDSNFNPKPAYTAIVNALK

SEQ ID NO: 19411 - DNA, 309 bp, Muscodor strobelii
  misc_feature: SGI EST ID NO. CUFF.45320.0
  misc_feature: Variant of the nucleotide sequence at SEQ ID NO 19409
ctaaaaacaacaagcttatccgtggccacaatctttgctggcattcacagctaccatcatgggttagcgctatcaaggacaaggcgacgctgacttccgtcctacaaaaccacgttactacccttgtgacacggtataagggcaagatcctgcaatgggacgttgtaaacgagattttcaacgaggacggatcgatgcgaagctccgtgttctctcaagtactgggagaggacttcgtccgcattgcattcgaagccgcgcgagccgcagatccaaatgccaagctctacatcaatgactacaacctcg

SEQ ID NO: 19412 - DNA, 1989 bp, Muscodor strobelii
  misc_feature: SGI cDNA ID NO. 566528
  misc_feature: Encodes the peptide sequence at SEQ ID NO 19413
atggtgccccggaatgaagagcagctccggcggccgcctcccaacccgcgtcttctctcagttcaatccatcgtgtccaagtattcacagcgctcccacgcatcctcgttcgaggcagacgatgagttatccaccacatccaacgattccgacggcatgagtccccgcagcagtctcgaaggcggccacggcgcatcgcccggccgccgctatcccggcgaagacaaccgtccgacgagctccaaagagctcgctggctggtacatgtattccttcgccgccgagacctatgtcatctgtgctatctcctcgttcataccgatcctcctggagagcttagcccgtgagaatggcgtcctgttgtccgatcgaaccactccctgtggcgacagcaggcagaaacacggagggtcgcagaaggacagccagtgcatcgtctccatcctcggcgtcgacgtcaacacggcgagcttcgccatgtatactttcagcattagcgtcctgttgcaagcactgcttgtagtcagtattagctgtgctgcagaccacggcaactatcgcaagcgcttgctcttgacctttgcatggacgggtagcatatgcgtcatgctttacattttcgtcttccgcgaaatctacctctttggtgccctgctcgccattgtctccaacacctcgttcggcgcctcatttgtgctcctcaactccttcctgccccttctcgtccgtcaccaccccctcgtgcaggaagccgccgtgggagggatacctacggaaggggatatcgcagatcggccatctgacgccgagtccttcacaacgtcgcctactctcaccgatcatcccctcaggaactcttcgactgctttgctccatcccaacgatggcaattcggatctctacgaattgaggcgcatccccacccacgaagaactcacctctattgaattgaagctgtcaacccagatatctgccaggggcattggtattggctatggcgcagctttgttcgtgcagtgtgtgtctatcctaattcttctcgctatgaagagctctacctggtcacaacgcatagtattgctgtttattggatcttggtgggccatcttcacgataccggccgccttctggctcagaccgcgacccggtccaccactcccctcgagtgggtacaagggctcaaaggcgtggctactctacattgcgtactcatggaagaacttgttccgcaccgtcaagcttgccggcagactgcgggacatcgttctgtttctggggagctggtttctcttgtccgacgccattgcaaccacttcatccactgccattttattcgcgaagacgcagctccggatgcagccttgggcacttggcttgatcaacgttatttccacctccacaggtgttatcggtgcactgagctggtctttcatttctagacatttcaacttgaaaccgcaccagaccatcctgggatgtatagctttgtttgagttgattccgatatacggcctgctgggctatcttccgattgtccaacggtggggtgtgattggcctccagcggccctgggagatgtatcccctggctgctatctacggctttgtgctggggggcctcagctcctactgccgatccctttttggggaactcatccctcctggatccgaggcggcgttctacgcgctttatgccattacggacaaggggtctagcgtatttgggcccgttattgtcggtgccattatcgacgcgtctggggagatacggccggccttctggtttcttgccgtgcttgtggggctgcctgggcccctcatctatttcgtcaatgttgagcgtggaaaatcggagggcgagaagctggccgaggtcatcgaagggtttaagaatagcgatggcatgaacggcggcgagccatctggcgacgaggaagatcgtggcatgctagcagcttatcaagcagacgaggaggagaatcgacggtga

SEQ ID NO: 19413 - protein, 662 aa, Muscodor strobelii
  misc_feature: SGI Peptide ID NO. 566528
  misc_feature (1)..(657): NCBI GI: 171696360 Blast Desc: protein product [Podospora anserina] gi|170948422|emb|CAP60586.1| protein product [Podospora anserina]
  misc_feature (1)..(661): NCBI GI: 116180872 Blast Desc: CHGG_01064 [Chaetomium globosum CBS 148.51] gi|88185361|gb|EAQ92829.1| CHGG_01064 [Chaetomium globosum CBS 148.51]
  misc_feature (1)..(660): NCBI GI: 39965018 Blast Desc: MGG_09904 [Magnaporthe grisea 70-15] gi|73917063|sp|Q51IZ9.1|ATG22_MAGGR RecName: Full=Autophagy-related protein 22 gi|145013197|gb|EDJ97838.1|
  misc_feature (8)..(659): NCBI GI: 256735072 Blast Desc: [Nectria haematococca mpVI 77-13-4]
  misc_feature (6)..(659): NCBI GI: 73917064 Blast Desc: [Nectria haematococca mpVI 77-13-4]
  misc_feature (23)..(660): NCBI GI: 46108686 Blast Desc: FG01225.1 [Gibberella zeae PH-1]
  misc_feature (6)..(659): NCBI GI: 164424196 Blast Desc: NCU07504 [Neurospora crassa OR74A] gi|157070415|gb|EAA35815.2| conserved [Neurospora crassa OR74A]
  misc_feature (1)..(659): NCBI GI: 156045633 Blast Desc: SS1G_10007 [Sclerotinia sclerotiorum 1980] gi|166989481|sp|A7EXE6.1|AT222_SCLS1 RecName: Full=Autophagy-related protein 22-2 gi|154694400|gb|EDN94138.1|
  misc_feature (1)..(662): NCBI GI: 166989547 Blast Desc: SS1G_10007 [Sclerotinia sclerotiorum 1980] gi|166989481|sp|A7EXE6.1|AT222_SCLS1 RecName: Full=Autophagy-related protein 22-2 gi|154694400|gb|EDN94138.1|
  misc_feature (70)..(662): NCBI GI: 154309537 Blast Desc: BC1G_07239 [Botryotinia fuckeliana B05.10] gi|150852262|gb|EDN27454.1| BC1G_07239 [Botryotinia fuckeliana B05.10]
MVPRNEEQLRRPPPNPRLLSVQSIVSKYSQRSHASSFEADDELSTTSNDSDGMSPRSSLEGGHGASPGRRYPGEDNRPTSSKELAGWYMYSFAAETYVICAISSFIPILLESLARENGVLLSDRTTPCGDSRQKHGGSQKDSQCIVSILGVDVNTASFAMYTFSISVLLQALLVVSISCAADHGNYRKRLLLTFAWTGSICVMLYIFVFREIYLFGALLAIVSNTSFGASFVLLNSFLPLLVRHHPLVQEAAVGGIPTEGDIADRPSDAESFTTSPTLTDHPLRNSSTALLHPNDGNSDLYELRRIPTHEELTSIELKLSTQISARGIGIGYGAALFVQCVSILILLAMKSSTWSQRIVLLFIGSWWAIFTIPAAFWLRPRPGPPLPSSGYKGSKAWLLYIAYSWKNLFRTVKLAGRLRDIVLFLGSWFLLSDAIATTSSTAILFAKTQLRMQPWALGLINVISTSTGVIGALSWSFISRHFNLKPHQTILGCIALFELIPIYGLLGYLPIVQRWGVIGLQRPWEMYPLAAIYGFVLGGLSSYCRSLFGELIPPGSEAAFYALYAITDKGSSVFGPVIVGAIIDASGEIRPAFWFLAVLVGLPGPLIYFVNVERGKSEGEKLAEVIEGFKNSDGMNGGEPSGDEEDRGMLAAYQADEEENRR

SEQ ID NO: 19414 - DNA, 2443 bp, Muscodor strobelii
  misc_feature: SGI EST ID NO. CUFF.45390.1
  misc_feature: Variant of the nucleotide sequence at SEQ ID NO 19412
ggccgctgcctggacacactagcccactgaagttgccctgataggccgctgtaagccatccccatccatcgggtctcacttccaatggtgccccggaatgaagagcagctccggcggccgcctcccaacccgcgtcttctctcagttcaatccatcgtgtccaagtattcacagcgctcccacgcatcctcgttcgaggcagacgatgagttatccaccacatccaacgattccgacggcatgagtccccgcagcagtctcgaaggcggccacggcgcatcgcccggccgccgctatcccggcgaagacaaccgtccgacgagctccaaagagctcgctggctggtacatgtattccttcgccgccgagacctatgtcatctgtgctatctcctcgttcataccgatcctcctggagagcttagcccgtgagaatggcgtcctgttgtccgatcgaaccactccctgtggcgacagcaggcagaaacacggagggtcgcagaaggacagccagtgcatcgtctccatcctcggcgtcgacgtcaacacggcgagcttcgccatgtatactttcagcattagcgtcctgttgcaagcactgcttgtagtcagtattagctgtgctgcagaccacggcaactatcgcaagcgcttgctcttgacctttgcatggacgggtagcatatgcgtcatgctttacattttcgtcttccgcgaaatctacctctttggtgccctgctcgccattgtctccaacacctcgttcggcgcctcatttgtgctcctcaactccttcctgccccttctcgtccgtcaccaccccctcgtgcaggaagccgccgtgggagggatacctacggaaggggatatcgcagatcggccatctgacgccgagtccttcacaacgtcgcctactctcaccgatcatcccctcaggaactcttcgactgctttgctccatcccaacgatggcaattcggatctctacgaattgaggcgcatccccacccacgaagaactcacctctattgaattgaagctgtcaacccagatatctgccaggggcattggtattggctatggcgcagctttgttcgtgcagtgtgtgtctatcctaattcttctcgctatgaagagctctacctggtcacaacgcatagtattgctgtttattggatcttggtgggccatcttcacgataccggccgccttctggctcagaccgcgacccggtccaccactcccctcgagtgggtacaagggctcaaaggcgtggctactctacattgcgtactcatggaagaacttgttccgcaccgtcaagcttgccggcagactgcgggacatcgttctgtttctggggagctggtttctcttgtccgacgccattgcaaccacttcatccactgccattttattcgcgaagacgcagctccggatgcagccttgggcacttggcttgatcaacgttatttccacctccacaggtgttatcggtgcactgagctggtctttcatttctagacatttcaacttgaaaccgcaccagaccatcctgggatgtatagctttgtttgagttgattccgatatacggcctgctgggctatcttccgattgtccaacggtggggtgtgattggcctccagcggccctgggagatgtatcccctggctgctatctacggctttgtgctggggggcctcagctcctactgccgatccctttttggggaactcatccctcctggatccgaggcggcgttctacgcgctttatgccattacggacaaggggtctagcgtatttgggcccgttattgtcggtgccattatcgacgcgtctggggagatacggccggccttctggtttcttgccgtgcttgtggggctgcctgggcccctcatctatttcgtcaatgttgagcgtggaaaatcggagggcgagaagctggccgaggtcatcgaagggtttaagaatagcgatggcatgaacggcggcgagccatctggcgacgaggaagatcgtggcatgctagcagcttatcaagcagacgaggaggagaatcgacggtgaatcattgagcccagtcacacacgctgagtatttgcatatgtcattttcggtggctctgggtatgataaatagtctagttgccagtttcaatttgcatagcgatggcgtttgctgtctgtctcttttttttgcaatacactttccaagtttatcagtctttacacgtatagatgaggtcactagtagctacatacgatatggcacaacgggacagggatgtcaatctgcggcttgaggggcgcattccaacggtgagcgagagcagtgtgatgggtgccattggcatgtgcgattgaaatgcagtggacaagcgatgttacgtcaacccctgaacgaagagctattgttggagtaggaagacaaggctatt

SEQ ID NO: 19415 - DNA, 1251 bp, Muscodor strobelii
  misc_feature: SGI cDNA ID NO. 566529
  misc_feature: Encodes the peptide sequence at SEQ ID NO 19416
atggcgtctgcccgcaagcgtccacggcccgacgaagacacccaggccgagtgccccttctcggtcacgcaccccgacaccagcgagaggagcaacaaggtcaagcgcaggcgacagggatccgacgagaatgcgccgccaaaaataggactgcagccgtcgccgttttcgcccatgggcaagttcaaggacccaaacaacaccatggaccgctactatcaagtccagccctaccagaagtggatcgagatgaccaggtacaacagcttcgtcctcaacggtgtcaagtattacagcgagggattcatatttgtggccaacagctccaccatcgagcgtcagaagaaccccaatgagccgcggacctccaggctgaaatctgacgacgattgggttgcccgcatccttgagatccgcgccagcgacgaacatcatgtctacgcacgtgtctactggatgtattggcccgacgagctgcctgtgggcactcaggaggggaagagatccatcgcggggaggcagccataccatggccaaaacgagcttatcgcctctaaccacatggacgtcatcaacgttgtcagcgtgaccgcccaggctactgtgaaccagtgggacgagacgaacgaggaggatcagcagcaggcattatactggcgccaggcctttgatgttaggagcatggagctttcgtctgcacagccgatatgcaaatgcggccggcccgagaaccctgacaagaagttgatcaactgtgccaacgaggactgcaggaaatggctacacgacgactgcctcatcaacgacgtcctggagaagactttcaagcgattagggaccgataagccccataaacccacccgagtaaagacggaagatgcgcagcgacctctgagcccgagcgagtcgggagcggcaccgacggcacaacagtcgatcgacgtgaaggcagaggaccagggcacgatcaagctagccgacgtcgagaccagcaatgcgacggtcaaggcggagacacgcacggtgccaatcgttggcggccaagagtcgaaacgcaaagggggcaagtcgcgcaagtcagaaggcaaggccagcgaggtgcccaagtgggagggccacttcacggcggcgattaatgaggacacgccgtcggtcatcgagatcacggacctgcggcagaacgtgaagggcggagagaagacgtggacggagccggccaactgtctcttctgcggctcggagatccactag

SEQ ID NO: 19416 - protein, 416 aa, Muscodor strobelii
  misc_feature: SGI Peptide ID NO. 566529
  misc_feature (2)..(415): NCBI GI: 171696358 Blast Desc: protein product [Podospora anserina] gi|170948421|emb|CAP60585.1| protein product [Podospora anserina]
  misc_feature (3)..(415): NCBI GI: 256735071 Blast Desc: NECHADRAFT_74541 [Nectria haematococca mpVI 77-13-4]
  misc_feature (1)..(415): NCBI GI: 145605381 Blast Desc: MGG_09903 [Magnaporthe grisea 70-15] gi|145013198|gb|EDJ97839.1| MGG_09903 [Magnaporthe grisea 70-15]
  misc_feature (1)..(412): NCBI GI: 164424194 Blast Desc: NCU07505 [Neurospora crassa OR74A] gi|157070414|gb|EAA35816.2| conserved [Neurospora crassa OR74A]
  misc_feature (2)..(415): NCBI GI: 261356418 Blast Desc: conserved [Verticillium albo-atrum VaMs.102]
  misc_feature (1)..(318): NCBI GI: 116180870 Blast Desc: CHGG_01063 [Chaetomium globosum CBS 148.51] gi|88185360|gb|EAQ92828.1| CHGG_01063 [Chaetomium globosum CBS 148.51]
  misc_feature (56)..(275): NCBI GI: 154313739 Blast Desc: BC1G_05719 [Botryotinia fuckeliana B05.10] gi|150849301|gb|EDN24494.1| BC1G_05719 [Botryotinia fuckeliana B05.10]
  misc_feature (72)..(266): NCBI GI: 169603135 Blast Desc: SNOG_04574 [Phaeosphaeria nodorum SN15] gi|160706330|gb|EAT88334.2| SNOG_04574 [Phaeosphaeria nodorum SN15]
  misc_feature (56)..(275): NCBI GI: 156061507 Blast Desc: SS1G_02898 [Sclerotinia sclerotiorum 1980] gi|154700300|gb|EDO00039.1| SS1G_02898 [Sclerotinia sclerotiorum 1980]
  misc_feature (51)..(266): NCBI GI: 189203567 Blast Desc: conserved [Pyrenophora tritici-repentis Pt-1C-BFP] gi|187985218|gb|EDU50706.1| conserved [Pyrenophora tritici-repentis Pt-1C-BFP]
MASARKRPRPDEDTQAECPFSVTHPDTSERSNKVKRRRQGSDENAPPKIGLQPSPFSPMGKFKDPNNTMDRYYQVQPYQKWIEMTRYNSFVLNGVKYYSEGFIFVANSSTIERQKNPNEPRTSRLKSDDDWVARILEIRASDEHHVYARVYWMYWPDELPVGTQEGKRSIAGRQPYHGQNELIASNHMDVINVVSVTAQATVNQWDETNEEDQQQALYWRQAFDVRSMELSSAQPICKCGRPENPDKKLINCANEDCRKWLHDDCLINDVLEKTFKRLGTDKPHKPTRVKTEDAQRPLSPSESGAAPTAQQSIDVKAEDQGTIKLADVETSNATVKAETRTVPIVGGQESKRKGGKSRKSEGKASEVPKWEGHFTAAINEDTPSVIEITDLRQNVKGGEKTWTEPANCLFCGSEIH

SEQ ID NO: 19417 - DNA, 2773 bp, Muscodor strobelii
  misc_feature: SGI EST ID NO. CUFF.45351.0
  misc_feature: Variant of the nucleotide sequence at SEQ ID NO 19415
cggaagaccaaaaaatagaggattgccgacccgtcgcagccgggtgtgttaccccccaaggccagggccattcccccgccaccgcaataaatcacaagaatgggccatcatctgctcgctccaaactagtccatgccatccgtaccatagcaatatctcctcctgcctctacagattcttcctgccgtcgccgtagctaggtagtgacgattggccagaggtgacggtcctccaggtgcgactggaattatttccagcttggctcaccgcgtctcttttctcatagtccccctctccccatacgctctcggcgacagattgcatgcatctccccagttgccggacgcctaggtagtaaatctcgtcgtcacagaacttgaccgaagctctctctctccatctcccccgcgccactccatgaccgagcagcgccgtggcaaataacagcacgcgcctcgccgctgtttctgcctgtgcattgctttcgtgcgacgattgtgcctgcgcacaatctcaattacggcaacttgctatcgcctggtttcctccgacgcgcaagcaccctcctccatcgtcatactctgcattccccatcgctgctcccccatcaccacacgcgtatgacatcgctcctgcacacttgcacttagcctcgtcgacgcgcgcatccacacgacacgccagacactgctcttccgtcattcatcttttcgcccatcaactaaaaatcctctccgacttctcgacttcacgccccaccccgcatcgtcatcgctatcctcgcccagcatggcgtctgcccgcaagcgtccacggcccgacgaagacacccaggccgagtgccccttctcggtcacgcaccccgacaccagcgagaggagcaacaaggtcaagcgcaggcgacagggatccgacgagaatgcgccgccaaaaataggactgcagccgtcgccgttttcgcccatgggcaagttcaaggacccaaacaacaccatggaccgctactatcaagtccagccctaccagaagtggatcgagatgaccaggtacaacagcttcgtcctcaacggtgtcaagtattacagcgagggattcatatttgtggccaacagctccaccatcgagcgtcagaagaaccccaatgagccgcggacctccaggctgaaatctgacgacgattgggttgcccgcatccttgagatccgcgccagcgacgaacatcatgtctacgcacgtgtctactggatgtattggcccgacgagctgcctgtgggcactcaggaggggaagagatccatcgcggggaggcagccataccatggccaaaacgagcttatcgcctctaaccacatggacgtcatcaacgttgtcagcgtgaccgcccaggctactgtgaaccagtgggacgagacgaacgaggaggatcagcagcaggcattatactggcgccaggcctttgatgttaggagcatggagctttcgtctgcacagccgatatgcaaatgcggccggcccgagaaccctgacaagaagttgatcaactgtgccaacgaggactgcaggaaatggctacacgacgactgcctcatcaacgacgtcctggagaagactttcaagcgattagggaccgataagccccataaacccacccgagtaaagacggaagatgcgcagcgacctctgagcccgagcgagtcgggagcggcaccgacggcacaacagtcgatcgacgtgaaggcagaggaccagggcacgatcaagctagccgacgtcgagaccagcaatgcgacggtcaaggcggagacacgcacggtgccaatcgttggcggccaagagtcgaaacgcaaagggggcaagtcgcgcaagtcagaaggcaaggccagcgaggtgcccaagtgggagggccacttcacggcggcgattaatgaggacacgccgtcggtcatcgagatcacggacctgcggcagaacgtgaagggcggagagaagacgtggacggagccggccaactgtctcttctgcggctcggagatccactagagacgaagaggacaataagaggaagaggtgggtggtacccagcgccgagtactaggcgtgtttgtcgagatccttctcgatgataatgagcactctcgtgtacggtctatgagccccaaggggcaggcgttccggagatcatgataccctgcatgtcgttgcgggggcaattgttttctatttgattcgtcgaggcgatttcacggggccgagattggagcgaaccatgggccagcaggaggacgttacactatgaggtgtttcaagaatgaaacggcagtgttaacagtgaggggggttgatgtttatcaagctagtccttcgaggcttggctcagactccacgatgtgcatacaattgcatttgctgcaaagggagtgcaccaatgcagcattacgtttctcgatatagttcgggcgaggcgggtattgattccaaaatctggccgaatgtatatatatcgttggttctcactatgcttttgaaagttgaagctccagaggatagtgtggcgtgagggtattcttttctcgcagtttgcatcgcattgcatgggttattctgaaggtagagaatgcttccattgcgccttggtatggtactctattttaatgcggtgcggaaaaacaaaaggatagaagccagcctgatgtcttttcgcacatgtcacttattctgtatcattatgctcttgatatacgacatgtgagatgaggtatgaccaggattgcct

SEQ ID NO: 19418 - DNA, 813 bp, Muscodor strobelii
  misc_feature: SGI cDNA ID NO. 566530
  misc_feature: Elevated expression when VOC is produced
  misc_feature: Encodes the peptide sequence at SEQ ID NO 19419
atggcggccgccgacccctttgactcggcactcgacctcctccgccgcctcaaccccaagcacacatcaacacacctaaacaacctcatcaacctcgcaccagacctaaccgaagacctcctctcctccgtcgatcagcccctcacagtgaagcgatgcaagcagtcagggcgcgactacctactctgcgactacaatcgtgacggcgacagctaccgctccccatggagcaatcagttcgaccccccgcttctcgatgcgccagggaccggggtgcctagtgagaaggtccggaagatggagatcaaagccaacgaggcttttgatgtgtatcgggagctatactatgagggaggcgtgagcagtgtctatttttgggcgctagatgatgggtttgccggggttgtgcttttgaagaaagccgcaaccccaggatccagcagcgagggaacatgggacagcatccacgtcttcgaagcaattgaccgggcacggttcacgcagtacaaccttacgtcaacagtcatactttccctcgccaccaacacgacgactcttggggatatggacttatccggcaacatgacgagacagatcgagatggaacttcctgcagagaacgatgagatgcagattgcaaatatcgggaaattggtcgaggacatggagctgaagatgaggaatttgctgcaagaggtgtattttggcaaggccaaggatgttgtgggagatctgaggagcgtgggcagcttgagcgagagtgtgagggaaagagatgcgcaaagggatattattggtagtatgcggagatag

SEQ ID NO: 19419 - protein, 270 aa, Muscodor strobelii
  misc_feature: SGI Peptide ID NO. 566530
  misc_feature (1)..(270): Pfam Id: PF01115 Pfam Desc: F-actin capping protein, beta subunit
  misc_feature (1)..(270): NCBI GI: 164424219 Blast Desc: F-actin capping protein beta subunit [Neurospora crassa OR74A] gi|190360696|sp|Q7SCP4.3|CAPZB_NEUCR RecName: Full=F-actin-capping protein subunit beta F-actin capping protein
  misc_feature (3)..(270): NCBI GI: 46108688 Blast Desc: FG01226.1 [Gibberella zeae PH-1] gi|119387858|sp|Q4INI2.1|CAPZB_GIBZE RecName: Full=F-actin-capping protein subunit beta
  misc_feature (1)..(270): NCBI GI: 116180832 Blast Desc: conserved [Chaetomium globosum CBS 148.51] gi|88185341|gb|EAQ92809.1| conserved [Chaetomium globosum CBS 148.51]
  misc_feature (1)..(270): NCBI GI: 171695964 Blast Desc: protein product [Podospora anserina] gi|170948224|emb|CAP60388.1| protein product [Podospora anserina]
  misc_feature (3)..(270): NCBI GI: 39964999 Blast Desc: F-actin capping protein subunit beta, [Magnaporthe grisea 70-15] gi|59803031|gb|AAX07695.1| F-actin capping protein beta subunit-like protein [Magnaporthe grisea] F-actin capping
  misc_feature (7)..(270): NCBI GI: 255951302 Blast Desc: Pc22g25320 [Penicillium chrysogenum Wisconsin 54-1255] gi|211593435|emb|CAP99820.1| Pc22g25320 [Penicillium chrysogenum Wisconsin 54-1255]
  misc_feature (7)..(270): NCBI GI: 169766706 Blast Desc: [Aspergillus oryzae RIB40] gi|119387857|sp|Q2URJ3.1|CAPZB_ASPOR RecName: Full=F-actin-capping protein subunit beta protein product oryzae]
  misc_feature (7)..(270): NCBI GI: 242804203 Blast Desc: F-actin capping protein beta subunit [Talaromyces stipitatus ATCC 10500] gi|218717672|gb|EED17093.1| F-actin capping protein beta subunit [Talaromyces stipitatus ATCC 10500]
  misc_feature (7)..(270): NCBI GI: 212539560 Blast Desc: F-actin capping protein beta subunit [Penicillium marneffei ATCC 18224] gi|210067234|gb|EEA21326.1| F-actin capping protein beta subunit [Penicillium marneffei ATCC 18224]
  misc_feature (1)..(270): NCBI GI: 156045623 Blast Desc: SS1G_10002 [Sclerotinia sclerotiorum 1980] gi|154694395|gb|EDN94133.1| SS1G_10002 [Sclerotinia sclerotiorum 1980]
  misc_feature: Useful for introducing or modulating the production of volatile compounds
MAAADPFDSALDLLRRLNPKHTSTHLNNLINLAPDLTEDLLSSVDQPLTVKRCKQSGRDYLLCDYNRDGDSYRSPWSNQFDPPLLDAPGTGVPSEKVRKMEIKANEAFDVYRELYYEGGVSSVYFWALDDGFAGVVLLKKAATPGSSSEGTWDSIHVFEAIDRARFTQYNLTSTVILSLATNTTTLGDMDLSGNMTRQIEMELPAENDEMQIANIGKLVEDMELKMRNLLQEVYFGKAKDVVGDLRSVGSLSESVRERDAQRDIIGSMRR

SEQ ID NO: 19420 - DNA, 1306 bp, Muscodor strobelii
  misc_feature: SGI EST ID NO. CUFF.45466.1
  misc_feature: Variant of the nucleotide sequence at SEQ ID NO 19418
tcccgcccccaccatccaccacatcgtcccgtgcagctctcaactacacctctagtaaacaccggcttccaacgacgactcctaaacgcgctcttgacaagtttccggccatctcgcccgctccgttgcacaggacacgaacagcggtggatatcacctctacctacccatcatggcggccgccgacccctttgactcggcactcgacctcctccgccgcctcaaccccaagcacacatcaacacacctaaacaacctcatcaacctcgcaccagacctaaccgaagacctcctctcctccgtcgatcagcccctcacagtgaagcgatgcaagcagtcagggcgcgactacctactctgcgactacaatcgtgacggcgacagctaccgctccccatggagcaatcagttcgaccccccgcttctcgatgcgccagggaccggggtgcctagtgagaaggtccggaagatggagatcaaagccaacgaggcttttgatgtgtatcgggagctatactatgagggaggcgtgagcagtgtctatttttgggcgctagatgatgggtttgccggggttgtgcttttgaagaaagccgcaaccccaggatccagcagcgagggaacatgggacagcatccacgtcttcgaagcaattgaccgggcacggttcacgcagtacaaccttacgtcaacagtcatactttccctcgccaccaacacgacgactcttggggatatggacttatccggcaacatgacgagacagatcgagatggaacttcctgcagagaacgatgagatgcagattgcaaatatcgggaaattggtcgaggacatggagctgaagatgaggaatttgctgcaagaggtgtattttggcaaggccaaggatgttgtgggagatctgaggagcgtgggcagcttgagcgagagtgtgagggaaagagatgcgcaaagggatattattggtagtatgcggagataggatgagttttgggagatgggtggaattagggaaggcttggggaaagtggagtctgaagcaaagacactgcaatgcatagagggagaagaaatggactgaagaatgtgctgtttgttgtggcataattcagacctaagagctgaagatactgcctcggcttgagaacggaatcgacgtctccggactcatttgacagtgttacgaagttaaacatgcactactaagatgctttcatgctctcatgcttggactgccgtgacgtgtgcgcttttgccagaaatactagtttatgtactgtatgatacctggctgcgatttgga

SEQ ID NO: 19421 - DNA, 1848 bp, Muscodor strobelii
  misc_feature: SGI cDNA ID NO. 566531
  misc_feature: Encodes the peptide sequence at SEQ ID NO 19422
atgtcttctattcaagcttcgcccagcgtttggtctagcacttctcccggtgtctcgtcgagcgacactctcagcaccacgcccgagcctctacatgtcattctaccgggcacaaattataatgccacctacgcagacggcttcaacaacggtcgcgcctacgacaatggcttcagtgacggtcagacctatcaagacggttacgatgacggcttcaacgcggggttcagaagcgggcgcagagatcgcgatgatgatcttgatgagctcgatcgatcgttcgtcgctagcttcaagtccgtgaagcaagatatggacctcctccgtgaggagcttgttactacaaagcgagcgctactcctccttcgccgaggacaagacgaagccagtacggacattaagaaacttgagcaaaatgacaaagacgccaagcagaagattaagcaattgtccaaagatcaagaagaagccagctcgaagatccaagagctggtcgacgaccatcaagaaaccaccatggtagtccagggacttcgcaatgatcacgatgatgtcgcacacatggtcaactctactcacgaagttgagattcgagacgccacaaaggaggtcaagcagcttcgcaaggatgttactgctgccaacgacaagatgcaatacttggaggcgcacttctgggaaggtgatgctgagtacacaccattcagcgagttcaaaacactcggtagaaatgttcatgatgttgtcgacttctcgggaccctttgacctcatgactcgagttatgatcaacaagattcgtcatgaaactgagaacgaacgcgatggtgaagcacctgctaggatgcgagttgcacgaccccccaagcgtgcccgtgaggagtcatcatcaactggctctcatgaaattccgattcaaccatctgtctccaacacttcttcattggccctaaatatcccaggatgtgagtatgttcacggcgtgggctggcgtagctttcctagtacccgaactccgattcgaatcgaaccggcatctcctcctcacgcgctcatcaacatcaatggaccttccaccgcgactcagggaccgtccactggcctttttggtcccacgacttcctccggccgccacgagacttggtaccaggatgaagaaaacatgaggaattctttggggggatataacagttatgccgacatgcttatcaatcccataggctccgagcctgcgatcaaggagtcatcgacaaccgacttttctaaggagcctcaagaaggagagactactatcattgacactagtatggacaccaatcgatctctcatgacgactcacgccaacgacggtcaccatgttccccactctcactaccaacaccacgttaaccctatatctgctctccgcccgctcggttcctcaatttccaggctccctcctcaaccggctatgagtggaagcgaaaacccggcactcatcacgaaggacggcaatcgagacacctctgagcgtgctcatgagcactcatcggcaactgacaatccgcagaaatctcaggacggagcggagactggactcggcactgccagcagcgtcaagggatcctccagctcgacccaggcaaggccatcagttcattcttggcgccagtcgctcggtcccatgtccggtattagtactagtttctcggacgggctcggatcatggtaccccttcactccgttcggttcgttctctactatgcatggaccgcaagacaactatctagagtcaagggatgagcagagacaatcaaagcgacaaaagatggatggcaaagcccctgagaccaactattttggttgctga

SEQ ID NO: 19422 - protein, 615 aa, Muscodor strobelii
  misc_feature: SGI Peptide ID NO. 566531
MSSIQASPSVWSSTSPGVSSSDTLSTTPEPLHVILPGTNYNATYADGFNNGRAYDNGFSDGQTYQDGYDDGFNAGFRSGRRDRDDDLDELDRSFVASFKSVKQDMDLLREELVTTKRALLLLRRGQDEASTDIKKLEQNDKDAKQKIKQLSKDQEEASSKIQELVDDHQETTMVVQGLRNDHDDVAHMVNSTHEVEIRDATKEVKQLRKDVTAANDKMQYLEAHFWEGDAEYTPFSEFKTLGRNVHDVVDFSGPFDLMTRVMINKIRHETENERDGEAPARMRVARPPKRAREESSSTGSHEIPIQPSVSNTSSLALNIPGCEYVHGVGWRSFPSTRTPIRIEPASPPHALININGPSTATQGPSTGLFGPTTSSGRHETWYQDEENMRNSLGGYNSYADMLINPIGSEPAIKESSTTDFSKEPQEGETTIIDTSMDTNRSLMTTHANDGHHVPHSHYQHHVNPISALRPLGSSISRLPPQPAMSGSENPALITKDGNRDTSERAHEHSSATDNPQKSQDGAETGLGTASSVKGSSSSTQARPSVHSWRQSLGPMSGISTSFSDGLGSWYPFTPFGSFSTMHGPQDNYLESRDEQRQSKRQKMDGKAPETNYFGC

SEQ ID NO: 19423 - DNA, 630 bp, Muscodor strobelii
  misc_feature: SGI EST ID NO. CUFF.45360.0
  misc_feature: Variant of the nucleotide sequence at SEQ ID NO 19421
gccgacatgcttatcaatcccataggctccgagcctgcgatcaaggagtcatcgacaaccgacttttctaaggagcctcaagaaggagagactactatcattgacactagtatggacaccaatcgatctctcatgacgactcacgccaacgacggtcaccatgttccccactctcactaccaacaccacgttaaccctatatctgctctccgcccgctcggttcctcaatttccaggctccctcctcaaccggctatgagtggaagcgaaaacccggcactcatcacgaaggacggcaatcgagacacctctgagcgtgctcatgagcactcatcggcaactgacaatccgcagaaatctcaggacggagcggagactggactcggcactgccagcagcgtcaagggatcctccagctcgacccaggcaaggccatcagttcattcttggcgccagtcgctcggtcccatgtccggtattagtactagtttctcggacgggctcggatcatggtaccccttcactccgttcggttcgttctctactatgcatggaccgcaagacaactatctagagtcaagggatgagcagagacaatcaaagcgacaaaagatggatggcaaagcccct

SEQ ID NO: 19424 - DNA, 675 bp, Muscodor strobelii
  misc_feature: SGI cDNA ID NO. 566532
  misc_feature: Encodes the peptide sequence at SEQ ID NO 19425
atgaatcctttctctttgctcggcgcatcttcagaacgcacacaacaggatggcttcgaagaagcgatcaaaaatgtcatgagtgatgccttcacagacggctacaaagagggtttcaaggacggccacaaggatggctgcaatacaacagtagagctgaaccgtcattcgagtactgatgtcatatccatgaagcaggatatcgaatttcttcgccagaggctcgcaaactctgagaattcgacccaaaagcttcgcgacgggctcacagtggctcacaagaagatcgccgagcttcgtaaagaacttggaagcaccactcagactatgcagcagatgcttgataatgccaatgaagtcgcggcggataaagatgcatggcttcgagaagtctatgatgaggaccataaagataccactacgatgattcagacgctccaaagaaagcttgcaaataccaaccgaatggtctatgatcttcgtgaggaccatgaacgtgcggtcgatatgctacgacaagacgatgacgatctatacgactggactagagatgcaatgagcgagcttcaagacgatgttgcatgtatcgacgagaagaccaatgaccttcgccaggattatgacgacgccgccgagacacaattcgttagctggaatatggtcatcgagagatag

SEQ ID NO: 19425 - protein, 224 aa, Muscodor strobelii
  misc_feature: SGI Peptide ID NO. 566532
MNPFSLLGASSERTQQDGFEEAIKNVMSDAFTDGYKEGFKDGHKDGCNTTVELNRHSSTDVISMKQDIEFLRQRLANSENSTQKLRDGLTVAHKKIAELRKELGSTTQTMQQMLDNANEVAADKDAWLREVYDEDHKDTTTMIQTLQRKLANTNRMVYDLREDHERAVDMLRQDDDDLYDWTRDAMSELQDDVACIDEKTNDLRQDYDDAAETQFVSWNMVIER

SEQ ID NO: 19426 - DNA, 736 bp, Muscodor strobelii
  misc_feature: SGI EST ID NO. CUFF.45381.0
  misc_feature: Variant of the nucleotide sequence at SEQ ID NO 19424
taaagatgcatggcttcgagaagtctatgatgaggaccataaagataccactacgatgattcagacgctccaaagaaagcttgcaaataccaaccgaatggtctatgatcttcgtgaggaccatgaacgtgcggtcgatatgctacgacaagacgatgacgatctatacgactggactagagatgcaatgagcgagcttcaagacgatgttgcatgtatcgacgagaagaccaatgaccttcgccaggattatgacgacgccgccgagacacaattcgttagctggaatatggtcatcgagagatagcaagacggtcgagaaaatgcaacagaaccctgcagaaacaacctcgagcgtgatctcaacatggctaactcctcattccgctcccaacgctcatcgagatatctcgactgtttctttccctaagcatggacgcaaaaagagcgttgcccgtttcccataccagtacttccacaaacgtagagacttttgttctttgccggcgtctcagatctgctcactaatgcgcatgccttcattaatgatgagagctcgacctagttgcgagactacaatacaagcaaccttctggaagatatgccgaagcagatggctatggtttgatgtgacgataccttgcatcaattgtttctcgacgtctggtgcctcatttccggccctgttggcgcgactaagtgcttgtgcgttgatttagattcgcacaggatggag

SEQ ID NO: 19427 - DNA, 1032 bp, Muscodor strobelii
  misc_feature: SGI cDNA ID NO. 566533
  misc_feature: Encodes the peptide sequence at SEQ ID NO 19428
atggctcaccgcacttcttcgccgagcacgttcctgagtgttgccgatggtcgcacttatcaagatggcttcaaggatggtttcaaggaaggcttcaaagacggtctcaaagacagtctcaaactcgatctccaggagatccgcaatccccttggcatccaacagactgcaaacatcagctctacgcagcaagatattggtcttcttcgccgcgatcttgccgacaacaatcaagcgatcagtcgcttccgtcagactcaagatgaagctgacaacataatcaagaagcttcaagaagacctcaaggctgccaatgagacaatcaaccaacttcgccatcagagcgaagaggataccaagttgatccagaagcttcgtacagaccttgcagaaaacgaacagacaatggaagtccttcagaagagcaataaagatactgttgagacagtagatcagtatcaagaagagatcgccgccaacgataaggaagccatggtcagtgttcaggatctccgaaaagagtatgaacgcacctccgaggagaatatcgagaagattcagtcgcttgaaacgaaattcacagatctaatggaggtgaatcttcagcttcgcaaagacctcaacacaactagatataatctcggatacctagaggcgcatgagtgggaaaacagggggggtgaatacgtaccgtttagtacatttcaagataaccccaagcgcgctgcggactcacttaagctgagtgacggccagccgctcaatgcttgtactcggaagctactaaagttccacgctgaactgactgctgcccttgcccacgataagtcaaagtcaactgtgtataccaagaagcatggaaccactgctgtggctacagagctagtttcggacatccagctagacctaggggtgttcaaagccaacgatgaggatctgaaggagagcccagagtggcaacaatattgggctgcgcgcagagcttctcacaagaaagtcgctgcggtacggttaactgatcttgtaaattag

SEQ ID NO: 19428 - protein, 343 aa, Muscodor strobelii
  misc_feature: SGI Peptide ID NO. 566533
MAHRTSSPSTFLSVADGRTYQDGFKDGFKEGFKDGLKDSLKLDLQEIRNPLGIQQTANISSTQQDIGLLRRDLADNNQAISRFRQTQDEADNIIKKLQEDLKAANETINQLRHQSEEDTKLIQKLRTDLAENEQTMEVLQKSNKDTVETVDQYQEEIAANDKEAMVSVQDLRKEYERTSEENIEKIQSLETKFTDLMEVNLQLRKDLNTTRYNLGYLEAHEWENRGGEYVPFSTFQDNPKRAADSLKLSDGQPLNACTRKLLKFHAELTAALAHDKSKSTVYTKKHGTTAVATELVSDIQLDLGVFKANDEDLKESPEWQQYWAARRASHKKVAAVRLTDLVN

SEQ ID NO: 19429 - DNA, 281 bp, Muscodor strobelii
  misc_feature: SGI EST ID NO. CUFF.45384.0
  misc_feature: Variant of the nucleotide sequence at SEQ ID NO 19427
ctggctcgcaattgaccgcgcaaacacgagaaggacacgcttcgcatagcattgggactctgactacccctctcaaatcgaaacttggaaacctcgtgtttcttcgtcacagtcactcgcacccggatcatatcttctaacggttttcagctccttgtcaagggtgacaacttctcgtcgctattgcttcgtccctttctcaaaatcccgaccccacctccagtagtgtgcgtcagaatctctcgtcttgccaagatggctcaccgcacttcttcgccgag

SEQ ID NO: 19430 - DNA, 747 bp, Muscodor strobelii
  misc_feature: SGI cDNA ID NO. 566534
  misc_feature: Encodes the peptide sequence at SEQ ID NO 19431
atggctcttcttgccgctccttctgcgttcgacggtacctatcaagacgggttcaaagatggctgccatgccatggaacgccgactgagagccgactttctttctcttcgtcaagatgtcctcagctgtatgacaaacatgacacagagcatctctcatattcgccaggagctcgcagatacccaaagtagccgacttagagccgaaaaggaggcacaccaatctacagaagatctctgccaagcgatgcgccatctctgccaggggcttacaaacgccaatcggaccacaaggatgcttcagagggacctcgcagatgccttaggcaaaattcaggatctggaggcacatatcaaaaagattgagagcacatctcaattcacaagctttgctcaagatgactctgacgactcgatgaatatcaaagatgaatctgcgcggaacacccctcatcctgagccatccaagagtccagaagccaacagcatcgttgcaagcggtcaaaacaaagctcaagctgttatcgctgcctctccaccagtcattgactgtctcttcagactctcatcgcataagaaagtggatgacctccgcgaagataccgcggcatcaacgactcagatcttcaccgaatcactcgcaagacgccgagatcaaaggatgataaaaacaccaggtctcgtcatctcacgtcaatcaaagccacgagcctcacggagccttcagcctgcgcagcggacgccttga

SEQ ID NO: 19431 - protein, 248 aa, Muscodor strobelii
  misc_feature: SGI Peptide ID NO. 566534
MALLAAPSAFDGTYQDGFKDGCHAMERRLRADFLSLRQDVLSCMTNMTQSISHIRQELADTQSSRLRAEKEAHQSTEDLCQAMRHLCQGLTNANRTTRMLQRDLADALGKIQDLEAHIKKIESTSQFTSFAQDDSDDSMNIKDESARNTPHPEPSKSPEANSIVASGQNKAQAVIAASPPVIDCLFRLSSHKKVDDLREDTAASTTQIFTESLARRRDQRMIKTPGLVISRQSKPRASRSLQPAQRTP

SEQ ID NO: 19432 - DNA, 692 bp, Muscodor strobelii
  misc_feature: SGI EST ID NO. CUFF.45387.0
  misc_feature: Variant of the nucleotide sequence at SEQ ID NO 19430
ataacctgctgcacctctcgcgaaacccatgcaggtttcccacaacattgaaattttgcaaactgtcacctcgccacggtctgttcctttgttgagcttgacactaacgcaatgctcgcacgtctctatcggatggtcaatcgcaaggttgtcataggccctccctttccgtctctccccaaacacttcagtcgtgtatttcctagatctctagcacttgttcacaatggctcttcttgccgctccttctgcgttcgacggtacctatcaagacgggttcaaagatggctgccatgccatggaacgccgactgagagccgactttctttctcttcgtcaagatgtcctcagctgtatgacaaacatgacacagagcatctctcatattcgccaggagctcgcagatacccaaagtagccgacttagagccgaaaaggaggcacaccaatctacagaagatctctgccaagcgatgcgccatctctgccaggggcttacaaacgccaatcggaccacaaggatgcttcagagggacctcgcagatgccttaggcaaaattcaggatctggaggcacatatcaaaaagattgagagcacatctcaattcacaagctttgctcaagatgactctgacgactcgatgaatatcaaagatgaatctgcgcggaacacccctcatcctgagccatcca

SEQ ID NO: 19433 - DNA, 807 bp, Muscodor strobelii
  misc_feature: SGI cDNA ID NO. 566535
  misc_feature: Encodes the peptide sequence at SEQ ID NO 19434
atgcgcctaataaatacatcaacgctcgccctcactgagtatctcaacgattcatttctgccccagtacgcgatactgtcgcatacttggtcgagcgacgaggttctatacgacgacatcttcaatcgtccccgtgccgcgcagaaaaagaaaggctggggcaagattacttctgtatgctcactggcgcggaagcagggtttcgagtatatatggatcgacacatgctgcatcgacaaatactcgagcgcggagctgagcgaggccatcaattcgatgtttcgttattataaacgtgcacggatatgctacgcctatcttgaagatgtaagattggatggtaggagagagttagatgagcccgcagaggagctaggtcgcgcaaagtggtttacgagaggttggactctgcaggaactgattgcatcagtaggggtagaattttacgacgcagagtggaagtacatctgcagcaagcacagcatgagccagtccctgtctcggattactcttgtacccgaaccagtcttgcaagggactcagaagccatccgactacgacatgtatcagcgtctacgctgggcagctggtcgccagactacacgcgtcgaggacatggcatattgcttgctgggcttgtttgacgtcaatatgccactcttgtatggagaaggagaaaaggcatttgcgagactacaggttgaagtcatacagagaacatacgattctagtctgatccatcactattttggctcggaatcgcacttcgaaaaggcatatgatgcgatacttctcgttcaggagtaa

SEQ ID NO: 19434 - protein, 268 aa, Muscodor strobelii
  misc_feature: SGI Peptide ID NO. 566535
  misc_feature (23)..(139): Pfam Id: PF06985 Pfam Desc: Heterokaryon incompatibility protein (HET)
  misc_feature (1)..(245): NCBI GI: 256732223 Blast Desc: NECHADRAFT_93752 [Nectria haematococca mpVI 77-13-4]
  misc_feature (10)..(245): NCBI GI: 145235123 Blast Desc: An03g03270 [Aspergillus niger] gi|134057890|emb|CAK38231.1| protein product [Aspergillus niger]
  misc_feature (1)..(260): NCBI GI: 256733325 Blast Desc: NECHADRAFT_77285 [Nectria haematococca mpVI 77-13-4]
  misc_feature (1)..(245): NCBI GI: 46139867 Blast Desc: FG11448.1 [Gibberella zeae PH-1]
  misc_feature (1)..(246): NCBI GI: 85092369 Blast Desc: NCU04912 [Neurospora crassa OR74A] gi|28920765|gb|EAA30124.1| [Neurospora crassa OR74A]
  misc_feature (1)..(246): NCBI GI: 261354085 Blast Desc: HET domain-containing protein [Verticillium albo-atrum VaMs.102]
  misc_feature (1)..(246): NCBI GI: 256726184 Blast Desc: NECHADRAFT_94537 [Nectria haematococca mpVI 77-13-4]
  misc_feature (1)..(246): NCBI GI: 171677580 Blast Desc: protein product [Podospora anserina] gi|170936858|emb|CAP61516.1| protein product [Podospora anserina]
  misc_feature (1)..(245): NCBI GI: 171689682 Blast Desc: protein product [Podospora anserina] gi|170944803|emb|CAP70915.1| protein product [Podospora anserina]
  misc_feature (1)..(264): NCBI GI: 169780438 Blast Desc: [Aspergillus oryzae RIB40] gi|83773423|dbj|BAE63550.1| protein product [Aspergillus oryzae]
MRLINTSTLALTEYLNDSFLPQYAILSHTWSSDEVLYDDIFNRPRAAQKKKGWGKITSVCSLARKQGFEYIWIDTCCIDKYSSAELSEAINSMFRYYKRARICYAYLEDVRLDGRRELDEPAEELGRAKWFTRGWTLQELIASVGVEFYDAEWKYICSKHSMSQSLSRITLVPEPVLQGTQKPSDYDMYQRLRWAAGRQTTRVEDMAYCLLGLFDVNMPLLYGEGEKAFARLQVEVIQRTYDSSLIHHYFGSESHFEKAYDAILLVQE

SEQ ID NO: 19435 - DNA, 3133 bp, Muscodor strobelii
  misc_feature: SGI EST ID NO. CUFF.45409.0
  misc_feature: Variant of the nucleotide sequence at SEQ ID NO 19433
ttggtcttaggcatgctgccaagacgtgccggatcccggtcacggcgtcggatccattgttccgagaccactccgaaaacctttatcacatccctcgtctaggaactttgacccatggtcttctcagtcatttcctctagttttcagcatgcaattcggacaagctctaggtacggccgccgtctcgtttgcaatcacaaacatcgacgatgcgtttctcttaatcacattctttgctgagtcagcacgtagtaagacattcacaccgttcaagatcattcttggccaattcatcggcttcacgactatcgtcgccatctctctcattggctttggtctctctctagctgtgccatatgaaccgatcgggttcgtcggtctagtcccgatactactcggcgtctggaaccttctcaatctactcttcccaacaaacgaagaggagcccgagaacgtgcgagccgaaggcttgaaagctgttctaaaggtttctctcatcacgatcgcaaatggaggggataatataggaacatacatacctctcttttcgcaggcgaaaggcgccgaaatagcgatatatgtcgttgtgttttatgtcttactcagcgtatggtgcctagtcgcctttcttgttgcgcggcaaaggcatattttggcattggctcataaatacattggcgtggtaataccattcctatacgttggcttggggatatacatcgtcgttaaatcccattgctatccttggtccatcgaccgtatcaacgagtccgcccctcatcatcctgggacagcaattctggctccgataacagcagtcctgatcacagctgccatttccgttatgacttggataaaatcgtcgcagaggcagagagccaacacaggcgacacgggaatagagcttgaggatggcaggcaaggacggtccgtgcgcgtggcatcaattggcgattctcacgttcatgattctgctcattcagtctcagcttttgaggcaaaccccgaacctgcggaagtgcaacatccagatgagagacatcaagaaccgcagccacaagacacaaggcagatttagagcgatagaggaattaatcagcgcgaaggctataatataagtcttacggtatgcgagatcaagagctcccagaaatccaacaaacaagtccaatatcatcgaactgagtcttctctcacaggatggcggtgaggataagagagtcgtccgaatccagtgcattttcgatgctttgagcattcaacattctcaatttgtggatcgcgccccgtcgcattgacatagtcacaggggccgtcagaatgtgaggctgtagcaaagtcttggcagaggcagacagcgactccgccccgagatccacgaataggctgggtggcgagaaatggctacgaggcctcaattgccttacttcacatataattagagagtgcctaaatcgttcgatgcgatgattttctcgtgattgccttcaacaaaactgcatcgacattcttgccctgtgtcgccccttgacgtacctcaattcttgttggctaaagcgcttgaaacctcatatcggtaataagctacgaacacatagttttcaaaaccatgcgcctaataaatacatcaacgctcgccctcactgagtatctcaacgattcatttctgccccagtacgcgatactgtcgcatacttggtcgagcgacgaggttctatacgacgacatcttcaatcgtccccgtgccgcgcagaaaaagaaaggctggggcaagattacttctgtatgctcactggcgcggaagcagggtttcgagtatatatggatcgacacatgctgcatcgacaaatactcgagcgcggagctgagcgaggccatcaattcgatgtttcgttattataaacgtgcacggatatgctacgcctatcttgaagatgtaagattggatggtaggagagagttagatgagcccgcagaggagctaggtcgcgcaaagtggtttacgagaggttggactctgcaggaactgattgcatcagtaggggtagaattttacgacgcagagtggaagtacatctgcagcaagcacagcatgagccagtccctgtctcggattactcttgtacccgaaccagtcttgcaagggactcagaagccatccgactacgacatgtatcagcgtctacgctgggcagctggtcgccagactacacgcgtcgaggacatggcatattgcttgctgggcttgtttgacgtcaatatgccactcttgtatggagaaggagaaaaggcatttgcgagactacaggttgaagtcatacagagaacatacgattctagtctgatccagtatgtactttacggccgggaacagcttgtgatgtcgaaggcagcttgacacctcaattcagtcactattttggctcggaatcgcacttcgaaaaggcatatgatgcgatacttctcgttcaggagtaactcgacctaatttcgaactatgtcttgacagatagaaccatcgatgaacatcttgttctactatcgggccactgtcgaggagttccagtcacatgaaagccaactatagttcggtagctacaagtgaagcccaatatggtgccgatgctacgagccttgcaacagcacactggtaatagcgtcggcgagttatgcccagggcacatcaattgctcctgagagaactacctttgattcctatttactttctggtctaacaggtatatcaaaaatattccaatttcgtcagaatttcccctctccatgcttctgacgtgacaatggtttgctccatatattcgtattcggtggggtcgcgcatcgttagatgagtttgcttgataggtattgcagcatcaggcgggatatccttttgtctggcggaaacatcgttgatcaaggcgtccgctgcgcaggctgaaggctccgtgaggctcgtggctttgattgacgtgagatgacgagacctggtgtttttatcatcctttgatctcggcgtcttgcgagtgattcggtgaagatctgagtcgttgatgccgcggtatcttcgcggaggtcatccactttcttatgcgatgagagtctgaagagacagtcaatgactggtggagaggca

SEQ ID NO: 19436 - DNA, 930 bp, Muscodor strobelii
  misc_feature: SGI cDNA ID NO. 566536
  misc_feature: Encodes the peptide sequence at SEQ ID NO 19437
atgcaattcggacaagctctaggtacggccgccgtctcgtttgcaatcacaaacatcgacgatgcgtttctcttaatcacattctttgctgagtcagcacgtagtaagacattcacaccgttcaagatcattcttggccaattcatcggcttcacgactatcgtcgccatctctctcattggctttggtctctctctagctgtgccatatgaaccgatcgggttcgtcggtctagtcccgatactactcggcgtctggaaccttctcaatctactcttcccaacaaacgaagaggagcccgagaacgtgcgagccgaaggcttgaaagctgttctaaaggtttctctcatcacgatcgcaaatggaggggataatataggaacatacatacctctcttttcgcaggcgaaaggcgccgaaatagcgatatatgtcgttgtgttttatgtcttactcagcgtatggtgcctagtcgcctttcttgttgcgcggcaaaggcatattttggcattggctcataaatacattggcgtggtaataccattcctatacgttggcttggggatatacatcgtcgttaaatcccattgctatccttggtccatcgaccgtatcaacgagtccgcccctcatcatcctgggacagcaattctggctccgataacagcagtcctgatcacagctgccatttccgttatgacttggataaaatcgtcgcagaggcagagagccaacacaggcgacacgggaatagagcttgaggatggcaggcaaggacggtccgtgcgcgtggcatcaattggcgattctcacgttcatgattctgctcattcagtctcagcttttgaggcaaaccccgaacctgcggaagtgcaacatccagatgagagacatcaagaaccgcagccacaagacacaaggcagatttag

SEQ ID NO: 19437 - protein, 309 aa, Muscodor strobelii
  misc_feature: SGI Peptide ID NO. 566536
  misc_feature (14)..(202): Pfam Id: PF03596 Pfam Desc: Cadmium resistance transporter
  misc_feature (111)..(193): Pfam Id: PF03596 Pfam Desc: Cadmium resistance transporter
  misc_feature (1)..(242): NCBI GI: 212537819 Blast Desc: conserved [Penicillium marneffei ATCC 18224] gi|210068807|gb|EEA22898.1| conserved [Penicillium marneffei ATCC 18224]
  misc_feature (1)..(280): NCBI GI: 212538641 Blast Desc: conserved [Penicillium marneffei ATCC 18224] gi|210069218|gb|EEA23309.1| conserved [Penicillium marneffei ATCC 18224]
  misc_feature (1)..(252): NCBI GI: 145606584 Blast Desc: MGG_02237 [Magnaporthe grisea 70-15] gi|145014204|gb|EDJ98845.1| MGG_02237 [Magnaporthe grisea 70-15]
  misc_feature (1)..(243): NCBI GI: 46103822 Blast Desc: FG00106.1 [Gibberella zeae PH-1]
  misc_feature (9)..(206): NCBI GI: 27466996 Blast Desc: cadmium resistance transporter, [Staphylococcus epidermidis ATCC 12228] gi|27314538|gb|AAO03675.1|AE016744_78 cadmium resistance transporter, [Staphylococcus epidermidis ATCC
  misc_feature (9)..(198): NCBI GI: 220908241 Blast Desc: cadmium resistance transporter [Cyanothece sp. PCC 7425] gi|219864852|gb|ACL45191.1| cadmium resistance transporter [Cyanothece sp. PCC 7425]
  misc_feature (30)..(206): NCBI GI: 39481 Blast Desc: quaternary amine transporter [Bacillus firmus]
  misc_feature (3)..(198): NCBI GI: 196255338 Blast Desc: cadmium resistance transporter [Cyanothece sp. PCC 7822] gi|196204535|gb|EDX99351.1| cadmium resistance transporter [Cyanothece sp. PCC 7822]
  misc_feature (7)..(195): NCBI GI: 260907524 Blast Desc: cadmium resistance transporter [Brevibacterium linens BL2]
  misc_feature (6)..(196): NCBI GI: 196257483 Blast Desc: cadmium resistance transporter [Cyanothece sp. PCC 7822] gi|196201083|gb|EDX95902.1| cadmium resistance transporter [Cyanothece sp. PCC 7822]
MQFGQALGTAAVSFAITNIDDAFLLITFFAESARSKTFTPFKIILGQFIGFTTIVAISLIGFGLSLAVPYEPIGFVGLVPILLGVWNLLNLLFPTNEEEPENVRAEGLKAVLKVSLITIANGGDNIGTYIPLFSQAKGAEIAIYVVVFYVLLSVWCLVAFLVARQRHILALAHKYIGVVIPFLYVGLGIYIVVKSHCYPWSIDRINESAPHHPGTAILAPITAVLITAAISVMTWIKSSQRQRANTGDTGIELEDGRQGRSVRVASIGDSHVHDSAHSVSAFEANPEPAEVQHPDERHQEPQPQDTRQI

SEQ ID NO: 19438 - DNA, 3133 bp, Muscodor strobelii; identical to SEQ ID NO: 19435
  misc_feature: SGI EST ID NO. CUFF.45409.0
  misc_feature: Variant of the nucleotide sequence at SEQ ID NO 19436

SEQ ID NO: 19439 - DNA, 1518 bp, Muscodor strobelii
  misc_feature: SGI cDNA ID NO. 566537
  misc_feature: Encodes the peptide sequence at SEQ ID NO 19440
atgcactcactaatcactgatgcctcgtggcttggagcgagtgccacattcttagttgcttggcttctcgcgttggccgtttgccgtttggtctatgatcctttggcacattttccagggtccaagctcgctggattgacccgttatgtcgaggcgtattacgatgtccttctaaatggccaatatacacacaaaattatacagcaacacaattcatacggcaggattattcgtatcagcccatatgaacttcacatcaatgaccctagcttcttcaatacactgtacagtcaaaagggtcgctggaataagtacgactgggcttacgacgcgcacggcacatcactatctacactatcagccattgaccatgacgtacacaaacgtcggcgcactgccattaatccgttcttctcgaagtctagagtaataactcaacaggacactgtaaaacaattagtttttcgtctctgccagcgtcttgaaaacttggtgtctcaagaaataaagatcgctgacgcaataggtgcgtttacgagggatgtcgcgacagagttccttctcagcaaaagcttcgataatcttggcgccgacgactttcgcgcgggtgtcggtagcacactccaagagtccggagctatttggaggatcacgaaacatcttcgttggtatggcccgatgatcaaagcggtgcccctgaggctcgtgaaaatggcaggcgacccaggtatcgtccagtgtctcgaatttgtggaggatatggaaaagaccgcaaaagatatatattcgacttgggtagcaggcagcagagatgtcgccaaatgcacaactatcgttgacgccatacttaattctgatttgctcatcattgacaaaatgccggcacgcattaaagacgaagtcattaccgctgccggggcggccttcgagacaaccgtttatactctctgtaagaccctataccatatctacaccaacccgaaaatccttcgacggctacgagaagaactcggcacacatgatgtgtctaacagaagcctttctgagcttgagaaactgcaatacctgacggcggtcctaaaagaaggcttgcgattaagcccggcgattgcgacaaggatggcgcgcgttgcaccggatcggccattagtttacaacgaatggacaatcccacctggtacgccagtgggtatgacacttcttttgatgcacacagaccctgtgcagtacccagacccaacgcgtttcgaacctgagagatggctcagcaaagacatggtggcatccaagagagcttacgccccgttcgggcaaggaacacgaatgtgtattggtatgcatcttgcatgggcagagctatacttcgcagttgcttctattgtcatgcggttcgagtttgacttcaaggatgacgcctggaaagatgttacttgggccagtgatcagttcaccatcggtactgaaacaagaaacggcttgccggcgctcgtgagaaaatatgactcccaaaactcataa

SEQ ID NO: 19440 - protein, 505 aa, Muscodor strobelii
  misc_feature: SGI Peptide ID NO. 566537
  misc_feature (43)..(496): Pfam Id: PF00067 Pfam Desc: Cytochrome P450
  misc_feature (297)..(467): Pfam Id: PF00067 Pfam Desc: Cytochrome P450
  misc_feature (20)..(497): NCBI GI: 238841488 Blast Desc: cytochrome P450 [Microsporum canis CBS 113480]
  misc_feature (1)..(497): NCBI GI: 171683471 Blast Desc: protein product [Podospora anserina] gi|170941695|emb|CAP67349.1| protein product [Podospora anserina]
  misc_feature (19)..(447): NCBI GI: 116206024 Blast Desc: CHGG_02305 [Chaetomium globosum CBS 148.51] gi|88182902|gb|EAQ90370.1| CHGG_02305 [Chaetomium globosum CBS 148.51]
  misc_feature (18)..(497): NCBI GI: 238839890 Blast Desc: cytochrome P450 [Microsporum canis CBS 113480]
  misc_feature (5)..(476): NCBI GI: 212546909 Blast Desc: benzoate 4-monooxygenase cytochrome P450, [Penicillium marneffei ATCC 18224] gi|210065128|gb|EEA19223.1| benzoate 4-monooxygenase cytochrome P450, [Penicillium marneffei ATCC
  misc_feature (5)..(483): NCBI GI: 119499275 Blast Desc: cytochrome P450, [Neosartorya fischeri NRRL 181] gi|119414559|gb|EAW24498.1| cytochrome P450, [Neosartorya fischeri NRRL 181]
  misc_feature (19)..(494): NCBI GI: 255938474 Blast Desc: Pc14g00120 [Penicillium chrysogenum Wisconsin 54-1255] gi|211584628|emb|CAP74153.1| Pc14g00120 [Penicillium chrysogenum Wisconsin 54-1255]
  misc_feature (1)..(483): NCBI GI: 239609831 Blast Desc: cytochrome P450 [Ajellomyces dermatitidis ER-3]
  misc_feature (1)..(483): NCBI GI: 261199007 Blast Desc: cytochrome P450 [Ajellomyces dermatitidis SLH14081] gi|239595057|gb|EEQ77638.1| cytochrome P450 [Ajellomyces dermatitidis SLH14081]
  misc_feature (9)..(476): NCBI GI: 240105626 Blast Desc: Cytochrome P450 family protein [Coccidioides posadasii C735 delta SOWgp]
  misc_feature (112)..(466): SWISSPROT Homolog: EC 1.14.14.1 Unspecific monooxygenase
MHSLITDASWLGASATFLVAWLLALAVCRLVYDPLAHFPGSKLAGLTRYVEAYYDVLLNGQYTHKIIQQHNSYGRIIRISPYELHINDPSFFNTLYSQKGRWNKYDWAYDAHGTSLSTLSAIDHDVHKRRRTAINPFFSKSRVITQQDTVKQLVFRLCQRLENLVSQEIKIADAIGAFTRDVATEFLLSKSFDNLGADDFRAGVGSTLQESGAIWRITKHLRWYGPMIKAVPLRLVKMAGDPGIVQCLEFVEDMEKTAKDIYSTWVAGSRDVAKCTTIVDAILNSDLLIIDKMPARIKDEVITAAGAAFETTVYTLCKTLYHIYTNPKILRRLREELGTHDVSNRSLSELEKLQYLTAVLKEGLRLSPAIATRMARVAPDRPLVYNEWTIPPGTPVGMTLLLMHTDPVQYPDPTRFEPERWLSKDMVASKRAYAPFGQGTRMCIGMHLAWAELYFAVASIVMRFEFDFKDDAWKDVTWASDQFTIGTETRNGLPALVRKYDSQNS

SEQ ID NO: 19441 - DNA, 1131 bp, Muscodor strobelii
  misc_feature: SGI cDNA ID NO. 566538
  misc_feature: Elevated expression when VOC is produced
  misc_feature: Encodes the peptide sequence at SEQ ID NO 19442
atggcgtcagagaagccgtcggttctcataatcggcggtttgggctacatcggccgcttcctcgccaaacacatccacgacaatgccctagcctcggagcttcgactggccgacaaggtcttgcctcagctagcctggctcgctcccgaattcgagactgcgtgctcggccgtgaacttcatgcaggctgacgccagcaaagagcaagctctggcgcgcatattcgatcgacctgacgggaagcagtgggattatgtctttaactgtggtggagagacaagatactctcaagaggacgaagtgtacaaggttcgatcattggggctatcgctggcggtcgcaaacgaggccgcgaagcgcaaagtcaaatgcttcgtagagcttagcacaggccaggtctacaagccaaactcatcgcccagcaaagagggcgacaagctcaagccctggagcaagatcgccacatataaggcgcaggctgaggagcagctagcacaaattgcaggactcaatcttgtaatcgtacgacttccacatgtatacggaccgtatgcttcccagtgggtttcgactgcgctatgtgttgcgcgtgtataccagtccctcgaggaagagatgaaatggttgtggacgaaagacctgcgcacgaacacagcacacatcgacgatgtcacacgggccctatgggctgtcacagcttggtatgatgccggcaaggccaactgggatgccaagacgatgggaaatacgccgatattcaacgtcgtcgacaagggttccacgactcaaggcaccatagcgaacatcatcggcgaggttttcggcattaagcaggacttccagggacagttgctcagcaatttcgcgaagctaaatatggacagtgtggtcgacgacgtcaacgatgatgtgctgggaccctgggcagacctgctagctgacgctggcatcacgagacctggcccattatctcctttcatggaaaaggagcttctgaaggacaccgatctcagcatggatgggaaccgactcgagacagttgttgggttcaaatacgaaaaacccaagatcactaaagagttggtcgaggaggtcattgccagctacaagacaatgaaatggtggccgtaa

SEQ ID NO: 19442 - protein, 376 aa, Muscodor strobelii
  misc_feature: SGI Peptide ID NO. 566538
  misc_feature (8)..(256): Pfam Id: PF01370 Pfam Desc: NAD dependent epimerase/dehydratase family
  misc_feature (8)..(184): Pfam Id: PF01370 Pfam Desc: NAD dependent epimerase/dehydratase family
  misc_feature (3)..(376): NCBI GI: 116180834 Blast Desc: conserved [Chaetomium globosum CBS 148.51] gi|88185342|gb|EAQ92810.1| conserved [Chaetomium globosum CBS 148.51]
  misc_feature (3)..(376): NCBI GI: 46108690 Blast Desc: FG01227.1 [Gibberella zeae PH-1]
  misc_feature (3)..(376): NCBI GI: 171695962 Blast Desc: protein product [Podospora anserina] gi|170948223|emb|CAP60387.1| protein product [Podospora anserina]
  misc_feature (3)..(376): NCBI GI: 39964991 Blast Desc: MGG_09901 [Magnaporthe grisea 70-15] gi|145013201|gb|EDJ97842.1| MGG_09901 [Magnaporthe grisea 70-15]
  misc_feature (3)..(376): NCBI GI: 256735069 Blast Desc: [Nectria haematococca mpVI 77-13-4]
  misc_feature (3)..(376): NCBI GI: 85111401 Blast Desc: NCU07468 [Neurospora crassa OR74A] gi|28925668|gb|EAA34683.1| conserved [Neurospora crassa OR74A]
  misc_feature (3)..(376): NCBI GI: 154309539 Blast Desc: BC1G_07240 [Botryotinia fuckeliana B05.10] gi|150852263|gb|EDN27455.1| BC1G_07240 [Botryotinia fuckeliana B05.10]
  misc_feature (3)..(376): NCBI GI: 156045631 Blast Desc: SS1G_10006 [Sclerotinia sclerotiorum 1980] gi|154694399|gb|EDN94137.1| SS1G_10006 [Sclerotinia sclerotiorum 1980]
  misc_feature (2)..(376): NCBI GI: 169603289 Blast Desc: SNOG_04653 [Phaeosphaeria nodorum SN15] gi|160706366|gb|EAT88413.2| SNOG_04653 [Phaeosphaeria nodorum SN15]
  misc_feature (2)..(376): NCBI GI: 189203221 Blast Desc: NAD dependent epimerase/dehydratase family protein [Pyrenophora tritici-repentis Pt-1C-BFP] gi|187985045|gb|EDU50533.1| NAD dependent epimerase/dehydratase
  misc_feature: Useful for introducing or modulating the production of volatile compounds
MASEKPSVLIIGGLGYIGRFLAKHIHDNALASELRLADKVLPQLAWLAPEFETACSAVNFMQADASKEQALARIFDRPDGKQWDYVFNCGGETRYSQEDEVYKVRSLGLSLAVANEAAKRKVKCFVELSTGQVYKPNSSPSKEGDKLKPWSKIATYKAQAEEQLAQIAGLNLVIVRLPHVYGPYASQWVSTALCVARVYQSLEEEMKWLWTKDLRTNTAHIDDVTRALWAVTAWYDAGKANWDAKTMGNTPIFNVVDKGSTTQGTIANIIGEVFGIKQDFQGQLLSNFAKLNMDSVVDDVNDDVLGPWADLLADAGITRPGPLSPFMEKELLKDTDLSMDGNRLETVVGFKYEKPKITKELVEEVIASYKTMKWWP

SEQ ID NO: 19443 - DNA, 2575 bp, Muscodor strobelii
  misc_feature: SGI EST ID NO. CUFF.45558.0
  misc_feature: Variant of the nucleotide sequence at SEQ ID NO 19441
cgaaggactggctcgactccacatccccaacgttgttaataatacaaatctccgcccgtcgaagcgcatcgcgttgcatcgcttttgtcctcgaatctcaccttgcccagccctctctgatcgcctgacttgacagtttgacagcagtattccaccctttgcgccttgcccacacctgctcattctggtaaaaacaaaggtagactctccctctccagtgccgtccctccaagtggacagcaatacgggtgacaggccagcctggtcagcccatatcctatccccatctcccctgcttctgcttctgccatacagtatcgccttgctatcagcccagtgttgcctttacgtaccccgtgctttatatacgagtgtgggcaaaactgctctacttacagcgcttcccagggctaatgttccctctccaggcctcacacctcatatcgactaggatttgcaccgcccgttgcactgaaatgagccaatattagttttgcgtaaccgctttacccctacctgcattgcacccggtcgattgaagaacagttcccgtgccaaacaagcacgctctgcctcgagctcttgtctgccgtctactagactacctacatacataacagaacttctcccacgacatctcaacccagttcttccctacaaattttggcccccaaccgcaaaatccacctttgcgccttggaaccccgcgttcgcgctcaactctcttatccccgaccactttacctgcaatcctgcctccgtccgatagacacgttccgtcccaatggcgtcagagaagccgtcggttctcataatcggcggtttgggctacatcggccgcttcctcgccaaacacatccacgacaatgccctagcctcggagcttcgactggccgacaaggtcttgcctcagctagcctggctcgctcccgaattcgagactgcgtgctcggccgtgaacttcatgcaggctgacgccagcaaagagcaagctctggcgcgcatattcgatcgacctgacgggaagcagtgggattatgtctttaactgtggtggagagacaagatactctcaagaggacgaagtgtacaaggttcgatcattggggctatcgctggcggtcgcaaacgaggccgcgaagcgcaaagtcaaatgcttcgtagagcttagcacaggccaggtctacaagccaaactcatcgcccagcaaagagggcgacaagctcaagccctggagcaagatcgccacatataaggcgcaggctgaggagcagctagcacaaattgcagggtgagttcgggccagatacggggaatcgcgtcacacacttacgcatgacttcatcccgcagactcaatcttgtaatcgtacgacttccacatgtatacggaccgtatgcttcccagtgggtttcgactgcgctatgtgttgcgcgtgtataccagtccctcgaggaagagatgaaatggttgtggacgaaagacctgcgcacgaacacagcacacatcgacgatgtcacacgggccctatgggctgtcacagcttggtatgatgccggcaaggccaactgggatgccaagacgatgggaaatacgccgatattcaacgtcgtcgacaagggttccacgactcaaggcaccatagcgaacatcatcggcgaggttttcggcattaagcaggacttccagggacagttgctcagcaatttcgcgaagctaaatatggacagtgtggtcgacgacgtcaacgatgatgtgctgggaccctgggcagacctgctagctgacgctggcatcacgagacctggcccattatctcctttcatggaaaaggagcttctgaaggacaccgatctcagcatggatgggaaccgactcgagacagttgttgggttcaaatacgaaaaacccaagatcactaaagagttggtcgaggaggtcattgccagctacaagacaatgaaatggtggccgtaagacacgcccatgccccgatccacactacattttcgaacctcacgcctatacgagcatcttctatgttgcgatttcctataccatgcaggcgcggcacgtctaccgcctgctatcaacgattcgatgactgacggctcaatggttctccacataccagatagacgcggcggttgcttttcaacttttatattcattccaattcccgtttcgcattgcttgttttacgtaaaatggggtcacaaagtgcgaagctgtatgataagataattctttccttcactcaccacatagcgcattgcggcctgtccaccactgctacatagtatattctttctccacattggcatacctcagcaacatcacgcggaccggcgagcgagcaagtgttattggtgatcaggtcatctggtatgatgctcggtcgggtatagaacatccatttacatcgttgtaatgagaatttttgaacgccatgacacacaaatattgctcaacatatattgacacttgagggttttgtttccagtgccacccgccaaaattgtgaactgtcttcaatacaatgcttaccaggctcttgacgtcactgaatgattcaa

SEQ ID NO: 19444 - DNA, 1404 bp, Muscodor strobelii
  misc_feature: SGI cDNA ID NO. 566539
  misc_feature: Encodes the peptide sequence at SEQ ID NO 19445
atgcactactcaccaggggcgccggttcttcgctcatacgatttgcagaactgggaatatatcggacattctgttccgtcgctttcttggtcgtccaaatatgacttgacaaacggccagcgagcctatgtaaaaggtatttgggcgtctagtatgcgctaccgtaagagcaatggaaaatggtactggatcggatgtatcgagttcgccactacctatgtctatactgcgtcttctccaaccggcccatggtctctgtcatcaactctcaatacttgtttgtatgactgcggcctgttcatcgacgacgacgatactatgtacgtggcgtatggaaatacacagctttctgtcgctcagctatcttctgacggttcgagtattgtgaagacacagcagatctactcttcacccagcaatattgggactctggaaggtagcaggatgtataagcgcaatggaaaatactatattctaactactcaccctgcgaatcaggagtgggtgttgcaggcatccagcgcttttggatcttacagcattaaggtcttagcaaatgcactctcgcctcctgtgtccgggggcggtaaccctcatcagggaggtctcgttgatatgccgaatggtgactggttttacatggcgtttgaagatgcatatccaggtggccgaatacccgttgtcgcaccggtcacatggggatctgacgggttccctgttctgacgacaagtggcggctcctggggaaagtcgtacacggtaccattggctacacatactttgccgtccacgatcggtacagattcgttctctgggacatcattgggtccagcctgggagtggaaccacaaccccgacaccagcaaattcaccgtgaacaatggtttgactttgaagacggcgacggtgacgtccgatttgtactcggcgcgaaatacactgacacaccgtatccatgggccaatctcgactgccaccgtggtgcttgattctactaacatggcggccggtgaccgcgccgggttatcacttttccgcgaccagtctgcttggattggggttaagaatgatggtggcaccctgacagtctgtatggtacatgacattctaatggacaccacgtgggcaacgaccaacacgggtactacagtcgcatgcgcaagtgcgtctaagggtaagatctatctacgtgggactgtcaatatcaaccctggaaccggacgtacgggtagctttagctatagcaccgacggctcgagctacacttcgttgggcagcgctttaacgcttaattcggattggcactatttcatgggatacagatggggtatcttcaattatgctaccacagcccttggcggctctgttcagatcagctcattcacgcagacagtatcttcgtaa

SEQ ID NO: 19445 - protein, 467 aa, Muscodor strobelii
  misc_feature: SGI Peptide ID NO. 566539
  misc_feature (2)..(239): Pfam Id: PF04616 Pfam Desc: Glycosyl hydrolases family 43
  misc_feature (1)..(160): Pfam Id: PF04616 Pfam Desc: Glycosyl hydrolases family 43
  misc_feature (197)..(239): Pfam Id: PF04616 Pfam Desc: Glycosyl hydrolases family 43
  misc_feature (1)..(466): NCBI GI: 115385897 Blast Desc: conserved [Aspergillus terreus NIH2624] gi|114187942|gb|EAU29642.1| conserved [Aspergillus terreus NIH2624]
  misc_feature (1)..(461): NCBI GI: 70988749 Blast Desc: xylosidase/glycosyl hydrolase [Aspergillus fumigatus Af293] gi|66846861|gb|EAL87192.1| xylosidase/glycosyl hydrolase, [Aspergillus fumigatus Af293] gi|159128644|gb|EDP53758.1| A1163]
  misc_feature (1)..(461): NCBI GI: 242815492 Blast Desc: xylosidase/glycosyl hydrolase, [Talaromyces stipitatus ATCC 10500] gi|218714918|gb|EED14341.1| xylosidase/glycosyl hydrolase, [Talaromyces stipitatus ATCC 10500]
  misc_feature (1)..(461): NCBI GI: 119497791 Blast Desc: xylosidase/glycosyl hydrolase, [Neosartorya fischeri NRRL 181] gi|119413817|gb|EAW23756.1| xylosidase/glycosyl hydrolase, [Neosartorya fischeri NRRL 181]
  misc_feature (1)..(464): NCBI GI: 121704547 Blast Desc: xylosidase/glycosyl hydrolase, [Aspergillus clavatus NRRL 1] gi|119398682|gb|EAW09111.1| xylosidase/glycosyl hydrolase, [Aspergillus clavatus NRRL 1]
  misc_feature (1)..(464): NCBI GI: 256377394 Blast Desc: glycoside hydrolase family 43 [Actinosynnema mirum DSM 43827] gi|255921697|gb|ACU37208.1| glycoside hydrolase family 43 [Actinosynnema mirum DSM 43827]
  misc_feature (1)..(461): NCBI GI: 238061553 Blast Desc: beta-xylosidase [Micromonospora sp. ATCC 39149] gi|237883364|gb|EEP72192.1| beta-xylosidase [Micromonospora sp. ATCC 39149]
  misc_feature (1)..(464): NCBI GI: 270501916 Blast Desc: Ricin B lectin [Micromonospora aurantiaca ATCC 27029] gi|270321267|gb|EFA32205.1| Ricin B lectin [Micromonospora aurantiaca ATCC 27029]
  misc_feature (1)..(464): NCBI GI: 238064571 Blast Desc: beta-xylosidase [Micromonospora sp. ATCC 39149] gi|237886382|gb|EEP75210.1| beta-xylosidase [Micromonospora sp. ATCC 39149]
  misc_feature (1)..(461): NCBI GI: 254406363 Blast Desc: conserved [Streptomyces sviceus ATCC 29083] gi|197715800|gb|EDY59834.1| conserved [Streptomyces sviceus ATCC 29083]
  misc_feature (3)..(267): SWISSPROT Homolog: EC 3.2.1.55 Alpha-N-arabinofuranosidase
  misc_feature (3)..(267): SWISSPROT Homolog: EC 3.2.1.37 Xylan 1,4-beta-xylosidase
MHYSPGAPVLRSYDLQNWEYIGHSVPSLSWSSKYDLTNGQRAYVKGIWASSMRYRKSNGKWYWIGCIEFATTYVYTASSPTGPWSLSSTLNTCLYDCGLFIDDDDTMYVAYGNTQLSVAQLSSDGSSIVKTQQIYSSPSNIGTLEGSRMYKRNGKYYILTTHPANQEWVLQASSAFGSYSIKVLANALSPPVSGGGNPHQGGLVDMPNGDWFYMAFEDAYPGGRIPVVAPVTWGSDGFPVLTTSGGSWGKSYTVPLATHTLPSTIGTDSFSGTSLGPAWEWNHNPDTSKFTVNNGLTLKTATVTSDLYSARNTLTHRIHGPISTATVVLDSTNMAAGDRAGLSLFRDQSAWIGVKNDGGTLTVCMVHDILMDTTWATTNTGTTVACASASKGKIYLRGTVNINPGTGRTGSFSYSTDGSSYTSLGSALTLNSDWHYFMGYRWGIFNYATTALGGSVQISSFTQTVSS

SEQ ID NO: 19446 - DNA, 1143 bp, Muscodor strobelii
  misc_feature: SGI cDNA ID NO. 566540
  misc_feature: Encodes the peptide sequence at SEQ ID NO 19447
atgaggctcacaaagtcgagctcgcgcactttctctatcggcgcaatgctgctaatttcagctgctgtcgtgtcaggggcatgcagccttccgtcgacttataaatggtcctctacgggtgctcttgtaactcccaagtcgggatgggcatctcttaaagacttcactcatgtgccttacaacggccagcacctcgtctacgcgacaacacacgacacaggatcgacgtggagctcgatgaactttggcctcttcaccgactggtctgcgatgggttccgctagccaaaatgctatgagctctgggactgtagcaccaacgctcttttacttcgcacccaagagcatttgggttctcacctaccaatggggagcaacagcattttcgtataagacctcaagtaacccgacaaatgctaatggatggtcttcagcgcaacctctctattccggcactattagctccagcacgggaccgatcgaccagacagtcatcggtgatagcactaatatgtatttgttctttgctggcgacaacggctcgatttaccgggcgagtatgcccatcggaaacttccctggaagtttcgggtcttctgcacaggtcgttctgagcgacacatcaaacaacttgtttgaggcagtccagttttttaaggtctatacagtaacaggtactggtcaatatctcatgatcgttgaggcgattggtgcaaacggacgatatttccgctccttcactgccacaagcttgagtggaacgtggaccccacaagctgcgactgaaagcaaccctttcgccggtaaagcaaacagtggcgcaacatggacaaatgacattagccatggtgatttggttcgtagttctgcggaccagacgatgcccgtcgatccttgcaatttacagctgctttatcaaggccgtgctcctagctctgggggtgactatggcttgttaccataccggcctggtgttttgacattgacaaatgctgttggtactggcggaacgactacactaaaaccttcaacaacctcatctgcaacatcaccgtcgggaacaggggcagcacactacgctcaatgtggcggtgttggctacagcggcccgactgcttgccaggcacgtatacattgttattga

SEQ ID NO: 19447 - protein, 380 aa, Muscodor strobelii
  misc_feature: SGI Peptide ID NO. 566540
  misc_feature (28)..(300): Pfam Id: PF03664 Pfam Desc: Glycosyl hydrolase family 62
  misc_feature (358)..(380): Pfam Id: PF00734 Pfam Desc: Fungal cellulose binding domain
  misc_feature (28)..(328): NCBI GI: 270503502 Blast Desc: glycoside hydrolase family 62 [Micromonospora aurantiaca ATCC 27029] gi|270319669|gb|EFA30639.1| glycoside hydrolase family 62 [Micromonospora aurantiaca ATCC 27029]
  misc_feature (28)..(328): NCBI GI: 270503170 Blast Desc: Alpha-N-arabinofuranosidase [Micromonospora aurantiaca ATCC 27029] gi|270319961|gb|EFA30921.1| Alpha-N-arabinofuranosidase [Micromonospora aurantiaca ATCC
  misc_feature (27)..(328): NCBI GI: 154299653 Blast Desc: BC1G_10789 [Botryotinia fuckeliana B05.10] gi|150857281|gb|EDN32473.1| BC1G_10789 [Botryotinia fuckeliana B05.10]
  misc_feature (9)..(328): NCBI GI: 39956518 Blast Desc: MGG_09095 [Magnaporthe grisea 70-15] gi|145016490|gb|EDK00920.1| MGG_09095 [Magnaporthe grisea 70-15]
  misc_feature (16)..(328): NCBI GI: 260453225 Blast Desc: Alpha-N-arabinofuranosidase [Streptomyces flavogriseus ATCC 33331] gi|260090658|gb|EEW74627.1| Alpha-N-arabinofuranosidase [Streptomyces flavogriseus ATCC
  misc_feature (12)..(328): NCBI GI: 31747156 Blast Desc: Abf2 [Hypocrea jecorina]
  misc_feature (17)..(328): NCBI GI: 254394926 Blast Desc: alpha-L-arabinofuranosidase [Streptomyces pristinaespiralis ATCC 25486] gi|197718658|gb|EDY62566.1| alpha-L-arabinofuranosidase [Streptomyces pristinaespiralis ATCC
  misc_feature (16)..(328): NCBI GI: 256800061 Blast Desc: Alpha-N-arabinofuranosidase [Streptomyces viridochromogenes DSM 40736]
  misc_feature (17)..(328): NCBI GI: 239927337 Blast Desc: arabinofuranosidase [Streptomyces ghanaensis ATCC 14672]
  misc_feature (26)..(328): NCBI GI: 238064348 Blast Desc: xylanase-arabinofuranosidase bifunctional enzyme [Micromonospora sp. ATCC 39149] gi|237886159|gb|EEP74987.1| xylanase-arabinofuranosidase bifunctional enzyme [Micromonospora
  misc_feature (1)..(328): SWISSPROT Homolog: EC 3.2.1.55 Alpha-N-arabinofuranosidase
MRLTKSSSRTFSIGAMLLISAAVVSGACSLPSTYKWSSTGALVTPKSGWASLKDFTHVPYNGQHLVYATTHDTGSTWSSMNFGLFTDWSAMGSASQNAMSSGTVAPTLFYFAPKSIWVLTYQWGATAFSYKTSSNPTNANGWSSAQPLYSGTISSSTGPIDQTVIGDSTNMYLFFAGDNGSIYRASMPIGNFPGSFGSSAQVVLSDTSNNLFEAVQFFKVYTVTGTGQYLMIVEAIGANGRYFRSFTATSLSGTWTPQAATESNPFAGKANSGATWTNDISHGDLVRSSADQTMPVDPCNLQLLYQGRAPSSGGDYGLLPYRPGVLTLTNAVGTGGTTTLKPSTTSSATSPSGTGAAHYAQCGGVGYSGPTACQARIHCY

SEQ ID NO: 19448 - DNA, 1752 bp, Muscodor strobelii
  misc_feature: SGI cDNA ID NO. 566541
  misc_feature: Encodes the peptide sequence at SEQ ID NO 19449
atgtcgccagaaccaccgagcgaagacgaagcccaatattattatcatgggcttgttggagggcggctagtggcgagaacgggcaccgatcccttcgttcttcgacgtgtattgaacagtgatggcgaagaacacctgaggctcaaagactatatggctcttggtgcgcagcgctcagacgtcgagctaatacatcgaataagacctcttattcgtcagatcgctgagatcctcgagaatgacaatttactatgggtttggttcacggcaattcgcatcggatacaagtctgagcctatgcctccagttttgttggtgaatgtggagcccggaaaggtggctttcgaagctgcttatcgtgctgcctcccatttaaagacactactcatgtctaagaatgcagatattgaggtagaggttcgcgagtacctcattcgaaatctagcagcgagcatggcaattgacgatcacatcgaatggcctgagtttgacccgaacaatcatatttccagacatccacgtcatgataccaacgcttatactctgcctctacaatcttatagtgggtggtgtgcccactatcccgattccaacggatgtggctccgtcggtctgttcgttactctatcaagcgttccaaaaaagctctttggtttaacagcggcacacgtggtggagccaaagcatacgcagtcggttgcagtccggaatggtgttccccaccgggaagtttttcagggcaggcaatctctcgctccattgatcaacaaggtcaaggggcaccttaaagaacttaaggagcgcgcgcggccgaaggaagaacaaacatacgctcataaacttctagggctcattgaatccagtaaagatctaaatcaaaggtcaattggtagggttgcttgggcgcaggagtacaagaagtcaaccacggaggtgggcattctcgacgactgggcacttattgatctgcacctcaagaagtttaagaacgcctcaaaccaagttttcgtgaaccccgacgaaattatctgtctcctgaaggaaacccataagaaccgtgaccttgcaggctttgttccgagtctaaccaatgaagaaatgataattgcccactccatcagagagaaatgggcagaagcgaaaggatttatacagttcaatagcactgaggtatgtgtcgctcgggcaatgggcagtaccgaaggcttcccttgtacaagggtattgaagtatggtatgataaccggtcttacgatcggcttgacgaatggcattgaggccgttttcagaacgcagggaatgggcaaaacaggccagcgcgagccggtgcttgtcaggaatttactggtggttccttttcccaaccaagaccattgcaaagagacattggcgggccaagagagaaacatcgtcgctttttcagcagcaggtgattctggatctgcagtcatatcatggaaaggtgaagtcttggggatggtagttggtggaggtctctggcttgacaaatatgagtggcgtggcaaaaggtctgaggcacttgagcaccgagtcggaaccccctaccagccaggcaaagagcccgaggacgcggatgatcccaaacctgaaaacgagcctactatgcgaacattccgagaatatgcaaagaaagctgtcgagatggacgtcacgtttatcgagcccatcgacaatattttccggaacatcaagcacttgactggtcaagatgtcaagatctatactaagtag

SEQ ID NO: 19449 - protein, 583 aa, Muscodor strobelii
  misc_feature: SGI Peptide ID NO. 566541
MSPEPPSEDEAQYYYHGLVGGRLVARTGTDPFVLRRVLNSDGEEHLRLKDYMALGAQRSDVELIHRIRPLIRQIAEILENDNLLWVWFTAIRIGYKSEPMPPVLLVNVEPGKVAFEAAYRAASHLKTLLMSKNADIEVEVREYLIRNLAASMAIDDHIEWPEFDPNNHISRHPRHDTNAYTLPLQSYSGWCAHYPDSNGCGSVGLFVTLSSVPKKLFGLTAAHVVEPKHTQSVAVRNGVPHREVFQGRQSLAPLINKVKGHLKELKERARPKEEQTYAHKLLGLIESSKDLNQRSIGRVAWAQEYKKSTTEVGILDDWALIDLHLKKFKNASNQVFVNPDEIICLLKETHKNRDLAGFVPSLTNEEMIIAHSIREKWAEAKGFIQFNSTEVCVARAMGSTEGFPCTRVLKYGMITGLTIGLTNGIEAVFRTQGMGKTGQREPVLVRNLLVVPFPNQDHCKETLAGQERNIVAFSAAGDSGSAVISWKGEVLGMVVGGGLWLDKYEWRGKRSEALEHRVGTPYQPGKEPEDADDPKPENEPTMRTFREYAKKAVEMDVTFIEPIDNIFRNIKHLTGQDVKIYTK

SEQ ID NO: 19450 - DNA, 195 bp, Muscodor strobelii
  misc_feature: SGI EST ID NO. CUFF.45444.0
  misc_feature: Variant of the nucleotide sequence at SEQ ID NO 19448
tcagacgtcgagctaatacatcgaataagacctcttattcgtcagatcgctgagatcctcgagaatgacaatttactatgggtttggttcacggcaattcgcatcggatacaagtctgagcctatgcctccagttttgttggtgaatgtggagcccggaaaggtggctttcgaagctgcttatcgtgctgcctcc

SEQ ID NO: 19451 - DNA, 522 bp, Muscodor strobelii
  misc_feature: SGI cDNA ID NO. 566542
  misc_feature: Encodes the peptide sequence at SEQ ID NO 19452
atgacggaaacgatgaaaggcggcgccgtccacatcgggccctcccctctatccaaacagccttttgtctccaaatggtcatcacggtatcgcggcgcctgcgtgcaagacctcgaaccgcccgccgccctctccctcaacccaaccgaccccgtctccctcgccatgctctccgccttcgaacgcgaatacacccacctgaccgtcatcgactcccaaagccgcaaactgctcggctacatcgccattccttcactacaggcccaactcgacaccggcgccgtcaagcccgaagaccctctctcccgcgccatggtccgcttccagcgcaagggaagagaatacacagtgatcagcatggataccccgcttgaagaattggaggctttcttcgagggtgcgggcgatatcaccggacagaagcaggacttcgctgtcgttacggatcaggataggcggtttgtcctcggtgtcgccacgagggaggacctcgaggactttgtcaagaggaggccggcttga

SEQ ID NO: 19452 - protein, 173 aa, Muscodor strobelii
  misc_feature: SGI Peptide ID NO. 566542
  misc_feature (20)..(173): NCBI GI: 171695958 Blast Desc: protein product [Podospora anserina] gi|170948221|emb|CAP60385.1| protein product [Podospora anserina]
  misc_feature (16)..(173): NCBI GI: 85111397 Blast Desc: NCU07466 [Neurospora crassa OR74A] gi|28925666|gb|EAA34681.1| conserved [Neurospora crassa OR74A]
  misc_feature (18)..(173): NCBI GI: 116180838 Blast Desc: CHGG_01047 [Chaetomium globosum CBS 148.51] gi|88185344|gb|EAQ92812.1| CHGG_01047 [Chaetomium globosum CBS 148.51]
  misc_feature (17)..(172): NCBI GI: 145605377 Blast Desc: cystathionine beta-synthase, [Magnaporthe grisea 70-15] gi|145013195|gb|EDJ97836.1| cystathionine beta-synthase, [Magnaporthe grisea 70-15]
  misc_feature (20)..(172): NCBI GI: 46108694 Blast Desc: FG01229.1 [Gibberella zeae PH-1]
  misc_feature (20)..(172): NCBI GI: 256734359 Blast Desc: [Nectria haematococca mpVI 77-13-4]
  misc_feature (2)..(173): NCBI GI: 154313727 Blast Desc: BC1G_05713 [Botryotinia fuckeliana B05.10] gi|150849295|gb|EDN24488.1| BC1G_05713 [Botryotinia fuckeliana B05.10]
  misc_feature (12)..(173): NCBI GI: 225562479 Blast Desc: conserved [Ajellomyces capsulatus G186AR]
  misc_feature (12)..(173): NCBI GI: 240281094 Blast Desc: cystathionine beta-synthase [Ajellomyces capsulatus H143]
  misc_feature (15)..(173): NCBI GI: 238843639 Blast Desc: conserved [Microsporum canis CBS 113480]
  misc_feature (29)..(170): SWISSPROT Homolog: EC 4.2.1.22 Cystathionine beta-synthase
MTETMKGGAVHIGPSPLSKQPFVSKWSSRYRGACVQDLEPPAALSLNPTDPVSLAMLSAFEREYTHLTVIDSQSRKLLGYIAIPSLQAQLDTGAVKPEDPLSRAMVRFQRKGREYTVISMDTPLEELEAFFEGAGDITGQKQDFAVVTDQDRRFVLGVATREDLEDFVKRRPA

SEQ ID NO: 19453 - DNA, 2365 bp, Muscodor strobelii
  misc_feature: SGI EST ID NO. CUFF.45590.0
  misc_feature: Variant of the nucleotide sequence at SEQ ID NO 19451
ttcttggcgaaaattactatcgcattcccacgggccccctccgtcaccgcacaacgacaacccatccagaacagccagccaacgcgtccgagacaggcggtacacacagaccgacgccagcatcatatttcctttcgccattgtgttttcttccaacaaacgtccaagaccactgcccaacacaactcagccgcatcacacatccccgccatgacggaaacgatgaaaggcggcgccgtccacatcgggccctcccctctatccaaacagccttttgtctccaaatggtcatcacggtatcgcggcgcctgcgtgcaagacctcgaaccgcccgccgccctctccctcaacccaaccgaccccgtctccctcgccatgctctccgccttcgaacgcgaatacacccacctgaccgtcatcgactcccaaagccgcaaactgctcggctacatcgccattccttcactacaggcccaactcgacaccggcgccgtcaagcccgaagaccctctctcccgcgccatggtccgcttccagcgcaagggaagagaatacacagtgatcagcatggataccccgcttgaagaattggaggctttcttcgagggtgcgggcgatatcaccggacagaagcaggacttcgctgtcgttacggatcaggataggcggtttgtcctcggtgtcgccacgagggaggacctcgaggactttgtcaagaggaggccggcttgagggtcccacgagggaatggatcatgattgcttctggggatgagataaatatgcaaaggaggaatgagccttcaactgctctcaatgccgagtataaactcggcaagacaaacccagctttaacagataggccgggatacggcgatgttggccgtgtggggacgaacgaagatcattgttggcttttcgccataatagaagaactggcgatcgcgaaagggatgcgagcggatgtaccagtcacagaccaaagatcactgttatctttcgtacacggggaaggtatttgcttagctaagcctgctaacggacgaacatacctaggcatgcggtccagtaataagcaaatattcaaaaatcagcttagcattaggcataaacactacttgcgataggtcattttcaagtttatgctcaataatgtgctaataatctcatgttcttcaacctttctatgatctcgctcgtacaaaagtgtaatggcagctctagaagcaagtgtcttatacccgcaacgtcaaaatcccatctcttcacatgagatgaacgatctcatctacagcgtatttccacttgatatctgacctctccaatcctcacccgtcgctcatctacaactccccatcccaatcgaaaatgagctgcacattagcaaactgcccctccttactcacacagatatgtctcacataccgcctctcgcccccaaccatctggaacccccaagtctgcgtagcataccacccattattgctcacaacatggttatacacaaacaacttgccatcctccgtcttctcgctatcctcctcaatgaaacccttgctgaggaagtcatcctggagaataccctgcttcgtctgttccgcgacgataacgtcgagctcttccttattcacgaacttagactggccctttgcggtgccgaacagccagtcggtgtgctcacggaattgaaagtcgagagttcggagctcggtcgtgccttttagtccaccggtcgcgacctggtcgatgtcgatgtgcgttttgctgtccgagtcgacgtactgcttgatgtgtagggtgacggttgttacggatactgctttgcggactagccagccgataccttggattgtaagggctgggtcgatggagtcgctgagggtgcggttctacggggttttggttaattggttgtaatgttaatcgtgcgataaaagctgtaagcggaggtgagaggggatgatgatgtcaagaacgaggtgagctcacctgaatccatttcccgccttggttgctgactgttttgtttggtggtgctgccatgatgtctgcgtttttcctatttgtctttgtataattatcgcaatctaatgtattatgaaagacaattggtgatcgagggtatcgtcagatctatcgatgaaaggtacagcatagaagaaagataaggttagatgaaccgaaagcttccaagatgggatgacgaggcggggttcataaataaaagcagtggatcgcagtcctagctacctagattcatccactagtaatgcacgctgtttccaaacttatcaattgccgtatgcataaaatagcagaatagatacgctcggagcattgtacccttcagtcgggtgcatcttttt

SEQ ID NO: 19454 - DNA, 600 bp, Muscodor strobelii
  misc_feature: SGI cDNA ID NO. 566543
  misc_feature: Encodes the peptide sequence at SEQ ID NO 19455
atggcagcaccaccaaacaaaacagtcagcaaccaaggcgggaaatggattcagaaccgcaccctcagcgactccatcgacccagcccttacaatccaaggtatcggctggctagtccgcaaagcagtatccgtaacaaccgtcaccctacacatcaagcagtacgtcgactcggacagcaaaacgcacatcgacatcgaccaggtcgcgaccggtggactaaaaggcacgaccgagctccgaactctcgactttcaattccgtgagcacaccgactggctgttcggcaccgcaaagggccagtctaagttcgtgaataaggaagagctcgacgttatcgtcgcggaacagacgaagcagggtattctccaggatgacttcctcagcaagggtttcattgaggaggatagcgagaagacggaggatggcaagttgtttgtgtataaccatgttgtgagcaataatgggtggtatgctacgcagacttgggggttccagatggttgggggcgagaggcggtatgtgagacatatctgtgtgagtaaggaggggcagtttgctaatgtgcagctcattttcgattgggatggggagttgtag

SEQ ID NO: 19455 - protein, 199 aa, Muscodor strobelii
  misc_feature: SGI Peptide ID NO. 566543
  misc_feature (1)..(198): NCBI GI: 261356421 Blast Desc: conserved [Verticillium albo-atrum VaMs.102]
  misc_feature (1)..(198): NCBI GI: 116180836 Blast Desc: CHGG_01046 [Chaetomium globosum CBS 148.51] gi|88185343|gb|EAQ92811.1| CHGG_01046 [Chaetomium globosum CBS 148.51]
  misc_feature (1)..(198): NCBI GI: 39964980 Blast Desc: MGG_09900 [Magnaporthe grisea 70-15] gi|145013202|gb|EDJ97843.1| MGG_09900 [Magnaporthe grisea 70-15]
  misc_feature (1)..(198): NCBI GI: 154302883 Blast Desc: BC1G_09185 [Botryotinia fuckeliana B05.10] gi|150855109|gb|EDN30301.1| BC1G_09185 [Botryotinia fuckeliana B05.10]
  misc_feature (1)..(195): NCBI GI: 171695960 Blast Desc: protein product [Podospora anserina] gi|170948222|emb|CAP60386.1| protein product [Podospora anserina]
  misc_feature (1)..(198): NCBI GI: 156048240 Blast Desc: SS1G_08851 [Sclerotinia sclerotiorum 1980] gi|154693248|gb|EDN92986.1| SS1G_08851 [Sclerotinia sclerotiorum 1980]
  misc_feature (1)..(198): NCBI GI: 256735068 Blast Desc: [Nectria haematococca mpVI 77-13-4]
  misc_feature (1)..(195): NCBI GI: 85111399 Blast Desc: NCU07467 [Neurospora crassa OR74A] gi|28925667|gb|EAA34682.1| conserved [Neurospora crassa OR74A]
  misc_feature (1)..(195): NCBI GI: 46108692 Blast Desc: FG01228.1 [Gibberella zeae PH-1]
  misc_feature (1)..(198): NCBI GI: 238838562 Blast Desc: conserved [Microsporum canis CBS 113480]
MAAPPNKTVSNQGGKWIQNRTLSDSIDPALTIQGIGWLVRKAVSVTTVTLHIKQYVDSDSKTHIDIDQVATGGLKGTTELRTLDFQFREHTDWLFGTAKGQSKFVNKEELDVIVAEQTKQGILQDDFLSKGFIEEDSEKTEDGKLFVYNHVVSNNGWYATQTWGFQMVGGERRYVRHICVSKEGQFANVQLIFDWDGEL

SEQ ID NO: 19456 - DNA, 2323 bp, Muscodor strobelii
  misc_feature: SGI EST ID NO. CUFF.45591.1
  misc_feature: Variant of the nucleotide sequence at SEQ ID NO 19454
aaaaagatgcacccgactgaagggtacaatgctccgagcgtatctattctgctattttatgcatacggcaattgataagtttggaaacagcgtgcattactagtggatgaatctaggtagctaggactgcgatccactgcttttatttatgaaccccgcctcgtcatcccatcttggaagctttcggttcatctaaccttatctttcttctatgctgtacctttcatcgatagatctgacgataccctcgatcaccaattgtctttcataatacattagattgcgataattatacaaagacaaataggaaaaacgcagacatcatggcagcaccaccaaacaaaacagtcagcaaccaaggcgggaaatggattcagaaccgcaccctcagcgactccatcgacccagcccttacaatccaaggtatcggctggctagtccgcaaagcagtatccgtaacaaccgtcaccctacacatcaagcagtacgtcgactcggacagcaaaacgcacatcgacatcgaccaggtcgcgaccggtggactaaaaggcacgaccgagctccgaactctcgactttcaattccgtgagcacaccgactggctgttcggcaccgcaaagggccagtctaagttcgtgaataaggaagagctcgacgttatcgtcgcggaacagacgaagcagggtattctccaggatgacttcctcagcaagggtttcattgaggaggatagcgagaagacggaggatggcaagttgtttgtgtataaccatgttgtgagcaataatgggtggtatgctacgcagacttgggggttccagatggttgggggcgagaggcggtatgtgagacatatctgtgtgagtaaggaggggcagtttgctaatgtgcagctcattttcgattgggatggggagttgtagatgagcgacgggtgaggattggagaggtcagatatcaagtggaaatacgctgtagatgagatcgttcatctcatgtgaagagatgggattttgacgttgcgggtataagacacttgcttctagagctgccattacacttttgtacgagcgagatcatagaaaggttgaagaacatgagattattagcacattattgagcataaacttgaaaatgacctatcgcaagtagtgtttatgcctaatgctaagctgatttttgaatatttgcttattactggaccgcatgcctaggtatgttcgtccgttagcaggcttagctaagcaaataccttccccgtgtacgaaagataacagtgatctttggtctgtgactggtacatccgctcgcatccctttcgcgatcgccagttcttctattatggcgaaaagccaacaatgatcttcgttcgtccccacacggccaacatcgccgtatcccggcctatctgttaaagctgggtttgtcttgccgagtttatactcggcattgagagcagttgaaggctcattcctcctttgcatatttatctcatccccagaagcaatcatgatccattccctcgtgggaccctcaagccggcctcctcttgacaaagtcctcgaggtcctccctcgtggcgacaccgaggacaaaccgcctatcctgatccgtaacgacagcgaagtcctgcttctgtccggtgatatcgcccgcaccctcgaagaaagcctccaattcttcaagcggggtatccatgctgatcactgtgtattctcttcccttgcgctggaagcggaccatggcgcgggagagagggtcttcgggcttgacggcgccggtgtcgagttgggcctgtagtgaaggaatggcgatgtagccgagcagtttgcggctttgggagtcgatgacggtcaggtgggtgtattcgcgttcgaaggcggagagcatggcgagggagacggggtcggttgggttgagggagagggcggcgggcggttcgaggtcttgcacgcaggcctggctgtcacattagcaacacgggggaaatccagctaggcaaagcatggccacttacgccgcgataccgtgatgaccatttggagacaaaaggctgtttggatagaggggagggcccgatgtggacggcgccgcctttcatcgtttccgtcatggcggggatgtgtgatgcggctgagttgtgttgggcagtggtcttggacgtttgttggaagaaaacacaatggcgaaaggaaatatgatgctggcgtcggtctgtgtgtaccgcctgtctcggacgcgttggctggctgttctggatgggttgtcgttgtgcggtgacggagggggcccgtgggaatgcgatagtaattttcgccaagaa

SEQ ID NO: 19457 - DNA, 1161 bp, Muscodor strobelii
  misc_feature: SGI cDNA ID NO. 566544
  misc_feature: Encodes the peptide sequence at SEQ ID NO 19458
atggcctatctctttccctcccagcatgcgctgcatcaatcattcggatcgcaatggcattctccatacagccgtcgcgcgcccgcacaacgcaaagcgacaccgcgtcaggcacgccccgatctctatcttgcctactctgtggtcgacgacgccaagaacaaagcagccaagctgagcgccgaggcagagaaggaattcaataaagcgagcgaagcggcacaggcaaagacgggcaagatcgagctatactcgcctggtttctacgcggccgccacgttcggtggtcttatggcttgtggcctcacacataccgctgttaccccgctcgaccttgtcaaatgtcgtcgccaggttgattcaaaactgtacaagggcaacttccaagcatggggcctgatttacagagcagaagggatcagaggcattttcacgggctggggacctactttcttcggatactcagcgcagggtgcgttcaagtacggctggtatgagtacttcaaaaagacatactcggacctcgcggggcccgagaatgcatacaagtacaagacgatcctctacctgaccgcatctgcatccgccgaattcttggcagatattgcgctttgtcccttcgaagcagtcaaagtgcgcatgcagacatcaattccatcgccatacgccgggacaatcgatggcatccggaagattacaggcgctgagggtgtcgcaggcctctacaaaggtctctatccgctgtgggggcgtcaaatcccttacacgatgatgaaattcgcttctttcgagacaattgtcgagatgatctacgaccgtctcccggggaaaaagacagactacggcaagggtgcacagacggctgtttcgttcacgggtggttatctagctggtattctttgcgctattgtgtcgcaccccgctgatgtgcttgtcagcaagttgaatgcgaaccgacaggctggtgaggcattcggagctgctgttgcgaggaattacaaagagatgggcttcggcggactctggaacggacttcctgtcaggatcgtcatgattggcacgctaacgggactacagtggatgatttatgactctttcaagatcttcatgggcttcccgacaacaggcggcgctgcgccgccagtcgcggagaagaagtga

SEQ ID NO: 19458 - protein, 386 aa, Muscodor strobelii
  misc_feature: SGI Peptide ID NO. 566544
  misc_feature (185)..(274): Pfam Id: PF00153 Pfam Desc: Mitochondrial carrier protein
  misc_feature (89)..(176): Pfam Id: PF00153 Pfam Desc: Mitochondrial carrier protein
  misc_feature (286)..(374): Pfam Id: PF00153 Pfam Desc: Mitochondrial carrier protein
  misc_feature (1)..(380): NCBI GI: 154313725 Blast Desc: BC1G_05712 [Botryotinia fuckeliana B05.10] gi|150849294|gb|EDN24487.1| BC1G_05712 [Botryotinia fuckeliana B05.10]
  misc_feature (1)..(381): NCBI GI: 256735067 Blast Desc: [Nectria haematococca mpVI 77-13-4]
  misc_feature (4)..(386): NCBI GI: 116180840 Blast Desc: conserved [Chaetomium globosum CBS 148.51] gi|88185345|gb|EAQ92813.1| conserved [Chaetomium globosum CBS 148.51]
  misc_feature (1)..(385): NCBI GI: 85111395 Blast Desc: mitochondrial phosphate carrier protein 2 [Neurospora crassa OR74A] gi|28925665|gb|EAA34680.1| mitochondrial phosphate carrier protein 2 [Neurospora crassa OR74A]
  misc_feature (1)..(386): NCBI GI: 46108696 Blast Desc: FG01230.1 [Gibberella zeae PH-1]
  misc_feature (1)..(386): NCBI GI: 261356422 Blast Desc: mitochondrial phosphate carrier protein [Verticillium albo-atrum VaMs.102]
  misc_feature (4)..(380): NCBI GI: 226282152 Blast Desc: phosphate carrier protein [Paracoccidioides brasiliensis Pb01]
  misc_feature (4)..(380): NCBI GI: 226292688 Blast Desc: phosphate carrier protein [Paracoccidioides brasiliensis Pb18]
  misc_feature (4)..(386): NCBI GI: 169767770 Blast Desc: [Aspergillus oryzae RIB40] gi|83766211|dbj|BAE56354.1| protein product [Aspergillus oryzae]
  misc_feature (4)..(386): NCBI GI: 238484683 Blast Desc: mitochondrial phosphate carrier protein, [Aspergillus flavus NRRL3357] gi|220701630|gb|EED57968.1| mitochondrial phosphate carrier protein, [Aspergillus flavus NRRL3357]
MAYLFPSQHALHQSFGSQWHSPYSRRAPAQRKATPRQARPDLYLAYSVVDDAKNKAAKLSAEAEKEFNKASEAAQAKTGKIELYSPGFYAAATFGGLMACGLTHTAVTPLDLVKCRRQVDSKLYKGNFQAWGLIYRAEGIRGIFTGWGPTFFGYSAQGAFKYGWYEYFKKTYSDLAGPENAYKYKTILYLTASASAEFLADIALCPFEAVKVRMQTSIPSPYAGTIDGIRKITGAEGVAGLYKGLYPLWGRQIPYTMMKFASFETIVEMIYDRLPGKKTDYGKGAQTAVSFTGGYLAGILCAIVSHPADVLVSKLNANRQAGEAFGAAVARNYKEMGFGGLWNGLPVRIVMIGTLTGLQWMIYDSFKIFMGFPTTGGAAPPVAEKK

SEQ ID NO: 19459 - DNA, 1800 bp, Muscodor strobelii
  misc_feature: SGI EST ID NO. CUFF.45533.0
  misc_feature: Variant of the nucleotide sequence at SEQ ID NO 19457
gccgaagcctgcgcaagtcaaagcaatccggggcagttgctcccccgtataaactgaaaccgatatctggttggacacaggttctcctcaatgtaactggttggaaggacaagaatttatgtcataccccgacacctcctgttcccattttacttcaccatctgcagcttattaggagacatcattggtatcctaccgactttaattcaactgaactcaattgagtcggatctcggtgcgtttgtgcctgtgcctgtggtaatcgggaatttacgaataggtacttgcgcagatgtgagtatcgaagctctgtcatccatacagccagttccctcgattgcggtcgttcttgtaaggggtcgacaatgatgacgttcgagcgtgcatcaattggagttcacagaacgcacatgatcacccaagtatgagtcttgttgctaattcatccgattattatatagctcgatccagcaagagcaagatggcctatctctttccctcccagcatgcgctgcatcaatcattcggatcgcaatggcattctccatacagccgtcgcgcgcccgcacaacgcaaagcgacaccgcgtcaggcacgccccgatctctatcttgcctactctgtggtcgacgacgccaagaacaaagcagccaagctgagcgccgaggcagagaaggaattcaataaagcgagcgaagcggcacaggcaaagacgggcaagatcgagctatactcgcctggtttctacgcggccgccacgttcggtggtcttatggcttgtggcctcacacataccgctgttaccccgctcgaccttgtcaaatgtcgtcgccaggttgattcaaaactgtacaagggcaacttccaagcatggggcctgatttacagagcagaagggatcagaggcattttcacgggctggggacctactttcttcggatactcagcgcagggtgcgttcaagtacggctggtatgagtacttcaaaaagacatactcggacctcgcggggcccgagaatgcatacaagtacaagacgatcctctacctgaccgcatctgcatccgccgaattcttggcagatattgcgctttgtcccttcgaagcagtcaaagtgcgcatgcagacatcaattccatcgccatacgccgggacaatcgatggcatccggaagattacaggcgctgagggtgtcgcaggcctctacaaaggtctctatccgctgtgggggcgtcaaatcccttacacgatgatgaaattcgcttctttcgagacaattgtcgagatgatctacgaccgtctcccggggaaaaagacagactacggcaagggtgcacagacggctgtttcgttcacgggtggttatctagctggtattctttgcgctattgtgtcgcaccccgctgatgtgcttgtcagcaagttgaatgcgaaccgacaggctggtgaggcattcggagctgctgttgcgaggaattacaaagagatgggcttcggcggactctggaacggacttcctgtcaggatcgtcatgattggcacgctaacgggactacagtggatgatttatgactctttcaagatcttcatgggcttcccgacaacaggcggcgctgcgccgccagtcgcggagaagaagtgaatgaatcggtgtaatgacctgtgggacaggtaggtaggcgatgagcctttcaggtgacatttggtcattgaagcgacaaatgaaagtgtactgtgttcggtttcttggtcttgtagattatactgagttgataatgcatatcatttgggattctcgtt

SEQ ID NO: 19460 - DNA, 1296 bp, Muscodor strobelii
  misc_feature: SGI cDNA ID NO. 566545
  misc_feature: Encodes the peptide sequence at SEQ ID NO 19461
atggagggccaagatttcccccgagagtacttcgtcagtactattgttcgactacttgacactatgaagtacgatgataccaactatagcgatgaggatcgcattcggaatctgaggtacgcatacagcgaagcagcaaagcattttgctcaaccgcacgtgcagaagcttgtagacatgcatcctaagaagacggaggctggtctgcgaactattgcttgtctagtggtgtactgctgggtcaatgcctcacaagaactcatggcagctctcactatctacttcatgtacacactcatccttgatgacagcgaacgtgaccttggcgcgacaatgcagactttcttcgcggatctcaaagcgggacgcgagcagaaagatccctggctgaagctaatgggcgatcatctaccggaggttctgcggcattacggtccgtactgctctttgaatatctatcgtagcacactggacttcttcgagggttgctggattgagcagaaagactttggaggatatccaggtagcactgactacccagagttccttcgccggatgaacggtctgggtcacgttgtcggtgcctcgctcttcccagccgagaccttcgatgaacaaacagatttccgtgagattaccacggcactcagcatggtggagaattggatggcatgggccaacgatctcgtatcgtattataaagaacgcgatgacccaaaagacaccactaccctcgtcaataactactcgcgcgttggtgggctaacggatgaggagtcgcttgagaagctgacgaagaacacactacgtgtcagcagcgagattgtaggcgtcttccctaccgcctcaaccagtggtacagaaggaggcaaggctagtgctctcgttgagagagatgggaacacagatgacaaggaagagaaagatccccgagtcggtgaaaccctcaccaaatttatgcacggatatgttacttggcacctatgcgacccgcgctaccgtatcgatgagatttatgaacagatcaagggatatgacgacgagacaagccgaagattctgccaatactttgagcaggcaaacaaagtcggtcgtgttgaccctgctacgtgggcgagtccgacatacctagagctcgcagcccaggcccgaaaagagaacgacaccaaggagagcggatcatggacgtccctgttgccgaagccgcacattccggtcaatgtacaggtacccaaggctatggtgacagcctttctgctgtcatcaccatccatcttttcgctacacgagaagtag

SEQ ID NO: 19461 - protein, 431 aa, Muscodor strobelii
  misc_feature: SGI Peptide ID NO. 566545
  misc_feature (1)..(403): Pfam Id: PF06330 Pfam Desc: Trichodiene synthase (TRI5)
  misc_feature (1)..(279): Pfam Id: PF06330 Pfam Desc: Trichodiene synthase (TRI5)
  misc_feature (307)..(403): Pfam Id: PF06330 Pfam Desc: Trichodiene synthase (TRI5)
  misc_feature (4)..(398): NCBI GI: 269856262 Blast Desc: sesquiterpene cyclase [Fusarium sp. NRRL 13405]
  misc_feature (4)..(392): NCBI GI: 74629924 Blast Desc: TRI5_FUSAS RecName: Full=Trichodiene synthase; AltName: Full=Sesquiterpene cyclase; Short=TS gi|21429461|gb|AAM48934.1| trichodiene synthase [Fusarium
  misc_feature (4)..(392): NCBI GI: 74629921 Blast Desc: TRI5_FUSAU RecName: Full=Trichodiene synthase; AltName: Full=Sesquiterpene cyclase; Short=TS gi|21429452|gb|AAM48926.1| trichodiene synthase [Fusarium
  misc_feature (4)..(392): NCBI GI: 74629920 Blast Desc: TRI5_FUSCU RecName: Full=Trichodiene synthase; AltName: Full=Sesquiterpene cyclase; Short=TS gi|21429290|gb|AAM48782.1| trichodiene synthase [Fusarium zeae]
  misc_feature (4)..(392): NCBI GI: 74629922 Blast Desc: TRI5_FUSBO RecName: Full=Trichodiene synthase; AltName: Full=Sesquiterpene cyclase; Short=TS gi|21429362|gb|AAM48846.1| trichodiene synthase [Fusarium
  misc_feature (4)..(392): NCBI GI: 74645154 Blast Desc: TRI5_FUSAC RecName: Full=Trichodiene synthase; AltName: Full=Sesquiterpene cyclase; Short=TS gi|21429254|gb|AAM48750.1| trichodiene synthase [Gibberella zeae]
  misc_feature (4)..(391): NCBI GI: 74629969 Blast Desc: TRI5_FUSMI RecName: Full=Trichodiene synthase; AltName: Full=Sesquiterpene cyclase; Short=TS gi|21429533|gb|AAM48998.1| trichodiene synthase [Fusarium
  misc_feature (4)..(392): NCBI GI: 21429326 Blast Desc: trichodiene synthase [Fusarium asiaticum] gi|24371019|dbj|BAC22117.1| trichodiene synthase [Gibberella zeae]
  misc_feature (4)..(392): NCBI GI: 74629913 Blast Desc: TRI5_FUSME RecName: Full=Trichodiene synthase; AltName: Full=Sesquiterpene cyclase; Short=TS gi|74645149|sp|Q7LJF8.1|TRI5_FUSCO RecName: Full=Trichodiene x
  misc_feature (4)..(392): NCBI GI: 46115390 Blast Desc: TRI5_GIBZE Trichodiene synthase (Sesquiterpene cyclase) (TS) [Gibberella zeae PH-1] gi|4033479|sp|Q00909.2|TRI5_GIBZE RecName: Full=Trichodiene zeae]
  misc_feature (4)..(392): SWISSPROT Homolog: EC 4.2.3.6 Trichodiene synthase
MEGQDFPREYFVSTIVRLLDTMKYDDTNYSDEDRIRNLRYAYSEAAKHFAQPHVQKLVDMHPKKTEAGLRTIACLVVYCWVNASQELMAALTIYFMYTLILDDSERDLGATMQTFFADLKAGREQKDPWLKLMGDHLPEVLRHYGPYCSLNIYRSTLDFFEGCWIEQKDFGGYPGSTDYPEFLRRMNGLGHVVGASLFPAETFDEQTDFREITTALSMVENWMAWANDLVSYYKERDDPKDTTTLVNNYSRVGGLTDEESLEKLTKNTLRVSSEIVGVFPTASTSGTEGGKASALVERDGNTDDKEEKDPRVGETLTKFMHGYVTWHLCDPRYRIDEIYEQIKGYDDETSRRFCQYFEQANKVGRVDPATWASPTYLELAAQARKENDTKESGSWTSLLPKPHIPVNVQVPKAMVTAFLLSSPSIFSLHEK

SEQ ID NO: 19462 - DNA, 1758 bp, Muscodor strobelii
  misc_feature: SGI EST ID NO. CUFF.45473.0
  misc_feature: Variant of the nucleotide sequence at SEQ ID NO 19460
cgcgggttatcgagagtcgttgccgtgtccctacttcaatagatctagtttcagtccccgagtctgacgtcaaaggaacagacaagacactacagtatcgtcgacgcttgtgatctccagccatgcgtgagagagtttgtcaaggcgatgggcagcctcggcgagccttcgatgcgatataaatatatcaagttcttcaggacagctctcgacaaaatcgttcgatataatcaagtcctctactgtatataaccatatcagtttccttcatccatacgatacgagtacggaatccttttctcatacttctgccacttgatccatatactatcttcctgttctgcctacaaccgacatggagggccaagatttcccccgagagtacttcgtcagtactattgttcgactacttgacactatgaagtacgatgataccaactatagcgatgaggatcgcattcggaatctgaggtacgcatacagcgaagcagcaaagcattttgctcaaccgcacgtgcagaagcttgtagacatgcatcctaagaagacggaggctggtctgcgaactattgcttgtctagtggtgtactgctgggtcaatgcctcacaagaactcatggcagctctcactatctacttcatgtacacactcatccttgatgacagcgaacgtgaccttggcgcgacaatgcagactttcttcgcggatctcaaagcgggacgcgagcagaaagatccctggctgaagctaatgggcgatcatctaccggaggttctgcggcattacggtccgtactgctctttgaatatctatcgtagcacactggacttcttcgagggttgctggattgagcagaaagactttggaggatatccaggtagcactgactacccagagttccttcgccggatgaacggtctgggtcacgttgtcggtgcctcgctcttcccagccgagaccttcgatgaacaaacagatttccgtgagattaccacggcactcagcatggtggagaattggatggcatgggccaacgatctcgtatcgtattataaagaacgcgatgacccaaaagacaccactaccctcgtcaataactactcgcgcgttggtgggctaacggatgaggagtcgcttgagaagctgacgaagaacacactacgtgtcagcagcgagattgtaggcgtcttccctaccgcctcaaccagtggtacagaaggaggcaaggctagtgctctcgttgagagagatgggaacacagatgacaaggaagagaaagatccccgagtcggtgaaaccctcaccaaatttatgcacggatatgttacttggcacctatgcgacccgcgctaccgtatcgatgagatttatgaacagatcaagggatatgacgacgagacaagccgaagattctgccaatactttgagcaggcaaacaaagtcggtcgtgttgaccctgctacgtgggcgagtccgacatacctagagctcgcagcccaggcccgaaaagagaacgacaccaaggagagcggatcatggacgtccctgttgccgaagccgcacattccggtcaatgtacaggtacccaaggctatggtgacagcctttctgctgtcatcaccatccatcttttcgctacacgagaagtagagtggttgtggtttcctgtaccagattattgtttgattctattgtatttatatcagttttatagtggaacgctcacgcgaggtattgaattgaatgaccagaattat

SEQ ID NO: 19463 - DNA, 1602 bp, Muscodor strobelii
  misc_feature: SGI cDNA ID NO. 566546
  misc_feature: Encodes the peptide sequence at SEQ ID NO 19464
atgtcgacctttttgatcacattgctgttagtagccctattcgtaagggggtataaactcctcacggtgggaaggcggccacgagactaccctcctgggccgccgacattaccactaatcggcaaccttcaccaaatcccttcagagaacacgcatctgcaattccaaaagtgggctaaggactatggacccattttctcactcatggccggaagtcggcctatcattgttctgaacacagacgatgccgtaaagaccctatttgataggagaggtagcatttactcctctagaccaaactcttatatcatggacgtcgtgactggaggtaccaaatttggtcttatgccatataacgatacttggaagaaatgtcgagcaatatgccaccgagagcttagtccacagtcggcaaagtcttacgtgccatatcaagacttggagaccaaacagacattgaatgaactcttgtccaagcctgagcttttcatggatcacatccgtcgttacacaaactctctgtcttatcaaatcacgttcggttttcgcgtgccagatacttacaactacgatctcacgtttgtctacgatagttttgagcgttggactggagtgctcagacggtctattctctttgacttgtatccatctttgcgccgtgttcccgactgcatggtgcctcttcgtaagagtgcaaaagttattcaagagacagaaagtcgcttctatctcaaacattggagtgccgcaaagaacaagatcgagagcggagacgctaagccatgcatcgcgaagcaagtgctcaaggcgcaggagacacacggctttgcggatgagctcacgagcgccatatgtggtgatctcatccaagccggctcggacacaactgcaaatgagatcacggcttttattcaagccatggtcttgtttcctgctgtacaaaaaagggcaagggaagacatcgatcgcctttgcggtgaccgacttcccacaatgggagacgcgaagtcgctgccgtatatccgcgcatgcgtcaaggaaacactccggtggatgccaacggcacttcttggaataccacatgcagtactacaagacgatgagtacatgggatacaagatacccaaggacgcaatcgtcatgatgaatacttgggcaattcatatggatcccaaccgccatcctgaaccgcgcgtctttgagccggcgcggtatcttgacgactcgttctcggcccgcgagtcggcggtacgatccgatgccgcgaagcgtgaccacttcagcttcggctctgggcgacgtctgtgtcccggtatcgatgtggctgaaaacgggttatatctaagcattgtccggattttatgggccttcaacatcaccaatgaaaaggattctgagggtcgtgatattgtgcccgatcctgacaagctaacaagcggtatcgccagttgtccgcggtccttcccagtgcgaattacgccccgaagcgacatgcacgccagggtggttcgcactgagtgggacctggcgcaagatgcgctagatcgagatgataaacagtggaggataattccccgtaatgtgcaatttgaagatgcttga

SEQ ID NO: 19464 - protein, 533 aa, Muscodor strobelii
  misc_feature: SGI Peptide ID NO. 566546
  misc_feature (31)..(492): Pfam Id: PF00067 Pfam Desc: Cytochrome P450
  misc_feature (283)..(454): Pfam Id: PF00067 Pfam Desc: Cytochrome P450
  misc_feature (31)..(144): Pfam Id: PF00067 Pfam Desc: Cytochrome P450
  misc_feature (12)..(525): NCBI GI: 119483586 Blast Desc: Cytochrome P450 oxidoreductase, [Neosartorya fischeri NRRL 181] gi|119409852|gb|EAW19799.1| Cytochrome P450 oxidoreductase, [Neosartorya fischeri NRRL 181]
  misc_feature (4)..(532): NCBI GI: 242773378 Blast Desc: cytochrome P450, [Talaromyces stipitatus ATCC 10500] gi|218721847|gb|EED21265.1| cytochrome P450, [Talaromyces stipitatus ATCC 10500]
  misc_feature (6)..(521): NCBI GI: 255944711 Blast Desc: Pc20g05940 [Penicillium chrysogenum Wisconsin 54-1255] gi|211587858|emb|CAP85923.1| Pc20g05940 [Penicillium chrysogenum Wisconsin 54-1255]
  misc_feature (18)..(525): NCBI GI: 212530062 Blast Desc: cytochrome P450, [Penicillium marneffei ATCC 18224] gi|210074586|gb|EEA28673.1| cytochrome P450, [Penicillium marneffei ATCC 18224]
  misc_feature (8)..(530): NCBI GI: 259484285 Blast Desc: TPA: cytochrome P450, (Eurofung) [Aspergillus nidulans FGSC A4]
  misc_feature (6)..(525): NCBI GI: 240111106 Blast Desc: Cytochrome P450 family protein [Coccidioides posadasii C735 delta SOWgp]
  misc_feature (1)..(525): NCBI GI: 171694638 Blast Desc: protein product [Podospora anserina] gi|170947561|emb|CAP59722.1| protein product [Podospora anserina]
  misc_feature (4)..(522): NCBI GI: 46139749 Blast Desc: FG11389.1 [Gibberella zeae PH-1]
  misc_feature (10)..(530): NCBI GI: 171678956 Blast Desc: protein product [Podospora anserina] gi|170937549|emb|CAP62206.1| protein product [Podospora anserina]
  misc_feature (6)..(525): NCBI GI: 119189783 Blast Desc: CIMG_04939 [Coccidioides immitis RS]
  misc_feature (48)..(498): SWISSPROT Homolog: EC 1.14.14.1 Unspecific monooxygenase
MSTFLITLLLVALFVRGYKLLTVGRRPRDYPPGPPTLPLIGNLHQIPSENTHLQFQKWAKDYGPIFSLMAGSRPIIVLNTDDAVKTLFDRRGSIYSSRPNSYIMDVVTGGTKFGLMPYNDTWKKCRAICHRELSPQSAKSYVPYQDLETKQTLNELLSKPELFMDHIRRYTNSLSYQITFGFRVPDTYNYDLTFVYDSFERWTGVLRRSILFDLYPSLRRVPDCMVPLRKSAKVIQETESRFYLKHWSAAKNKIESGDAKPCIAKQVLKAQETHGFADELTSAICGDLIQAGSDTTANEITAFIQAMVLFPAVQKRAREDIDRLCGDRLPTMGDAKSLPYIRACVKETLRWMPTALLGIPHAVLQDDEYMGYKIPKDAIVMMNTWAIHMDPNRHPEPRVFEPARYLDDSFSARESAVRSDAAKRDHFSFGSGRRLCPGIDVAENGLYLSIVRILWAFNITNEKDSEGRDIVPDPDKLTSGIASCPRSFPVRITPRSDMHARVVRTEWDLAQDALDRDDKQWRIIPRNVQFEDA

SEQ ID NO: 19465 - DNA, 976 bp, Muscodor strobelii
  misc_feature: SGI EST ID NO. CUFF.45484.0
  misc_feature: Variant of the nucleotide sequence at SEQ ID NO 19463
ttttctcactcatggccggaagtcggcctatcattgttctgaacacagacgatgccgtaaagaccctatttgataggagaggtagcatttactcctctagaccaaactcttatatcatggacgtcgtgactggaggtaccaaatttggtcttatgccatataacgatacttggaagaaatgtcgagcaatatgccaccgagagcttagtccacagtcggcaaagtcttacgtgccatatcaagacttggagaccaaacagacattgaatgaactcttgtccaagcctgagcttttcatggatcacatccgtcgttacacaaactctctgtcttatcaaatcacgttcggttttcgcgtgccagatacttacaactacgatctcacgtttgtctacgatagttttgagcgttggactggagtgctcagacggtctattctctttgacttgtatccatctttgcgccgtgttcccgactgcatggtgcctcttcgtaagagtgcaaaagttattcaagagacagaaagtcgcttctatctcaaacattggagtgccgcaaagaacaagatcgagagcggagacgctaagccatgcatcgcgaagcaagtgctcaaggcgcaggagacacacggctttgcggatgagctcacgagcgccatatgtggtgatctcatccaagccggctcggacacaactgcaaatgagatcacggcttttattcaagccatggtcttgtttcctgctgtacaaaaaagggcaagggaagacatcgatcgcctttgcggtgaccgacttcccacaatgggagacgcgaagtcgctgccgtatatccgcgcatgcgtcaaggaaacactccggtggatgccaacggcacttcttggaataccacatgcagtactacaagacgatgagtacatgggatacaagatacccaaggacgcaatcgtcatgatgaatacttgggcaattcatatgga

SEQ ID NO: 19466 - DNA, 1179 bp, Muscodor strobelii
  misc_feature: SGI cDNA ID NO. 566547
  misc_feature: Elevated expression when VOC is produced
  misc_feature: Encodes the peptide sequence at SEQ ID NO 19467
atgtcggcctatgccgagtatactcctgagtttgaagggctcacgggcgcagagattcaggcccgcgctgatgcccatgctttcatgcaacctacgggcgcgggaattgcagtacaggcaattatttacacgtttggcattctcgcaaccatcatcttcagcctaagagtctacgtgcgattgaagctgctcgaagcaggacaacgctggggtatcgatgactggctggccgtcgcgggatttggcccttatttgccagcatgcgtcctcgggattgtaggcacgtactatggcataggcgcacctgatgccgctatcgatcctttcatcaagattaaggcaaaggaataccagttgatttatgagcttatttacttcggctcaactacattgaccaaggtctccatcgtcttcactatcatgagaatctgcaagagaaattactacaaatacatcatgtacggtgttcttgcaaccatcggaataagctcgacagcagccttggtattcttattcgtcgactgtaaaccgttcccagttcgatggaatccggctcttggcagttgttcagtcacgcctcccattggctggttcgtgactagttatgttggaacaagtatccaggtcgccacggatatcatcgttgcttcaatgccatacttcatcatcaaagatctccaaatgaacagacgtaagaaaatatcggttatcgcgatccttggcctcggagcgacagccagtttattcgccattctgcgcatatcatcatatccgaagactgatgagagatatcatccccataatatcctcgaggccgaggcacttctggtgatctattcgcatcttgagggtagttttgctatcataggatgcaatctaccgccacttcggaaactcttcgcccgcttctatcgcggatcatatggcgattccagattcaaatctggcaacgcgctgtctggtgacggtcgcgggacgcagcttagctctttgaacctccaaggcaagacaaaaaccacagtcactactagcaaatcgtgggctagactctcggacgatgacgacgattcgactcgccacatcataagggagacggaaattagaatagaaacaagcaataagagtacggaccaattaggtcatacgggattaaatggacatccccaaggcatggtgtaa

SEQ ID NO: 19467 - protein, 392 aa, Muscodor strobelii
  misc_feature: SGI Peptide ID NO. 566547
  misc_feature (10)..(382): NCBI GI: 46120436 Blast Desc: FG04865.1 [Gibberella zeae PH-1]
  misc_feature (16)..(321): NCBI GI: 256720265 Blast Desc: NECHADRAFT_56199 [Nectria haematococca mpVI 77-13-4]
  misc_feature (14)..(373): NCBI GI: 46114700 Blast Desc: FG03192.1 [Gibberella zeae PH-1]
  misc_feature (45)..(304): NCBI GI: 256726457 Blast Desc: NECHADRAFT_5404 [Nectria haematococca mpVI 77-13-4]
  misc_feature (29)..(392): NCBI GI: 256726131 Blast Desc: NECHADRAFT_81725 [Nectria haematococca mpVI 77-13-4]
  misc_feature (29)..(384): NCBI GI: 256732365 Blast Desc: NECHADRAFT_41488 [Nectria haematococca mpVI 77-13-4]
  misc_feature (48)..(364): NCBI GI: 238507465 Blast Desc: conserved [Aspergillus flavus NRRL3357] gi|220689647|gb|EED45998.1| conserved [Aspergillus flavus NRRL3357]
  misc_feature (47)..(366): NCBI GI: 255946237 Blast Desc: Pc20g14080 [Penicillium chrysogenum Wisconsin 54-1255] gi|211588621|emb|CAP86737.1| Pc20g14080 [Penicillium chrysogenum Wisconsin 54-1255]
  misc_feature (29)..(376): NCBI GI: 46115492 Blast Desc: FG03588.1 [Gibberella zeae PH-1]
  misc_feature (29)..(366): NCBI GI: 256727562 Blast Desc: NECHADRAFT_76517 [Nectria haematococca mpVI 77-13-4]
  misc_feature: Useful for introducing or modulating the production of volatile compounds
MSAYAEYTPEFEGLTGAEIQARADAHAFMQPTGAGIAVQAIIYTFGILATIIFSLRVYVRLKLLEAGQRWGIDDWLAVAGFGPYLPACVLGIVGTYYGIGAPDAAIDPFIKIKAKEYQLIYELIYFGSTTLTKVSIVFTIMRICKRNYYKYIMYGVLATIGISSTAALVFLFVDCKPFPVRWNPALGSCSVTPPIGWFVTSYVGTSIQVATDIIVASMPYFIIKDLQMNRRKKISVIAILGLGATASLFAILRISSYPKTDERYHPHNILEAEALLVIYSHLEGSFAIIGCNLPPLRKLFARFYRGSYGDSRFKSGNALSGDGRGTQLSSLNLQGKTKTTVTTSKSWARLSDDDDDSTRHIIRETEIRIETSNKSTDQLGHTGLNGHPQGMV

SEQ ID NO: 19468 - DNA, 3567 bp, Muscodor strobelii
  misc_feature: SGI EST ID NO. CUFF.45503.0
  misc_feature: Variant of the nucleotide sequence at SEQ ID NO 19466
ttacattgcgccgcacccggccgcctagctttcgccagccatctcggcgagcgagacgttctagagcattgcgcagcttcttaggatccaacacttcgtcgtagacacttagattgtatagaacaattcgtctgaagaagaatgtgtcgtcgaaaaagtgaacaggacagacatcgtcgctctcgacgcgctttggcgtctttggcccaaatattgacatggcgggctttgctgcggtgcaactgggttggggtagtaggccgaggagtgagacagataggtacaatgcaatgcatagagagtttccacgatgatactttccgtgcccaacctattctttattatactaagatactaaatcagcggtgactggtggcaagttgatcagcgcacctgccatgtgctattgaggggcgatacaagggcatttcgttcaaaggtaatccaattgacatggaaacaatcccaagcgacacatgcgcatcgccatatcgtgccatatcccaatcttcccccccgaccctgtctcgcttgtccacatgtcgagcacatgcttctgcacatggtccaggccaacggttcatcagcggatatggtgcaatttgacgcatgcaaggggccggcggaggggcttctcgaatggccagagaaaaggggctggcgggggcgacaggggacagaaatgtcaaaaaccaacagcctgtcgtatgcgacgtatgttaccaactctagtcatcgaattactgtcgatatctttgacagtactgcgagcacggcgaatatctatccaattgttccaagcgaacccggtctatttctgatgcacattgaattgataacggttctcgtagagtgtttattctacgaaagcagcggctgaaaaccgttgcataccaatgcgtgtgggcatagccgttggcaacggactagacagggatcttctccatcgccttggcaccggcgacaatctcgctgtcttttgccgctcatgaagcaggtccgagcgaggaccaggtatctgcccatctattccgtaacaaggaaagatactgatgatcgcgtttagctcgcagagtctggcagagattgttgatatgcatagtcgactgttggccatttcacagtcgatcgtgcaggggtctcccctccagtccgcatgtcaatcgttaagagcagtcacgctgtagagagaatgatcgtgatatatcgaatggaattgatgtatataagaaatctttcttaacattatcagacgaggaacttcaacagcatctcaccaaaaaaagtctgcaagctttgcaaaatgcgccattcacaggctaaggtcaactaacatcctacgagcaagggatctcagtttcgatacaagcgagacaggtccctgccgggaccccggaccagttcggcacgggcattggtgacaggaacatgctcgacggggcccatgcgtggatggacctttcaatgccttgtcgaaccactgaagtgataagaagcgggttcgccgctatgtgtacttgaattgttcttggcttttccggatgggagacgaagggagggcgtgagagaaaaccattactctctcttatcaactcggagtagaaactgccagttgcaattcacaatcacaatgtcggcctatgccgagtatactcctgagtttgaagggctcacgggcgcagagattcaggcccgcgctgatgcccatgctttcatgcaacctacgggcgcgggaattgcagtacaggcaattatttacacgtttggcattctcgcaaccatcatcttcagcctaagagtctacgtgcgattgaagctgctcgaagcaggacaacgctggggtatcgatgactggctggccgtcgcgggatttggcccttatttgccagcatgcgtcctcgggattgtaggcacgtactatggcataggcgcacctgatgccgctatcgatcctttcatcaagattaaggcaaaggaataccagttgatttatgagcttatttacttcggctcaactacattgaccaaggtctccatcgtcttcactatcatgagaatctgcaagagaaattactacaaatacatcatgtacggtgttcttgcaaccatcggaataagctcgacagcagccttggtattcttattcgtcgactgtaaaccgttcccagttcgatggaatccggctcttggcagttgttcagtcacgcctcccattggctggttcgtgactagttatgttggaacaagtatccaggtcgccacggatatcatcgttgcttcaatgccatacttcatcatcaaagatctccaaatgaacagacgtaagaaaatatcggttatcgcgatccttggcctcggagcgacagccagtttattcgccattctgcgcatatcatcatatccgaagactgatgagagatatcatccccataatatcctcgaggccgaggcacttctggtgatctattcgcatcttgagggtagttttgctatcataggatgcaatctaccgccacttcggaaactcttcgcccgcttctatcgcggatcatatggcgattccagattcaaatctggcaacgcgctgtctggtgacggtcgcgggacgcagcttagctctttgaacctccaaggcaagacaaaaaccacagtcactactagcaaatcgtgggctagactctcggacgatgacgacgattcgactcgccacatcataagggagacggaaattagaatagaaacaagcaataagagtacggaccaattaggtcatacgggattaaatggacatccccaaggcatggtgtaactggctgcagtctcggacactcgtttttggtttcgtcgaaagacataaaaagtccgtttctttcttgggcatggcaacaaaattagattacgaacttgtatagtaaaactacaccttaatattgacgcattggctattggcacactgccgttccctcattttgccagttagatccgtactctgcgccgcaccatattgtagcctacactacacgcaattccgcctggagaatgtagatattacggggatagaaagaacatattggaacagagagtgactgaatcacacttacaggaagtaatgcgaaccaaagcggcgagaaatcattatactgtctggaataacatacgctcgcgggagctgtcgctaaattcattctataacacatgatcatgtcaactataatacaatggtatcaacgctttcagatctctcaagcatcttcaaattgcacattacggggaattatcctccactgtttatcatctcgatctagcgcatcttgcgccaggtcccactcagtgcgaaccaccctggcgtgcatgtcgcttcggggcgtaattcgcactgggaaggaccgcggacaactggcgataccgcttgttagcttgtcaggatcgggcacaatatcacgaccctcagaatccttttcattggtgatgttgaaggcccataaaatccggacaatgcttagatataacccgttttcagccacatcgataccgggacacagacgtcgcccagagccgaagctgaag

SEQ ID NO: 19469 - DNA, 1200 bp, Muscodor strobelii
  misc_feature: SGI cDNA ID NO. 566548
  misc_feature: Encodes the peptide sequence at SEQ ID NO 19470
atgtcggcctatgccgagtatactcctgagtttgaagggctcacgggcgcagagattcaggcccgcgctgatgcccatgctttcatgcaacctacgggcgcgggaattgcagtacaggcaattatttacacgtttggcattctcgcaaccatcatcttcagcctaagagtctacgtgcgattgaagctgctcgaagcaggacaacgctggggtatcgatgactggctggccgtcgcgggatttggcccttatttgccagcatgcgtcctcgggattgtaggcacgtactatggcataggcgcacctgatgccgctatcgatcctttcatcaagattaaggcaaaggaataccagttgatttatgagcttatttacttcggctcaactacattgaccaaggtctccatcgtcttcactatcatgagaatctgcaagagaaattactacaaatacatcatgtacggtgttctatatactaactacgatttagttgcaaccatcggaataagctcgacagcagccttggtattcttattcgtcgactgtaaaccgttcccagttcgatggaatccggctcttggcagttgttcagtcacgcctcccattggctggttcgtgactagttatgttggaacaagtatccaggtcgccacggatatcatcgttgcttcaatgccatacttcatcatcaaagatctccaaatgaacagacgtaagaaaatatcggttatcgcgatccttggcctcggagcgacagccagtttattcgccattctgcgcatatcatcatatccgaagactgatgagagatatcatccccataatatcctcgaggccgaggcacttctggtgatctattcgcatcttgagggtagttttgctatcataggatgcaatctaccgccacttcggaaactcttcgcccgcttctatcgcggatcatatggcgattccagattcaaatctggcaacgcgctgtctggtgacggtcgcgggacgcagcttagctctttgaacctccaaggcaagacaaaaaccacagtcactactagcaaatcgtgggctagactctcggacgatgacgacgattcgactcgccacatcataagggagacggaaattagaatagaaacaagcaataagagtacggaccaattaggtcatacgggattaaatggacatccccaaggcatggtgtaa

SEQ ID NO: 19470 - protein, 399 aa, Muscodor strobelii
  misc_feature: SGI Peptide ID NO. 566548
  misc_feature (10)..(389): NCBI GI: 46120436 Blast Desc: FG04865.1 [Gibberella zeae PH-1]
  misc_feature (16)..(328): NCBI GI: 256720265 Blast Desc: NECHADRAFT_56199 [Nectria haematococca mpVI 77-13-4]
  misc_feature (14)..(380): NCBI GI: 46114700 Blast Desc: FG03192.1 [Gibberella zeae PH-1]
  misc_feature (45)..(311): NCBI GI: 256726457 Blast Desc: NECHADRAFT_5404 [Nectria haematococca mpVI 77-13-4]
  misc_feature (29)..(399): NCBI GI: 256726131 Blast Desc: NECHADRAFT_81725 [Nectria haematococca mpVI 77-13-4]
  misc_feature (29)..(391): NCBI GI: 256732365 Blast Desc: NECHADRAFT_41488 [Nectria haematococca mpVI 77-13-4]
  misc_feature (48)..(371): NCBI GI: 238507465 Blast Desc: conserved [Aspergillus flavus NRRL3357] gi|220689647|gb|EED45998.1| conserved [Aspergillus flavus NRRL3357]
  misc_feature (47)..(373): NCBI GI: 255946237 Blast Desc: Pc20g14080 [Penicillium chrysogenum Wisconsin 54-1255] gi|211588621|emb|CAP86737.1| Pc20g14080 [Penicillium chrysogenum Wisconsin 54-1255]
  misc_feature (29)..(383): NCBI GI: 46115492 Blast Desc: FG03588.1 [Gibberella zeae PH-1]
  misc_feature (29)..(373): NCBI GI: 256727562 Blast Desc: NECHADRAFT_76517 [Nectria haematococca mpVI 77-13-4]
MSAYAEYTPEFEGLTGAEIQARADAHAFMQPTGAGIAVQAIIYTFGILATIIFSLRVYVRLKLLEAGQRWGIDDWLAVAGFGPYLPACVLGIVGTYYGIGAPDAAIDPFIKIKAKEYQLIYELIYFGSTTLTKVSIVFTIMRICKRNYYKYIMYGVLYTNYDLVATIGISSTAALVFLFVDCKPFPVRWNPALGSCSVTPPIGWFVTSYVGTSIQVATDIIVASMPYFIIKDLQMNRRKKISVIAILGLGATASLFAILRISSYPKTDERYHPHNILEAEALLVIYSHLEGSFAIIGCNLPPLRKLFARFYRGSYGDSRFKSGNALSGDGRGTQLSSLNLQGKTKTTVTTSKSWARLSDDDDDSTRHIIRETEIRIETSNKSTDQLGHTGLNGHPQGMV

SEQ ID NO: 19471 - DNA, 3567 bp, Muscodor strobelii; identical to SEQ ID NO: 19468
  misc_feature: SGI EST ID NO. CUFF.45503.0
  misc_feature: Variant of the nucleotide sequence at SEQ ID NO 19469

SEQ ID NO: 19472 - DNA, 1446 bp, Muscodor strobelii
  misc_feature: SGI cDNA ID NO. 566549
  misc_feature: Encodes the peptide sequence at SEQ ID NO 19473
atgtcaatatttgggccaaagacgccaaagcgcgtcgagagcgacgatgtctgtcctgttcactttttcgacgacacattcttcttcagacgaattgttctatacaatctaagtgtctacgacgaagtgttggatcctaagaagctgcgcaatgctctagaacgtctcgctcgccgagatggctggcgaaagctaggcggccgggtgcggcgcaataataaaggaggcttagagcttcacgttcctacggtattctcggaagaccgtcaggcgattgctttcactcacgtgtcgcacgacatggcaaaagccgaccacccactggcttcccgtctgcctaagcctgtgcgagaccaaccagccatcgttggcgacccggatgattatttggagctcgcccgtgggccggggtgtccctccggcatcaacgactacctctacacagatcgtcctatattcgggcttcacatagtttccttcaaggatgcgacacttgtgtccctacactggttgcatattgcctctgatacactgggcaacaaggacatcatggacaattgggttttgtcgcttcaaggccgtgatgacgatatcaagcccctcgtcgggttcgagtacgatccgctagcagagcttggcaaacacccgacagaaccccataagctagcagacaagcggatgaccacaggtacaatggtttcgtgggggctgaagaacataggcgatttggctatacgtgctaaggagaaccgcatggtctgcattccttccaaattcaccaagaagctgcacgctacagcgctgaaagatctggccgccaacggcgatccaaaccccttcctcaccgaaaatgatgtactcacggcgttctggacgcggttagcactctgccacttgcccgaagactcggataagcccataacgctcaacatagccgctgctctgcgtcgtacgctagagaaggacctgatgcccccaggtaacgcatatatatctaactgcattggattcgtcaatgtgttaatgagcgcttccgatgtgctttcgcgtcccctgagttacacggccgcggcaatccgaaaggcgcttaacgagcagcgaacacgggcacaggttgaggcttacgccgcgatccaacgagagctgacaacgacaggcccgatacctgtgttcttcggcgaggcagcgacccatcaaatcagctattctaattggaccatgtcggacctgtttggcaaagacttctcggctgcgcgtgtcactccccgcaccggaccctgccttccctcctacatcaatcacagccaaatgccttaccagtttggcgagggcttcctcttcatgggtaaggacagcatggataactattggatctgcgggtatcgtgccaagggtaactgggcacattgggaaaagggacttcgagaatggagtgactttgcgtaa

SEQ ID NO: 19473 - protein, 481 aa, Muscodor strobelii
  misc_feature: SGI Peptide ID NO. 566549
  misc_feature (1)..(479): NCBI GI: 46120438 Blast Desc: FG04866.1 [Gibberella zeae PH-1]
  misc_feature (9)..(475): NCBI GI: 256728735 Blast Desc: NECHADRAFT_50656 [Nectria haematococca mpVI 77-13-4]
  misc_feature (9)..(478): NCBI GI: 119499624 Blast Desc: NFIA_101560 [Neosartorya fischeri NRRL 181] gi|119414734|gb|EAW24672.1| conserved [Neosartorya fischeri NRRL 181]
  misc_feature (12)..(418): NCBI GI: 256726591 Blast Desc: NECHADRAFT_93122 [Nectria haematococca mpVI 77-13-4]
  misc_feature (1)..(475): NCBI GI: 212529410 Blast Desc: conserved [Penicillium marneffei ATCC 18224] gi|210074260|gb|EEA28347.1| conserved [Penicillium marneffei ATCC 18224]
  misc_feature (12)..(474): NCBI GI: 256730272 Blast Desc: NECHADRAFT_94949 [Nectria haematococca mpVI 77-13-4]
  misc_feature (3)..(476): NCBI GI: 67904636 Blast Desc: AN9305.2 [Aspergillus nidulans FGSC A4] gi|40747216|gb|EAA66372.1| AN9305.2 [Aspergillus nidulans FGSC A4] gi|259488140|tpe|CBF87369.1| TPA: LysR family regulatory FGSC
  misc_feature (3)..(467): NCBI GI: 171688922 Blast Desc: protein product [Podospora anserina] gi|170944423|emb|CAP70534.1| protein product [Podospora anserina]
  misc_feature (6)..(476): NCBI GI: 255950836 Blast Desc: Pc22g22910 [Penicillium chrysogenum Wisconsin 54-1255] gi|211593202|emb|CAP99579.1| Pc22g22910 [Penicillium chrysogenum Wisconsin 54-1255]
  misc_feature (9)..(479): NCBI GI: 119490150 Blast Desc: LysR family regulatory protein, [Neosartorya fischeri NRRL 181] gi|119411148|gb|EAW21091.1| LysR family regulatory protein, [Neosartorya fischeri NRRL 181]
MSIFGPKTPKRVESDDVCPVHFFDDTFFFRRIVLYNLSVYDEVLDPKKLRNALERLARRDGWRKLGGRVRRNNKGGLELHVPTVFSEDRQAIAFTHVSHDMAKADHPLASRLPKPVRDQPAIVGDPDDYLELARGPGCPSGINDYLYTDRPIFGLHIVSFKDATLVSLHWLHIASDTLGNKDIMDNWVLSLQGRDDDIKPLVGFEYDPLAELGKHPTEPHKLADKRMTTGTMVSWGLKNIGDLAIRAKENRMVCIPSKFTKKLHATALKDLAANGDPNPFLTENDVLTAFWTRLALCHLPEDSDKPITLNIAAALRRTLEKDLMPPGNAYISNCIGFVNVLMSASDVLSRPLSYTAAAIRKALNEQRTRAQVEAYAAIQRELTTTGPIPVFFGEAATHQISYSNWTMSDLFGKDFSAARVTPRTGPCLPSYINHSQMPYQFGEGFLFMGKDSMDNYWICGYRAKGNWAHWEKGLREWSDFA

SEQ ID NO: 19474 - DNA, 3393 bp, Muscodor strobelii
  misc_feature: SGI EST ID NO. CUFF.45502.2
  misc_feature: Variant of the nucleotide sequence at SEQ ID NO 19472
ccgcgacggccagccagtcatcgataccccagcgttgtcctgcttcgagcagcttcaatcgcacgtagactcttaggctgaagatgatggttgcgagaatgccaaacgtgtaaataattgcctgtactgcaattcccgcgcccgtaggttgcatgaaagcatgggcatcagcgcgggcctgaatctctgcgcccgtgagcccttcaaactcaggagtatactcggcataggccgacattgtgattgtgaattgcaactggcagtttctactccgagttgataagagagagtaatggttttctctcacgccctcccttcgtctcccatccggaaaagccaagaacaattcaagtacacatagcggcgaacccgcttcttatcacttcagtggttcgacaaggcattgaaaggtccatccacgcatgggccccgtcgagcatgttcctgtcaccaatgcccgtgccgaactggtccggggtcccggcagggacctgtctcgcttgtatcgaaactgagatcccttgctcgtaggatgttagttgaccttagcctgtgaatggcgcattttgcaaagcttgcagactttttttggtgagatgctgttgaagttcctcgtctgataatgttaagaaagatttcttatatacatcaattccattcgatatatcacgatcattctctctacagcgtgactgctcttaacgattgacatgcggactggaggggagacccctgcacgatcgactgtgaaatggccaacagtcgactatgcatatcaacaatctctgccagactctgcgagctaaacgcgatcatcagtatctttccttgttacggaatagatgggcagatacctggtcctcgctcggacctgcttcatgagcggcaaaagacagcgagattgtcgccggtgccaaggcgatggagaagatccctgtctagtccgttgccaacggctatgcccacacgcattggtatgcaacggttttcagccgctgctttcgtagaataaacactctacgagaaccgttatcaattcaatgtgcatcagaaatagaccgggttcgcttggaacaattggatagatattcgccgtgctcgcagtactgtcaaagatatcgacagtaattcgatgactagagttggtaacatacgtcgcatacgacaggctgttggtttttgacatttctgtcccctgtcgcccccgccagccccttttctctggccattcgagaagcccctccgccggccccttgcatgcgtcaaattgcaccatatccgctgatgaaccgttggcctggaccatgtgcagaagcatgtgctcgacatgtggacaagcgagacagggtcgggggggaagattgggatatggcacgatatggcgatgcgcatgtgtcgcttgggattgtttccatgtcaattggattacctttgaacgaaatgcccttgtatcgcccctcaatagcacatggcaggtgcgctgatcaacttgccaccagtcaccgctgatttagtatcttagtataataaagaataggttgggcacggaaagtatcatcgtggaaactctctatgcattgcattgtacctatctgtctcactcctcggcctactaccccaacccagttgcaccgcagcaaagcccgccatgtcaatatttgggccaaagacgccaaagcgcgtcgagagcgacgatgtctgtcctgttcactttttcgacgacacattcttcttcagacgaattgttctatacaatctaagtgtctacgacgaagtgttggatcctaagaagctgcgcaatgctctagaacgtctcgctcgccgagatggctggcgaaagctaggcggccgggtgcggcgcaataataaaggaggcttagagcttcacgttcctacggtattctcggaagaccgtcaggcgattgctttcactcacgtgtcgcacgacatggcaaaagccgaccacccactggcttcccgtctgcctaagcctgtgcgagaccaaccagccatcgttggcgacccggatgattatttggagctcgcccgtgggccggggtgtccctccggcatcaacgactacctctacacagatcgtcctatattcgggcttcacatagtttccttcaaggatgcgacacttgtgtccctacactggttgcatattgcctctgatacactgggcaacaaggacatcatggacaattgggttttgtcgcttcaaggccgtgatgacgatatcaagcccctcgtcgggttcgagtacgatccgctagcagagcttggcaaacacccgacagaaccccataagctagcagacaagcggatgaccacaggtacaatggtttcgtgggggctgaagaacataggcgatttggctatacgtgctaaggagaaccgcatggtctgcattccttccaaattcaccaagaagctgcacgctacagcgctgaaagatctggccgccaacggcgatccaaaccccttcctcaccgaaaatgatgtactcacggcgttctggacgcggttagcactctgccacttgcccgaagactcggataagcccataacgctcaacatagccgctgctctgcgtcgtacgctagagaaggacctgatgcccccaggtaacgcatatatatctaactgcattggattcgtcaatgtgttaatgagcgcttccgatgtgctttcgcgtcccctgagttacacggccgcggcaatccgaaaggcgcttaacgagcagcgaacacgggcacaggttgaggcttacgccgcgatccaacgagagctgacaacgacaggcccgatacctgtgttcttcggcgaggcagcgacccatcaaatcagctattctaattggaccatgtcggacctgtttggcaaagacttctcggctgcgcgtgtcactccccgcaccggaccctgccttccctcctacatcaatcacagccaaatgccttaccagtttggcgagggcttcctcttcatgggtaaggacagcatggataactattggatctgcgggtatcgtgccaagggtaactgggcacattgggaaaagggacttcgagaatggagtgactttgcgtaaccgttatagaaagtcggtatctgttggatttaatgggcgcgaggtagactcactgggatgtcgacagacaatgagatcaacatacgctcagtcgccagtactagataatagagcttaaatagagtattttagaggaattaataccgggcttcatgctgaagaagatgacgcgtcactaatttgtgtttattctagcatggtcagaatgcgacatctgaacaaccaagcagagacccaaaagtattaactctcgcctcctccgcccctgaagtatacttcagcaatgcctacattcaaaa

SEQ ID NO: 19475 - DNA, 870 bp, Muscodor strobelii
  misc_feature: SGI cDNA ID NO. 566550
  misc_feature: Elevated expression when VOC is produced
  misc_feature: Encodes the peptide sequence at SEQ ID NO 19476
atggcatctaaatcggtcggcacagactactcagagccggagtatgcaaaggcacaagatcgagcgaaagtaccatattattctgtcgatatttcaagccgtctagttccggaaacccaaaagctgctggagaattatagccacgtatccaaagatgaacaaatagaacatatacacctcatccgcgataaagcttgggacatccgtgcttatccgtgcataggcctcgggtcttggttgaccccgcaactatgtcggctacctgtttacggggacattgtacgacgagtgaaagaaggtgcgactttgatggatgtaggaacattcattggtcatgatcttcgccggcttgctttcgatggcgcaccatcggatagactatacggcgttgatatagttaatcacttcgatgtcggctatgccttctttcgggatcgcgatcacttcaagggtcagttcatcgaagccgacatcttgtcatcggctcctaaactcatgagcatcagaggccaagtcgacatcattgtcatctcgcaggtcctacatcagtgggactgggagcatcaagtcaaagcagtagaaacattggtcgcatttactaagccgggatcgtccattgttggaaatcagatcggtaataaaaaagcccaggctatcaatttgaaggctctcacatcggtcagcgtgtggcgacataaccaggagagcttcgcaacacttttcgaagaagtaggcaacaagacaggctccaagtggaaaacgcaagcttggctgcgatcatttccagaaatgggctgggatgagaaagatgctgcatggatggagcctgaagtatgcgtgatcgagttcgtggccgatcgcgtggaatga

SEQ ID NO: 19476 - protein, 289 aa, Muscodor strobelii
  misc_feature: SGI Peptide ID NO. 566550
  misc_feature (1)..(289): NCBI GI: 154291843 Blast Desc: BC1G_14998 [Botryotinia fuckeliana B05.10] gi|150846606|gb|EDN21799.1| BC1G_14998 [Botryotinia fuckeliana B05.10]
  misc_feature (31)..(289): NCBI GI: 156034847 Blast Desc: SS1G_13359 [Sclerotinia sclerotiorum 1980] gi|154698762|gb|EDN98500.1| SS1G_13359 [Sclerotinia sclerotiorum 1980]
  misc_feature (1)..(289): NCBI GI: 242816296 Blast Desc: conserved [Talaromyces stipitatus ATCC 10500] gi|218715086|gb|EED14509.1| conserved [Talaromyces stipitatus ATCC 10500]
  misc_feature (38)..(288): NCBI GI: 169611624 Blast Desc: SNOG_08927 [Phaeosphaeria nodorum SN15] gi|160702331|gb|EAT84095.2| SNOG_08927 [Phaeosphaeria nodorum SN15]
  misc_feature (6)..(287): NCBI GI: 156056699 Blast Desc: SS1G_04080 [Sclerotinia sclerotiorum 1980] gi|154701866|gb|EDO01605.1| SS1G_04080 [Sclerotinia sclerotiorum 1980]
  misc_feature (26)..(289): NCBI GI: 238839094 Blast Desc: conserved [Microsporum canis CBS 113480]
  misc_feature (24)..(256): NCBI GI: 169615148 Blast Desc: SNOG_10728 [Phaeosphaeria nodorum SN15] gi|111061002|gb|EAT82122.1| SNOG_10728 [Phaeosphaeria nodorum SN15]
  misc_feature (20)..(288): NCBI GI: 238483841 Blast Desc: conserved [Aspergillus flavus NRRL3357] gi|220701209|gb|EED57547.1| conserved [Aspergillus flavus NRRL3357]
  misc_feature (18)..(289): NCBI GI: 169768198 Blast Desc: [Aspergillus oryzae RIB40] gi|83766427|dbj|BAE56567.1| protein product [Aspergillus oryzae]
  misc_feature (33)..(260): NCBI GI: 169596538 Blast Desc: SNOG_01034 [Phaeosphaeria nodorum SN15] gi|111071409|gb|EAT92529.1| SNOG_01034 [Phaeosphaeria nodorum SN15]
  misc_feature: Useful for introducing or modulating the production of volatile compounds
MASKSVGTDYSEPEYAKAQDRAKVPYYSVDISSRLVPETQKLLENYSHVSKDEQIEHIHLIRDKAWDIRAYPCIGLGSWLTPQLCRLPVYGDIVRRVKEGATLMDVGTFIGHDLRRLAFDGAPSDRLYGVDIVNHFDVGYAFFRDRDHFKGQFIEADILSSAPKLMSIRGQVDIIVISQVLHQWDWEHQVKAVETLVAFTKPGSSIVGNQIGNKKAQAINLKALTSVSVWRHNQESFATLFEEVGNKTGSKWKTQAWLRSFPEMGWDEKDAAWMEPEVCVIEFVADRVE

SEQ ID NO: 19477 - DNA, 1230 bp, Muscodor strobelii
  misc_feature: SGI EST ID NO. CUFF.45494.0
  misc_feature: Variant of the nucleotide sequence at SEQ ID NO 19475
tacgaattcaagtgttacaccgcagatggtaatcgtcttattgcctctcttcaaaacagttacattcaacatttgactcattgacttgattggtcattaattcgtcaacatggcatctaaatcggtcggcacagactactcagagccggagtatgcaaaggcacaagatcgagcgaaagtaccatattattctgtcgatatttcaagccgtctagttccggaaacccaaaagctgctggagaattatagccacgtatccaaagatgaacaaatagaacatatacacctcatccgcgataaagcttgggacatccgtgcttatccgtgcataggcctcgggtcttggttgaccccgcaactatgtcggctacctgtttacggggacattgtacgacgagtgaaagaaggtgcgactttgatggatgtaggaacattcattggtcatgatcttcgccggcttgctttcgatggcgcaccatcggatagactatacggcgttgatatagttaatcacttcgatgtcggctatgccttctttcgggatcgcgatcacttcaagggtcagttcatcgaagccgacatcttgtcatcggctcctaaactcatgagcatcagaggccaagtcgacatcattgtcatctcgcaggtcctacatcagtgggactgggagcatcaagtcaaagcagtagaaacattggtcgcatttactaagccgggatcgtccattgttggaaatcagatcggtaataaaaaagcccaggctatcaatttgaaggctctcacatcggtcagcgtgtggcgacataaccaggagagcttcgcaacacttttcgaagaagtaggcaacaagacaggctccaagtggaaaacgcaagcttggctgcgatcatttccagaaatgggctgggatgagaaagatgctgcatggatggagcctgaagtatgcgtgatcgagttcgtggccgatcgcgtggaatgattaatacattaccactcagtgagcacaattatgtaacgaagccaaacttatcggcgttgtttggcatacgtgagctttactttcgatagacatgtagctatcgtgttgtggttatcattaatcatgacgaacagcgggtatggctaagtcaatcgttccaccgtgacgccctagtataatttcagtcatgtgcgtggtatagagataatgagatggacgcaagcaagtgaagctctgatatttaatctaac

SEQ ID NO: 19478 - DNA, 825 bp, Muscodor strobelii
  misc_feature: SGI cDNA ID NO. 566551
  misc_feature: Elevated expression when VOC is produced
  misc_feature: Encodes the peptide sequence at SEQ ID NO 19479
atggcagaccttcgtcaatggtattctgcagacaagcagaacactcacggttcatccacagacatcgcccagcacgcctttgaagtagctgatctcaggttcacgagcagcaacggctatgacgagaataaatctaagccaatcttcacaactagtagtcttgaagacgtactggcagctgtctccaaagccatgaatggatatcaaacatcgaggaaacactccaaagcgcgtgcatgtctccaccggttctcgcaaagggttgctctttatggcaatattctcgatgtcttcgttcaacatcatccggagtatgtgtcccttgcgtggggtgcgatgaagtttcttttcatgggagtaatcaaccacgaaaacacagttgcgaccttagcagaagctttatctgacatagcagatgtactcccaaaagcacatttatcggcttttttgtatccgacagtatacatgaatacagcagttgccgagttgtacgaatgcatcatggaatttctggttagagctcgagattggtatgaagaagggactctaaagcatgtcattcatagtatcacccgaccggtcgaacttaaatacgcagacttacttaagcgaattagtcgatgttctcaaaaaattcaagacttagcctcgttgggtcagcatgcagaagtaagagatctgcatggtggtgtgaaccgcaaactagatctcatgaattccggtcttcaagagagatttaatcaagtggaagcaactttggaagaggtgaaaaacgcattgacacgtaagaaacaagccccgatagttgttcagagcttctgctaa

SEQ ID NO: 19479 - protein, 274 aa, Muscodor strobelii
  misc_feature: SGI Peptide ID NO. 566551
  misc_feature (9)..(227): NCBI GI: 145609736 Blast Desc: MGG_03034 [Magnaporthe grisea 70-15] gi|145017126|gb|EDK01489.1| MGG_03034 [Magnaporthe grisea 70-15]
  misc_feature (22)..(225): NCBI GI: 256726536 Blast Desc: NECHADRAFT_39343 [Nectria haematococca mpVI 77-13-4]
  misc_feature (19)..(227): NCBI GI: 149210699 Blast Desc: MGCH7_ch7g822 [Magnaporthe grisea 70-15] gi|86196777|gb|EAQ71415.1| MGCH7_ch7g822 [Magnaporthe grisea 70-15]
  misc_feature (95)..(242): NCBI GI: 171685450 Blast Desc: protein product [Podospora anserina] gi|170942686|emb|CAP68339.1| protein product [Podospora anserina]
  misc_feature (52)..(227): NCBI GI: 169604254 Blast Desc: SNOG_05138 [Phaeosphaeria nodorum SN15] gi|160706528|gb|EAT87529.2| SNOG_05138 [Phaeosphaeria nodorum SN15]
  misc_feature (91)..(227): NCBI GI: 189205346 Blast Desc: conserved [Pyrenophora tritici-repentis Pt-1C-BFP] gi|187986107|gb|EDU51595.1| conserved [Pyrenophora tritici-repentis Pt-1C-BFP]
  misc_feature (134)..(232): NCBI GI: 46105202 Blast Desc: FG00229.1 [Gibberella zeae PH-1]
  misc_feature (120)..(235): NCBI GI: 116204351 Blast Desc: CHGG_10059 [Chaetomium globosum CBS 148.51] gi|88176187|gb|EAQ83655.1| CHGG_10059 [Chaetomium globosum CBS 148.51]
  misc_feature (27)..(118): NCBI GI: 169619756 Blast Desc: SNOG_13076 [Phaeosphaeria nodorum SN15] gi|160703897|gb|EAT79403.2| SNOG_13076 [Phaeosphaeria nodorum SN15]
  misc_feature (167)..(264): NCBI GI: 169615525 Blast Desc: SNOG_10920 [Phaeosphaeria nodorum SN15] gi|160702980|gb|EAT81419.2| SNOG_10920 [Phaeosphaeria nodorum SN15]
  misc_feature: Useful for introducing or modulating the production of volatile compounds
MADLRQWYSADKQNTHGSSTDIAQHAFEVADLRFTSSNGYDENKSKPIFTTSSLEDVLAAVSKAMNGYQTSRKHSKARACLHRFSQRVALYGNILDVFVQHHPEYVSLAWGAMKFLFMGVINHENTVATLAEALSDIADVLPKAHLSAFLYPTVYMNTAVAELYECIMEFLVRARDWYEEGTLKHVIHSITRPVELKYADLLKRISRCSQKIQDLASLGQHAEVRDLHGGVNRKLDLMNSGLQERFNQVEATLEEVKNALTRKKQAPIVVQSFC

SEQ ID NO: 19480 - DNA, 3011 bp, Muscodor strobelii
  misc_feature: SGI EST ID NO. CUFF.45500.1
  misc_feature: Variant of the nucleotide sequence at SEQ ID NO 19478
aaggcaatgaggggtattcgggtcctagccataagaccatgcatgcagtcagcacatgggtgcaattgagcagtgccgcagggcgtatttgggtcttagtattcttccacatgcaggcaactgagctgcgcctcgatcgcttgatcgtcaccgttactcacaacaaatagagacggctatctcaacctttgactagcaacgatcaatcttcgatgtgcattaatgcatcgaggcgatgtcatcgggaggacacaattgcttctgttcgtcatggcagaccttcgtcaatggtattctgcagacaagcagaacactcacggttcatccacagacatcgcccagcacgcctttgaagtagctgatctcaggttcacgagcagcaacggctatgacgagaataaatctaagccaatcttcacaactagtagtcttgaagacgtactggcagctgtctccaaagccatgaatggatatcaaacatcgaggaaacactccaaagcgcgtgcatgtctccaccggttctcgcaaagggttgctctttatggcaatattctcgatgtcttcgttcaacatcatccggagtatgtgtcccttgcgtggggtgcgatgaagtttcttttcatgggagtaatcaaccacgaaaacacagttgcgaccttagcagaagctttatctgacatagcagatgtactcccaaaagcacatttatcggcttttttgtatccgacagtatacatgaatacagcagttgccgagttgtacgaatgcatcatggaatttctggttagagctcgagattggtatgaagaagggactctaaagcatgtcattcatagtatcacccgaccggtcgaacttaaatacgcagacttacttaagcgaattagtcgatgttctcaaaaaattcaagacttagcctcgttgggtcagcatgcagaagtaagagatctgcatggtggtgtgaaccgcaaactagatctcatgaattccggtcttcaagagagatttaatcaagtggaagcaactttggaagaggtgaaaaacgcattgacactacaatcggccgctatgatcaacacaaattatctcttgaccgacatccagttttcacagatcatgacatctatcgatggtctaccgctgtgggaccctgtcaaaacaatacagtatcatcggtccctgagagatagaagagcgcataattcacatcagaatctttcccctcgattttgggattcaccaaagcttagaaattggttccagtctacggagtctggagtgttgatgttaacggggaacgttcagtcaagattttgtttgcgaaacctttgcattgacctcatagaacatcttacttcgtcaggaatacccattttatttgctttgaaagctggtcaagacctatcagagaccgcagcatcgaacatgacatcctctgtagacatcctaaaatacttgctccgccaagcaatccagcaaacacaaggaaaacaaaccgaaaaatctatgtcaataagttgcgcgcgcattcatagtgcaaggactggacaagagtggtttcaaaacctggcagcagcgctctccgcctttgaacaacaaatttatctcatcatagatctcgaaatattagaccaggagataggagaccacgcagggttcccttggttagcttctttccaagttttgttcgaaagtctcgtccgacgttgtgccacgactcgcgtcaaagccctgttgattagttatgggcatggaatgccattccagttatcggcggacgatcatgccacgtttacggtgcaggcacgaactgaagtggtaaccgtccgacagcgaaaattaaggcgacatgtaccacaaagcggcatcccaagccatctgaaagcccacttggtttaagaactcagaaatagtgggttgtaggatgtcatgactgaatacaacactttaccgcaccggtgacatctctgttgcacagcattcatgatgtcaccaatgtcatcatcttctgagtgcgatgattgagcggaaacagcaagttgtcaaaaccgaaagtcactgtccttcttttcgttctaactgcttcatcgtttccccatctttcgacatgtcgactctcacggaagtgagactggaagtcgtagaagcttacgaaaatgctgtagacgctcatgtggggagaattataatgggataactctaagtatcttccggataaatcggcgagtaacacgtgtgtatatatatacaacgcaacccctgtatcatgctgccaggagcgtgccgcattacctcaggtggtattccgaataagcggaccactttgtgacctcaagccctggtgatcactatacaggcaacgtctgcttttgttcgatatgacatatcatcgccctcggtcgtacatgctatcgacaggtcaaactctgtctcgaggaaatacccgaatgccgatttggcccttcagttattatgtgcgtggatatagagtcacacaaagtctggaaggagcatgtcaacgcagtttgaataggcttgattgcgtgtcgtgattttggcagccactgcggacgccagattctcccattgcgacgactgttgctggccgctggctgatgttgccaagtccttcagcatgaacctagacagtccgcggtatgtgctcagtattcagcgatcctgagcaaggacaggtgtttgcagatgcgcgcaatcgatgccacagctcgtcataatagagttgtataccagtttaggatcttttcctatatttattggtaagggaccttgcctggagatctgcatggaattgaggacaaagccatttggcatggctcgttgagtctcacaaagtcagtgatacaacgggcaagatagtttcgaccacaggagtcccattgatcgcctactacactagtgccaatcttgctttcacacaagatggtgattttcttcgtgatttcttcgcaaatccggcgaacgataccgttgcgctttcgactgaatgtaag

SEQ ID NO: 19481 - DNA, 3648 bp, Muscodor strobelii
  misc_feature: SGI cDNA ID NO. 566552
  misc_feature: Encodes the peptide sequence at SEQ ID NO 19482
atgctcgctcctgttagacagggactcgctgcatcattatcgtcctccgacacagattccgacagtgaggataactccgattccgattctactcattcaagcgaccgctcagcgaagcaagtcaatgatttcgacgattcatctgattccgacaagtcctccagctcagtgccccctttccacaccgctgtcagcgacgaggacgacaccgatgaggattctagctcctctagatcttccgattccgaacaatcttcaggcttcgctgaatccgactcggagccagacatagaagatcaaatacgcgaattgtttcaagaaggtggagtttctgtacttgaaagcatcgccgaaagagatagattcttagagaagaagctactaagagaaatctcaaggttagggatcaaggcatctaactttcaacaaccacacatatttgaagtggtccttgagaaatgcgacgagtatatatccgcgttacagcgcgaaatcagatccgctgtgtctcgctcggaattgccaggccccagtaagcgacgactggaagagtttatattagatcacattagctctcgaagtcatgaggatgcactagagagtgttaaatcggagttgaaactaaagaagtggagaagcaaacgacgagctcctgtctccccaccccctggcggtccgcccttacccatgccaccacgatatcctcctgtgtcaaagccacgaccagtttataagcctacccgcgtattcgatactacaaaggttagtgagaaacttgagtcgaaagggaaaaaagctcaaatttggaaccactcgactatatcaagtgatcagaccggtgcaagcaaattcgccaacgagctggtattattttttctacgccaagggttccataatcgagtcgcaaagtctcttgattgggacgataaaccaacagactttttcgtcagtgaacgtcttgtagatggtacagccggtacatatcaccctgcttctagcacgtatccttgcatctcaccatctccagcagatcgttcaccaacgcactcgaacgtaatatctctttctactatagaagagtctctgtctcttaatagtcgaaatatcgtccaaccaccaacatcactgccgccaccgccaccgccatcaggttgggctcgacccgcacccgtgtcctatcctcaacaggggtggccagccgttcttgcattcccggtgtccgtcccacgatttatcaacgttaatactgccccatcatcagacactagtctgctacagcggcgccggggcactcgtgctaagcctagtgtttctaactggtatcctccggcctatattgcgatagacgccaagatgggcagacagactatggataaccatgtcggcactgctagtatgtcaaatgctgatattagcagtaacgtatcttcgacggcagcgaaggtggtagattctattcctgagccaccacaaggcgagtcattacactatctcatagataaaataaaccatctagaggcggaaaatcagaacttcaaagcttctcaaggtcaatccattagatacgagactcttcataccatttcagagcggtcaaacatgccaggcactacatatctcgatgagccaacctgggggataggaccccgtggcgaagcgaggctcaaagcacatttccccattcctgatataaatgggtacctaaatcaacggcacgatatcgcgttcgtcgtcatgaagtactatgatctgattgatcaagccgatgaggcagaaaatgctttccggaatcgccaagcgcttcctcgccctcggtcaaccacagaaatgatacgtctcgaatcagcagagatgaaagatgcctttgaaagtttccttgctgaacagtcgaactcctccgcgaatctcagtggtttcaataccaaagctcctatccgcgcaccatacctcttctggtaccattatcgctcaccttgcattttggacaacctccctgcgcaggataacaagatgatgaaatttctcacagcttggatagatagtcactacggtgagctgtataaccgtgtggcggaccagctcaacaggggcctgacatccccagagaccatggacttcttaatcaaaccaggcgacgttttgatatgggaggagaaaaacgacgttggtgcagccatatctagctcttggcctatctcaagattcaagccttctctcaagggaaagtcacgccacacaacctggaaaaggccttctggaactgacgataccactcacaaatggaaatggcaagttacgagctggcagtactactataacgggtcatttcagcgcaaaactcacacaacagtgattaccatgcatgcgaattcatttgaagaagaagttcccattgcgaagctaagtgcgtacccattgcaatatgccgacaaagttattcagttaaagctgaagcttcggggggagactttctggaaatgtcgctttcggcaattggtatcgtacaaggatgaaaaaggactggttggggctggtgaacgatttatggtcgatttcgacacatacatgcaacttcatgccgaatcacctaattttaaagaagaatatggaaaattggatgagaccaaggtcgacaccatggatccggaggtcatggcttcggacgaaccacccacagagcctgagatctatgttttcccacgtataatcacgggttataatctgcgaacgaagaaatgggttgatcttgtcgtggacatgattcaagacgttgtgtggaataagaaatcattcgaacacttagtcgttgatcccgagaccaaagagcttgttcaagcattagtaaccaatcaaattgaaagagagcaaagtaccgatatcatcgagcaaaaaggaaatggactaataatccttttacatggcgggccaggaacaggcaaaacctttaccgctgaatcagttgcggagatggccgagaaaccccttttccgcgtcacctgtggagacataggtaccaagcctgaagtcgtggagaagtatctcgagtcggttttatatcttgggaagagctggggttgtgtagttctgcttgatgaagcagacgtatttcttgaacaacgaacattgacggatttggagcgtaacgctttagtttctgtctttcttcgtgttctagaatattacgagggtatcttgatccttacttccaatagagttgggacatttgacgaagctttcaagtcccgaatccagctttcgctgcattacgaaacattgacggaagggcagcgaaagaaaatctggaagaactttttcaacagactcaaaggtctggatgcggacttggtcatgaatcctcccggaaccagatcgaattcttttaagtcgaagatgatggagcctactggtattgattttgatgatgtcgagtgctatttgagcgacctggcgaagtatgaattgaatggtagacaaatcagaaacgccatcacgaccgcacggcagctcgcgaagttcaagaaagagaagatgtcgtttcatcaccttcgacatgtgatcaacgtttcgggaaagttcgacgcatacctaaggaacgtacaagaaggctttacggacgatcaggttgcacgcggtggtggcatacgataa

SEQ ID NO: 19482 - protein, 1215 aa, Muscodor strobelii
  misc_feature: SGI Peptide ID NO. 566552
  misc_feature (969)..(1173): Pfam Id: PF00004 Pfam Desc: ATPase family associated with various cellular activities (AAA)
  misc_feature (969)..(1109): Pfam Id: PF00004 Pfam Desc: ATPase family associated with various cellular activities (AAA)
  misc_feature (537)..(1215): NCBI GI: 46105200 Blast Desc: FG00228.1 [Gibberella zeae PH-1]
  misc_feature (492)..(1215): NCBI GI: 212545270 Blast Desc: conserved [Penicillium marneffei ATCC 18224] gi|210065758|gb|EEA19852.1| conserved [Penicillium marneffei ATCC 18224]
  misc_feature (478)..(1215): NCBI GI: 169619754 Blast Desc: SNOG_13075 [Phaeosphaeria nodorum SN15] gi|111058282|gb|EAT79402.1| SNOG_13075 [Phaeosphaeria nodorum SN15]
  misc_feature (513)..(1215): NCBI GI: 171685452 Blast Desc: protein product [Podospora anserina] gi|170942687|emb|CAP68340.1| protein product [Podospora anserina]
  misc_feature (377)..(1215): NCBI GI: 115449835 Blast Desc: [Aspergillus terreus NIH2624] gi|114187657|gb|EAU29357.1| [Aspergillus terreus NIH2624]
  misc_feature (376)..(1202): NCBI GI: 255932979 Blast Desc: Pc12g11420 [Penicillium chrysogenum Wisconsin 54-1255] gi|211582579|emb|CAP80769.1| Pc12g11420 [Penicillium chrysogenum Wisconsin 54-1255]
  misc_feature (506)..(1215): NCBI GI: 46133953 Blast Desc: FG09116.1 [Gibberella zeae PH-1]
  misc_feature (551)..(1214): NCBI GI: 212532637 Blast Desc: conserved [Penicillium marneffei ATCC 18224] gi|210071839|gb|EEA25928.1| conserved [Penicillium marneffei ATCC 18224]
  misc_feature (639)..(1215): NCBI GI: 242765142 Blast Desc: TSTA_069470 [Talaromyces stipitatus ATCC 10500] gi|218724110|gb|EED23527.1| TSTA_069470 [Talaromyces stipitatus ATCC 10500]
  misc_feature (885)..(1215): NCBI GI: 169615523 Blast Desc: SNOG_10919 [Phaeosphaeria nodorum SN15] gi|160702979|gb|EAT81418.2| SNOG_10919 [Phaeosphaeria nodorum SN15]
MLAPVRQGLAASLSSSDTDSDSEDNSDSDSTHSSDRSAKQVNDFDDSSDSDKSSSSVPPFHTAVSDEDDTDEDSSSSRSSDSEQSSGFAESDSEPDIEDQIRELFQEGGVSVLESIAERDRFLEKKLLREISRLGIKASNFQQPHIFEVVLEKCDEYISALQREIRSAVSRSELPGPSKRRLEEFILDHISSRSHEDALESVKSELKLKKWRSKRRAPVSPPPGGPPLPMPPRYPPVSKPRPVYKPTRVFDTTKVSEKLESKGKKAQIWNHSTISSDQTGASKFANELVLFFLRQGFHNRVAKSLDWDDKPTDFFVSERLVDGTAGTYHPASSTYPCISPSPADRSPTHSNVISLSTIEESLSLNSRNIVQPPTSLPPPPPPSGWARPAPVSYPQQGWPAVLAFPVSVPRFINVNTAPSSDTSLLQRRRGTRAKPSVSNWYPPAYIAIDAKMGRQTMDNHVGTASMSNADISSNVSSTAAKVVDSIPEPPQGESLHYLIDKINHLEAENQNFKASQGQSIRYETLHTISERSNMPGTTYLDEPTWGIGPRGEARLKAHFPIPDINGYLNQRHDIAFVVMKYYDLIDQADEAENAFRNRQALPRPRSTTEMIRLESAEMKDAFESFLAEQSNSSANLSGFNTKAPIRAPYLFWYHYRSPCILDNLPAQDNKMMKFLTAWIDSHYGELYNRVADQLNRGLTSPETMDFLIKPGDVLIWEEKNDVGAAISSSWPISRFKPSLKGKSRHTTWKRPSGTDDTTHKWKWQVTSWQYYYNGSFQRKTHTTVITMHANSFEEEVPIAKLSAYPLQYADKVIQLKLKLRGETFWKCRFRQLVSYKDEKGLVGAGERFMVDFDTYMQLHAESPNFKEEYGKLDETKVDTMDPEVMASDEPPTEPEIYVFPRIITGYNLRTKKWVDLVVDMIQDVVWNKKSFEHLVVDPETKELVQALVTNQIEREQSTDIIEQKGNGLIILLHGGPGTGKTFTAESVAEMAEKPLFRVTCGDIGTKPEVVEKYLESVLYLGKSWGCVVLLDEADVFLEQRTLTDLERNALVSVFLRVLEYYEGILILTSNRVGTFDEAFKSRIQLSLHYETLTEGQRKKIWKNFFNRLKGLDADLVMNPPGTRSNSFKSKMMEPTGIDFDDVECYLSDLAKYELNGRQIRNAITTARQLAKFKKEKMSFHHLRHVINVSGKFDAYLRNVQEGFTDDQVARGGGIR

SEQ ID NO: 19483 - DNA, 4122 bp, Muscodor strobelii
  misc_feature: SGI EST ID NO. CUFF.45548.0
  misc_feature: Variant of the nucleotide sequence at SEQ ID NO 19481
cacgtctgcaagtgctgtcccagcagatatctattgcgccccactgaggcaaagcaaacacatttataaattagagtttcaacgtcgagttcccggttacttacaaggattgctttcagtgttctacttatctacgtatctacgtatctacttgatcttttcgtcgatgctcgctcctgttagacagggactcgctgcatcattatcgtcctccgacacagattccgacagtgaggataactccgattccgattctactcattcaagcgaccgctcagcgaagcaagtcaatgatttcgacgattcatctgattccgacaagtcctccagctcagtgccccctttccacaccgctgtcagcgacgaggacgacaccgatgaggattctagctcctctagatcttccgattccgaacaatcttcaggcttcgctgaatccgactcggagccagacatagaagatcaaatacgcgaattgtttcaagaaggtggagtttctgtacttgaaagcatcgccgaaagagatagattcttagagaagaagctactaagagaaatctcaaggttagggatcaaggcatctaactttcaacaaccacacatatttgaagtggtccttgagaaatgcgacgagtatatatccgcgttacagcgcgaaatcagatccgctgtgtctcgctcggaattgccaggccccagtaagcgacgactggaagagtttatattagatcacattagctctcgaagtcatgaggatgcactagagagtgttaaatcggagttgaaactaaagaagtggagaagcaaacgacgagctcctgtctccccaccccctggcggtccgcccttacccatgccaccacgatatcctcctgtgtcaaagccacgaccagtttataagcctacccgcgtattcgatactacaaaggttagtgagaaacttgagtcgaaagggaaaaaagctcaaatttggaaccactcgactatatcaagtgatcagaccggtgcaagcaaattcgccaacgagctggtattattttttctacgccaagggttccataatcgagtcgcaaagtctcttgattgggacgataaaccaacagactttttcgtcagtgaacgtcttgtagatggtacagccgatcgttcaccaacgcactcgaacgtaatatctctttctactatagaagagtctctgtctcttaatagtcgaaatatcgtccaaccaccaacatcactgccgccaccgccaccgccatcaggttgggctcgacccgcacccgtgtcctatcctcaacaggggtggccagccgttcttgcattcccggtgtccgtcccacgatttatcaacgttaatactgccccatcatcagacactagtctgctacagcggcgccggggcactcgtgctaagcctagtgtttctaactggtatcctccggcctatattgcgatagacgccaagatgggcagacagactatggataaccatgtcggcactgctagtatgtcaaatgctgatattagcagtaacgtatcttcgacggcagcgaaggtggtagattctattcctgagccaccacaaggcgagtcattacactatctcatagataaaataaaccatctagaggcggaaaatcagaacttcaaagcttctcaaggtcaatccattagatacgagactcttcataccatttcagagcggtcaaacatgccaggcactacatatctcgatgagccaacctgggggataggaccccgtggcgaagcgaggctcaaagcacatttccccattcctgatataaatgggtacctaaatcaacggcacgatatcgcgttcgtcgtcatgaagtactatgatctgattgatcaagccgatgaggcagaaaatgctttccggaatcgccaagcgcttcctcgccctcggtcaaccacagaaatgatacgtctcgaatcagcagagatgaaagatgcctttgaaagtttccttgctgaacagtcgaactcctccgcgaatctcagtggtttcaataccaaagctcctatccgcgcaccatacctcttctggtaccattatcgctcaccttgcattttggacaacctccctgcgcaggataacaagatgatgaaatttctcacagcttggatagatagtcactacggtgagctgtataaccgtgtggcggaccagctcaacaggggcctgacatccccagagaccatggacttcttaatcaaaccaggcgacgttttgatatgggaggagaaaaacgacgttggtgcagccatatctagctcttggcctatctcaagattcaagccttctctcaagggaaagtcacgccacacaacctggaaaaggccttctggaactgacgataccactcacaaatggaaatggcaagttacgagctggcagtactactataacgggtcatttcagcgcaaaactcacacaacagtgattaccatgcatgcgaattcatttgaagaagaagttcccattgcgaagctaagtgcgtacccattgcaatatgccgacaaagttattcagttaaagctgaagcttcggggggagactttctggaaatgtcgctttcggcaattggtatcgtacaaggatgaaaaaggactggttggggctggtgaacgatttatggtcgatttcgacacatacatgcaacttcatgccgaatcacctaattttaaagaagaatatggaaaattggatgagaccaaggtcgacaccatggatccggaggtcatggcttcggacgaaccacccacagagcctgagatctatgttttcccacgtataatcacgggttataatctgcgaacgaagaaatgggttgatcttgtcgtggacatgattcaagacgttgtgtggaataagaaatcattcgaacacttagtcgttgatcccgagaccaaagagcttgttcaagcattagtaaccaatcaaattgaaagagagcaaagtaccgatatcatcgagcaaaaaggaaatggactaataatccttttacatggcgggccaggaacaggcaaaacctttaccgctgaatcagttgcggagatggccgagaaaccccttttccgcgtcacctgtggagacataggtaccaagcctgaagtcgtggagaagtatctcgagtcggttttatatcttgggaagagctggggttgtgtagttctgcttgatgaagcagacgtatttcttgaacaacgaacattgacggatttggagcgtaacgctttagtttctgtctttcttcgtgttctagaatattacgagggtatcttgatccttacttccaatagagttgggacatttgacgaagctttcaagtcccgaatccagctttcgctgcattacgaaacattgacggaagggcagcgaaagaaaatctggaagaactttttcaacagactcaaaggtctggatgcggacttggtcatgaatcctcccggaaccagatcgaattcttttaagtcgaagatgatggagcctactggtattgattttgatgatgtcgagtgctatttgagcgacctggcgaagtatgaattgaatggtagacaaatcagaaacgccatcacgaccgcacggcagctcgcgaagttcaagaaagagaagatgtcgtttcatcaccttcgacatgtgatcaacgtttcgggaaagttcgacgcatacctaaggaacgtacaagaaggctttacggacgatcaggttgcacgcggtggtggcatacgataatagtagagaacatcgaacgggacgtagggaattttttgttgaaggcgcatctgcatacacagactcatggctctctccacgtgggacgtagtaacaatgaagagaaagtacataagcaccaaccacgttcactcatagtgtggttctcctcgtttaaagtgcgtgcgcatctgactctccttatgcgaataatattgttgccagcgattacgtagggtcagttcgcctatcattagttcattgggaatgtatgattggtccggcaatgttttccgcgggaaactctggaatgtgggtttgtggcacagatggggccgtgagagtcgatcaccgttagtgacgaccgcggagaaccatctcgg

SEQ ID NO: 19484 - DNA, 3552 bp, Muscodor strobelii
  misc_feature: SGI cDNA ID NO. 566553
  misc_feature: Encodes the peptide sequence at SEQ ID NO 19485
atgctcgctcctgttagacagggactcgctgcatcattatcgtcctccgacacagattccgacagtgaggataactccgattccgattctactcattcaagcgaccgctcagcgaagcaagtcaatgatttcgacgattcatctgattccgacaagtcctccagctcagtgccccctttccacaccgctgtcagcgacgaggacgacaccgatgaggattctagctcctctagatcttccgattccgaacaatcttcaggcttcgctgaatccgactcggagccagacatagaagatcaaatacgcgaattgtttcaagaaggtggagtttctgtacttgaaagcatcgccgaaagagatagattcttagagaagaagctactaagagaaatctcaaggttagggatcaaggcatctaactttcaacaaccacacatatttgaagtggtccttgagaaatgcgacgagtatatatccgcgttacagcgcgaaatcagatccgctgtgtctcgctcggaattgccaggccccagtaagcgacgactggaagagtttatattagatcacattagctctcgaagtcatgaggatgcactagagagtgttaaatcggagttgaaactaaagaagtggagaagcaaacgacgagctcctgtctccccaccccctggcggtccgcccttacccatgccaccacgatatcctcctgtgtcaaagccacgaccagtttataagcctacccgcgtattcgatactacaaaggttagtgagaaacttgagtcgaaagggaaaaaagctcaaatttggaaccactcgactatatcaagtgatcagaccggtgcaagcaaattcgccaacgagctggtattattttttctacgccaagggttccataatcgagtcgcaaagtctcttgattgggacgataaaccaacagactttttcgtcagtgaacgtcttgtagatggtacagccggtacatatcaccctgcttctagcacgtatccttgcatctcaccatctccagcagatcgttcaccaacgcactcgaacgtaatatctctttctactatagaagagtctctgtctcttaatagtcgaaatatcgtccaaccaccaacatcactgccgccaccgccaccgccatcaggttgggctcgacccgcacccgtgtcctatcctcaacaggggtggccagccgttcttgcattcccggtgtccgtcccacgatttatcaacgttaatactgccccatcatcagacactagtctgctacagcggcgccggggcactcgtgctaagcctagtgtttctaactggtatcctccggcctatattgcgatagacgccaagatgggcagacagactatggataaccatgtcggcactgctagtatgtcaaatgctgatattagcagtaacgtatcttcgacggcagcgaaggtggtagattctattcctgagccaccacaaggcgagtcattacactatctcatagataaaataaaccatctagaggcggaaaatcagaacttcaaagcttctcaaggtcaatccattagatacgagactcttcataccatttcagagcggtcaaacatgccaggcactacatatctcgatgagccaacctgggggataggaccccgtggcgaagcgaggctcaaagcacatttccccattcctgatataaatgggtacctaaatcaacggcacgatatcgcgttcgtcgtcatgaagtactatgatctgattgatcaagccgatgaggcagaaaatgctttccggaatcgccaagcgcttcctcgccctcggtcaaccacagaaatgatacgtctcgaatcagcagagatgaaagatgcctttgaaagtttccttgctgaacagtcgaactcctccgcgaatctcagtggtttcaataccaaagctcctatccgcgcaccatacctcttctggtaccattatcgctcaccttgcattttggacaacctccctgcgcaggataacaagatgatgaaatttctcacagcttggatagatagtcactacggtgagctgtataaccgtgtggcggaccagctcaacaggggcctgacatccccagagaccatggacttcttaatcaaaccaggcgacgttttgatatgggaggagaaaaacgacgttggtgcagccatatctagctcttggcctatctcaagattcaagccttctctcaagggaaagtcacgccacacaacctggaaaaggccttctggaactgacgataccactcacaaatggaaatggcaagttacgagctggcagtactactataacgggtcatttcagcgcaaaactcacacaacagtgattaccatgcatgcgaattcatttgaagaagaagttcccattgcgaagctaaagattgttgtgttactgatcagagttcaggctggtgaacgatttatggtcgatttcgacacatacatgcaacttcatgccgaatcacctaattttaaagaagaatatggaaaattggatgagaccaaggtcgacaccatggatccggaggtcatggcttcggacgaaccacccacagagcctgagatctatgttttcccacgtataatcacgggttataatctgcgaacgaagaaatgggttgatcttgtcgtggacatgattcaagacgttgtgtggaataagaaatcattcgaacacttagtcgttgatcccgagaccaaagagcttgttcaagcattagtaaccaatcaaattgaaagagagcaaagtaccgatatcatcgagcaaaaaggaaatggactaataatccttttacatggcgggccaggaacaggcaaaacctttaccgctgaatcagttgcggagatggccgagaaaccccttttccgcgtcacctgtggagacataggtaccaagcctgaagtcgtggagaagtatctcgagtcggttttatatcttgggaagagctggggttgtgtagttctgcttgatgaagcagacgtatttcttgaacaacgaacattgacggatttggagcgtaacgctttagtttctgtctttcttcgtgttctagaatattacgagggtatcttgatccttacttccaatagagttgggacatttgacgaagctttcaagtcccgaatccagctttcgctgcattacgaaacattgacggaagggcagcgaaagaaaatctggaagaactttttcaacagactcaaaggtctggatgcggacttggtcatgaatcctcccggaaccagatcgaattcttttaagtcgaagatgatggagcctactggtattgattttgatgatgtcgagtgctatttgagcgacctggcgaagtatgaattgaatggtagacaaatcagaaacgccatcacgaccgcacggcagctcgcgaagttcaagaaagagaagatgtcgtttcatcaccttcgacatgtgatcaacgtttcgggaaagttcgacgcatacctaaggaacgtacaagaaggctttacggacgatcaggttgcacgcggtggtggcatacgataa

SEQ ID NO: 19485 - protein, 1183 aa, Muscodor strobelii
  misc_feature: SGI Peptide ID NO. 566553
  misc_feature (937)..(1141): Pfam Id: PF00004 Pfam Desc: ATPase family associated with various cellular activities (AAA)
  misc_feature (937)..(1077): Pfam Id: PF00004 Pfam Desc: ATPase family associated with various cellular activities (AAA)
  misc_feature (537)..(1183): NCBI GI: 46105200 Blast Desc: FG00228.1 [Gibberella zeae PH-1]
  misc_feature (478)..(1183): NCBI GI: 169619754 Blast Desc: SNOG_13075 [Phaeosphaeria nodorum SN15] gi|111058282|gb|EAT79402.1| SNOG_13075 [Phaeosphaeria nodorum SN15]
  misc_feature (492)..(1183): NCBI GI: 212545270 Blast Desc: conserved [Penicillium marneffei ATCC 18224] gi|210065758|gb|EEA19852.1| conserved [Penicillium marneffei ATCC 18224]
  misc_feature (513)..(1183): NCBI GI: 171685452 Blast Desc: protein product [Podospora anserina] gi|170942687|emb|CAP68340.1| protein product [Podospora anserina]
  misc_feature (425)..(1183): NCBI GI: 115449835 Blast Desc: [Aspergillus terreus NIH2624] gi|114187657|gb|EAU29357.1| [Aspergillus terreus NIH2624]
  misc_feature (376)..(1170): NCBI GI: 255932979 Blast Desc: Pc12g11420 [Penicillium chrysogenum Wisconsin 54-1255] gi|211582579|emb|CAP80769.1| Pc12g11420 [Penicillium chrysogenum Wisconsin 54-1255]
  misc_feature (506)..(1183): NCBI GI: 46133953 Blast Desc: FG09116.1 [Gibberella zeae PH-1]
  misc_feature (639)..(1183): NCBI GI: 242765142 Blast Desc: TSTA_069470 [Talaromyces stipitatus ATCC 10500] gi|218724110|gb|EED23527.1| TSTA_069470 [Talaromyces stipitatus ATCC 10500]
  misc_feature (853)..(1183): NCBI GI: 169615523 Blast Desc: SNOG_10919 [Phaeosphaeria nodorum SN15] gi|160702979|gb|EAT81418.2| SNOG_10919 [Phaeosphaeria nodorum SN15]
  misc_feature (551)..(1182): NCBI GI: 212532637 Blast Desc: conserved [Penicillium marneffei ATCC 18224] gi|210071839|gb|EEA25928.1| conserved [Penicillium marneffei ATCC 18224]
MLAPVRQGLAASLSSSDTDSDSEDNSDSDSTHSSDRSAKQVNDFDDSSDSDKSSSSVPPFHTAVSDEDDTDEDSSSSRSSDSEQSSGFAESDSEPDIEDQIRELFQEGGVSVLESIAERDRFLEKKLLREISRLGIKASNFQQPHIFEVVLEKCDEYISALQREIRSAVSRSELPGPSKRRLEEFILDHISSRSHEDALESVKSELKLKKWRSKRRAPVSPPPGGPPLPMPPRYPPVSKPRPVYKPTRVFDTTKVSEKLESKGKKAQIWNHSTISSDQTGASKFANELVLFFLRQGFHNRVAKSLDWDDKPTDFFVSERLVDGTAGTYHPASSTYPCISPSPADRSPTHSNVISLSTIEESLSLNSRNIVQPPTSLPPPPPPSGWARPAPVSYPQQGWPAVLAFPVSVPRFINVNTAPSSDTSLLQRRRGTRAKPSVSNWYPPAYIAIDAKMGRQTMDNHVGTASMSNADISSNVSSTAAKVVDSIPEPPQGESLHYLIDKINHLEAENQNFKASQGQSIRYETLHTISERSNMPGTTYLDEPTWGIGPRGEARLKAHFPIPDINGYLNQRHDIAFVVMKYYDLIDQADEAENAFRNRQALPRPRSTTEMIRLESAEMKDAFESFLAEQSNSSANLSGFNTKAPIRAPYLFWYHYRSPCILDNLPAQDNKMMKFLTAWIDSHYGELYNRVADQLNRGLTSPETMDFLIKPGDVLIWEEKNDVGAAISSSWPISRFKPSLKGKSRHTTWKRPSGTDDTTHKWKWQVTSWQYYYNGSFQRKTHTTVITMHANSFEEEVPIAKLKIVVLLIRVQAGERFMVDFDTYMQLHAESPNFKEEYGKLDETKVDTMDPEVMASDEPPTEPEIYVFPRIITGYNLRTKKWVDLVVDMIQDVVWNKKSFEHLVVDPETKELVQALVTNQIEREQSTDIIEQKGNGLIILLHGGPGTGKTFTAESVAEMAEKPLFRVTCGDIGTKPEVVEKYLESVLYLGKSWGCVVLLDEADVFLEQRTLTDLERNALVSVFLRVLEYYEGILILTSNRVGTFDEAFKSRIQLSLHYETLTEGQRKKIWKNFFNRLKGLDADLVMNPPGTRSNSFKSKMMEPTGIDFDDVECYLSDLAKYELNGRQIRNAITTARQLAKFKKEKMSFHHLRHVINVSGKFDAYLRNVQEGFTDDQVARGGGIR

SEQ ID NO: 19486 - DNA, 4122 bp, Muscodor strobelii; identical to SEQ ID NO: 19483
  misc_feature: SGI EST ID NO. CUFF.45548.0
  misc_feature: Variant of the nucleotide sequence at SEQ ID NO 19484

SEQ ID NO: 19487 - DNA, 1401 bp, Muscodor strobelii
  misc_feature: SGI cDNA ID NO. 566554
  misc_feature: Encodes the peptide sequence at SEQ ID NO 19488
atggccccgggaatcgcgattgatgatgagtctatgaacggctccctttcgatccctagcaaggatgcaccgacactatatgcaggtatcgacgagaagagcctacgacaaaaaacctctcaatatctgctctactacggcacgattttcaatagagacgtaatctacggtgctaaagatctctttgtctacactgctacgggtcacaaagtcttggattggacttcagggcagatgtcttgtctcttgggtcacgggcatcctgaaatagtcaagacagtcgcggatcatgccgccaacctggatcatctcttctcgggtatggtctcgccgccagtcatttccttatccgaacgcctctgcaatgtactcccgtctggacttgataaggctttcttcccgtccacaggcggcgagagtaacgaagcagctattaagatggcaaaggtttacacgggaaggttcgagattgtaggacttggtgcaagttggcacggcgttacagcacaggctttgggaacgcagtaccattttggcagaaaagggaatggaccactgatgccaggtatgcatatgcttccccagcctaatgcctaccggtccatttttcaaaaaccagatggatcctacgactgggagactgagctagagtacgggtggcgcatgattgacatggcatcatgtgggtcgcttgcggcttgtattgtcgagcccattcagtcatctgcaggtatgcacgtgctaccagcgggctacttaaaggctttgaagaagcactgcgagaagcgaggcatgctcctcattgtcgatgaagctcagactggtgtcggtcgctgtggagatatcatggcgattgtccacgaagatgtcacacccgatattcttactctcagcaagacattaggcaacggtctaccactcagtgcagttgttaccagtgccgagattgagaagaccctaatagagcgggactattgtttctacacaacgcatatcaacgaccccttaccagctgcagtcggagataaggtccttgaaatcgtgcttcgcgacaatctagttgagaattccagagcacttggaaaggtccttcacgatgggctcaagaagctgcagtccagatacggctgcatcggagatgttcgcggtcgtggcttaatggcaggtgtagaaattgttgcagatcgtgagaccaaagtgcctgaactggatctggcgaagcgtataggtgacaatttgtacggcaacggagtttgggctaatcttagtagtcatcccagcttcggtggaacattcagaatagcccctccgatcacgatcacgaaggagcagctggagtttgggcttgaggcaatggaaaaagcgtttgccgtgaccccaggctcactgccactttattga

SEQ ID NO: 19488 - protein, 466 aa, Muscodor strobelii
  misc_feature: SGI Peptide ID NO. 566554
  misc_feature (54)..(394): Pfam Id: PF00202 Pfam Desc: Aminotransferase class-III
  misc_feature (1)..(465): NCBI GI: 255949048 Blast Desc: Pc22g13650 [Penicillium chrysogenum Wisconsin 54-1255] gi|211592308|emb|CAP98653.1| Pc22g13650 [Penicillium chrysogenum Wisconsin 54-1255]
  misc_feature (19)..(465): NCBI GI: 154314090 Blast Desc: BC1G_04988 [Botryotinia fuckeliana B05.10] gi|150849134|gb|EDN24327.1| BC1G_04988 [Botryotinia fuckeliana B05.10]
  misc_feature (26)..(466): NCBI GI: 33187179 Blast Desc: dialkylglycine decarboxylase [Mycosphaerella graminicola]
  misc_feature (19)..(465): NCBI GI: 156060627 Blast Desc: SS1G_02455 [Sclerotinia sclerotiorum 1980] gi|154699860|gb|EDN99598.1| SS1G_02455 [Sclerotinia sclerotiorum 1980]
  misc_feature (13)..(466): NCBI GI: 85109192 Blast Desc: 2,2-dialkylglycine decarboxylase [Neurospora crassa OR74A] gi|28924433|gb|EAA33562.1| 2,2-dialkylglycine decarboxylase [Neurospora crassa OR74A]
  misc_feature (27)..(466): NCBI GI: 189205743 Blast Desc: 2,2-dialkylglycine decarboxylase [Pyrenophora tritici-repentis Pt-1C-BFP] gi|187975299|gb|EDU41925.1| 2,2-dialkylglycine decarboxylase [Pyrenophora tritici-repentis
  misc_feature (22)..(464): NCBI GI: 39976271 Blast Desc: MGG_05938 [Magnaporthe grisea 70-15] gi|145011796|gb|EDJ96452.1| MGG_05938 [Magnaporthe grisea 70-15]
  misc_feature (26)..(466): NCBI GI: 169621654 Blast Desc: SNOG_14038 [Phaeosphaeria nodorum SN15] gi|111057543|gb|EAT78663.1| SNOG_14038 [Phaeosphaeria nodorum SN15]
  misc_feature (25)..(456): NCBI GI: 50423613 Blast Desc: DEHA0F00847g [Debaryomyces hansenii CBS767] gi|49656059|emb|CAG88694.1| DEHA2F00682p [Debaryomyces hansenii]
  misc_feature (27)..(457): NCBI GI: 255714449 Blast Desc: KLTH0E00374p [Lachancea thermotolerans] gi|238934888|emb|CAR23069.1| KLTH0E00374p [Lachancea thermotolerans]
  misc_feature (31)..(456): SWISSPROT Homolog: EC 4.1.1.64 2,2-dialkylglycine decarboxylase (pyruvate)
MAPGIAIDDESMNGSLSIPSKDAPTLYAGIDEKSLRQKTSQYLLYYGTIFNRDVIYGAKDLFVYTATGHKVLDWTSGQMSCLLGHGHPEIVKTVADHAANLDHLFSGMVSPPVISLSERLCNVLPSGLDKAFFPSTGGESNEAAIKMAKVYTGRFEIVGLGASWHGVTAQALGTQYHFGRKGNGPLMPGMHMLPQPNAYRSIFQKPDGSYDWETELEYGWRMIDMASCGSLAACIVEPIQSSAGMHVLPAGYLKALKKHCEKRGMLLIVDEAQTGVGRCGDIMAIVHEDVTPDILTLSKTLGNGLPLSAVVTSAEIEKTLIERDYCFYTTHINDPLPAAVGDKVLEIVLRDNLVENSRALGKVLHDGLKKLQSRYGCIGDVRGRGLMAGVEIVADRETKVPELDLAKRIGDNLYGNGVWANLSSHPSFGGTFRIAPPITITKEQLEFGLEAMEKAFAVTPGSLPLY

SEQ ID NO: 19489 - DNA, 316 bp, Muscodor strobelii
  misc_feature: SGI EST ID NO. CUFF.45509.0
  misc_feature: Variant of the nucleotide sequence at SEQ ID NO 19487
gcgattgtccacgaagatgtcacacccgatattcttactctcagcaagacattaggcaacggtctaccactcagtgcagttgttaccagtgccgagattgagaagaccctaatagagcgggactattgtttctacacaacgcatatcaacgaccccttaccagctgcagtcggagataaggtccttgaaatcgtgcttcgcgacaatctagttgagaattccagagcacttggaaaggtccttcacgatgggctcaagaagctgcagtccagatacggctgcatcggagatgttcgcggtcgtggcttaatggcag

SEQ ID NO: 19490 - DNA, 2220 bp, Muscodor strobelii
  misc_feature: SGI cDNA ID NO. 566555
  misc_feature: Encodes the peptide sequence at SEQ ID NO 19491
atggcgggctttttaaacaagtggaagcagaataactcctctgcgaatccatcagccaaagatgccgtcaagaagaaagaagagcccccgcccgagctgactgctcttgagcgcatgcttcagaatgccggatccatcagaccagacggcagtgataagttttttggtatggaaaactttggcaatacttgctattgcaactcgatcgtccaagcactattctacaccaccatattccgagaacaagtcctgaatttcccaccattgtcaccctcagatacaccgaacggagaccgcccgagagtgaatgtccagattagagcaccgaatgtgaacgggacggcgcaacccggtgggaacggcgcaaagaacgccccggcggtagatcctaagaagaagctaccaaatggccaaccacagccgggccagccaatacgaccggaagataagccggatacgccagaatacaaaaagaagcaggccatgttgaagggtccgattttagagttagcgcaggagaacaccactcctttcgacatggacgagtccacattcacaggcttacgagacatatttatggcgcttgttgaaagtaatacccgcaccggcgtgcttagtcctcagcgattcctcgagattttcaagcgcgacaacgagatgtttcgtaactccatgcatcaagatgctcacgagttttacggcctagtattgaatgatgtcatcgcgactgttgagagcaccgcgcaacggttgctgaataatagagcggagcaagggatggacggcgcgaccgattcacttcgagccgcactcggcgccgtggctcggactgggaacggaatcaactccccaggaacaggctgggtgcacgatattttcgagggcgtattggcatctgagacgaaatgcttaacgtgcgagaccgcttcccaaagagacgagacattcctagatttgtcgattgatttagaggagcatgcatcggttacatcgtgtctacagaacttttccgcggaggagatgctctgcgaaagaaacaaattccattgcgaccactgtggaggcttacaggaggcagagaagcgcatgaagatcaaacggttaccgcgggtgttagccctccacctgaagcggttcaagtacaccgaggattacagtcgactgcagaagctattccacagagtggtctacccgtaccagcttagaatgtttaatacgacagaagaggccgaggatccagaccgcctttacgagttatatgctgttgtcatccacattggtggcaatgcactccatggacattacgtatcggtcatcaagacagaagatcggggatggttactcttcgatgacgagttggtggagccggtagataagcactacgttcgaaacttctttggagacaaaccgggccaagcctgcgcttatgttctattctaccaagaaacgactttcgaaaaggtccgagccgaacaagaagcggagggattggaagaagtgaggatagcaagtgaaaaggccggcgttgcccaggagaatggtacaaatgttccggtgaacggtcacaacgggggcctatccaagcaggtcactacaccagttcgtcttgaggagcaggaggagttaaatcagcttgatcacgccgctacagcacccaatcttgttcgcagtcccacgaacccattgccagcccctccaccgatacccgtggatgacccatccattgttcttgcaagatcgaatacggtcaagtcgacaagggaagaaaagaaagcagctaaagaactggctaaagcccaggaaaaggcccggaagttggcagagaaagaggagctgaaggccaagcagaaacagcgcgaggagtcttttgccaaaatccgagcagccaggctggaggaggaggcgaacatgaagctggccctagaagaaagcgctaagatggcagcagcagcccaggaagacgaggaagacggagaccacgtgccggctctagacaaagccaagagagacagcaagtcgatggcgaggaagagcttcggcttcctccggacgaaacgcgatagtatagagacgacggacagtagccacacgagcgacagcacgccactgacgcagaactcagagaaggcggacaaagaaaaggagaaatacgggctgagaaagacgctcagcttcgggctggggaagaaaaaaagccggcatttctcggctcagcattaa

SEQ ID NO: 19491 - protein, 739 aa, Muscodor strobelii
  misc_feature: SGI Peptide ID NO. 566555
  misc_feature (52)..(480): Pfam Id: PF00443 Pfam Desc: Ubiquitin carboxyl-terminal hydrolase
  misc_feature (33)..(734): NCBI GI: 39965047 Blast Desc: MGG_09907 [Magnaporthe grisea 70-15] gi|145013193|gb|EDJ97834.1| MGG_09907 [Magnaporthe grisea 70-15]
  misc_feature (1)..(701): NCBI GI: 116182392 Blast Desc: CHGG_01824 [Chaetomium globosum CBS 148.51] gi|88186121|gb|EAQ93589.1| CHGG_01824 [Chaetomium globosum CBS 148.51]
  misc_feature (1)..(732): NCBI GI: 46108698 Blast Desc: FG01231.1 [Gibberella zeae PH-1]
  misc_feature (1)..(738): NCBI GI: 256735066 Blast Desc: [Nectria haematococca mpVI 77-13-4]
  misc_feature (1)..(701): NCBI GI: 171695326 Blast Desc: protein product [Podospora anserina] gi|170947905|emb|CAP60069.1| protein product [Podospora anserina]
  misc_feature (13)..(712): NCBI GI: 164424898 Blast Desc: NCU08378 [Neurospora crassa OR74A] gi|157070708|gb|EAA36045.2| NCU08378 [Neurospora crassa OR74A]
  misc_feature (65)..(736): NCBI GI: 154309531 Blast Desc: BC1G_07236 [Botryotinia fuckeliana B05.10] gi|150852259|gb|EDN27451.1| BC1G_07236 [Botryotinia fuckeliana B05.10]
  misc_feature (14)..(677): NCBI GI: 121708473 Blast Desc: ubiquitin C-terminal hydrolase CreB [Aspergillus clavatus NRRL 1] gi|119400290|gb|EAW10716.1| ubiquitin C-terminal hydrolase CreB [Aspergillus clavatus NRRL 1]
  misc_feature (1)..(732): NCBI GI: 169602479 Blast Desc: SNOG_04241 [Phaeosphaeria nodorum SN15] gi|160706178|gb|EAT88001.2| SNOG_04241 [Phaeosphaeria nodorum SN15]
  misc_feature (14)..(677): NCBI GI: 159125527 Blast Desc: ubiquitin C-terminal hydrolase CreB [Aspergillus fumigatus A1163]
  misc_feature (5)..(500): SWISSPROT Homolog: EC 3.1.2.15 Ubiquitin thiolesterase
MAGFLNKWKQNNSSANPSAKDAVKKKEEPPPELTALERMLQNAGSIRPDGSDKFFGMENFGNTCYCNSIVQALFYTTIFREQVLNFPPLSPSDTPNGDRPRVNVQIRAPNVNGTAQPGGNGAKNAPAVDPKKKLPNGQPQPGQPIRPEDKPDTPEYKKKQAMLKGPILELAQENTTPFDMDESTFTGLRDIFMALVESNTRTGVLSPQRFLEIFKRDNEMFRNSMHQDAHEFYGLVLNDVIATVESTAQRLLNNRAEQGMDGATDSLRAALGAVARTGNGINSPGTGWVHDIFEGVLASETKCLTCETASQRDETFLDLSIDLEEHASVTSCLQNFSAEEMLCERNKFHCDHCGGLQEAEKRMKIKRLPRVLALHLKRFKYTEDYSRLQKLFHRVVYPYQLRMFNTTEEAEDPDRLYELYAVVIHIGGNALHGHYVSVIKTEDRGWLLFDDELVEPVDKHYVRNFFGDKPGQACAYVLFYQETTFEKVRAEQEAEGLEEVRIASEKAGVAQENGTNVPVNGHNGGLSKQVTTPVRLEEQEELNQLDHAATAPNLVRSPTNPLPAPPPIPVDDPSIVLARSNTVKSTREEKKAAKELAKAQEKARKLAEKEELKAKQKQREESFAKIRAARLEEEANMKLALEESAKMAAAAQEDEEDGDHVPALDKAKRDSKSMARKSFGFLRTKRDSIETTDSSHTSDSTPLTQNSEKADKEKEKYGLRKTLSFGLGKKKSRHFSAQH

SEQ ID NO: 19492 - DNA, 4261 bp, Muscodor strobelii
  misc_feature: SGI EST ID NO. CUFF.45612.0
  misc_feature: Variant of the nucleotide sequence at SEQ ID NO 19490
ggcctgtctgtcgatctctccaaggtgttgttttatgtgaccgcatttgaggcgaacacttagattcaggtcgtctcttaactcgccaacatctctcgcgtgcccatcactacaacgctacgacgctaggagaaccgttggataccaccacacgcctccagctcccccgtctgccgccggtgcccactagtgctacctcactgttggcacttccagctctgcctagtacgctaccttatgagtcgagcagtacacggcagctgtaactgcaactgcgaaccgtgaactgcgaattaactcacatctcgttgcaacttccgccgctctcgtcctacccgcatctcttctgcctcactgaagccagccctcctcatcgcctgatcttggcattgccacgcattcgcatattcattcacgacatgtcttagaatcgccgcattgtctttcgttcaattgattcttaaatccgcatattgagcatattgccgaccccccaccttgcgatcgtacccatctctgctcctgccaacgtaatcaagtagccgatatccccagtcgattaccacatatccgccttcatatctcgcccgaatgtccataaaacccccctacattgctgtatatcatcatacttgacggatgggagccactattgccctatgcgatcgtaaatgcaggaatctagacacatctcaaccgcactgagccctggacgcgaccaacgacacctcgacggatgacggttgacggctatctctcacttcctctgcgtattccaacccccaggccgcgcgccccgacgctggtctccgtctcctaccctcgttttcacgtcgttctttacttctaggcatgtgactatggcgggctttttaaacaagtggaagcagaataactcctctgcgaatccatcagccaaagatgccgtcaagaagaaagaagagcccccgcccgagctgactgctcttgagcgcatgcttcagaatgccggatccatcagaccagacggcagtgataagttttttggtatggaaaactttggcaatacttgctattgcaactcgatcgtccaagcactattctacaccaccatattccgagaacaagtcctgaatttcccaccattgtcaccctcagatacaccgaacggagaccgcccgagagtgaatgtccagattagagcaccgaatgtgaacgggacggcgcaacccggtgggaacggcgcaaagaacgccccggcggtagatcctaagaagaagctaccaaatggccaaccacagccgggccagccaatacgaccggaagataagccggatacgccagaatacaaaaagaagcaggccatgttgaagggtccgattttagagttagcgcaggagaacaccactcctttcgacatggacgagtccacattcacaggcttacgagacatatttatggcgcttgttgaaagtaatacccgcaccggcgtgcttagtcctcagcgattcctcgagattttcaagcgcgacaacgagatgtttcgtaactccatgcatcaagatgctcacgagttttacggcctagtattgaatgatgtcatcgcgactgttgagagcaccgcgcaacggttgctgaataatagagcggagcaagggatggacggcgcgaccgattcacttcgagccgcactcggcgccgtggctcggactgggaacggaatcaactccccaggaacaggctgggtgcacgatattttcgagggcgtattggcatctgagacgaaatgcttaacgtgcgagaccgcttcccaaagagacgagacattcctagatttgtcgattgatttagaggagcatgcatcggttacatcgtgtctacagaacttttccgcggaggagatgctctgcgaaagaaacaaattccattgcgaccactgtggaggcttacaggaggcagagaagcgcatgaagatcaaacggttaccgcgggtgttagccctccacctgaagcggttcaagtacaccgaggattacagtcgactgcagaagctattccacagagtggtctacccgtaccagcttagaatgtttaatacgacagaagaggccgaggatccagaccgcctttacgagttatatgctgttgtcatccacattggtggcaatgcactccatggacattacgtatcggtcatcaagacagaagatcggggatggttactcttcgatgacgagttggtggagccggtagataagcactacgttcgaaacttctttggagacaaaccgggccaagcctgcgcttatgttctattctaccaagaaacgactttcgaaaaggtccgagccgaacaagaagcggagggattggaagaagtgaggatagcaagtgaaaaggccggcgttgcccaggagaatggtacaaatgttccggtgaacggtcacaacgggggcctatccaagcaggtcactacaccagttcgtcttgaggagcaggaggagttaaatcagcttgatcacgccgctacagcacccaatcttgttcgcagtcccacgaacccattgccagcccctccaccgatacccgtggatgacccatccattgttcttgcaagatcgaatacggtcaagtcgacaagggaagaaaagaaagcagctaaagaactggctaaagcccaggaaaaggcccggaagttggcagagaaagaggagctgaaggccaagcagaaacagcgcgaggagtcttttgccaaaatccgagcagccaggctggaggaggaggcgaacatgaagctggccctagaagaaagcgctaagatggcagcagcagcccaggaagacgaggaagacggagaccacgtgccggctctagacaaagccaagagagacagcaagtcgatggcgaggaagagcttcggcttcctccggacgaaacgcgatagtatagagacgacggacagtagccacacgagcgacagcacgccactgacgcagaactcagagaaggcggacaaagaaaaggagaaatacgggctgagaaagacgctcagcttcgggctggggaagaaaaaaagccggcatttctcggctcagcattaagcgatacgattcggttcctattcggagagttgatttagggggctattagatggcgtatttgtctgtctgtctgtctgtctgtctaccacgtagctatagctatggctattgctgattgggtatattcatcattatcataggaagcatttgttgttgctgcctagctcaagatagaattgctctccctctacgtgggggagcacgacagggtcgcagggccttgtgcatgaatgtgtacactttcgagacaagcgaaactccatattggtttatagatgcattgtgagagtccttaaggttgttaggtttgtgactgcacgtattatcgttctcgccaatgccttcgcactcttgaagtactatcaagagtattggagtaatcagacgaccagacgatgataggctgtagcagacgaggaaatgccacaagaaaatggaagcaaatatatgccatgataagaagcatgatatttcatttgcaaagcatgctatcttgactactcgagctcacaaagtgcctatgcatgcttaagcgcagaacccggcagtcctcatcatgggcgttatgcagctatctttgcataggaaaggttgtcgttgctggatgcctatcataccttggtaggtagcttccacgacaaacattgttgctatcgaaccaggctcgcaaggtcatcatttgctgctaacgaattcgcggagctgcctcttgtgttgctcgaaagttcactttctgccaaatcagcgtttgactcttgttctgtgatgaacacctgtcttttccccagttgccctttaacgcccattcctgatatcgtatttaaactccgaacctgttgctcgtagtggcagcttatccaaggaccagctcgtagactattatgaaagtgttgatgaataccagcgggactgtgaaggaatattgtcagcattttggcttgcggtatacgacttcgaatgtctgttccatcctgctcctatcacaatcccacaatttggacgatcggtgtatgcaaacaggggaacaatttgagatgtcggcactcggtgcacgtacccctcataacggtctgcacgctcttaatcaaattcgtagtctttgctttcgcattgttggggtcgctgccgaaacctggctcgtatgtggctgtcgagtatccgactaaacaagaggactcaga

SEQ ID NO: 19493 - DNA, 1014 bp, Muscodor strobelii
  misc_feature: SGI cDNA ID NO. 566556
  misc_feature: Encodes the peptide sequence at SEQ ID NO 19494
atgtttaatacgacagaagaggccgaggatccagaccgcctttacgagttatatgctgttgtcatccacattggtggcaatgcactccatggacattacgtatcggtcatcaagacagaagatcggggatggttactcttcgatgacgagttggtggagccggtagataagcactacgttcgaaacttctttggagacaaaccgggccaagcctgcgcttatgttctattctaccaagaaacgactttcgaaaaggtccgagccgaacaagaagcggagggattggaagaagtgaggatagcaagtgaaaaggccggcgttgcccaggagaatggtacaaatgttccggtgaacggtcacaacgggggcctatccaagcaggtcactacaccagttcgtcttgaggagcaggaggagttaaatcagcttgatcacgccgctacagcacccaatcttgttcgcagtcccacgaacccattgccagcccctccaccgatacccgtggatgacccatccattgttcttgcaagatcgaatacggtcaagtcgacaagggaagaaaagaaagcagctaaagaactggctaaagcccaggaaaaggcccggaagttggcagagaaagaggagctgaaggccaagcagaaacagcgcgaggagtcttttgccaaaatccgagcagccaggctggaggaggaggcgaacatgaagctggccctagaagaaagcgctaagatggcagcagcagcccaggaagacgaggaagacggagaccacgtgccggctctagacaaagccaagagagacagcaagtcgatggcgaggaagagcttcggcttcctccggacgaaacgcgatagtatagagacgacggacagtagccacacgagcgacagcacgccactgacgcagaactcagagaaggcggacaaagaaaaggagaaatacgggctgagaaagacgctcagcttcgggctggggaagaaaaaaagccggcatttctcggctcagcattaa

SEQ ID NO: 19494 - protein, 337 aa, Muscodor strobelii
  misc_feature: SGI Peptide ID NO. 566556
  misc_feature (15)..(78): Pfam Id: PF00443 Pfam Desc: Ubiquitin carboxyl-terminal hydrolase
  misc_feature (1)..(299): NCBI GI: 116182392 Blast Desc: CHGG_01824 [Chaetomium globosum CBS 148.51] gi|88186121|gb|EAQ93589.1| CHGG_01824 [Chaetomium globosum CBS 148.51]
  misc_feature (1)..(332): NCBI GI: 39965047 Blast Desc: MGG_09907 [Magnaporthe grisea 70-15] gi|145013193|gb|EDJ97834.1| MGG_09907 [Magnaporthe grisea 70-15]
  misc_feature (1)..(336): NCBI GI: 256735066 Blast Desc: [Nectria haematococca mpVI 77-13-4]
  misc_feature (1)..(330): NCBI GI: 46108698 Blast Desc: FG01231.1 [Gibberella zeae PH-1]
  misc_feature (1)..(334): NCBI GI: 154309531 Blast Desc: BC1G_07236 [Botryotinia fuckeliana B05.10] gi|150852259|gb|EDN27451.1| BC1G_07236 [Botryotinia fuckeliana B05.10]
  misc_feature (1)..(299): NCBI GI: 171695326 Blast Desc: protein product [Podospora anserina] gi|170947905|emb|CAP60069.1| protein product [Podospora anserina]
  misc_feature (1)..(280): NCBI GI: 164424898 Blast Desc: NCU08378 [Neurospora crassa OR74A] gi|157070708|gb|EAA36045.2| NCU08378 [Neurospora crassa OR74A]
  misc_feature (1)..(275): NCBI GI: 115389692 Blast Desc: ubiquitin carboxyl-terminal hydrolase 12 [Aspergillus terreus NIH2624] gi|114194747|gb|EAU36447.1| ubiquitin carboxyl-terminal hydrolase 12 [Aspergillus terreus NIH2624]
  misc_feature (1)..(330): NCBI GI: 169602479 Blast Desc: SNOG_04241 [Phaeosphaeria nodorum SN15] gi|160706178|gb|EAT88001.2| SNOG_04241 [Phaeosphaeria nodorum SN15]
  misc_feature (1)..(275): NCBI GI: 121708473 Blast Desc: ubiquitin C-terminal hydrolase CreB [Aspergillus clavatus NRRL 1] gi|119400290|gb|EAW10716.1| ubiquitin C-terminal hydrolase CreB [Aspergillus clavatus NRRL 1]
MFNTTEEAEDPDRLYELYAVVIHIGGNALHGHYVSVIKTEDRGWLLFDDELVEPVDKHYVRNFFGDKPGQACAYVLFYQETTFEKVRAEQEAEGLEEVRIASEKAGVAQENGTNVPVNGHNGGLSKQVTTPVRLEEQEELNQLDHAATAPNLVRSPTNPLPAPPPIPVDDPSIVLARSNTVKSTREEKKAAKELAKAQEKARKLAEKEELKAKQKQREESFAKIRAARLEEEANMKLALEESAKMAAAAQEDEEDGDHVPALDKAKRDSKSMARKSFGFLRTKRDSIETTDSSHTSDSTPLTQNSEKADKEKEKYGLRKTLSFGLGKKKSRHFSAQH

SEQ ID NO: 19495 - DNA, 4261 bp, Muscodor strobelii; identical to SEQ ID NO: 19492
  misc_feature: SGI EST ID NO. CUFF.45612.0
  misc_feature: Variant of the nucleotide sequence at SEQ ID NO 19493

SEQ ID NO: 19496 - DNA, 252 bp, Muscodor strobelii
  misc_feature: SGI cDNA ID NO. 566557
  misc_feature: Encodes the peptide sequence at SEQ ID NO 19497
atgctattcggcttcggaaacctcatatacataatcgtccttctgctcaacagcctggccatattatcagaagaccgcttcctcgctcgcatcggatactcgacagccacatacgagccaggtttcggcagcgaccccaacaatgcgaaagcaaagactacgaatttgattaagagcgtgcagaccgttatgagggtcccgctggtattcatcaacactttcataatagtctacgagctggtccttggataa

SEQ ID NO: 19497 - protein, 83 aa, Muscodor strobelii
  misc_feature: SGI Peptide ID NO. 566557
  misc_feature (5)..(83): Pfam Id: PF08571 Pfam Desc: Yos1-like
  misc_feature (1)..(83): NCBI GI: 212541921 Blast Desc: protein transport protein yos1, [Penicillium marneffei ATCC 18224] gi|210066022|gb|EEA20115.1| protein transport protein yos1, [Penicillium marneffei ATCC 18224]
  misc_feature (1)..(83): NCBI GI: 242770192 Blast Desc: protein transport protein yos1, [Talaromyces stipitatus ATCC 10500] gi|218725124|gb|EED24541.1| protein transport protein yos1, [Talaromyces stipitatus ATCC 10500]
  misc_feature (2)..(83): NCBI GI: 239611215 Blast Desc: BDCG_03322 [Ajellomyces dermatitidis ER-3]
  misc_feature (2)..(83): NCBI GI: 261205670 Blast Desc: BDBG_02243 [Ajellomyces dermatitidis SLH14081] gi|239592631|gb|EEQ75212.1| BDBG_02243 [Ajellomyces dermatitidis SLH14081]
  misc_feature (1)..(83): NCBI GI: 169602477 Blast Desc: SNOG_04240 [Phaeosphaeria nodorum SN15] gi|160706177|gb|EAT88000.2| SNOG_04240 [Phaeosphaeria nodorum SN15]
  misc_feature (1)..(83): NCBI GI: 154309529 Blast Desc: [Botryotinia fuckeliana B05.10] gi|150852258|gb|EDN27450.1| [Botryotinia fuckeliana B05.10]
  misc_feature (2)..(83): NCBI GI: 46108700 Blast Desc: FG01232.1 [Gibberella zeae PH-1]
  misc_feature (5)..(83): NCBI GI: 39965057 Blast Desc: [Magnaporthe grisea 70-15] gi|145013192|gb|EDJ97833.1| [Magnaporthe grisea 70-15]
  misc_feature (10)..(83): NCBI GI: 145229921 Blast Desc: An01g08465 [Aspergillus niger] gi|134055382|emb|CAK43936.1| protein product [Aspergillus niger]
  misc_feature (1)..(83): NCBI GI: 255710767 Blast Desc: KLTH0A04840p [Lachancea thermotolerans] gi|238933044|emb|CAR21225.1| KLTH0A04840p [Lachancea thermotolerans]
MLFGFGNLIYIIVLLLNSLAILSEDRFLARIGYSTATYEPGFGSDPNNAKAKTTNLIKSVQTVMRVPLVFINTFIIVYELVLG

SEQ ID NO: 19498 - DNA, 3349 bp, Muscodor strobelii
  misc_feature: SGI EST ID NO. CUFF.45613.1
  misc_feature: Variant of the nucleotide sequence at SEQ ID NO 19496
ctcaaatgacggcacctgcactcccactctcgaagctgtcaacttctctaaacaccaacccgcgatatcttcaaaccacgctcacaccaatacactgcgccgtctttcggcttacccaaccactcctaagcgacacagttaccatcattcaagatgctattcggcttcggaaacctcatatacataatcgtccttctgctcaacagcctggccatattatcagaagaccgcttcctcgctcgcatcggatactcgacagccacatacgagccaggtttcggcagcgaccccaacaatgcgaaagcaaagactacgaatttgattaagagcgtgcagaccgttatgagggtcccgctggtattcatcaacactttcataatagtctacgagctggtccttggataagctgccactacgagcaacaggttcggagtttaaatacgatatcaggaatgggcgttaaagggcaactggggaaaagacaggtgttcatcacagaacaagagtcaaacgctgatttggcagaaagtgaactttcgagcaacacaagaggcagctccgcgaattcgttagcagcaaatgatgaccttgcgagcctggttcgatagcaacaatgtttgtcgtggaagctacctaccaaggtatgataggcatccagcaacgacaacctttcctatgcaaagatagctgcataacgcccatgatgaggactgccgggttctgcgcttaagcatgcataggcactttgtgagctcgagtagtcaagatagcatgctttgcaaatgaaatatcatgcttcttatcatggcatatatttgcttccattttcttgtggcatttcctcgtctgctacagcctatcatcgtctggtcgtctgattactccaatactcttgatagtacttcaagagtgcgaaggcattggcgagaacgataatacgtgcagtcacaaacctaacaaccttaaggactctcacaatgcatctataaaccaatatggagtttcgcttgtctcgaaagtgtacacattcatgcacaaggccctgcgaccctgtcgtgctcccccacgtagagggagagcaattctatcttgagctaggcagcaacaacaaatgcttcctatgataatgatgaatatacccaatcagcaatagccatagctatagctacgtggtagacagacagacagacagacagacaaatacgccatctaatagccccctaaatcaactctccgaataggaaccgaatcgtatcgcttaatgctgagccgagaaatgccggctttttttcttccccagcccgaagctgagcgtctttctcagcccgtatttctccttttctttgtccgccttctctgagttctgcgtcagtggcgtgctgtcgctcgtgtggctactgtccgtcgtctctatactatcgcgtttcgtccggaggaagccgaagctcttcctcgccatcgacttgctgtctctcttggctttgtctagagccggcacgtggtctccgtcttcctcgtcttcctgggctgctgctgccatcttagcgctttcttctagggccagcttcatgttcgcctcctcctccagcctggctgctcggattttggcaaaagactcctcgcgctgtttctgcttggccttcagctcctctttctctgccaacttccgggccttttcctgggctttagccagttctttagctgctttcttttcttcccttgtcgacttgaccgtattcgatcttgcaagaacaatggatgggtcatccacgggtatcggtggaggggctggcaatgggttcgtgggactgcgaacaagattgggtgctgtagcggcgtgatcaagctgatttaactcctcctgctcctcaagacgaactggtgtagtgacctgcttggataggcccccgttgtgaccgttcaccggaacatttgtaccattctcctgggcaacgccggccttttcacttgctatcctcacttcttccaatccctccgcttcttgttcggctcggaccttttcgaaagtcgtttcttggtagaatagaacataagcgcaggcttggcccggtttgtctccaaagaagtttcgaacgtagtgcttatctaccggctccaccaactcgtcatcgaagagtaaccatccccgatcttctgtcttgatgaccgatacgtaatgtccatggagtgcattgccaccaatgtggatgacaacagcatataactcgtaaaggcggtctggatcctcggcctcttctgtcgtattaaacattctaagctggtacgggtagaccactctgtggaatagcttctgcagtcgactgtaatcctcggtgtacttgaaccgcttcaggtggagggctaacacccgcggtaaccgtttgatcttcatgcgcttctctgcctcctgtaagcctccacagtggtcgcaatggaatttgtttctttcgcagagcatctcctccgcggaaaagttctgtagacacgatgtaaccgatgcatgctcctctaaatcaatcgacaaatctaggaatgtctcgtctctttgggaagcggtctcgcacgttaagcatttcgtctcagatgccaatacgccctcgaaaatatcgtgcacccagcctgttcctggggagttgattccgttcccagtccgagccacggcgccgagtgcggctcgaagtgaatcggtcgcgccgtccatcccttgctccgctctattattcagcaaccgttgcgcggtgctctcaacagtcgcgatgacatcattcaatactaggccgtaaaactcgtgagcatcttgatgcatggagttacgaaacatctcgttgtcgcgcttgaaaatctcgaggaatcgctgaggactaagcacgccggtgcgggtattactttcaacaagcgccataaatatgtctcgtaagcctgtgaatgtggactcgtccatgtcgaaaggagtggtgttctcctgcgctaactctaaaatcggacccttcaacatggcctgcttctttttgtattctggcgtatccggcttatcttccggtcgtattggctggcccggctgtggttggccatttggtagcttcttcttaggatctaccgccggggcgttctttgcgccgttcccaccgggttgcgccgtcccgttcacattcggtgctctaatctggacattcactctcgggcggtctccgttcggtgtatctgagggtgacaatggtgggaaattcaggacttgttctcggaatatggtggtgtagaatagtgcttggacgatcgagttgcaatagctgagtcaatattagtagtgcgcgcagctggaggagttggtgatccataccaagtattgcca

SEQ ID NO: 19499 - DNA, 1668 bp, Muscodor strobelii
  misc_feature: SGI cDNA ID NO. 566558
  misc_feature: Encodes the peptide sequence at SEQ ID NO 19500
atgagggcaattgatcttttgttctcggtgtccattccggcattgatcgtcgtattcctgctcgccgccccttacacaaaggtcgaagagtccttcaatattcaggcaactcatgacatcctcgggtatggcacgcccatcaaagattgctctcggcgtctatcctcgcagtatgaccacttcgactttcccggcgcagtacccaggacctttcttggtcccgttctattggctggtctaagtcagccttttgtctatcttaccggatttcaacatgcccagctcattataagagctgtcttgggcctagccaatgctggtgctctcctgatcttcaaatctaatgttgaacgagcttttggaagatccgtcgcaagatggtacacctttctccaagcgggccagtttcacatcatcttctacgcttccaggacacttcccaatatgttcgctttcttcttcacaactttagcattctcgcagcttctcccgcagcctgacccgagaaagcaagttacgcgatacaagatggctattgctttcttgacaatagccacggccatcttcaggtcagaactggccatcctaatggtcaccgtcacgctctacggcctactgtcatcgcacatcaccattccgcagatcatcccgcccttcattgcgttcttcgtactctcggtcggcttcacagctcccatcgactcttatttctggcagaaatgggtatggcctgagctctggggcttttactttaacgcggtgttaggatcttcatcggaatggggaacatcaccttggcactactatttcacctcggctctgcctaagaccctgaccaatccgctgagctcagtattcctcattccatttgcactcttcaccccaggaattagacagcaagcccgagccctagttgtgccgagtttgctcttcgttgcgatatactcactccagccacacaaggaagcccgattcatattctacgtcgtacctcctttgacagccgcagccgctttaggagccgactacatctttgcgcgacgaacgaagtcaatgctgtttggcattggcgccctgtcaatcctgggttcaggtgtcgcttcgttcctcatcagcgacgttatgcttctcatctcatcccttaactacccggggggcgaagccttgtccgagctgaagagccttgtcatatcttcacctggctcagccatgcaaactgtctccgtacataccgatgtcctctcctgcatgacgggcgtcacgctgtttggccagcaccatacatcaccgagtgatccaccttcgaaagatggcgtcacattcctttttgacaagactgaagacgatagcttacacaacccactcttctgggagcaattcgattatgtgcttgccgaggatcctgctaagcctatcgggcccttcgagacaattggtgtcattgagggctatgctggcatcgtggtcttgaagcctggatctgcgacacagggcgatatagagagtggacaagacccgatatttggacgaggcgcaatcgtgaagaaggcaagggactttatcaggcgatatactggtggctggtgggttggcccgcgtatggtgccaagagtgcatatcatgagaaagatcagggatggggaggcaagacaaccggttctcgaatga

SEQ ID NO: 19500 - protein, 555 aa, Muscodor strobelii
  misc_feature: SGI Peptide ID NO. 566558
  misc_feature (11)..(390): Pfam Id: PF03901 Pfam Desc: Alg9-like mannosyltransferase family
  misc_feature (95)..(331): Pfam Id: PF03901 Pfam Desc: Alg9-like mannosyltransferase family
  misc_feature (14)..(553): NCBI GI: 145605375 Blast Desc: MGG_09909 [Magnaporthe grisea 70-15] gi|145013191|gb|EDJ97832.1| MGG_09909 [Magnaporthe grisea 70-15]
  misc_feature (1)..(543): NCBI GI: 256735065 Blast Desc: NECHADRAFT_105807 [Nectria haematococca mpVI 77-13-4]
  misc_feature (1)..(553): NCBI GI: 164424217 Blast Desc: NCU07472 [Neurospora crassa OR74A] gi|157070424|gb|EAA34515.2| conserved [Neurospora crassa OR74A]
  misc_feature (1)..(544): NCBI GI: 46108702 Blast Desc: FG01233.1 [Gibberella zeae PH-1]
  misc_feature (23)..(555): NCBI GI: 171695966 Blast Desc: protein product [Podospora anserina] gi|170948225|emb|CAP60389.1| protein product [Podospora anserina]
  misc_feature (1)..(546): NCBI GI: 154309527 Blast Desc: BC1G_07234 [Botryotinia fuckeliana B05.10] gi|150852257|gb|EDN27449.1| BC1G_07234 [Botryotinia fuckeliana B05.10]
  misc_feature (1)..(545): NCBI GI: 119192480 Blast Desc: CIMG_00617 [Coccidioides immitis RS]
  misc_feature (2)..(545): NCBI GI: 240106076 Blast Desc: glycosyltransferase, [Coccidioides posadasii C735 delta SOWgp]
  misc_feature (11)..(544): NCBI GI: 238504088 Blast Desc: alpha-1,6-mannosyltransferase subunit (Ecm39), [Aspergillus flavus NRRL3357] gi|220690747|gb|EED47096.1| alpha-1,6-mannosyltransferase subunit (Ecm39), [Aspergillus
  misc_feature (24)..(543): NCBI GI: 145229919 Blast Desc: An01g08460 [Aspergillus niger] gi|134055381|emb|CAK43935.1| protein product [Aspergillus niger]
MRAIDLLFSVSIPALIVVFLLAAPYTKVEESFNIQATHDILGYGTPIKDCSRRLSSQYDHFDFPGAVPRTFLGPVLLAGLSQPFVYLTGFQHAQLIIRAVLGLANAGALLIFKSNVERAFGRSVARWYTFLQAGQFHIIFYASRTLPNMFAFFFTTLAFSQLLPQPDPRKQVTRYKMAIAFLTIATAIFRSELAILMVTVTLYGLLSSHITIPQIIPPFIAFFVLSVGFTAPIDSYFWQKWVWPELWGFYFNAVLGSSSEWGTSPWHYYFTSALPKTLTNPLSSVFLIPFALFTPGIRQQARALVVPSLLFVAIYSLQPHKEARFIFYVVPPLTAAAALGADYIFARRTKSMLFGIGALSILGSGVASFLISDVMLLISSLNYPGGEALSELKSLVISSPGSAMQTVSVHTDVLSCMTGVTLFGQHHTSPSDPPSKDGVTFLFDKTEDDSLHNPLFWEQFDYVLAEDPAKPIGPFETIGVIEGYAGIVVLKPGSATQGDIESGQDPIFGRGAIVKKARDFIRRYTGGWWVGPRMVPRVHIMRKIRDGEARQPVLE

SEQ ID NO: 19501 - DNA, 2080 bp, Muscodor strobelii
  misc_feature: SGI EST ID NO. CUFF.45536.0
  misc_feature: Variant of the nucleotide sequence at SEQ ID NO 19499
gtcgtgtgcccccagcagctacagcgagctgttatcttacctgggaacaagctttagagcttgttacacctcgtcgccgtagcatttccaataacaacttcgccgagtcgacttgattcttgtccattgatagaaatctactcttttacctgtcgccagattatatgagattcagagacccttaattgcgatgttcatgcgaagaaattgatactgagttgattatgcgccacaaagttcactgatctcatccaatctcaaaataccaaactcattatcagatgattccaggtcacctttgccgccaattcagcaaggatgagggcaattgatcttttgttctcggtgtccattccggcattgatcgtcgtattcctgctcgccgccccttacacaaaggtcgaagagtccttcaatattcaggcaactcatgacatcctcgggtatggcacgcccatcaaagattgctctcggcgtctatcctcgcagtatgaccacttcgactttcccggcgcagtacccaggacctttcttggtcccgttctattggctggtctaagtcagccttttgtctatcttaccggatttcaacatgcccagctcattataagagctgtcttgggcctagccaatgctggtgctctcctgatcttcaaatctaatgttgaacgagcttttggaagatccgtcgcaagatggtacacctttctccaagcgggccagtttcacatcatcttctacgcttccaggacacttcccaatatgttcgctttcttcttcacaactttagcattctcgcagcttctcccgcagcctgacccgagaaagcaagttacgcgatacaagatggctattgctttcttgacaatagccacggccatcttcaggtcagaactggccatcctaatggtcaccgtcacgctctacggcctactgtcatcgcacatcaccattccgcagatcatcccgcccttcattgcgttcttcgtactctcggtcggcttcacagctcccatcgactcttatttctggcagaaatgggtatggcctgagctctggggcttttactttaacgcggtgttaggatcttcatcggaatggggaacatcaccttggcactactatttcacctcggctctgcctaagaccctgaccaatccgctgagctcagtattcctcattccatttgcactcttcaccccaggaattagacagcaagcccgagccctagttgtgccgagtttgctcttcgttgcgatatactcactccagccacacaaggaagcccgattcatattctacgtcgtacctcctttgacagccgcagccgctttaggagccgactacatctttgcgcgacgaacgaagtcaatgctgtttggcattggcgccctgtcaatcctgggttcaggtgtcgcttcgttcctcatcagcgacgttatgcttctcatctcatcccttaactacccggggggcgaagccttgtccgagctgaagagccttgtcatatcttcacctggctcagccatgcaaactgtctccgtacataccgatgtcctctcctgcatgacgggcgtcacgctgtttggccagcaccatacatcaccgagtgatccaccttcgaaagatggcgtcacattcctttttgacaagactgaagacgatagcttacacaacccactcttctgggagcaattcgattatgtgcttgccgaggatcctgctaagcctatcgggcccttcgagacaattggtgtcattgagggctatgctggcatcgtggtcttgaagcctggatctgcgacacagggcgatatagagagtggacaagacccgatatttggacgaggcgcaatcgtgaagaaggcaagggactttatcaggcgatatactggtggctggtgggttggcccgcgtatggtgccaagagtgcatatcatgagaaagatcagggatggggaggcaagacaaccggttctcgaatgatgaacgggctcaacacagagaaaagccaatctgtaaacgaggatagaagcgatagcaaatcatcgtgacgacacaatgcatgaatcaacaaagc

SEQ ID NO: 19502 - DNA, 708 bp, Muscodor strobelii
  misc_feature: SGI cDNA ID NO. 566559
  misc_feature: Reduced expression when VOC is produced
  misc_feature: Encodes the peptide sequence at SEQ ID NO 19503
atggcttcacggatccagcaagtaaaatttctctcctggtccctaatagggtgcaacctcctcgtcttcgcaaaatggcatctcgtccccaccaaaaagggttcctcgcaaatggcccagcgccaacaagcagcagcccacgaatactacatgatagaaaactacaccgtgtcaaaacgcaacatcgacgcaggtcggtacaagactttactcacctccgcattcagccacaaggacattggccacttggccctaaacatgttcatgttgcaccaatcatgcaggatcggcgccatggtcgggctcggcccattgcgcgtcggtgctctggcgattggaagtgcgctggcgggaagtgcggggagttattacgatgctcaggccatgatgaagaaaggtggttctgatgtttatagtcttggagcctcgggcatggtccagggaatgcttgtagcgactatgagggccgcgccttggttgccgatgcatctgatgtttattcctataccaatctcttacaggacggtggtgctggggtttattgcttgggatatgtttcagttgtacgatcagaggactagcggacgacgcaaggagaattggcatggctcgctcgtcgcgtatgcggcgcatcttggtggtgctgcgtttggcgctgtgttttacacgttggccatgaggagagggaaattaccacctcttcgttaa

SEQ ID NO: 19503 - protein, 235 aa, Muscodor strobelii
  misc_feature: SGI Peptide ID NO. 566559
  misc_feature (61)..(230): Pfam Id: PF01694 Pfam Desc: Rhomboid family
  misc_feature (61)..(186): Pfam Id: PF01694 Pfam Desc: Rhomboid family
  misc_feature (50)..(228): NCBI GI: 270226589 Blast Desc: protein product [Vitis vinifera]
  misc_feature (50)..(228): NCBI GI: 225456573 Blast Desc: [Vitis vinifera]
  misc_feature (67)..(227): NCBI GI: 169618004 Blast Desc: SNOG_12187 [Phaeosphaeria nodorum SN15] gi|111059479|gb|EAT80599.1| SNOG_12187 [Phaeosphaeria nodorum SN15]
  misc_feature (9)..(227): NCBI GI: 189194767 Blast Desc: conserved [Pyrenophora tritici-repentis Pt-1C-BFP] gi|187979286|gb|EDU45912.1| conserved [Pyrenophora tritici-repentis Pt-1C-BFP]
  misc_feature (11)..(231): NCBI GI: 146162537 Blast Desc: Rhomboid family protein [Tetrahymena thermophila] gi|146146309|gb|EAR89431.2| Rhomboid family protein [Tetrahymena thermophila SB210]
  misc_feature (48)..(214): NCBI GI: 224092178 Blast Desc: [Populus trichocarpa] gi|222855471|gb|EEE93018.1| [Populus trichocarpa]
  misc_feature (53)..(220): NCBI GI: 260062828 Blast Desc: RB2501_14599 [Robiginitalea biformata HTCC2501] gi|88784396|gb|EAR15566.1| RB2501_14599 [Robiginitalea biformata HTCC2501]
  misc_feature (62)..(221): NCBI GI: 71276309 Blast Desc: Rhomboid-like protein [Xylella fastidiosa Dixon] gi|71900285|ref|ZP_00682421.1| Rhomboid-like protein [Xylella fastidiosa Ann-1] gi|170730512|ref|YP_001775945.1| Xfasm12_1387
  misc_feature (61)..(218): NCBI GI: 150024952 Blast Desc: rhomboid family protein [Flavobacterium psychrophilum JIP02/86] gi|149771493|emb|CAL42962.1| Rhomboid family protein [Flavobacterium psychrophilum JIP02/86]
  misc_feature (47)..(214): NCBI GI: 18394631 Blast Desc: RBL12 (ARABIDOPSIS RHOMBOID-LIKE PROTEIN 12) [Arabidopsis thaliana] gi|9795596|gb|AAF98414.1|AC026238_6 [Arabidopsis thaliana] gi|13877607|gb|AAK43881.1|AF370504_1
  misc_feature: Useful for introducing or modulating the production of volatile compounds
MASRIQQVKFLSWSLIGCNLLVFAKWHLVPTKKGSSQMAQRQQAAAHEYYMIENYTVSKRNIDAGRYKTLLTSAFSHKDIGHLALNMFMLHQSCRIGAMVGLGPLRVGALAIGSALAGSAGSYYDAQAMMKKGGSDVYSLGASGMVQGMLVATMRAAPWLPMHLMFIPIPISYRTVVLGFIAWDMFQLYDQRTSGRRKENWHGSLVAYAAHLGGAAFGAVFYTLAMRRGKLPPLR

SEQ ID NO: 19504 - DNA, 1381 bp, Muscodor strobelii
  misc_feature: SGI EST ID NO. CUFF.45539.0
  misc_feature: Variant of the nucleotide sequence at SEQ ID NO 19502
tggtgataggttgtgttcttggtagtgatttcctatgatgtctcacaataaagctcgcacgggccaagcgatctgagctgtcaacacctatatctcactcactctagcctcacaacctccctccacatcttcaattgccatttactcaggtgccatccaatttgattatcttgtgcccagaacaccgaccaaattatagtcaagataactcactcaccgttacagcgaaggccgccatggcttcacggatccagcaagtaaaatttctctcctggtccctaatagggtgcaacctcctcgtcttcgcaaaatggcatctcgtccccaccaaaaagggttcctcgcaaatggcccagcgccaacaagcagcagcccacgaatactacatgatagaaaactacaccgtgtcaaaacgcaacatcgacgcaggtcggtacaagactttactcacctccgcattcagccacaaggacattggccacttggccctaaacatgttcatgttgcaccaatcatgcaggatcggcgccatggtcgggctcggcccattgcgcgtcggtgctctggcgattggaagtgcgctggcgggaagtgcggggagttattacgatgctcaggccatgatgaagaaaggtggttctgatgtttatagtcttggagcctcgggcatggtccagggaatgcttgtagcgactatgagggccgcgccttggttgccgatgcatctgatgtttattcctataccaatctcttacaggacggtggtgctggggtttattgcttgggatatgtttcagttgtacgatcagaggactagcggacgacgcaaggagaattggcatggctcgctcgtcgcgtatgcggcgcatcttggtggtgctgcgtttggcgctgtgttttacacgttggccatgaggagagggaaattaccacctcttcgttaagagtttatggattgctgcactattatcaatatgtgtggtcatcaccgaggcaagcagcatttgtggtttgtccggccgcaacagttggtctgattgttgttccccaaatttgaaccgatcggctgcaccgatacggcaagagggtattctgctccgcttgttgtcaaattcgaatcagtctggtcgtgaaatctggattgtgaggtttggttgttctcacgactcaatggacggctgacctccccagctaccttacgtcatcggctaggttgaaaaaaaattacgaactgcttagaggcgtgtcagtgggcatattgtaatattacgtcttaggaagacaacaagagaagagaagggccgatgggtcggcatccatctggtatctcaagaccaacttgaaagtgtgttattaactgtcacaaagtggcccacctatt

SEQ ID NO: 19505 - DNA, 3498 bp, Muscodor strobelii
  misc_feature: SGI cDNA ID NO. 566560
  misc_feature: Encodes the peptide sequence at SEQ ID NO 19506
atgggaaagctgttcaagcccaaagagaaggacaggaagataacgagcgaagagagcgccaacgacctgtccgacttccttggccactcggacaagctgaacgtcacgcatcctccgcctcgaccgcccgccttccagagcaccggccccccgagcctggccatcgacaccaaccaggccagccgcttcaccaaggccgccaactacacccatgctccccaagacatcgccatccgcacccgatcacacagcccccacgcccccgacgcccacggaaggacggccggaccgtgcgctttgccgacacataccccgagatcattggcgaaggaggggacgagtgtgacatggccaccgcagagattgggacatcaatatgccagggaggtgggcgcgtttcaggagacaaagagaggggacgatgggtttgtgcccggcccaataagacgaacacaaactggcttctcctcgatatcagagcctgagcgtgatcgcccgcagacaaagccctccccagtcatcccgtctcctgaacctccccaacccagagtactacctgctggcgaacctgtgcagtcccgcttcctggatatcagcagtcgcaaggacgaggcccgccgttcattcatcgacattcagcaacaggagcagcgcgaagcagagggcagggcattggccgaagctatgcggtctgcgagcaatagtgccaatcccgagtgggacgagcacagctccccttccgagtccttccacagccagtctcctcagcgccaaccgcagcagctgtctgtccaaccgcctggctcccccgaatcctacagagagcggccctcacgatctcctcagccgccaccatccttagccgagtcggtatcaagcatgctacgaacccaatctacgagatctccaatcccgcccacacccccagagaagagccccagaagatcccctatgcctcgccatgactccatcaaggttgctgcgagcaggtctcctataccaccgccccacgccgaccacccgaccaccatagaaggcgacgccgctagaaatcaacgtcagttggcacccgatgggttgcagattgtgactaccgaccatacctcacgggactcacctccctctgcatatcctaactctgttaattcaaattccgactactctttcaaatcgacacccactaacccatatacatcacgcggcttcgtttcgcccatggatagatccaagtctctgcgtgaagtggtcgtagcggctggggatgacgcattcgatactttcaacgccaatacgaaacacctatatgagttgttccgtctctatgccgagcagcaaaaaccattggagacttgcaagcccgaggatctaagccgtgctgctctgtggtggtttttgaaagggagaaccgctttggaaaatgtgattagaaaccgtcccaaagatcctgaagaccagcgacatctgatggcgcgctaccaagcgtacacagatcttaccaagagctattggctgacagagattgctcttcctgagatcgcagaagggaaatatagcccggtaagcggcgaactgggagatgtgaagcaaacactgatgcacaatctacgaaaactggcagtctccatgaaaagaaatggcttcttgcctcctgacgaaccttttctgccgcagacaatggacaagtccatattcatagactacccatcgcttagcccagatattaccgctcttctaaatggcatttggggatcgtcactggcagctgtccaacagcctacccgctccatggacatattggatgcattgcccattggcgacacggccaagtatttcatgtataccagggtaccggccgatgtgtatctcatggagcaaggcatcgagtcggcgcaaacttacttcccctgcttcttgtccgttgttcgctcaccggacgatgccactctcaactttgtggtggcgagtcagaatggaagcgtcactttgcgaatacagtcagatcaaaagtctgggccaacgtggcaaaatgtcaagtggaggcagaattcgcagtcgctggaagtaaaactgccccgaggattcatactcgcgatccaactcacacaggcagacttcaaagtactatggggcatcttcgacttcagtaacaagactcagggctacttatatccccgccaggacgaggctgttatacacactgtcaggcttcagggctttcattatttcgatgccaaccctcaaggacgatcgttccctaaagatgccgtcggggcatgtacgctgactttgtttgaaaagatcctcaaggaagacagtccgacggggccgcgcaggttccatcgtggataccggattgctgttgtgacaggtcccaggacgagaacgctcagtggcatttcacattcatatacaccacaatttcccattcagtttgccatgctacggggcgatcaacgagcaccattactccaattggacttcaacgatggccgggatcgcggacgaatggtcatgtcatttgccgacgaaaatgaacgcgagaagatgctgaggcttattagtggaagctatgttcaccatgacgaggagcttgtagcggatgtaccactcgaaggtatggcaatatcagaaggtatcgccggcttccaaaacggctatcctgcgacacaacgtctaccgtggcagaaagctcgcattgtcaatgacaggtattctagcgaacagaccgtactggccgagagattgagaatagaaattgactcggtcgacaagactggtaatgggattgttagcaccattacagaccgtgtcaatgtcgccccaggagagctgaagatgagactgggcaccaaggacattcttactctgcaggtcctacgacagcctcagctagacatgacagtatctctgctggagagtgccgttcccaaagagactgcgcgtgagtttgcaactctccagaccgcgatccagagcagggcctcgacccgaacctatcgctttccgagcttcagggacctacatgccttccaattgggtctcaccggatacaacgttctatttgacggtgtggccagcagcctgaacatctcgcggcgcatgatggtcgtgcccattcacaagaaatgggaggctgggacgacacgtatccaggtggtagagcaggataagacgatgcagctactcgcattctttgaggattggagccatggacaatgcatgggatttgcattgaaaggcaccgatgtgtttgagtcgttcagtcgcaacggaaaggcagggttgaagctcgcggatgccaaattcccacttccgagagttccggctgacgggcagcccaagtcggatgatatggcattcttatgtcttgacatgcccgactttgccggggaacatgacgatatcaccattatttttgatgatggcctcgaacgggatcgtctctgctccgtcttaccggcccctactaagggatcacgactaagtaagatgaagtga

SEQ ID NO: 19506 - protein, 1165 aa, Muscodor strobelii
  misc_feature: SGI Peptide ID NO. 566560
  misc_feature (1)..(1165): NCBI GI: 116182460 Blast Desc: CHGG_01858 [Chaetomium globosum CBS 148.51] gi|88186155|gb|EAQ93623.1| CHGG_01858 [Chaetomium globosum CBS 148.51]
  misc_feature (421)..(1165): NCBI GI: 145605323 Blast Desc: MGG_11715 [Magnaporthe grisea 70-15] gi|145013145|gb|EDJ97786.1| MGG_11715 [Magnaporthe grisea 70-15]
  misc_feature (403)..(1165): NCBI GI: 171695118 Blast Desc: protein product [Podospora anserina] gi|170947801|emb|CAP59964.1| protein product [Podospora anserina]
  misc_feature (418)..(1164): NCBI GI: 256733114 Blast Desc: NECHADRAFT_37905 [Nectria haematococca mpVI 77-13-4]
  misc_feature (389)..(1165): NCBI GI: 156057005 Blast Desc: SS1G_04233 [Sclerotinia sclerotiorum 1980] gi|154702019|gb|EDO01758.1| SS1G_04233 [Sclerotinia sclerotiorum 1980]
  misc_feature (411)..(1165): NCBI GI: 154301121 Blast Desc: BC1G_10533 [Botryotinia fuckeliana B05.10] gi|150856281|gb|EDN31473.1| BC1G_10533 [Botryotinia fuckeliana B05.10]
  misc_feature (184)..(1157): NCBI GI: 240111472 Blast Desc: CPC735_073070 [Coccidioides posadasii C735 delta SOWgp]
  misc_feature (184)..(1157): NCBI GI: 119188809 Blast Desc: CIMG_04452 [Coccidioides immitis RS]
  misc_feature (410)..(1157): NCBI GI: 225562638 Blast Desc: conserved [Ajellomyces capsulatus G186AR]
  misc_feature (198)..(1165): NCBI GI: 239609677 Blast Desc: conserved [Ajellomyces dermatitidis ER-3]
MGKLFKPKEKDRKITSEESANDLSDFLGHSDKLNVTHPPPRPPAFQSTGPPSLAIDTNQASRFTKAANYTHAPQDIAIRTRSHSPHAPDAHGRTAGPCALPTHTPRSLAKEGTSVTWPPQRLGHQYAREVGAFQETKRGDDGFVPGPIRRTQTGFSSISEPERDRPQTKPSPVIPSPEPPQPRVLPAGEPVQSRFLDISSRKDEARRSFIDIQQQEQREAEGRALAEAMRSASNSANPEWDEHSSPSESFHSQSPQRQPQQLSVQPPGSPESYRERPSRSPQPPPSLAESVSSMLRTQSTRSPIPPTPPEKSPRRSPMPRHDSIKVAASRSPIPPPHADHPTTIEGDAARNQRQLAPDGLQIVTTDHTSRDSPPSAYPNSVNSNSDYSFKSTPTNPYTSRGFVSPMDRSKSLREVVVAAGDDAFDTFNANTKHLYELFRLYAEQQKPLETCKPEDLSRAALWWFLKGRTALENVIRNRPKDPEDQRHLMARYQAYTDLTKSYWLTEIALPEIAEGKYSPVSGELGDVKQTLMHNLRKLAVSMKRNGFLPPDEPFLPQTMDKSIFIDYPSLSPDITALLNGIWGSSLAAVQQPTRSMDILDALPIGDTAKYFMYTRVPADVYLMEQGIESAQTYFPCFLSVVRSPDDATLNFVVASQNGSVTLRIQSDQKSGPTWQNVKWRQNSQSLEVKLPRGFILAIQLTQADFKVLWGIFDFSNKTQGYLYPRQDEAVIHTVRLQGFHYFDANPQGRSFPKDAVGACTLTLFEKILKEDSPTGPRRFHRGYRIAVVTGPRTRTLSGISHSYTPQFPIQFAMLRGDQRAPLLQLDFNDGRDRGRMVMSFADENEREKMLRLISGSYVHHDEELVADVPLEGMAISEGIAGFQNGYPATQRLPWQKARIVNDRYSSEQTVLAERLRIEIDSVDKTGNGIVSTITDRVNVAPGELKMRLGTKDILTLQVLRQPQLDMTVSLLESAVPKETAREFATLQTAIQSRASTRTYRFPSFRDLHAFQLGLTGYNVLFDGVASSLNISRRMMVVPIHKKWEAGTTRIQVVEQDKTMQLLAFFEDWSHGQCMGFALKGTDVFESFSRNGKAGLKLADAKFPLPRVPADGQPKSDDMAFLCLDMPDFAGEHDDITIIFDDGLERDRLCSVLPAPTKGSRLSKMK

SEQ ID NO: 19507 - DNA, 5091 bp, Muscodor strobelii
  misc_feature: SGI EST ID NO. CUFF.45594.1
  misc_feature: Variant of the nucleotide sequence at SEQ ID NO 19505
ataggtagcctcaggtcgacaattctcaaattgaaagcagatacgacgttggggctgcgacaagctcgatggaccaagttgcatacatacatgtatgcacccatgtagtcatctaggcatgctatgggatacctactccaggattgggacgcccttttcaggcgataatcgcatttgaccgattaggactcaggcaatgattagcaggcggaggaaatgcagctggtatgccaagtcgagaggtagtattgctgttaggcggatctatgaatagcgacagttgactagtcgcatcgatgttcccaaatctaccactgcaatggaaccaacaccaagtccagccttgacagtatgatctccatgctggtgttggctttaattgtgtaatgctgtgaagaagctaaaaggcactgcaaagttgagcactcgcgtcggcagtgcagcgggcagcacatccctacccgaaagagaaaggctcagccgtggaagtttatctttgggcatttatcatttcgagacaaaacaagtcgcccacagcgtcccgcattcacaaggatacggtgacacccctttgcatgctcggctcatgcctctagactgactaccaccacaatcgcaacatcgtcccttccactgacctacatcccctatttctcactaaacaccgaccgcccgacgacaaccaaaaaggcacctactgtctttgatctgtagataacctgctgcccgctatacacacctcgctaaactcaattggagggccagtcaatcagattcccagcggctgcggtgccctatctcccccgcatcctccagcgctccctgtcccatcaccagtggctacgttgactcgacaaatgtgcagttgggatcttgtgtttgtgtttgtgtttctgcgagtacattgctcaatcacggcttcgataggagaacacgaaaagtgaattcccgtgactctcgagcgacatacaagatacccagacaggggaatcgcctgcaacaccctttctcgcatgccgaccaccttctcgattccctctccatcccctgtgtgcaccaccttgatatatctgccagaatatggacaatgatggcgacggtggtcgctcttcgcggcgagaccgcctcatgggaaagctgttcaagcccaaagagaaggacaggaagataacgagcgaagagagcgccaacgacctgtccgacttccttggccactcggacaagctgaacgtcacgcatcctccgcctcgaccgcccgccttccagagcaccggccccccgagcctggccatcgacaccaaccaggccagccgcttcaccaaggccgccaactacacccatgctccccaagacatcgccatccgcacccgatcacacagcccccacgcccccgacgcccacggaaggacggccggaccgtgcgctttgccgacacataccccgagatcattggcgaaggaggggacgagtgtgacatggccaccgcagagattggtaagaggaagaggtctaggtccgccccttctgctgcaccaattccacctacgaggcagggacatcaatatgccagggaggtgggcgcgtttcaggagacaaagagaggggacgatgggtttgtgcccggcccaataagacgaacacaaactggcttctcctcgatatcagagcctgagcgtgatcgcccgcagacaaagccctccccagtcatcccgtctcctgaacctccccaacccagagtactacctgctggcgaacctgtgcagtcccgcttcctggatatcagcagtcgcaaggacgaggcccgccgttcattcatcgacattcagcaacaggagcagcgcgaagcagagggcagggcattggccgaagctatgcggtctgcgagcaatagtgccaatcccgagtgggacgagcacagctccccttccgagtccttccacagccagtctcctcagcgccaaccgcagcagctgtctgtccaaccgcctggctcccccgaatcctacagagagcggccctcacgatctcctcagccgccaccatccttagccgagtcggtatcaagcatgctacgaacccaatctacgagatctccaatcccgcccacacccccagagaagagccccagaagatcccctatgcctcgccatgactccatcaaggttgctgcgagcaggtctcctataccaccgccccacgccgaccacccgaccaccatagaaggcgacgccgctagaaatcaacgtcagttggcacccgatgggttgcagattgtgactaccgaccatacctcacgggactcacctccctctgcatatcctaactctgttaattcaaattccgactactctttcaaatcgacacccactaacccatatacatcacgcggcttcgtttcgcccatggatagatccaagtctctgcgtgaagtggtcgtagcggctggggatgacgcattcgatactttcaacgccaatacgaaacacctatatgagttgttccgtctctatgccgagcagcaaaaaccattggagacttgcaagcccgaggatctaagccgtgctgctctgtggtggtttttgaaagggagaaccgctttggaaaatgtgattagaaaccgtcccaaagatcctgaagaccagcgacatctgatggcgcgctaccaagcgtacacagatcttaccaagagctattggctgacagagattgctcttcctgagatcgcagaagggaaatatagcccggtaagcggcgaactgggagatgtgaagcaaacactgatgcacaatctacgaaaactggcagtctccatgaaaagaaatggcttcttgcctcctgacgaaccttttctgccgcagacaatggacaagtccatattcatagactacccatcgcttagcccagatattaccgctcttctaaatggcatttggggatcgtcactggcagctgtccaacagcctacccgctccatggacatattggatgcattgcccattggcgacacggccaagtatttcatgtataccagggtaccggccgatgtgtatctcatggagcaaggcatcgagtcggcgcaaacttacttcccctgcttcttgtccgttgttcgctcaccggacgatgccactctcaactttgtggtggcgagtcagaatggaagcgtcactttgcgaatacagtcagatcaaaagtctgggccaacgtggcaaaatgtcaagtggaggcagaattcgcagtcgctggaagtaaaactgccccgaggattcatactcgcgatccaactcacacaggcagacttcaaagtactatggggcatcttcgacttcagtaacaagactcagggctacttatatccccgccaggacgaggctgttatacacactgtcaggcttcagggctttcattatttcgatgccaaccctcaaggacgatcgttccctaaagatgccgtcggggcatgtacgctgactttgtttgaaaagatcctcaaggaagacagtccgacggggccgcgcaggttccatcgtggataccggattgctgttgtgacaggtcccaggacgagaacgctcagtggcatttcacattcatatacaccacaatttcccattcagtttgccatgctacggggcgatcaacgagcaccattactccaattggacttcaacgatggccgggatcgcggacgaatggtcatgtcatttgccgacgaaaatgaacgcgagaagatgctgaggcttattagtggaagctatgttcaccatgacgaggagcttgtagcggatgtaccactcgaaggtatggcaatatcagaaggtatcgccggcttccaaaacggctatcctgcgacacaacgtctaccgtggcagaaagctcgcattgtcaatgacaggtattctagcgaacagaccgtactggccgagagattgagaatagaaattgactcggtcgacaagactggtaatgggattgttagcaccattacagaccgtgtcaatgtcgccccaggagagctgaagatgagactgggcaccaaggacattcttactctgcaggtcctacgacagcctcagctagacatgacagtatctctgctggagagtgccgttcccaaagagactgcgcgtgagtttgcaactctccagaccgcgatccagagcagggcctcgacccgaacctatcgctttccgagcttcagggacctacatgccttccaattgggtctcaccggatacaacgttctatttgacggtgtggccagcagcctgaacatctcgcggcgcatgatggtcgtgcccattcacaagaaatgggaggctgggacgacacgtatccaggtggtagagcaggataagacgatgcagctactcgcattctttgaggattggagccatggacaatgcatgggatttgcattgaaaggcaccgatgtgtttgagtcgttcagtcgcaacggaaaggcagggttgaagctcgcggatgccaaattcccacttccgagagttccggctgacgggcagcccaagtcggatgatatggcattcttatgtcttgacatgcccgactttgccggggaacatgacgatatcaccattatttttgatgatggcctcgaacgggatcgtctctgctccgtcttaccggcccctactaagggatcacgactaagtaagatgaagtgacgtggacaagacacctggcgcgacacatgatgatatgagaacacgacatgaattgtgacggataccggctagcattgcattgtatgtgcttcggacttaggcatgactgcgaagaggctggtggacaggaatgagctagagctgtcaataacacagctgttagtaaaactactggttagagtacatgaagcgaggacgaaggtagagggcggctattgcatgtcgcgcattttggaagagcggctgtagaagaagacttgtttgcttcaagaaagacatactcaagcgcggtactctggaagatgcactcaaaggggggaaaaccacatcaagaaataaaagcttaaagcgtctgacacttttgctgataccgagatagtgacgataatcaagaattgcaggtgga

SEQ ID NO: 19508 - DNA, 1578 bp, Muscodor strobelii
  misc_feature: SGI cDNA ID NO. 566561
  misc_feature: Encodes the peptide sequence at SEQ ID NO 19509
atgcacgcaggaaagatcgcttcgggtctaagccgtcgtcgcaggacgcattctaatgctagtagcaaatcgtccgttgacggctcagcagaagtcgaagatgacaaccaaagcatggagccggatcaaggcaatgtcttgagtcacatcatatcgcagcttcggcctggggccgacttgagtcgcgtcgtgttgcccacattcattctggagccgcgaagcatgctggagcgcattaccaacttcatgtgtcaccccgagatgctcctctcgatacctgacatggaggatcccgtcgaccgctttgtgtctgttgtcaagttctatctgagcggctggcacattcgaccacctggtgtcaagaagcccctgaacccgatcctaggcgaggtcttctcctgctactgggatctccctgacaacacgcgcgcatactacatatccgaacagacctcacatcaccctcccaagtcgagctacttctacgtagcccccgaacaccacatccgtatagatggcacactgaaacccaggagcaagtttcttggcaactcagccgctagtttgatggaaggtgttgctgtactcagcctgatgaaccggggcaaagacaagaagaaaggggagcgatactggctcactcaacccaacatgtatgcgcggggcgttttgttcggcaaaatgcaatacgagcttggtgaccatagcgtggtgcgatgtcctgagctggggcttacggccgatatcgacttcaagacaaaaggatgggttagcggcacatacaacgctatcggcggcatgataaaagatgaaaagacaggcgaaacactatttgaactgtctggcttgtggagcgaggagatggtgattaaagacttgaggactggcaagaaagacatgttcttcgatgcccggaaggctaagccctccaaacccagcgtcaggccacttgctgagcaggatgagcgcgagtctcagaaactatgggagaagacagcaaatgcagtcaaagagaggaatcacgagcttgctaccgacgagaagaccgctattgaggataggcaacgagaagaggctgccaagagacaggctgcaaacgttgattggcacccacgccttttcagagcagtcaagcccaaggacggagatgaagaaggcatgcaaactctggagtggattatcaacgcgaatatcgatggcgatacacctgggaaaatagcagaacaagtcatggcgatctaccccattgtcaacggtcagaaggctagcgacatgaaaatcgttcctcccagcggctcagcaggacatccaccaacagctggaaagcctgcagctgaagacaccacggcagacctaatagatttcggacagtccgacgcaccacaacccgtgcctcctgttcttccaactcgctcctctcaggacatctccaaaatgctcggcaagactggacaaaagacggagggtccattgatcgacttcacgggagacatgaagaaggatttgccttcgcagccgggcatgaagaggtctgatacagcagagagcaatgatgatttctttgacgctgagagttga

SEQ ID NO: 19509 - protein, 525 aa, Muscodor strobelii
  misc_feature: SGI Peptide ID NO. 566561
  misc_feature (10)..(435): Pfam Id: PF01237 Pfam Desc: Oxysterol-binding protein
  misc_feature (10)..(385): Pfam Id: PF01237 Pfam Desc: Oxysterol-binding protein
  misc_feature (10)..(525): NCBI GI: 164427179 Blast Desc: NCU03258 [Neurospora crassa OR74A] gi|157071639|gb|EAA35175.2| NCU03258 [Neurospora crassa OR74A]
  misc_feature (10)..(521): NCBI GI: 171695116 Blast Desc: protein product [Podospora anserina] gi|170947800|emb|CAP59963.1| protein product [Podospora anserina]
  misc_feature (46)..(504): NCBI GI: 256733113 Blast Desc: [Nectria haematococca mpVI 77-13-4]
  misc_feature (22)..(524): NCBI GI: 156056999 Blast Desc: SS1G_04230 [Sclerotinia sclerotiorum 1980] gi|154702016|gb|EDO01755.1| SS1G_04230 [Sclerotinia sclerotiorum 1980]
  misc_feature (54)..(503): NCBI GI: 46124967 Blast Desc: FG06861.1 [Gibberella zeae PH-1]
  misc_feature (17)..(463): NCBI GI: 119479969 Blast Desc: oxysterol binding protein (Osh7), [Neosartorya fischeri NRRL 181] gi|119408167|gb|EAW18116.1| oxysterol binding protein (Osh7), [Neosartorya fischeri NRRL 181]
  misc_feature (17)..(463): NCBI GI: 159128922 Blast Desc: oxysterol binding protein (Osh7), [Aspergillus fumigatus A1163]
  misc_feature (17)..(463): NCBI GI: 70989323 Blast Desc: oxysterol binding protein (Osh7) [Aspergillus fumigatus Af293] gi|66847142|gb|EAL87473.1| oxysterol binding protein (Osh7), [Aspergillus fumigatus Af293]
  misc_feature (17)..(444): NCBI GI: 145238524 Blast Desc: An07g08340 [Aspergillus niger] gi|134076398|emb|CAK48216.1| protein product [Aspergillus niger]
  misc_feature (35)..(464): NCBI GI: 121710378 Blast Desc: oxysterol binding protein (Osh7), [Aspergillus clavatus NRRL 1] gi|119400955|gb|EAW11379.1| oxysterol binding protein (Osh7), [Aspergillus clavatus NRRL 1]
MHAGKIASGLSRRRRTHSNASSKSSVDGSAEVEDDNQSMEPDQGNVLSHIISQLRPGADLSRVVLPTFILEPRSMLERITNFMCHPEMLLSIPDMEDPVDRFVSVVKFYLSGWHIRPPGVKKPLNPILGEVFSCYWDLPDNTRAYYISEQTSHHPPKSSYFYVAPEHHIRIDGTLKPRSKFLGNSAASLMEGVAVLSLMNRGKDKKKGERYWLTQPNMYARGVLFGKMQYELGDHSVVRCPELGLTADIDFKTKGWVSGTYNAIGGMIKDEKTGETLFELSGLWSEEMVIKDLRTGKKDMFFDARKAKPSKPSVRPLAEQDERESQKLWEKTANAVKERNHELATDEKTAIEDRQREEAAKRQAANVDWHPRLFRAVKPKDGDEEGMQTLEWIINANIDGDTPGKIAEQVMAIYPIVNGQKASDMKIVPPSGSAGHPPTAGKPAAEDTTADLIDFGQSDAPQPVPPVLPTRSSQDISKMLGKTGQKTEGPLIDFTGDMKKDLPSQPGMKRSDTAESNDDFFDAES

SEQ ID NO: 19510 - DNA, 2363 bp, Muscodor strobelii
  misc_feature: SGI EST ID NO. CUFF.45904.0
  misc_feature: Variant of the nucleotide sequence at SEQ ID NO 19508
ctcatagtattttgcttgctgggcgcactcaacctccgtcaagtcacagccctgttcaagctctgttctatggtagatgactcctcttgcggctgcttccatgctctccaccgttctggcggacaccagagagatcagcagttgcagctctttaagctctgtctctgttaagccttgacatcgacagtatatgctaccacaggcatctcacatacgtactgtactgtacctgtaactaccacacaccatgcacgcaggaaagatcgcttcgggtctaagccgtcgtcgcaggacgcattctaatgctagtagcaaatcgtccgttgacggctcagcagaagtcgaagatgacaaccaaagcatggagccggatcaaggcaatggtcggtcaccatcctccttccggcccccgtcctagagcctcaacaaaacgacacgacatgatactaacctagcatgcagtcttgagtcacatcatatcgcagcttcggcctggggccgacttgagtcgcgtcgtgttgcccacattcattctggagccgcgaagcatgctggagcgcattaccaacttcatgtgtcaccccgagatgctcctctcgatacctgacatggaggatcccgtcgaccgctttgtgtctgttgtcaagttctatctgagcggctggcacattcgaccacctggtgtcaagaagcccctgaacccgatcctaggcgaggtcttctcctgctactgggatctccctgacaacacgcgcgcatactacatatccgaacagacctcacatcaccctcccaagtcgagctacttctacgtagcccccgaacaccacatccgtatagatggcacactgaaacccaggagcaagtttcttggcaactcagccgctagtttgatggaaggtgttgctgtactcagcctgatgaaccggggcaaagacaagaagaaaggggagcgatactggctcactcaacccaacatgtatgcgcggggcgttttgttcggcaaaatgcaatacgagcttggtgaccatagcgtggtgcgatgtcctgagctggggcttacggccgatatcgacttcaagacaaaaggatgggttagcggcacatacaacgctatcggcggcatgataaaagatgaaaagacaggcgaaacactatttgaactgtctggcttgtggagcgaggagatggtgattaaagacttgaggactggcaagaaagacatgttcttcgatgcccggaaggctaagccctccaaacccagcgtcaggccacttgctgagcaggatgagcgcgagtctcagaaactatgggagaagacagcaaatgcagtcaaagagaggaatcacgagcttgctaccgacgagaagaccgctattgaggataggcaacgagaagaggctgccaagagacaggctgcaaacgttgattggcacccacgccttttcagagcagtcaagcccaaggacggagatgaagaaggcatgcaaactctggagtggattatcaacgcgaatatcgatggcgatacacctgggaaaatagcagaacaagtcatggcgatctaccccattgtcaacggtcagaaggctagcgacatgaaaatcgttcctcccagcggctcagcaggacatccaccaacagctggaaagcctgcagctgaagacaccacggcagacctaatagatttcggacagtccgacgcaccacaacccgtgcctcctgttcttccaactcgctcctctcaggacatctccaaaatgctcggcaagactggacaaaagacggagggtccattgatcgacttcacgggagacatgaagaaggatttgccttcgcagccgggcatgaagaggtctgatacagcagagagcaatgatgatttctttgacgctgagagttgagagatgtgttgtttgaggaatacaactgcccatgtgtaggaatgagagagagacagagctataccatacaataggattacgagagcgaaagggattcattacttccaagtcaaagttagcttgcatgcatgaggacaatagaggaaatgaataatgagctacgtcagcttgcattaccgtcttttctggcggtcttacgtaggtctctgtgcctcagtgagttgcaaatggagagagaagagaggaggggcaaacatggtacggtgggaaggaaagaaaaggggacgattgtgtataccctgtgtagcttgcttacgtctctctgagtgttcccgctagagagtcattatcatggatgtggtatttcactttcagaccgccggactttgacatgtctgtacatcctgaatctctccatacgctgttgagacagaggacgtacagattaggcgcggaaat

SEQ ID NO: 19511 - DNA, 642 bp, Muscodor strobelii
  misc_feature: SGI cDNA ID NO. 566562
  misc_feature: Reduced expression when VOC is produced
  misc_feature: Encodes the peptide sequence at SEQ ID NO 19512
atgagccctgttgtcaagaaagaggagcgatttgagactcccgcgaagaaggaagaccggtttggaactcctatgcctatcaaaaaagaagaagagaagagctcgcctaccaagagacgcgatcttttcatgcgtgagcggagcatggagcgatatggatatgacggtgtcaatgaatccaagaatgggctcaagactcaagagacgattggaggagatcagacacgggaagaagagaacgtggccatttcagatgtggactgggagtttgagcaatgggcttccttccagggaggctcgagatttctcaacgtttccgaggcagacgctacacgatgtctcgaaagactcttcaacaatgacgcacaacttgaatctaactgcaccgtcttcatgaacgaagacagggactgcactttctcccgtccccgtcgccgactaagaaatcctgctcttcggaacaacgcccacgggaacttttcgatcaatgtgaactttggcttctcgatgcgtcgtgacaattcaggacgcttgactttttctatttgcggcacagggggtggcccagccaacaaaagatttaccagaacagggggacgctggaatatgaatatcaatggctgggtcatgaatctgttctga

SEQ ID NO: 19512 - protein, 213 aa, Muscodor strobelii
  misc_feature: SGI Peptide ID NO. 566562
  misc_feature: Useful for introducing or modulating the production of volatile compounds
MSPVVKKEERFETPAKKEDRFGTPMPIKKEEEKSSPTKRRDLFMRERSMERYGYDGVNESKNGLKTQETIGGDQTREEENVAISDVDWEFEQWASFQGGSRFLNVSEADATRCLERLFNNDAQLESNCTVFMNEDRDCTFSRPRRRLRNPALRNNAHGNFSINVNFGFSMRRDNSGRLTFSICGTGGGPANKRFTRTGGRWNMNINGWVMNLF

SEQ ID NO: 19513 - DNA, 1759 bp, Muscodor strobelii
  misc_feature: SGI EST ID NO. CUFF.46096.1
  misc_feature: Variant of the nucleotide sequence at SEQ ID NO 19511
agcaactgcatttcttcccttcactcaatctagccatcctccacccaaccttcactccatcactcaaaacctccttcgtcgcgcgtacatctgcattctaccttcttatatcgcctgcagctacaatcatcatagacagcacaccgcgcgacaccgcgcccaaatcatcacaatggccaacttcctcgcctccatctttggcacggagcaggacaaagtcaactgctccttctactacaagatcggcgcctgccgccatggtgaccgctgctcccgcaagcacgtcaaaccctcctactcacagaccatcctcctcccctccatgtaccagaaccccgcccacgaccccaagtcccgcctgtctcccgagcagtgcatgaaccacttcgacgccttctacgaggacctctggtgcgagctctgcaagtacggcgagctcgaggaactcgtcgtctgcgacaacacgaacgaccacctcatcggcaacgtctacgctcgattcaagtatgaggattccgcccagtctgcctgcgacgagctcaacagtcgttggtatgccggccgccccatctactgcgagttgagccccgtcaccgatttccgcgaggcttgttgccgtctcaactccggagagggatgtgtcagaggcggattctgcaacttcatccaccgcaagaaccctactcccgagctcgacagagagctgactctcgctacgaagaagtggctcaagatgcgtggtcgcgatgccaagagtatgagtcgcagtcctagcccggagccgacgcgtagacggtactaggataaccgtggtgcgcgagacactgggcgcgatggaggaagaggccgtagcatgagccctgttgtcaagaaagaggagcgatttgagactcccgcgaagaaggaagaccggtttggaactcctatgcctatcaaaaaagaagaagagaagagctcgcctaccaagagacgcgatcttttcatgcgtgagcggagcatggagcgatatggatatgacggtgtcaatgaatccaagaatgggctcaagactcaagagacgattggaggagatcagacacgggaagaagagaacgtggccatttcagatgtggactgggagtttgagcaatgggcttccttccagggaggctcgagatttctcaacgtttccgaggcagacgctacacgatgtctcgaaagactcttcaacaatgacgcacaacttgaatctaactgcaccgtcttcatgaacgaagacagggactgcactttctcccgtccccgtcgccgactaagaaatcctgctcttcggaacaacgcccacgggaacttttcgatcaatgtgaactttggcttctcgatgcgtcgtgacaattcaggacgcttgactttttctatttgcggcacagggggtggcccagccaacaaaagatttaccagaacagggggacgctggaatatgaatatcaatggctgggtcatgaatctgttctgaaccatgacgacgtttttctgtacggggaagcaaaacaactaaatgaaagtgacgaaacagtatttgatgcttagctagttcatcgcttcgtcgcttcgtgtataaataagactaaagaaatcgtcctcataatgaaaaagcttaatcctccagcccaatgatcgcctcccaagtatcaatagcatggtcataacggaactataagcagacaccatttgcctcatcgcttcgcatactaacaagatacaagaccaggttgccaat

SEQ ID NO: 19514 - DNA, 630 bp, Muscodor strobelii
  misc_feature: SGI cDNA ID NO. 566563
  misc_feature: Reduced expression when VOC is produced
  misc_feature: Encodes the peptide sequence at SEQ ID NO 19515
atggccaacttcctcgcctccatctttggcacggagcaggacaaagtcaactgctccttctactacaagatcggcgcctgccgccatggtgaccgctgctcccgcaagcacgtcaaaccctcctactcacagaccatcctcctcccctccatgtaccagaaccccgcccacgaccccaagtcccgcctgtctcccgagcagtgcatgaaccacttcgacgccttctacgaggacctctggtgcgagctctgcaagtacggcgagctcgaggaactcgtcgtctgcgacaacacgaacgaccacctcatcggcaacgtctacgctcgattcaagtatgaggattccgcccagtctgcctgcgacgagctcaacagtcgttggtatgccggccgccccatctactgcgagttgagccccgtcaccgatttccgcgaggcttgttgccgtctcaactccggagagggatgtgtcagaggcggattctgcaacttcatccaccgcaagaaccctactcccgagctcgacagagagctgactctcgctacgaagaagtggctcaagatgcgtggtcgcgatgccaagagtatgagtcgcagtcctagcccggagccgacgcgtagacggtactag

SEQ ID NO: 19515 - protein, 209 aa, Muscodor strobelii
  misc_feature: SGI Peptide ID NO. 566563
  misc_feature (13)..(39): Pfam Id: PF00642 Pfam Desc: Zinc finger C-x8-C-x5-C-x3-H type (and similar)
  misc_feature (1)..(209): NCBI GI: 115401000 Blast Desc: splicing factor U2AF 23 kDa subunit [Aspergillus terreus NIH2624] gi|114190029|gb|EAU31729.1| splicing factor U2AF 23 kDa subunit [Aspergillus terreus NIH2624]
  misc_feature (1)..(209): NCBI GI: 212526104 Blast Desc: U2 auxiliary factor small subunit, [Penicillium marneffei ATCC 18224] gi|242780019|ref|XP_002479507.1| U2 auxiliary factor small subunit, [Talaromyces stipitatus ATCC U2
  misc_feature (1)..(209): NCBI GI: 39965459 Blast Desc: conserved [Magnaporthe grisea 70-15] gi|145013147|gb|EDJ97788.1| conserved [Magnaporthe grisea 70-15]
  misc_feature (1)..(209): NCBI GI: 154279620 Blast Desc: splicing factor U2AF 35 kDa subunit [Ajellomyces capsulatus NAm1] gi|150412566|gb|EDN07953.1| splicing factor U2AF 35 kDa subunit [Ajellomyces capsulatus NAm1]
  misc_feature (1)..(209): NCBI GI: 67904750 Blast Desc: AN9362.2 [Aspergillus nidulans FGSC A4] gi|40747273|gb|EAA66429.1| conserved [Aspergillus nidulans FGSC A4] gi|259488204|tpe|CBF87476.1| TPA: U2 auxiliary factor small
  misc_feature (1)..(209): NCBI GI: 46124965 Blast Desc: FG06860.1 [Gibberella zeae PH-1]
  misc_feature (1)..(209): NCBI GI: 121712082 Blast Desc: U2 auxiliary factor small subunit, [Aspergillus clavatus NRRL 1] gi|119401808|gb|EAW12230.1| U2 auxiliary factor small subunit, [Aspergillus clavatus NRRL 1]
  misc_feature (1)..(209): NCBI GI: 145228481 Blast Desc: An01g01060 [Aspergillus niger] gi|134054638|emb|CAK43483.1| protein product [Aspergillus niger]
  misc_feature (1)..(209): NCBI GI: 70986128 Blast Desc: U2 auxiliary factor small subunit [Aspergillus fumigatus Af293] gi|66846190|gb|EAL86523.1| U2 auxiliary factor small subunit, [Aspergillus fumigatus Af293] U2 auxiliary factor
  misc_feature (1)..(209): NCBI GI: 261196914 Blast Desc: splicing factor U2AF 35 kDa subunit [Ajellomyces dermatitidis SLH14081] gi|225562652|gb|EEH10931.1| splicing factor U2AF 23 kDa subunit [Ajellomyces capsulatus G186AR] factor
  misc_feature: Useful for introducing or modulating the production of volatile compounds
MANFLASIFGTEQDKVNCSFYYKIGACRHGDRCSRKHVKPSYSQTILLPSMYQNPAHDPKSRLSPEQCMNHFDAFYEDLWCELCKYGELEELVVCDNTNDHLIGNVYARFKYEDSAQSACDELNSRWYAGRPIYCELSPVTDFREACCRLNSGEGCVRGGFCNFIHRKNPTPELDRELTLATKKWLKMRGRDAKSMSRSPSPEPTRRRY

SEQ ID NO: 19516 - DNA, 1814 bp, Muscodor strobelii
  misc_feature: SGI EST ID NO. CUFF.46095.0
  misc_feature: Variant of the nucleotide sequence at SEQ ID NO 19514
agcaactgcatttcttcccttcactcaatctagccatcctccacccaaccttcactccatcactcaaaacctccttcgtcgcgcgtacatctgcattctaccttcttatatcgcctgcagctacaatcatcatagacagcacaccgcgcgacaccgcgcccaaatcatcacaatggccaacttcctcgcctccatctttggcacggagcaggacaaagtcaactgctccttctactacaagatcggcgcctgccgccatggtgaccgctgctcccgcaagcacgtcaaaccctcctactcacagaccatcctcctcccctccatgtaccagaaccccgcccacgaccccaagtcccgcctgtctcccgagcagtgcatgaaccacttcgacgccttctacgaggacctctggtgcgagctctgcaagtacggcgagctcgaggaactcgtcgtctgcgacaacacgaacgaccacctcatcggcaacgtctacgctcgattcaagtatgaggattccgcccagtctgcctgcgacgagctcaacagtcgttggtatgccggccgccccatctactgcgagttgagccccgtcaccgatttccgcgaggcttgttgccgtctcaactccggagagggatgtgtcagaggcggattctgcaacttcatccaccgcaagaaccctactcccgagctcgacagagagctgactctcgctacgaagaagtggctcaagatgcgtggtcgcgatgccaagagtatgagtcgcagtcctagcccggagccgacgcgtagacggtactaggataaccgtggtgcgcgagacactgggcgcgatggaggaagaggccgtagcatgagccctgttgtcaagaaagaggagcgatttgagactcccgcgaagaaggaagaccggtttggaactcctatgcctatcaaaaaagaagaagagaagagctcgcctaccaagagacgcgatcttttcatgcgtgagcggagcatggagcgatatggatatgacggtgtcaatgaatccaagaatgggctcaagactcaagagacgattggaggagatcagacacgggaagaagagaacgtggccatttcagatgtggactgggagtttgagcaatgggcttccttccagtgagtcccaaactcactcgcaacagggagatattagctgaagagcacaaactaggggaggctcgagatttctcaacgtttccgaggcagacgctacacgatgtctcgaaagactcttcaacaatgacgcacaacttgaatctaactgcaccgtcttcatgaacgaagacagggactgcactttctcccgtccccgtcgccgactaagaaatcctgctcttcggaacaacgcccacgggaacttttcgatcaatgtgaactttggcttctcgatgcgtcgtgacaattcaggacgcttgactttttctatttgcggcacagggggtggcccagccaacaaaagatttaccagaacagggggacgctggaatatgaatatcaatggctgggtcatgaatctgttctgaaccatgacgacgtttttctgtacggggaagcaaaacaactaaatgaaagtgacgaaacagtatttgatgcttagctagttcatcgcttcgtcgcttcgtgtataaataagactaaagaaatcgtcctcataatgaaaaagcttaatcctccagcccaatgatcgcctcccaagtatcaatagcatggtcataacggaactataagcagacaccatttgcctcatcgcttcgcatactaacaagatacaagaccaggttgccaat

SEQ ID NO: 19517 - DNA, 600 bp, Muscodor strobelii
  misc_feature: SGI cDNA ID NO. 566564
  misc_feature: Reduced expression when VOC is produced
  misc_feature: Encodes the peptide sequence at SEQ ID NO 19518
atggcatcaattggaaacactgagataggtgcaggcgactccattcagccacagtctacctcctcgaaacccacgactcccatcacaaccggtcgcgcgttgccctcagaagcggtgtcgattgcagaaataggggcacacacgttcacaatcaattatgggtggtcagtacctaaagaggatctcgccgtttttctgaacacaacgtattcagaagccagcatcaaggcagatctcgaagaccctaagaaggaccttatcgtagcccgagacttaacaggcaaagtcctgggctttgtgtatctcttccgcggtctctcagagccttgcattcccggcgacccatccactcacgcagagctgggtcgactgtacgtcgcaatggatgcgcagggtcgaggtgttggctcgaagttatgtgccgtgcttgaggagcaagcccgtgctgaaggcttcaagcagttgtggttgagtgtttgggagaatgcgcccaagacacagaggttgtatgagaggctgggctttgggcaggttggggagatgttcttcccgatgggcgtgcataatcaccgagatcttgtttacaataagagtttgtaa

SEQ ID NO: 19518 - protein, 199 aa, Muscodor strobelii
  misc_feature: SGI Peptide ID NO. 566564
  misc_feature (88)..(176): Pfam Id: PF00583 Pfam Desc: Acetyltransferase (GNAT) family
  misc_feature (28)..(199): NCBI GI: 46126429 Blast Desc: FG07592.1 [Gibberella zeae PH-1]
  misc_feature (22)..(199): NCBI GI: 255957203 Blast Desc: Pc21g23900 [Penicillium chrysogenum Wisconsin 54-1255] gi|211591065|emb|CAP97287.1| Pc21g23900 [Penicillium chrysogenum Wisconsin 54-1255]
  misc_feature (16)..(199): NCBI GI: 256724782 Blast Desc: NECHADRAFT_48313 [Nectria haematococca mpVI 77-13-4]
  misc_feature (20)..(199): NCBI GI: 261353536 Blast Desc: acetyltransferase [Verticillium albo-atrum VaMs.102]
  misc_feature (28)..(199): NCBI GI: 71023413 Blast Desc: UM05789.1 [Ustilago maydis 521] gi|46100795|gb|EAK86028.1| UM05789.1 [Ustilago maydis 521]
  misc_feature (21)..(186): NCBI GI: 16126312 Blast Desc: acetyltransferase [Caulobacter crescentus CB15] gi|221235091|ref|YP_002517527.1| GCN5-related N-acetyltransferase [Caulobacter crescentus NA1000] gi|13423552|gb|AAK24044.1| GNAT
  misc_feature (27)..(195): NCBI GI: 266629948 Blast Desc: GCN5-related N-acetyltransferase [Caulobacter segnis ATCC 21756] gi|264671877|gb|EEZ35298.1| GCN5-related N-acetyltransferase [Caulobacter segnis ATCC 21756]
  misc_feature (33)..(199): NCBI GI: 254294788 Blast Desc: GCN5-related N-acetyltransferase [Hirschia baltica ATCC 49814] gi|254043319|gb|ACT60114.1| GCN5-related N-acetyltransferase [Hirschia baltica ATCC 49814]
  misc_feature (36)..(199): NCBI GI: 115375242 Blast Desc: acetyltransferase, gnat family [Stigmatella aurantiaca DW4/3-1] gi|115367709|gb|EAU66679.1| acetyltransferase, gnat family [Stigmatella aurantiaca DW4/3-1]
  misc_feature (32)..(198): NCBI GI: 78048840 Blast Desc: acetyltransferase (GNAT) family protein [Xanthomonas campestris pv. vesicatoria str. 85-10] gi|78037270|emb|CAJ25015.1| acetyltransferase (GNAT) family pv.
  misc_feature: Useful for introducing or modulating the production of volatile compounds
MASIGNTEIGAGDSIQPQSTSSKPTTPITTGRALPSEAVSIAEIGAHTFTINYGWSVPKEDLAVFLNTTYSEASIKADLEDPKKDLIVARDLTGKVLGFVYLFRGLSEPCIPGDPSTHAELGRLYVAMDAQGRGVGSKLCAVLEEQARAEGFKQLWLSVWENAPKTQRLYERLGFGQVGEMFFPMGVHNHRDLVYNKSL

SEQ ID NO: 19519 - DNA, 926 bp, Muscodor strobelii
  misc_feature: SGI EST ID NO. CUFF.46102.0
  misc_feature: Variant of the nucleotide sequence at SEQ ID NO 19517
ttatgatacagcatttgatactggagccggtccggatcactacatatttattgtgtcacgacgatctgaattcgatgagttctaaccccgtctaagtctcacaacggacactgcaagctagtgtcattaatatcaaatggcatcaattggaaacactgagataggtgcaggcgactccattcagccacagtctacctcctcgaaacccacgactcccatcacaaccggtcgcgcgttgccctcagaagcggtgtcgattgcagaaataggggcacacacgttcacaatcaattatgggtggtcagtacctaaagaggatctcgccgtttttctgaacacaacgtattcagaagccagcatcaaggcagatctcgaagaccctaagaaggaccttatcgtagcccgagacttaacaggcaaagtcctgggctttgtgtatctcttccgcggtctctcagagccttgcattcccggcgacccatccactcacgcagagctgggtcgactgtacgtcgcaatggatgcgcagggtcgaggtgttggctcgaagttatgtgccgtgcttgaggagcaagcccgtgctgaaggcttcaagcagttgtggttgagtgtttgggagaatgcgcccaagacacagaggttgtatgagaggctgggctttgggcaggttggggagatgttcttcccgatgggcgtgcataatcaccgagatcttgtttacaataagagtttgtaatggttgaaaagttgaggcgttttgattttggtcgcgggaaattttgattaggaggggcagatagagagaaacatagagaaaagaggagctgggtaaaaatggtataaaaatacatcaagctcggttaggcctagagcgcattagtcaaaacattgagttcactgcggccttatatcacgcaaaatgcgca

SEQ ID NO: 19520 - DNA, 1242 bp, Muscodor strobelii
  misc_feature: SGI cDNA ID NO. 566565
  misc_feature: Encodes the peptide sequence at SEQ ID NO 19521
atggccgtcaaacaatcaaaaatgcaagccaccaaggctaatacctcttctaagaaaccaaaagccgtcaagaaggaggatagcagcgatgaagagtacaaggatgtcgagctccccatgaaaacacgaccgagtcacagatccttgcctgtatactcacctctacagcaaatgaactatacacccgagcttgatcagagcacatacagaccacgggatctgctcaactatgcggtcaagacttttcatagtcgtgaggtcgatgacttaaacgaccgacagcgagacgtcaagagcaagctggttcgggcatttgacacacaacaggaccactatggagcaatgcgggaggataatacttcaattgctatgctgcaacgagaagtccggactttcatgcaataccttgacggatacttcttcgtcggaagtttgcagcctcatgtcatattgaccgctgactttgatgcactggttgcagaggatcctgtcactggtgaggtcttggacggcggcacggagatcgttcagcaaaggaaaggggacgagaatgatgatgctgagcaagaggaagacgacgacgacgagagcgaggagacggacgaagatattcagcttcaaatccacattaacctcggacaaggccgtgctatctatacccttgatcacattctcggcctgttggtgtctgagctggtacactgctggttcctcttattcggttgtaaatgcgcaatgtgcaccaaggacgctctcaatacgaccggacctccagaccaccatcgtggcccgttcttcttgatgctgcaccgtctgattatcactgacctgcgcacatgggatgccagccttagaaacttagaggctgatgattgtcccgagaatgaggttagcaatcgctggcgggcattctatcaatctgctgttgccgatctctccaagcaggaaaaggcaggccttaggaaaagaaggggtcccaacggcaatgcagcacacttgattcgattgttggaggataacacagtcgctgtcaagccgagcctgaaattcaatcagttggactacgaggactctcgacgtgagagactaagaatcgaggcacagaaccgcgaaagaaatgaggaacgccgtcgacgggaccgacaacgacttggcgatcaggagcgccacgatgaaatgctagacagggaggaggaaacacgccgagccaggcggagtgctacaccacgagatgccgagtaa

SEQ ID NO: 19521 - protein, 413 aa, Muscodor strobelii
  misc_feature: SGI Peptide ID NO. 566565
MAVKQSKMQATKANTSSKKPKAVKKEDSSDEEYKDVELPMKTRPSHRSLPVYSPLQQMNYTPELDQSTYRPRDLLNYAVKTFHSREVDDLNDRQRDVKSKLVRAFDTQQDHYGAMREDNTSIAMLQREVRTFMQYLDGYFFVGSLQPHVILTADFDALVAEDPVTGEVLDGGTEIVQQRKGDENDDAEQEEDDDDESEETDEDIQLQIHINLGQGRAIYTLDHILGLLVSELVHCWFLLFGCKCAMCTKDALNTTGPPDHHRGPFFLMLHRLIITDLRTWDASLRNLEADDCPENEVSNRWRAFYQSAVADLSKQEKAGLRKRRGPNGNAAHLIRLLEDNTVAVKPSLKFNQLDYEDSRRERLRIEAQNRERNEERRRRDRQRLGDQERHDEMLDREEETRRARRSATPRDAE

SEQ ID NO: 19522 - DNA, 1287 bp, Muscodor strobelii
  misc_feature: SGI cDNA ID NO. 566567
  misc_feature: Encodes the peptide sequence at SEQ ID NO 19523
atgttaacacttggagactgggatgactcggtggaagacgaggacgatagacttatggaacaggccccatttgcactacttgcctctcgaataacagaacgcgtctgggcgatgtttgaagagggaatatcaggcgacaccactggattagtacaggcaatggagaacgggcgcacccagacgggtagggcagatagggttcagtctaacactacttcgccacgaacatcgcagttccgaagacgcttcagaagttctctgtaccgacgtaacgatcgcgacaatgatgaaaatgacgacgagggtgggcctgcaaggtccacggtcaggaagccaccatctacaggattggagaaccttgattgggcttgcccatttagcaagctgaagccgatgagatatgaagcatgctaccaatatcagttaagcgatgtaagccgggtcaagcaacatttgtctcggcgtcacaaattgccgctatactgttctatttgcttcctagagtttgacaacgagccgattcgagaccaacatattgccgcgcgtacttgccaaccgcgactatcccaagttgagggattgaacttggagcaacagaagtggcttcatcaacgtatgagtccaaatatgagcgaggaggagcggtggtacgagatctttcactacttatttccagatgctcaccgaccagattcgccgtttattgatcgtaaaatgtctcgagagattctttacctccaagacctggttgctactgagggcccaactgtgatcgatcagtctatacaggatacgacacgccaattccctgacacaatattcatcagcgatgatcagttccaagcagttctacgctacgcctgcaggcaggcaatactgcggctcgttcagcgaacccgagctcactttgacccagcacgggacacgtcaggcatttctatcactgccccggaagaaccatccagagtcgtccaaaaccagccaactaattttcaatcccgcaccacagctaacgacctaagccaacacgccgtagatccactcatcagttctgggcttcacgtgagaccccagacctggcctgccgtgagtgtggcgccggacagcgcaggagggcaatataaccgaggacttgacagaataccccaatactatgaccgacggcctacaccgtctcaaggcgaagttacgcttggaagcactaatccgtcttttaacctcgacttgttagatgacttcaatggccacgacttgtcagacagaatagattgggatcaatctctctaa

SEQ ID NO: 19523 - protein, 428 aa, Muscodor strobelii
  misc_feature: SGI Peptide ID NO. 566567
  misc_feature (45)..(265): NCBI GI: 171680950 Blast Desc: protein product [Podospora anserina] gi|170940433|emb|CAP65660.1| protein product [Podospora anserina]
  misc_feature (64)..(233): NCBI GI: 171691262 Blast Desc: protein product [Podospora anserina] gi|170945579|emb|CAP71692.1| protein product [Podospora anserina]
  misc_feature (80)..(254): NCBI GI: 256720685 Blast Desc: expressed protein [Nectria haematococca mpVI 77-13-4]
  misc_feature (84)..(315): NCBI GI: 256720885 Blast Desc: [Nectria haematococca mpVI 77-13-4]
  misc_feature (124)..(260): NCBI GI: 171691260 Blast Desc: protein product [Podospora anserina] gi|170945578|emb|CAP71691.1| protein product [Podospora anserina]
  misc_feature (96)..(237): NCBI GI: 46109250 Blast Desc: FG01507.1 [Gibberella zeae PH-1]
  misc_feature (89)..(236): NCBI GI: 116205235 Blast Desc: CHGG_10501 [Chaetomium globosum CBS 148.51] gi|88176629|gb|EAQ84097.1| CHGG_10501 [Chaetomium globosum CBS 148.51]
  misc_feature (102)..(274): NCBI GI: 256722882 Blast Desc: [Nectria haematococca mpVI 77-13-4]
  misc_feature (65)..(264): NCBI GI: 256734879 Blast Desc: [Nectria haematococca mpVI 77-13-4]
  misc_feature (89)..(274): NCBI GI: 256726722 Blast Desc: NECHADRAFT_76012 [Nectria haematococca mpVI 77-13-4]
MLTLGDWDDSVEDEDDRLMEQAPFALLASRITERVWAMFEEGISGDTTGLVQAMENGRTQTGRADRVQSNTTSPRTSQFRRRFRSSLYRRNDRDNDENDDEGGPARSTVRKPPSTGLENLDWACPFSKLKPMRYEACYQYQLSDVSRVKQHLSRRHKLPLYCSICFLEFDNEPIRDQHIAARTCQPRLSQVEGLNLEQQKWLHQRMSPNMSEEERWYEIFHYLFPDAHRPDSPFIDRKMSREILYLQDLVATEGPTVIDQSIQDTTRQFPDTIFISDDQFQAVLRYACRQAILRLVQRTRAHFDPARDTSGISITAPEEPSRVVQNQPTNFQSRTTANDLSQHAVDPLISSGLHVRPQTWPAVSVAPDSAGGQYNRGLDRIPQYYDRRPTPSQGEVTLGSTNPSFNLDLLDDFNGHDLSDRIDWDQSL

SEQ ID NO: 19524 - DNA, 338 bp, Muscodor strobelii
  misc_feature: SGI EST ID NO. CUFF.45566.0
  misc_feature: Variant of the nucleotide sequence at SEQ ID NO 19522
gtgatcgatcagtctatacaggatacgacacgccaattccctgacacaatattcatcagcgatgatcagttccaagcagttctacgctacgcctgcaggcaggcaatactgcggctcgttcagcgaacccgagctcactttgacccagcacgggacacgtcaggcatttctatcactgccccggaagaaccatccagagtcgtccaaaaccagccaactaattttcaatcccgcaccacagctaacgacctaagccaacacgccgtagatccactcatcagttctgggcttcacgtgagaccccagacctggcctgccgtgagtgtggcgccggacag

SEQ ID NO: 19525 - DNA, 2184 bp, Muscodor strobelii
  misc_feature: SGI cDNA ID NO. 566569
  misc_feature: Encodes the peptide sequence at SEQ ID NO 19526
atgtctctactctcttccggacggctgtacaagcccttgcccaacgaaacttcaatccgcataatcattctcgcaccagctgagaactgtgactgtggcttatcttgtgatttgattgaatcggacttagattatgaccacgataggtttccaaactcggagccactacaagtcgcactagaatgctttgtaccctctttggaaaagactgacgatggcgatggccatcatttcccgacgatcctagacttaaaatcagatacaactcctgacgaaccacgattgcatcaatttcaacattatgaagctctatcctatgtttggggtgatcttggcgatttacatcacattcgagtgaatggacagagttttccgatcacgacaggtctgtcctctgcgctgcgctctcttcgcctacaggatcgcgggcgcaagttatggatagacgccctgtgcatcaatcaaagtgaccatgaagaaaagaaggtccaactcggcctcatgacacgtatatatcagcaggcccagaaagtcattgcttatgtgcccttgtcattatcagatgaaaataaccttcgagaattgactcaaaagattctccgagcctctatggcttacaaagagtcccgagcgtcgagcgacaagacccaatctgatcaagaacagtctactacatctttcaattcgatcactaatttggaatcgaaacgagtcataagggataaagcagagccgatgagtgtcgttatggccaaggcattcggtacagacgaccactacatcgaaagtttcggactcccgcaggaaaatagtccgctttgggattcctggcggagattatttacatcgtcatactttcggcgtgtgtggatatggcaggaagttactctgggtaacaatctcttcttctggtttggaaccaatgggcaagctgccgagcccattttcttagcacaccatgccctagaagacgaaagtgccttaacgaatatgagctataacgccgcttggtgtgcttcggatgaagacacacaggtgacattgaatgacagacttgtaggatctggaaacgcaagaacgatgtatctcgagaggatcatgcgattatttggcaccggcgacaagagtagactgattgagaagttggccaaagtcggaacattcgaagctacagatccacgtgacaagatctacgcaatgttgggcctggcattcgacggcgcctcatttgtcgaacatgttagttatgcgccctgcgactccatggagcgtaccttcgtcaagtttgccaagctgttcatggcgagaaacgaaggaattgacgttctcttgcaagctggaattcgagacgagagtgatgagtggccatcttgggtacctcactgggatgatctggagcggactgtgcctatagatgctagcagaacgcctggtaaaacaacgacaaaaatcgaattgagggacaatagttccagcatacaggtgtgtggaaggattatagacgacatctctgtggtaaacagtgaagttctagaaaagctgcaggtgactgagtctggtgtcgatatcatgagattcgtgaagacaatggtaagtgggctaaagatggtattcaatgccgccactcctcaggacccagagcagatcttcgaaaagctttttcacgtccttgctcaacctcaggcccagcacaaaacaactgcacaggaggaaagtcaagatgaagacatggatcaggaaagtcgagaaatcaaagccttacgtgtgggtttccgtgagtttctcagttgggtagtagcactacgctctcagcttggggacctgtcgtccgactctgaggaggatgccactcacctacttcaagtggaatcgcctgtagagtttcaaaaatttcaacaagcagcgatgaagcatattcatcaccgtcgtctatgcgtcacaaccggagaccatattggtattgcaccaaaacgtgtaaaagcaggggacaaagttgtcgtgttcgaagattgcgatatacacttcattctacgtccggtcaaatacataacaggctttcacattccagaaaatgaaaatttggagggcaacttgacgtacagacttgtaggacctgcgtttttctacctagaaaacgagacgacggccgcaaaggcaaacatcgagaatattgcgatactgtaa

SEQ ID NO: 19526 - protein, 727 aa, Muscodor strobelii
  misc_feature: SGI Peptide ID NO. 566569
  misc_feature (101)..(294): Pfam Id: PF06985 Pfam Desc: Heterokaryon incompatibility protein (HET)
  misc_feature (101)..(208): Pfam Id: PF06985 Pfam Desc: Heterokaryon incompatibility protein (HET)
  misc_feature (10)..(460): NCBI GI: 171679763 Blast Desc: protein product [Podospora anserina] gi|170939507|emb|CAP64735.1| protein product [Podospora anserina]
  misc_feature (101)..(474): NCBI GI: 169777885 Blast Desc: [Aspergillus oryzae RIB40] gi|83772145|dbj|BAE62275.1| protein product [Aspergillus oryzae]
  misc_feature (9)..(462): NCBI GI: 116182272 Blast Desc: CHGG_01764 [Chaetomium globosum CBS 148.51] gi|88186061|gb|EAQ93529.1| CHGG_01764 [Chaetomium globosum CBS 148.51]
  misc_feature (99)..(462): NCBI GI: 256721593 Blast Desc: NECHADRAFT_67889 [Nectria haematococca mpVI 77-13-4]
  misc_feature (106)..(474): NCBI GI: 238495120 Blast Desc: conserved [Aspergillus flavus NRRL3357] gi|220695446|gb|EED51789.1| conserved [Aspergillus flavus NRRL3357]
  misc_feature (99)..(715): NCBI GI: 256722665 Blast Desc: NECHADRAFT_87188 [Nectria haematococca mpVI 77-13-4]
  misc_feature (101)..(709): NCBI GI: 171678935 Blast Desc: protein product [Podospora anserina] gi|170937538|emb|CAP62196.1| protein product [Podospora anserina]
  misc_feature (101)..(706): NCBI GI: 170940109 Blast Desc: protein product [Podospora anserina]
  misc_feature (82)..(704): NCBI GI: 256724990 Blast Desc: NECHADRAFT_77031 [Nectria haematococca mpVI 77-13-4]
  misc_feature (101)..(678): NCBI GI: 119179507 Blast Desc: CIMG_08498 [Coccidioides immitis RS]
MSLLSSGRLYKPLPNETSIRIIILAPAENCDCGLSCDLIESDLDYDHDRFPNSEPLQVALECFVPSLEKTDDGDGHHFPTILDLKSDTTPDEPRLHQFQHYEALSYVWGDLGDLHHIRVNGQSFPITTGLSSALRSLRLQDRGRKLWIDALCINQSDHEEKKVQLGLMTRIYQQAQKVIAYVPLSLSDENNLRELTQKILRASMAYKESRASSDKTQSDQEQSTTSFNSITNLESKRVIRDKAEPMSVVMAKAFGTDDHYIESFGLPQENSPLWDSWRRLFTSSYFRRVWIWQEVTLGNNLFFWFGTNGQAAEPIFLAHHALEDESALTNMSYNAAWCASDEDTQVTLNDRLVGSGNARTMYLERIMRLFGTGDKSRLIEKLAKVGTFEATDPRDKIYAMLGLAFDGASFVEHVSYAPCDSMERTFVKFAKLFMARNEGIDVLLQAGIRDESDEWPSWVPHWDDLERTVPIDASRTPGKTTTKIELRDNSSSIQVCGRIIDDISVVNSEVLEKLQVTESGVDIMRFVKTMVSGLKMVFNAATPQDPEQIFEKLFHVLAQPQAQHKTTAQEESQDEDMDQESREIKALRVGFREFLSWVVALRSQLGDLSSDSEEDATHLLQVESPVEFQKFQQAAMKHIHHRRLCVTTGDHIGIAPKRVKAGDKVVVFEDCDIHFILRPVKYITGFHIPENENLEGNLTYRLVGPAFFYLENETTAAKANIENIAIL

SEQ ID NO: 19527 - DNA, 1020 bp, Muscodor strobelii
  misc_feature: SGI cDNA ID NO. 566570
  misc_feature: Elevated expression when VOC is produced
  misc_feature: Encodes the peptide sequence at SEQ ID NO 19528
atggaccaacttccaaagaaaacattcaccacatcgcggggctatacgtatgcttattacgtacacaaaccaacatctgcgactaataagccggcgctggctttctgtcatggatggccggatcatgctcttatgtggaatgacatagcgacggcgctactggatagtggccatccgattgtcgcaactgatatgttgggatatgatggtacttcgaaaccgacagatccccacgagtaccgctccaaggcactggtagatgatctctatgaagtcttcgacgccgaaggactaaacaagatcatcccagtcggccacgactggggttcgtggatggcacagcgcctgtatatctggcggcccgagcgatgtaccggccttgtgctgctcagcgcgccataccagccagcgcaagtcgggaccgatgttgaaccaccagcgtttgacctgcaagtcatgaacacggttgtagaaaaagcctatggctaccccgcattggcatactggcaactcttcggcgtcgacgaggatggaccgcaggtgctgcgcgacaatgttgagacgctgtaccacctgttgcattgggacgatccggatgccatgatgaaggctttctgtgtgctcggcgctactcgtgaactggtcacaacgggtaagcctgaggatttcccattgaaggaatatgcgcgcgtgcccgggatgaaggaggcttggattagccgtatgacgcgcgatggcttcgagggtcctcaatgctggtacaaatccacgttgaataattctcagtcggagagtgaaaaggagataccacctgcgaacctccttatcaaggatccctgcctgtatattagcggtacacgcgactccgtgtgccgcaccgacggcatggagcgggtgaagacacttgtgcctgacctgacgactctgatccttgagggaaatcactggattctgcttgaccgagcggacgagacgcgcgaccgcattgtgtcatggctatccgagaagtatccctcttaa

SEQ ID NO: 19528 - protein, 339 aa, Muscodor strobelii
  misc_feature: SGI Peptide ID NO. 566570
  misc_feature (58)..(331): Pfam Id: PF00561 Pfam Desc: alpha/beta hydrolase fold
  misc_feature (58)..(156): Pfam Id: PF00561 Pfam Desc: alpha/beta hydrolase fold
  misc_feature (1)..(337): NCBI GI: 169619195 Blast Desc: SNOG_12792 [Phaeosphaeria nodorum SN15] gi|111058472|gb|EAT79592.1| SNOG_12792 [Phaeosphaeria nodorum SN15]
  misc_feature (1)..(337): NCBI GI: 226289840 Blast Desc: conserved [Paracoccidioides brasiliensis Pb18]
  misc_feature (1)..(337): NCBI GI: 225682441 Blast Desc: conserved [Paracoccidioides brasiliensis Pb03]
  misc_feature (1)..(339): NCBI GI: 154275636 Blast Desc: [Ajellomyces capsulatus NAm1] gi|150415109|gb|EDN10471.1| [Ajellomyces capsulatus NAm1]
  misc_feature (1)..(337): NCBI GI: 226280957 Blast Desc: conserved [Paracoccidioides brasiliensis Pb01]
  misc_feature (1)..(336): NCBI GI: 240281639 Blast Desc: conserved [Ajellomyces capsulatus H143]
  misc_feature (1)..(297): NCBI GI: 145604653 Blast Desc: MGG_13875 [Magnaporthe grisea 70-15] gi|145012623|gb|EDJ97277.1| MGG_13875 [Magnaporthe grisea 70-15]
  misc_feature (7)..(335): NCBI GI: 238844169 Blast Desc: conserved [Microsporum canis CBS 113480]
  misc_feature (1)..(334): NCBI GI: 242218437 Blast Desc: [Postia placenta Mad-698-R] gi|220725831|gb|EED79802.1| [Postia placenta Mad-698-R]
  misc_feature (1)..(334): NCBI GI: 169857815 Blast Desc: CC1G_03336 [Coprinopsis cinerea okayama7#130] gi|116503230|gb|EAU86125.1| CC1G_03336 [Coprinopsis cinerea okayama7#130]
  misc_feature (31)..(333): SWISSPROT Homolog: EC 3.3.2.10 Soluble epoxide hydrolase
  misc_feature: Useful for introducing or modulating the production of volatile compounds
MDQLPKKTFTTSRGYTYAYYVHKPTSATNKPALAFCHGWPDHALMWNDIATALLDSGHPIVATDMLGYDGTSKPTDPHEYRSKALVDDLYEVFDAEGLNKIIPVGHDWGSWMAQRLYIWRPERCTGLVLLSAPYQPAQVGTDVEPPAFDLQVMNTVVEKAYGYPALAYWQLFGVDEDGPQVLRDNVETLYHLLHWDDPDAMMKAFCVLGATRELVTTGKPEDFPLKEYARVPGMKEAWISRMTRDGFEGPQCWYKSTLNNSQSESEKEIPPANLLIKDPCLYISGTRDSVCRTDGMERVKTLVPDLTTLILEGNHWILLDRADETRDRIVSWLSEKYPS

SEQ ID NO: 19529 - DNA, 2735 bp, Muscodor strobelii
  misc_feature: SGI EST ID NO. CUFF.45626.1
  misc_feature: Variant of the nucleotide sequence at SEQ ID NO 19527
cccgggttctcggccgctacaagacgcgtgtcgcgtcccaagccagcctttactcccgcaactccaattgcataagatgcatggtgtatagacagggcggcgagaaccaggtaatcatcccaactgtaggcgtaattcgtgagatatcgggaccagaagcggaaagcgacgagaatagtgctgaggactgctagagtggtgacgaggccgacgaagatgggactgtcgtctctgtaatcgatcggtggttcctcagtagtcatattgtctgtggggtttctggcccagaacgtttgagcatggtctccctcactacttattaatcatctccatcaaggaaagacggctggactggcaatgatatccccatgatgcaggagtgctgtctccctatgtatggtcatgagttgccatggacgaggacttgagatcaagctctaggtattatgctcaccttggactacggcagaggaccaaattcgccgagaagacaggtcggcgatcgcactcggagtctaaatagcgtctgatcgctcagtctcgactcccctatgtactgcagcgtaagttgggatactgaccaatctggtcattgtgtactagtcggggtcaatgcactaggcgctcggacatgattcatggttgagttagccttgcgaggtgtctagccttagtgggcatcgtgtggtaacccctgattagatctattctctccatggtaaagtgtctaatgtttgatgccggcttgcacgcggatgagcatcgatatgccgtggtgttcacatcactgccggcactataacaaatagttgaaagttcttagatctgcgatgtccatttacgtgcgaatcgctgtggtccaccccgttgaggcccaactcgggcccaactctggcctaatacaccatgtcgggtcccgccctgttgggaatttgacaaagccaagcaacaggggcatccccgcagacttgcgcggggagaagtgggtgcacgggacgtccggaacagaccgagacttttgtgatggacgtggaagagttgttcgtgtggggtagtattggatgggaaaactgacctcctcaacttatcgcggcagtcagatagtctagtcaatatctagtgagcatgtcaagcatggaccaacttccaaagaaaacattcaccacatcgcggggctatacgtatgcttattacgtacacaaaccaacatctgcgactaataagccggcgctggctttctgtcatggatggccggatcatgctcttatgtggaatgacatagcgacggcgctactggatagtggccatccgattgtcgcaactgatatgttgggatatgatggtacttcgaaaccgacagatccccacgagtaccgctccaaggcactggtagatgatctctatgaagtcttcgacgccgaaggactaaacaagatcatcccagtcggccacgactggggttcgtggatggcacagcgcctgtatatctggcggcccgagcgatgtaccggccttgtgctgctcagcgcgccataccagccagcgcaagtcgggaccgatgttgaaccaccagcgtttgacctgcaagtcatgaacacggttgtagaaaaagcctatggctaccccgcattggcatactggcaactcttcggcgtcgacgaggatggaccgcaggtgctgcgcgacaatgttgagacgctgtaccacctgttgcattgggacgatccggatgccatgatgaaggctttctgtgtgctcggcgctactcgtgaactggtcacaacgggtaagcctgaggatttcccattgaaggaatatgcgcgcgtgcccgggatgaaggaggcttggattagccgtatgacgcgcgatggcttcgagggtcctcaatgctggtacaaatccacgttgaataattctcagtcggagagtgaaaaggagataccacctgcgaacctccttatcaaggatccctgcctgtatattagcggtacacgcgactccgtgtgccgcaccgacggcatggagcgggtgaagacacttgtgcctgacctgacgactctgatccttgagggaaatcactggattctgcttgaccgagcggacgagacgcgcgaccgcattgtgtcatggctatccgagaagtatccctcttaatatttacacgtacggctagattgctagaggaatagaaggctgcgaagacttgtgcctagactttccttgctgtggaaattgcttcattgcgaaggtcgcatcggaaactcaaatgggtcccgcctggtgagcgccgtgcgcgtgaaaaacttccccccttctttttttcctttactgtagccccagagacactcactacaatcccgttcgaggggtttcgaggcatttgcagtagtgacagctcaagaagagtgaccctcatggaaagcctatgagctgaagatgttctactgcgtgggctctagaacgtcgcatagtgtggagtcttagagctaagattccattcgagcactctcatgttggttacctttcaatgcctgtgatttggcttttagctaatatggtgttgttaacatcacgcatcggtgttggacacttataatcagagaactacggtttacaatgcacgactgggaattatacgagtagtgcatgagcggtatatacgaagattgcatgaagccgcatacgacctgtttcagccctaatagactatgagtaccataatgccaagaacacgt

SEQ ID NO: 19530 - DNA, 1158 bp, Muscodor strobelii
  misc_feature: SGI cDNA ID NO. 566571
  misc_feature: Elevated expression when VOC is produced
  misc_feature: Encodes the peptide sequence at SEQ ID NO 19531
atgactactgaggaaccaccgatcgattacagagacgacagtcccatcttcgtcggcctcgtcaccactctagcagtcctcagcactattctcgtcgctttccgcttctggtcccgatatctcacgaattacgcctacagttgggatgattacctggttctcgccgccctgtctatacaccatgcatcttatgcaattggagttgcgggagtaaaggctggcttgggacgcgacacgcgtcttgtagcggccgagaacccgggtctcgtcccttacggcttcaagctagtgctagcggcgtctttcacctatggtgtagccgcaccgctcatcaagcttggagtgttggcattttattggcgtgtcttcccaacgaacaacgttcgaattggctgttacatactaggatcgctctccatcgcctggctcatcgctattaacatcaccacaggcctccagtgtcgtcccattgcaaaatggtggaacaaaacgcttcctggatcgtgtatcgattacctcaacttttacttaggtaacagcatcgccaacgctatcattgacttcggtaccatcgtactacccctccaggaggtgtaccgcctacagataacaagttggagaaaatggggcctcgccggcatctttgctctcggctttatttcttttattgctagtatcatccggatcatcacagttcagcttctcagagaaacgggcatttcgaacttcacaaagcaatttgcgtttacagcgacggccgccgtggtcgaggtctatgtggccatcatcgcagcttgtctccccctaatggtgcctgtatatcggcaactacggtacggcactactctgagcagcatatcgtcttcgcgatgtgacgcccctgtgccgttgtctcgcttatcgaagcgaaccggcactggcggagcatgccaacataacgcaaggcgccgaagcgacagtgcacctttcaacccgctcgagagcagagtcgacaaaaccgaagagcgcggcttcgatgaaccgaagcgctcttttactacagacgctgaaagtcatagcaatcctttccactcgcgttgtaactctaaggagagcgacgagggaatacgtgtacaaacagagttcataattgccgatgcgcgacggctcgacgtgtga

SEQ ID NO: 19531 - protein, 385 aa, Muscodor strobelii
  misc_feature: SGI Peptide ID NO. 566571
  misc_feature (24)..(360): NCBI GI: 46102717 Blast Desc: FG00057.1 [Gibberella zeae PH-1]
  misc_feature (22)..(358): NCBI GI: 46137139 Blast Desc: FG10085.1 [Gibberella zeae PH-1]
  misc_feature (26)..(276): NCBI GI: 121720078 Blast Desc: conserved [Aspergillus clavatus NRRL 1] gi|119404949|gb|EAW15311.1| conserved [Aspergillus clavatus NRRL 1]
  misc_feature (2)..(335): NCBI GI: 256720423 Blast Desc: NECHADRAFT_98298 [Nectria haematococca mpVI 77-13-4]
  misc_feature (24)..(295): NCBI GI: 145228617 Blast Desc: An01g01780 [Aspergillus niger] gi|134054708|emb|CAK43549.1| protein product [Aspergillus niger]
  misc_feature (3)..(357): NCBI GI: 256720355 Blast Desc: NECHADRAFT_56055 [Nectria haematococca mpVI 77-13-4]
  misc_feature (101)..(335): NCBI GI: 46114988 Blast Desc: FG03336.1 [Gibberella zeae PH-1]
  misc_feature (12)..(337): NCBI GI: 261353889 Blast Desc: conserved [Verticillium albo-atrum VaMs.102]
  misc_feature (7)..(290): NCBI GI: 115491041 Blast Desc: [Aspergillus terreus NIH2624] gi|114197008|gb|EAU38708.1| [Aspergillus terreus NIH2624]
  misc_feature (1)..(336): NCBI GI: 145236936 Blast Desc: An07g00220 [Aspergillus niger] gi|134075580|emb|CAK39246.1| protein product [Aspergillus niger]
  misc_feature: Useful for introducing or modulating the production of volatile compounds
MTTEEPPIDYRDDSPIFVGLVTTLAVLSTILVAFRFWSRYLTNYAYSWDDYLVLAALSIHHASYAIGVAGVKAGLGRDTRLVAAENPGLVPYGFKLVLAASFTYGVAAPLIKLGVLAFYWRVFPTNNVRIGCYILGSLSIAWLIAINITTGLQCRPIAKWWNKTLPGSCIDYLNFYLGNSIANAIIDFGTIVLPLQEVYRLQITSWRKWGLAGIFALGFISFIASIIRIITVQLLRETGISNFTKQFAFTATAAVVEVYVAIIAACLPLMVPVYRQLRYGTTLSSISSSRCDAPVPLSRLSKRTGTGGACQHNARRRSDSAPFNPLESRVDKTEERGFDEPKRSFTTDAESHSNPFHSRCNSKESDEGIRVQTEFIIADARRLDV

SEQ ID NO: 19532 - DNA, 3927 bp, Muscodor strobelii
  misc_feature: SGI EST ID NO. CUFF.45625.0
  misc_feature: Variant of the nucleotide sequence at SEQ ID NO 19530
acgtgttcttggcattatggtactcatagtctattagggctgaaacaggtcgtatgcggcttcatgcaatcttcgtatataccgctcatgcactactcgtataattcccagtcgtgcattgtaaaccgtagttctctgattataagtgtccaacaccgatgcgtgatgttaacaacaccatattagctaaaagccaaatcacaggcattgaaaggtaaccaacatgagagtgctcgaatggaatcttagctctaagactccacactatgcgacgttctagagcccacgcagtagaacatcttcagctcataggctttccatgagggtcactcttcttgagctgtcactactgcaaatgcctcgaaacccctcgaacgggattgtagtgagtgtctctggggctacagtaaaggaaaaaaagaaggggggaagtttttcacgcgcacggcgctcaccaggcgggacccatttgagtttccgatgcgaccttcgcaatgaagcaatttccacagcaaggaaagtctaggcacaagtcttcgcagccttctattcctctagcaatctagccgtacgtgtaaatattaagagggatacttctcggatagccatgacacaatgcggtcgcgcgtctcgtccgctcggtcaagcagaatccagtgatttccctcaaggatcagagtcgtcaggtcaggcacaagtgtcttcacccgctccatgccgtcggtgcggcacacggagtcgcgtgtaccgctaatatacaggcagggatccttgataaggaggttcgcaggtggtatctccttttcactctccgactgagaattattcaacgtggatttgtaccagcattgaggaccctcgaagccatcgcgcgtcatacggctaatccaagcctccttcatcccgggcacgcgcgcatattccttcaatgggaaatcctcaggcttacccgttgtgaccagttcacgagtagcgccgagcacacagaaagccttcatcatggcatccggatcgtcccaatgcaacaggtggtacagcgtctcaacattgtcgcgcagcacctgcggtccatcctcgtcgacgccgaagagttgccagtatgccaatgcggggtagccataggctttttctacaaccgtgttcatgacttgcaggtcaaacgctggtggttcaacatcggtcccgacttgcgctggctggtatggcgcgctgagcagcacaaggccggtacatcgctcgggccgccagatatacaggcgctatcgccggacaaattagtcgttactttaccaaatatacttacaatatggtgtctttggccgactctcgaaacttaagacaaagtgacataaaagggtctggagctcacctgtgccatccacgaaccccagtcgtggccgactgggatgatcttgtttagtccttcggcgtcgaagacttcatagagatcatctaccagtgccttggagcggtactcgtggggatctgtcggtttcgaagtaccatcatatcccaacatatcagttgcgacaatcggatggccactatccagtagcgccgtcgctatgtcattccacataagagcatgatccggccatccatgacagaaagccagcgccggcttattagtcgcagatgttggtttgtgtacgtaataagcatacgtatagccccgcgatgtggtgaatgttttctttggaagttggtccatgcttgacatgctcactagatattgactagactatctgactgccgcgataagttgaggaggtcagttttcccatccaatactaccccacacgaacaactcttccacgtccatcacaaaagtctcggtctgttccggacgtcccgtgcacccacttctccccgcgcaagtctgcggggatgcccctgttgcttggctttgtcaaattcccaacagggcgggacccgacatggtgtattaggccagagttgggcccgagttgggcctcaacggggtggaccacagcgattcgcacgtaaatggacatcgcagatctaagaacttctgatggatattagcctcgcccacaacggggaaattccgagaccaggcataaaaacagactactgactcaactatttgttatagtgccggcagtgatgtgaacaccacggcatatcgatgctcatccgcgtgcaagccggcatcaaacattagacactttaccatggagagaatagatctaatcaggggttaccacacgatgcccactaaggctagacacctcgcaaggctaactcaaccatgaatcatgtccgagcgcctagtgcattgaccccgactagtacacaatgaccagattgacgctatttagactccgagtgcgatcgccgacctgtcttctcggcgaatttggtcctctgccgtagtccaagggagacagcactcctgcatcatggggatatcattgccagtccagccgtctttccttgatggagatgattaataagtagtgagggagaccatgctcaaacgttctgggccagaaaccccacagacaatatgactactgaggaaccaccgatcgattacagagacgacagtcccatcttcgtcggcctcgtcaccactctagcagtcctcagcactattctcgtcgctttccgcttctggtcccgatatctcacgaattacgcctacagttgggatgattacctggttctcgccgccctgtctatacaccatgcatcttatgcaattggagttgcgggagtaaaggctggcttgggacgcgacacgcgtcttgtagcggccgagaacccgggtctcgtcccttacggcttcaagctagtgctagcggcgtctttcacctatggtgtagccgcaccgctcatcaagcttggagtgttggcattttattggcgtgtcttcccaacgaacaacgttcgaattggctgttacatactaggatcgctctccatcgcctggctcatcgctattaacatcaccacaggcctccagtgtcgtcccattgcaaaatggtggaacaaaacgcttcctggatcgtgtatcgattacctcaacttttacttaggtaacagcatcgccaacgctatcattgacttcggtaccatcgtactacccctccaggaggtgtaccgcctacagataacaagttggagaaaatggggcctcgccggcatctttgctctcggctttatttcttttattgctagtatcatccggatcatcacagttcagcttctcagagaaacgggcatttcgaacttcacaaagcaatttgcgtttacagcgacggccgccgtggtcgaggtctatgtggccatcatcgcagcttgtctccccctaatggtgcctgtatatcggcaactacggtacggcactactctgagcagcatatcgtcttcgcgatgtgacgcccctgtgccgttgtctcgcttatcgaagcgaaccggcactggcggagcatgccaacataacgcaaggcgccgaagcgacagtgcacctttcaacccgctcgagagcagagtcgacaaaaccgaagagcgcggcttcgatgaaccgaagcgctcttttactacagacgctgaaagtcatagcaatcctttccactcgcgttgtaactctaaggagagcgacgagggaatacgtgtacaaacagagttcataattgccgatgcgcgacggctcgacgtgtgaggagatgttgttgcttaaaggggtagaaaaatgtcggcggcgattattcggatgctcgcggctgggcgtttgggtttggtagttttcatgataccttatatctttctggcaataaaaacgtccatattcctagatctcatgtgtttcaacgcggaatgaggcagaagtaggagattatgatatagtcatatccctcgataatgaatatcttacttatcaggtctgggaatggttacctg

SEQ ID NO: 19533 - DNA, 657 bp, Muscodor strobelii
  misc_feature: SGI cDNA ID NO. 566572
  misc_feature: Encodes the peptide sequence at SEQ ID NO 19534
atgattgctgagcgaacatcacagccagtcaactcaaagccggatttctatgccacagtggccggcgacggaggtctacatcctagtgaactctggggagaagctttattcttcgtcttagctggtggctcaacagtggcgacggcaatatgcggctccctgttccacctatcgtggcatcctaaggcgtatgctcgccttgcttcagagattcgcgggtcgttttcgtcaggtgagtacattcaatcgggcccgaagctctcttcgtgtgcctatctacgcgctgtcatcgatgagtctctccgcatgacgccaccagcacccagcccactatggcgtgagcccgaaaatccaacagacaagccttttgtcgtcgatgggcacgtcataccaccaggcacggaagtcgcggtccatctctgggcgatcatgcatgatcccgactacttcgatgatccctttgcatttaggcccgagcgatggctagtcctcggttctgaaagtgcagacgaggcagcagaggcaaggaaatcacgcgctcagctgcgccggcaagagtatggcttacatggaaacaagtctcactatcgccaaaattctatggtacttcgacttcgagcgggccccaggaaaggcaggaaacttaggctgcggtaa

SEQ ID NO: 19534 - protein, 218 aa, Muscodor strobelii
  misc_feature: SGI Peptide ID NO. 566572
  misc_feature (92)..(162): Pfam Id: PF00067 Pfam Desc: Cytochrome P450
  misc_feature (1)..(203): NCBI GI: 156056276 Blast Desc: SS1G_05490 [Sclerotinia sclerotiorum 1980] gi|154703274|gb|EDO03013.1| SS1G_05490 [Sclerotinia sclerotiorum 1980]
  misc_feature (1)..(162): NCBI GI: 156060449 Blast Desc: SS1G_02363 [Sclerotinia sclerotiorum 1980] gi|154699771|gb|EDN99509.1| SS1G_02363 [Sclerotinia sclerotiorum 1980]
  misc_feature (26)..(172): NCBI GI: 145241738 Blast Desc: An09g02000 [Aspergillus niger] gi|134078055|emb|CAK40138.1| protein product [Aspergillus niger]
  misc_feature (38)..(163): NCBI GI: 154318307 Blast Desc: BC1G_03321 [Botryotinia fuckeliana B05.10] gi|150842844|gb|EDN18037.1| BC1G_03321 [Botryotinia fuckeliana B05.10]
  misc_feature (1)..(165): NCBI GI: 169610055 Blast Desc: SNOG_08121 [Phaeosphaeria nodorum SN15] gi|160701972|gb|EAT84397.2| SNOG_08121 [Phaeosphaeria nodorum SN15]
  misc_feature (24)..(163): NCBI GI: 169611945 Blast Desc: SNOG_09088 [Phaeosphaeria nodorum SN15] gi|160702403|gb|EAT83280.2| SNOG_09088 [Phaeosphaeria nodorum SN15]
  misc_feature (26)..(178): NCBI GI: 242771379 Blast Desc: cytochrome P450, [Talaromyces stipitatus ATCC 10500] gi|218721449|gb|EED20867.1| cytochrome P450, [Talaromyces stipitatus ATCC 10500]
  misc_feature (39)..(205): NCBI GI: 154288799 Blast Desc: BC1G_16358 [Botryotinia fuckeliana B05.10] gi|150853122|gb|EDN28314.1| BC1G_16358 [Botryotinia fuckeliana B05.10]
  misc_feature (25)..(162): NCBI GI: 189196570 Blast Desc: cytochrome P450 4A5 precursor [Pyrenophora tritici-repentis Pt-1C-BFP] gi|187980502|gb|EDU47128.1| cytochrome P450 4A5 precursor [Pyrenophora tritici-repentis
  misc_feature (16)..(162): NCBI GI: 240107354 Blast Desc: Cytochrome P450 family protein [Coccidioides posadasii C735 delta SOWgp]
  misc_feature (41)..(161): SWISSPROT Homolog: EC 1.14.13.48 (S)-limonene 6-monooxygenase
MIAERTSQPVNSKPDFYATVAGDGGLHPSELWGEALFFVLAGGSTVATAICGSLFHLSWHPKAYARLASEIRGSFSSGEYIQSGPKLSSCAYLRAVIDESLRMTPPAPSPLWREPENPTDKPFVVDGHVIPPGTEVAVHLWAIMHDPDYFDDPFAFRPERWLVLGSESADEAAEARKSRAQLRRQEYGLHGNKSHYRQNSMVLRLRAGPRKGRKLRLR

SEQ ID NO: 19535 - DNA, 2212 bp, Muscodor strobelii
  misc_feature: SGI EST ID NO. CUFF.45902.0
  misc_feature: Variant of the nucleotide sequence at SEQ ID NO 19533
atgagaaccttttcaccgttagagacaacgatgtgcaccggcataagcgtaaagtcatcggacaggtggtgtcagatcgatcgctgcgagctttccgccctatgatgaatgagcaaatcgacatctttctacgacagctgttgagacacggtcgacggtcagagatggtcaatatgaccacagcgtgcaaccgacttgggatcgacgttgtcggatatatggcgtttggatgtgcgttaaatacacagaccgaagcaacgaatcgtctcattcccgaagttatgtttcacagtatatacctaaataacatctaccacacatggccgtcgctcggaagactctggcctatcttccattggttagggaagaaaaaagtggcagtgttcgctcaagcagtagcgaggatgattgctgagcgaacatcacagccagtcaactcaaagccggatttctatgccacagtggccggcgacggaggtctacatcctagtgaactctggggagaagctttattcttcgtcttagctggtggctcaacagtggcgacggcaatatgcggctccctgttccacctatcgtggcatcctaaggcgtatgctcgccttgcttcagagattcgcgggtcgttttcgtcaggtgagtacattcaatcgggcccgaagctctcttcgtgtgcctatctacgcgctgtcatcgatgagtctctccgcatgacgccaccagcacccagcccactatggcgtgagcccgaaaatccaacagacaagccttttgtcgtcgatgggcacgtcataccaccaggcacggaagtcgcggtccatctctgggcgatcatgcatgatcccgactacttcgatgatccctttgcatttaggcccgagcgatggctagtcctcggttctgaaagtgcagacgaggcagcagaggcaaggaaatcacgcgctcagctgcgccggcaagagtatggcttacatggaaacaagtctcactatcgccaaaattctatggtacttcgacttcgagcgggccccaggaaaggcaggaaacttaggctgcggtaaggggagcaaggatccgtgggatgcacaaaatcagttccaaatatatgacgttcttggagctgaccacgatggcccgaatttggtgttcaagccgcgggaggagcagtgtcaagacttgtacgacagtgcgtagtcggtatcgggtgatgatagaccaccgagtttctgaagtcgattgggcagctatgcgcaatgtgaccggagtttgacataaagaggtttgtctaaattcggatgagtcttttaaactagtcttgtcaaatagtatcgactcttttctccccctttctttgccctttttcggcccccctttttggggttgctggagctacacgtttctggcataagccgtagtcccttgaccccttccttgaacaagctaccttactgcttccgcccatcatcagcccatctatctccaaaacgctggtatacatcttcaatctcattcgcaaacatcttctcgctcttcggtctcgaaaccgtaccctttggcgttctcacaagacccccaacgggtacactcagaaaatgcgtctcagcaattctggagaatgactgcactttcttattcatcggttctaggacctccctccagacctctgccttatctgtgccttcatcgagttcaaccaacgcgatgggttgcatccgcctggatcctagaaccagtgcctcttgaactctgggatgtgctttgatcgcttgctccagtaatgcaggacgcatatttatgcctgttgcgagattgataagatcgtcgatacggcctgcgaaacggaatgtgttctcgctcttcttcggatccgggtgtttggtccagaggtcgccaatgcgaaattcgaggtatggcggccggtcggactgtgccttgattccctcgcgggcgaaatatcccgagtatggctctgatttcggcgttaatgtagcaaccatttcgtagagcttgtctgagtccccgtcgtatcccattttgacttcttgaaattctaagccgcttaattccagatcgaatgcgatgtattcgtaatcttcgggtgctgtttttagctgtggcgggaggatcatctcgctggacccccaggtatttctcagttctgttgatttggcccatatttcttgtactgaagatggtagcacgcctgcatgtg

SEQ ID NO: 19536 - DNA, 1707 bp, Muscodor strobelii
  misc_feature: SGI cDNA ID NO. 566573
  misc_feature: Reduced expression when VOC is produced
  misc_feature: Encodes the peptide sequence at SEQ ID NO 19537
atgacttctaacgcttcaccaatcccctatggcaaacgcctattgcccatcgagctagacaagatcgctcgtgaagatgggcaacgaccttgggcctcgatccccatcgacgacaacaacttatccaaaggctacgaagacatcagcttcgcagtcctcgcgaacgcgatcaataggcttgcatggatcattgacgatgcgttagggaagtctacgacgttcggtactcttgcctacctcggcgccgcagatatacgataccacatgatccagatggcagcttgcaagactgggcacaaagtcttgttttcttcacatttgaatagcttagctattcatctgtcgcttatgaacaaagtgggctgcaaaacgttgttttatagtgctggtacgaaggttgatgatattctggaggcgagaccgatgacgggtgtggctattccggagcttgacgatttgatttatagcaaggagcaggttaagtggtacgagtacacgaagacatatgaggaggctgcactggatccattttcagttcttcaggtgcctcttagcacgagcggcacaacaggtgacccgaaacctctggtcatcaaccatgcccttgtcgggacagtagatgccatacaagctttgcccgataaaagcaagcgtgtgatggacttcgtgttcccagagaagccgggtacacgcattctgatccctacctcaccctttcacatcatatcatcagtcactggtatgacgatggcggttttcggttcgggcgtatttgtatatccttatcgatcacgcggaatgacctcggacctctccgatcttctcgacgtcttcacttattcaaggagtgaacgaacgtttctcatgccctatgtcatggagaagattgctgcagcaccaaatccagagaaatatatcagcaatttcaaaacagtaacatggggcggcggcgtgctaccatcttcagtacaagaaatatgggccaaatcaacagaactgagaaatacctgggggtccagcgagatgatcctcccgccacagctaaaaacagcacccgaagattacgaatacatcgcattcgatctggaattaagcggcttagaatttcaagaagtcaaaatgggatacgacggggactcagacaagctctacgaaatggttgctacattaacgccgaaatcagagccatactcgggatatttcgcccgcgagggaatcaaggcacagtccgaccggccgccatacctcgaatttcgcattggcgacctctggaccaaacacccggatccgaagaagagcgagaacacattccgtttcgcaggccgtatcgacgatcttatcaatctcgcaacaggcataaatatgcgtcctgcattactggagcaagcgatcaaagcacatcccagagttcaagaggcactggttctaggatccaggcggatgcaacccatcgcgttggttgaactcgatgaaggcacagataaggcagaggtctggagggaggtcctagaaccgatgaataagaaagtgcagtcattctccagaattgctgagacgcattttctgagtgtacccgttgggggtcttgtgagaacgccaaagggtacggtttcgagaccgaagagcgagaagatgtttgcgaatgagattgaagatgtataccagcgttttggagatagatgggctgatgatgggcggaagcagtaa

SEQ ID NO: 19537 - protein, 568 aa, Muscodor strobelii
  misc_feature: SGI Peptide ID NO. 566573
  misc_feature (49)..(475): Pfam Id: PF00501 Pfam Desc: AMP-binding enzyme
  misc_feature (399)..(475): Pfam Id: PF00501 Pfam Desc: AMP-binding enzyme
  misc_feature (186)..(341): Pfam Id: PF00501 Pfam Desc: AMP-binding enzyme
  misc_feature (10)..(554): NCBI GI: 156063804 Blast Desc: SS1G_02020 [Sclerotinia sclerotiorum 1980] gi|154697354|gb|EDN97092.1| SS1G_02020 [Sclerotinia sclerotiorum 1980]
  misc_feature (10)..(556): NCBI GI: 242810029 Blast Desc: NRPS-like enzyme, [Talaromyces stipitatus ATCC 10500] gi|218716122|gb|EED15544.1| NRPS-like enzyme, [Talaromyces stipitatus ATCC 10500]
  misc_feature (10)..(559): NCBI GI: 154318668 Blast Desc: BC1G_02723 [Botryotinia fuckeliana B05.10] gi|150857853|gb|EDN33045.1| BC1G_02723 [Botryotinia fuckeliana B05.10]
  misc_feature (7)..(554): NCBI GI: 156055522 Blast Desc: SS1G_05113 [Sclerotinia sclerotiorum 1980] gi|154702897|gb|EDO02636.1| SS1G_05113 [Sclerotinia sclerotiorum 1980]
  misc_feature (11)..(554): NCBI GI: 242789697 Blast Desc: NRPS-like enzyme, [Talaromyces stipitatus ATCC 10500] gi|218718004|gb|EED17424.1| NRPS-like enzyme, [Talaromyces stipitatus ATCC 10500]
  misc_feature (12)..(554): NCBI GI: 145247614 Blast Desc: An12g10090 [Aspergillus niger] gi|134080795|emb|CAL00909.1| protein product [Aspergillus niger]
  misc_feature (14)..(555): NCBI GI: 256729257 Blast Desc: NECHADRAFT_2446 [Nectria haematococca mpVI 77-13-4]
  misc_feature (13)..(554): NCBI GI: 212526190 Blast Desc: NRPS-like enzyme, [Penicillium marneffei ATCC 18224] gi|210072650|gb|EEA26737.1| NRPS-like enzyme, [Penicillium marneffei ATCC 18224]
  misc_feature (44)..(554): NCBI GI: 156065437 Blast Desc: SS1G_00729 [Sclerotinia sclerotiorum 1980] gi|154691588|gb|EDN91326.1| SS1G_00729 [Sclerotinia sclerotiorum 1980]
  misc_feature (14)..(554): NCBI GI: 145241446 Blast Desc: An09g00450 [Aspergillus niger] gi|134077907|emb|CAL00305.1| protein product [Aspergillus niger]
  misc_feature: Useful for introducing or modulating the production of volatile compounds
MTSNASPIPYGKRLLPIELDKIAREDGQRPWASIPIDDNNLSKGYEDISFAVLANAINRLAWIIDDALGKSTTFGTLAYLGAADIRYHMIQMAACKTGHKVLFSSHLNSLAIHLSLMNKVGCKTLFYSAGTKVDDILEARPMTGVAIPELDDLIYSKEQVKWYEYTKTYEEAALDPFSVLQVPLSTSGTTGDPKPLVINHALVGTVDAIQALPDKSKRVMDFVFPEKPGTRILIPTSPFHIISSVTGMTMAVFGSGVFVYPYRSRGMTSDLSDLLDVFTYSRSERTFLMPYVMEKIAAAPNPEKYISNFKTVTWGGGVLPSSVQEIWAKSTELRNTWGSSEMILPPQLKTAPEDYEYIAFDLELSGLEFQEVKMGYDGDSDKLYEMVATLTPKSEPYSGYFAREGIKAQSDRPPYLEFRIGDLWTKHPDPKKSENTFRFAGRIDDLINLATGINMRPALLEQAIKAHPRVQEALVLGSRRMQPIALVELDEGTDKAEVWREVLEPMNKKVQSFSRIAETHFLSVPVGGLVRTPKGTVSRPKSEKMFANEIEDVYQRFGDRWADDGRKQ

SEQ ID NO: 19538 - DNA, 3294 bp, Muscodor strobelii
  misc_feature: SGI EST ID NO. CUFF.45903.1
  misc_feature: Variant of the nucleotide sequence at SEQ ID NO 19536
tggaccttcaatcagcaaagtcgcatttatctttgctaacttcaccattacacgcaatcaaacagcgcgatgacttctaacgcttcaccaatcccctatggcaaacgcctattgcccatcgagctagacaagatcgctcgtgaagatgggcaacgaccttgggcctcgatccccatcgacgacaacaacttatccaaaggctacgaagacatcagcttcgcagtcctcgcgaacgcgatcaataggcttgcatggatcattgacgatgcgttagggaagtctacgacgttcggtactcttgcctacctcggcgccgcagatatacgataccacatgatccagatggcagcttgcaagactgggcacaaagtcttgttttcttcacatttgaatagcttagctattcatctgtcgcttatgaacaaagtgggctgcaaaacgttgttttatagtgctggtacgaaggttgatgatattctggaggcgagaccgatgacgggtgtggctattccggagcttgacgatttgatttatagcaaggagcaggttaagtggtacgagtacacgaagacatatgaggaggctgcactggatccattttcagttcttcaggtcagctcgttcgactgtcggagagaaactcgacgcaaaggaaaaattgcggatgcggtaaatttactaacaggtgcctcttagcacgagcggcacaacaggtgacccgaaacctctggtcatcaaccatgcccttgtcgggacagtagatgccatacaagctttgcccgataaaagcaagcgtgtgatggacttcgtgttcccagagaagccgggtacacgcattctgatccctacctcaccctttcacatcatatcatcagtcactggtatgacgatggcggttttcggttcgggcgtatttgtatatccttatcgatcacgcggaatgacctcggacctctccgatcttctcgacgtcttcacttattcaaggagtgaacgaacgtttctcatgccctatgtcatggagaagattgctgcagcaccaaatccagagaaatatatcagcaatttcaaaacagtaacatggggcggcggcgtgctaccatcttcagtacaagaaatatgggccaaatcaacagaactgagaaatacctgggggtccagcgagatgatcctcccgccacagctaaaaacagcacccgaagattacgaatacatcgcattcgatctggaattaagcggcttagaatttcaagaagtcaaaatgggatacgacggggactcagacaagctctacgaaatggttgctacattaacgccgaaatcagagccatactcgggatatttcgcccgcgagggaatcaaggcacagtccgaccggccgccatacctcgaatttcgcattggcgacctctggaccaaacacccggatccgaagaagagcgagaacacattccgtttcgcaggccgtatcgacgatcttatcaatctcgcaacaggcataaatatgcgtcctgcattactggagcaagcgatcaaagcacatcccagagttcaagaggcactggttctaggatccaggcggatgcaacccatcgcgttggttgaactcgatgaaggcacagataaggcagaggtctggagggaggtcctagaaccgatgaataagaaagtgcagtcattctccagaattgctgagacgcattttctgagtgtacccgttgggggtcttgtgagaacgccaaagggtacggtttcgagaccgaagagcgagaagatgtttgcgaatgagattgaagatgtataccagcgttttggagatagatgggctgatgatgggcggaagcagtaaggtagcttgttcaaggaaggggtcaagggactacggcttatgccagaaacgtgtagctccagcaaccccaaaaaggggggccgaaaaagggcaaagaaagggggagaaaagagtcgatactatttgacaagactagtttaaaagactcatccgaatttagacaaacctctttatgtcaaactccggtcacattgcgcatagctgcccaatcgacttcagaaactcggtggtctatcatcacccgataccgactacgcactgtcgtacaagtcttgacactgctcctcccgcggcttgaacaccaaattcgggccatcgtggtcagctccaagaacgtcatatatttggaactgattttgtgcatcccacggatccttgctccccttaccgcagcctaagtttcctgcctttcctggggcccgctcgaagtcgaagtaccatagaattttggcgatagtgagacttgtttccatgtaagccatactcttgccggcgcagctgagcgcgtgatttccttgcctctgctgcctcgtctgcactttcagaaccgaggactagccatcgctcgggcctaaatgcaaagggatcatcgaagtagtcgggatcatgcatgatcgcccagagatggaccgcgacttccgtgcctggtggtatgacgtgcccatcgacgacaaaaggcttgtctgttggattttcgggctcacgccatagtgggctgggtgctggtggcgtcatgcggagagactcatcgatgacagcgcgtagataggcacacgaagagagcttcgggcccgattgaatgtactcacctgacgaaaacgacccgcgaatctctgaagcaaggcgagcatacgccttaggatgccacgataggtggaacagggagccgcatattgccgtcgccactgttgagccaccagctaagacgaagaataaagcttctccccagagttcactaggatgtagacctccgtcgccggccactgtggcatagaaatccggctttgagttgactggctgtgatgttcgctcagcaatcatcctcgctactgcttgagcgaacactgccacttttttcttccctaaccaatggaagataggccagagtcttccgagcgacggccatgtgtggtagatgttatttaggtatatactgtgaaacataacttcgggaatgagacgattcgttgcttcggtctgtgtatttaacgcacatccaaacgccatatatccgacaacgtcgatcccaagtcggttgcacgctgtggtcatattgaccatctctgaccgtcgaccgtgtctcaacagctgtcgtagaaagatgtcgatttgctcattcatcatagggcggaaagctcgcagcgatcgatctgacaccacctgtccgatgactttacgcttatgccggtgcacatcgttgtctctaacggtgaaaaggttctcat

SEQ ID NO: 19539 - DNA, 1797 bp, Muscodor strobelii
  misc_feature: SGI cDNA ID NO. 566574
  misc_feature: Elevated expression when VOC is produced
  misc_feature: Encodes the peptide sequence at SEQ ID NO 19540
atgaagaagaggatcaaagcgatactggccgattggacgagaggcatgccacatggttgcaagaaatactatgtagcactcaaggccaaaaaacctggtatctataccgattgggatacatgcaaaccgcagacagatggcgttaagggatggaaccgccacaacgtttacaaaacctgtggaaatatcgacgaggctagagcgtttgtacgcaactattatcctccgctacttgaggaggaggataggcttcgagaacaaaatcagcttcaagagcaaagaaagttgttagagaaggagaagattgaggcggaggcacagcaaggcgcttcctcctctgactcaacacccccaaaacaacaaactagacacgaggctcaagctgactacgatgacgacgaaatcgattggacaaatgttcacgaacaaaaaacagaagcaccagagccaagccccgttctcgatgaagagcagcaagctgccgttgatagcgctctgcaaggccgcaatgtcttcttgactgggtcgggaggttgcggtaagagtgtcgttgtccgagagttgataaaaagactccgtcaagatggaaaggaagtggctattttggcacccactgggatagccgcatacaatgtctcaggatacacgacgtatggtttcatgggttggactcaggatactgggaaggaaaactttgaaaaagtgatggagaaactgtggcagaaaaagacggcagagcagttgaggaagaccgacgtcattataattgacgagatcagtatggtcagcaatttccatttcgatcgaatcggccgcgctctttcggtaatcaaggactaccgaaatcaaccaaggccgttcgggggctgtcaagtgatcgctgtcggtgatttctgtcagttgccccccgtgaaggggctcgaatactgcggcgaatgccgcaagaaaatgaatgagaaaggtgagaatggcgtcaaaacttggacttgccctggatgcccccacccgatatcctacaaagacgaagacaaatgggcattcaaaagctacgtatggaccgagctggattttgtcaacattcacctgcaaaagatccatcgtcaaagcgatcagaagctagtcgaaatgttacagaagggacgcctaggcaaaaagctgggagaagatgaactcaacctattcctccatcacccttgcaagatcgagaatgcggttcggctgtttccaagaaaaatcgatgtcaaaaacgaaaacgagaagaattttcgagagctcgaagttgaagctctcacgtattggagcgttgacaagtttgactgcgagcacgatgaacacagggatgcatatcgccccaactcctatgggccgcaatcacgacctcgattatcgttaggcgaccatcgttatgctgatgaattgggagtcaaaatcggcatgcccgtcattctgctaaaaaaatatcgattaagtggacacttgggcaagtacagcctggtcatgaggacgcagattcctctcgcccagggctgggccatgacgattcataagagccagggcatgactcttgagcggctcgtcgtggacttgaattgtgtgtgggaacgtgggcaagcctatcttgctctgtcccgggcaacatcgctcgagggtctcaagatagaaggcagcaaagcgaggtcgaaacttgagacaatttacggccctcctgacgaggttatggagtttcttcgagcgaaattcccttccatgtttccgcttccgaagagcgatatcagagcggcgtttggtcgggcttga

SEQ ID NO: 19540 - protein, 598 aa, Muscodor strobelii
  misc_feature: SGI Peptide ID NO. 566574
  misc_feature (140)..(493): NCBI GI: 116194350 Blast Desc: CHGG_03773 [Chaetomium globosum CBS 148.51] gi|88179686|gb|EAQ87154.1| CHGG_03773 [Chaetomium globosum CBS 148.51]
  misc_feature (152)..(490): NCBI GI: 116194352 Blast Desc: CHGG_03774 [Chaetomium globosum CBS 148.51] gi|88179687|gb|EAQ87155.1| CHGG_03774 [Chaetomium globosum CBS 148.51]
  misc_feature (33)..(493): NCBI GI: 169596226 Blast Desc: SNOG_00870 [Phaeosphaeria nodorum SN15] gi|160701258|gb|EAT92365.2| SNOG_00870 [Phaeosphaeria nodorum SN15]
  misc_feature (35)..(493): NCBI GI: 85090335 Blast Desc: NCU07519 [Neurospora crassa OR74A] gi|28919724|gb|EAA29131.1| [Neurospora crassa OR74A]
  misc_feature (22)..(483): NCBI GI: 189202510 Blast Desc: ATP-dependent DNA helicase PIF1 [Pyrenophora tritici-repentis Pt-1C-BFP] gi|187984690|gb|EDU50178.1| ATP-dependent DNA helicase PIF1 [Pyrenophora tritici-repentis
  misc_feature (149)..(438): NCBI GI: 171678879 Blast Desc: protein product [Podospora anserina] gi|170937510|emb|CAP62168.1| protein product [Podospora anserina]
  misc_feature (152)..(441): NCBI GI: 46115252 Blast Desc: FG03468.1 [Gibberella zeae PH-1]
  misc_feature (95)..(436): NCBI GI: 171691074 Blast Desc: protein product [Podospora anserina] gi|170945485|emb|CAP71597.1| protein product [Podospora anserina]
  misc_feature (97)..(514): NCBI GI: 156052170 Blast Desc: SS1G_07493 [Sclerotinia sclerotiorum 1980] gi|154705270|gb|EDO05009.1| SS1G_07493 [Sclerotinia sclerotiorum 1980]
  misc_feature (154)..(563): NCBI GI: 183231254 Blast Desc: [Entamoeba histolytica HM-1:IMSS] gi|169802557|gb|EAL49677.2| , conserved [Entamoeba histolytica HM-1:IMSS]
  misc_feature: Useful for introducing or modulating the production of volatile compounds
MKKRIKAILADWTRGMPHGCKKYYVALKAKKPGIYTDWDTCKPQTDGVKGWNRHNVYKTCGNIDEARAFVRNYYPPLLEEEDRLREQNQLQEQRKLLEKEKIEAEAQQGASSSDSTPPKQQTRHEAQADYDDDEIDWTNVHEQKTEAPEPSPVLDEEQQAAVDSALQGRNVFLTGSGGCGKSVVVRELIKRLRQDGKEVAILAPTGIAAYNVSGYTTYGFMGWTQDTGKENFEKVMEKLWQKKTAEQLRKTDVIIIDEISMVSNFHFDRIGRALSVIKDYRNQPRPFGGCQVIAVGDFCQLPPVKGLEYCGECRKKMNEKGENGVKTWTCPGCPHPISYKDEDKWAFKSYVWTELDFVNIHLQKIHRQSDQKLVEMLQKGRLGKKLGEDELNLFLHHPCKIENAVRLFPRKIDVKNENEKNFRELEVEALTYWSVDKFDCEHDEHRDAYRPNSYGPQSRPRLSLGDHRYADELGVKIGMPVILLKKYRLSGHLGKYSLVMRTQIPLAQGWAMTIHKSQGMTLERLVVDLNCVWERGQAYLALSRATSLEGLKIEGSKARSKLETIYGPPDEVMEFLRAKFPSMFPLPKSDIRAAFGRA

SEQ ID NO: 19541 - DNA, 798 bp, Muscodor strobelii
  misc_feature: SGI cDNA ID NO. 566575
  misc_feature: Reduced expression when VOC is produced
  misc_feature: Encodes the peptide sequence at SEQ ID NO 19542
atgatgtccctccgtgccatcgcccgctcggcgcctcgcaccacctcccgtctcagctccgccctcctccgtcaatccagagtagcccagcctgctgccctgtcgaggacgttatgggctcctctgcgcacatcgcaactcgcttctttctcctccacttccttcagacaagccgccgagaacgaggccgacacagagttgttaagcaagctcgagaacgagctgcagtatgagagcgagatgaaggagagaggatgtctactgacccgcaagttcggcaatgagaatatcaccgtctccttctccattaacgatctgaccaactacgacccagacatgtacaacgaggacactgcattgggcgatgaggagatggagggcgccgaggacaaggagcttgccgccgccgaggctgaggacataaaggagcccgagggccccgagcccatggtgccctgccacctcaacatcgtcgtcgagaaggacggcaagggcgctctcaacatcgaggctattgcccaggatggcgccatcatggtcgaaaacttctactactacaaggacgccagcctcgcccacagctcatcccccgccgctgtccacgctgctgaggatatctaccccggcccacccttcggcagcctcgacgaggacctgcagatgctgatggagcgcttcctcgaggagcgtggcattggccaggccctcgccctcttcgtccctgactacatggacgtcaaggagcagcgcgagtaccagacttggttgaccaacgtcaagaatttcgttgaggcttaa

SEQ ID NO: 19542 - protein, 265 aa, Muscodor strobelii
  misc_feature: SGI Peptide ID NO. 566575
  misc_feature (58)..(263): Pfam Id: PF02330 Pfam Desc: Mitochondrial glycoprotein
  misc_feature (88)..(263): Pfam Id: PF02330 Pfam Desc: Mitochondrial glycoprotein
  misc_feature (1)..(265): NCBI GI: 116203675 Blast Desc: CHGG_09721 [Chaetomium globosum CBS 148.51] gi|88175849|gb|EAQ83317.1| CHGG_09721 [Chaetomium globosum CBS 148.51]
  misc_feature (1)..(265): NCBI GI: 261354727 Blast Desc: suaprga1 [Verticillium albo-atrum VaMs.102]
  misc_feature (1)..(265): NCBI GI: 171679453 Blast Desc: protein product [Podospora anserina] gi|170939352|emb|CAP64580.1| protein product [Podospora anserina]
  misc_feature (1)..(265): NCBI GI: 85092793 Blast Desc: NCU06086 [Neurospora crassa OR74A] gi|28920988|gb|EAA30312.1| conserved [Neurospora crassa OR74A]
  misc_feature (1)..(265): NCBI GI: 46125327 Blast Desc: FG07041.1 [Gibberella zeae PH-1]
  misc_feature (1)..(265): NCBI GI: 256733042 Blast Desc: [Nectria haematococca mpVI 77-13-4]
  misc_feature (1)..(265): NCBI GI: 39974021 Blast Desc: MGG_00843 [Magnaporthe grisea 70-15] gi|145018216|gb|EDK02495.1| MGG_00843 [Magnaporthe grisea 70-15]
  misc_feature (1)..(265): NCBI GI: 156039405 Blast Desc: SS1G_11839 [Sclerotinia sclerotiorum 1980] gi|154697576|gb|EDN97314.1| SS1G_11839 [Sclerotinia sclerotiorum 1980]
  misc_feature (1)..(263): NCBI GI: 238845865 Blast Desc: suaprga1 [Microsporum canis CBS 113480]
  misc_feature (1)..(265): NCBI GI: 225554872 Blast Desc: suaprga1 [Ajellomyces capsulatus G186AR]
  misc_feature: Useful for introducing or modulating the production of volatile compounds
MMSLRAIARSAPRTTSRLSSALLRQSRVAQPAALSRTLWAPLRTSQLASFSSTSFRQAAENEADTELLSKLENELQYESEMKERGCLLTRKFGNENITVSFSINDLTNYDPDMYNEDTALGDEEMEGAEDKELAAAEAEDIKEPEGPEPMVPCHLNIVVEKDGKGALNIEAIAQDGAIMVENFYYYKDASLAHSSSPAAVHAAEDIYPGPPFGSLDEDLQMLMERFLEERGIGQALALFVPDYMDVKEQREYQTWLTNVKNFVEA

SEQ ID NO: 19543 - DNA, 1463 bp, Muscodor strobelii
  misc_feature: SGI EST ID NO. CUFF.45997.1
  misc_feature: Variant of the nucleotide sequence at SEQ ID NO 19541
agtctatagcagggggaccctggcgattggttcgactagaaacggggcagaaaggtcaatcttattgcgacgcggcgacgtcaaataaaaatttcgggttcgcattgcaactgaaccctaccaaatcccatccatcctccatcttccatctctaatacccccaaatcacaccctttcccatctagattgccttatgaatataaaccccaatcgcatttcctccataatctccgtctcatacaacattccacatccacatctgcgaaaatgatgtccctccgtgccatcgcccgctcggcgcctcgcaccacctcccgtctcagctccgccctcctccgtcaatccagagtagcccagcctgctgccctgtcgaggacgttatgggctcctctgcgcacatcgcaactcgcttctttctcctccacttccttcagacaagccgccgagaacgaggccgacacagagttgttaagcaagctcgagaacgagctgcagtatgagagcgagatgaaggagagtgagcagctccctgccagcgtcaaggacttcctcgagaacagcccctacgagctcaaggacgagcccggcaaggaggatgtctactgacccgcaagttcggcaatgagaatatcaccgtctccttctccattaacgatctgaccaactacgacccagacatgtacaacgaggacactgcattgggcgatgaggagatggagggcgccgaggacaaggagcttgccgccgccgaggctgaggacataaaggagcccgagggccccgagcccatggtgccctgccacctcaacatcgtcgtcgagaaggacggcaagggcgctctcaacatcgaggctattgcccaggatggcgccatcatggtcgaaaacttctactactacaaggacgccagcctcgcccacagctcatcccccgccgctgtccacgctgctgaggatatctaccccggcccacccttcggcagcctcgacgaggacctgcagatgctgatggagcgcttcctcgaggagcgtggcattggccaggccctcgccctcttcgtccctgactacatggacgtcaaggagcagcgcgagtaccagacttggttgaccaacgtcaagaatttcgttgaggcttaagcggtgattgtgaaaagaaaggaaaaagaacagtgtacaaacaggaagtcgaatatggacttcactaggatctctggggggatctacaaaaaatgtgtattatcaggagggatatcgagttccttgtgtaaaatttccactctcagggcgtgtaacaaatgtagcatactagtcggcaatctgccaggctcggggtaatgggagacgatgggcctaaacatgatgaactggctctaatatgatacacttccaggttgcctctaaacctgtttaaattcgtgcaagtacccttggtgattgatttgtgaacaatgaacagaccag

SEQ ID NO: 19544 - DNA, 651 bp, Muscodor strobelii
  misc_feature: SGI cDNA ID NO. 566576
  misc_feature: Encodes the peptide sequence at SEQ ID NO 19545
atgctcggctcaacactactcgttgctctgacggctgcggctggggtggttgcctcgcccttggacctgattacccggacttcacctggcacgggacagaataatgggtttttctacagcttttggactgatggtcaaggctctgtgaattacaacaacggcgcagcaggcacctacgatgtaacttggtccaatgtaggaaatttcgtagcgggcaagggatggaaccccggtgcttcgcgcgtcgtgacctacaacgggacctggaacggggcgaatgtgaactcctacttgtctgtgtatggctggacaaagaacccgctcatcgagtactacgtcgttgagagcttcggctcgtataacccgtcctcgggtgccacgaagagaggaactatccagtctgatgggggtacttatgatatctatcagacgcaacgggtgaaccagcctagtattgaagggacttcgacgttctaccagttttggtccgtccgccagcagaagcgggttggtggcactgtcacccttgcaaaccatttcaacgcctggacaagcgccggtctaaagcttggctcgcatgactaccagatcgtggccactgagggctaccagagcagtggctcagcccacatcgaggtcatggcgtcgtaa

SEQ ID NO: 19545 - protein, 216 aa, Muscodor strobelii
  misc_feature: SGI Peptide ID NO. 566576
  misc_feature (32)..(213): Pfam Id: PF00457 Pfam Desc: Glycosyl hydrolases family 11
  misc_feature (1)..(216): NCBI GI: 164562256 Blast Desc: xylanase [Annulohypoxylon stygium]
  misc_feature (4)..(213): NCBI GI: 109390308 Blast Desc: xylanase [Alternaria sp. HB186]
  misc_feature (4)..(216): NCBI GI: 189209652 Blast Desc: endo-1,4-beta-xylanase A [Pyrenophora tritici-repentis Pt-1C-BFP] gi|187977251|gb|EDU43877.1| endo-1,4-beta-xylanase A [Pyrenophora tritici-repentis Pt-1C-BFP]
  misc_feature (4)..(213): NCBI GI: 169619301 Blast Desc: SNOG_12845 [Phaeosphaeria nodorum SN15] gi|160703789|gb|EAT79645.2| SNOG_12845 [Phaeosphaeria nodorum SN15]
  misc_feature (1)..(216): NCBI GI: 116205351 Blast Desc: CHGG_10559 [Chaetomium globosum CBS 148.51] gi|88176687|gb|EAQ84155.1| CHGG_10559 [Chaetomium globosum CBS 148.51]
  misc_feature (4)..(213): NCBI GI: 119472529 Blast Desc: endo-1,4-beta-xylanase (XynG1), [Neosartorya fischeri NRRL 181] gi|119406515|gb|EAW16466.1| endo-1,4-beta-xylanase (XynG1), [Neosartorya fischeri NRRL 181]
  misc_feature (2)..(213): NCBI GI: 28950192 Blast Desc: endo-1, 4-beta-xylanase B precursor [Neurospora crassa]
  misc_feature (5)..(213): NCBI GI: 67526311 Blast Desc: XYN1_EMENI Endo-1,4-beta-xylanase 1 precursor (Xylanase 1) (1,4-beta-D-xylan xylanohydrolase 1) [Aspergillus nidulans FGSC A4] gi|1722899|sp|P55332.1|XYNA_EMENI RecName: A; 1
  misc_feature (2)..(213): NCBI GI: 164424328 Blast Desc: endo-1,4-beta-xylanase 2 precursor [Neurospora crassa OR74A] gi|157070468|gb|EAA28214.2| endo-1,4-beta-xylanase 2 precursor [Neurospora crassa OR74A]
  misc_feature (19)..(213): NCBI GI: 171689822 Blast Desc: protein product [Podospora anserina] gi|170944873|emb|CAP70985.1| protein product [Podospora anserina]
  misc_feature (22)..(213): SWISSPROT Homolog: EC 3.2.1.8 Endo-1,4-beta-xylanase
MLGSTLLVALTAAAGVVASPLDLITRTSPGTGQNNGFFYSFWTDGQGSVNYNNGAAGTYDVTWSNVGNFVAGKGWNPGASRVVTYNGTWNGANVNSYLSVYGWTKNPLIEYYVVESFGSYNPSSGATKRGTIQSDGGTYDIYQTQRVNQPSIEGTSTFYQFWSVRQQKRVGGTVTLANHFNAWTSAGLKLGSHDYQIVATEGYQSSGSAHIEVMAS

SEQ ID NO: 19546 - DNA, 858 bp, Muscodor strobelii
  misc_feature: SGI cDNA ID NO. 566577
  misc_feature: Encodes the peptide sequence at SEQ ID NO 19547
atggcgaacattggaaaccttattaagagccgttatggtgcctcagaggcctcatccccaaaggtccgcaatgttgactctgagaatccaaccttagagacgttgctacaacacaaatcgatacggcattttctaccggaaaaacttcccgaaggaaatctcgagatcatcattgcagcggcacaaagcgctgctacgtcttcccatctgcagacctggagtgtcctagccattgaggatgcagatcgcaaagacaaagttgcaggtttatgcggcgaccaagatttcatccgtcaggcacccctatttctgatcttctgtgccgatctgagtcgtttgactaaagtctctgtgcaatacgaattacgcggcgaggaattggagttcacggagatgtttctgatggcttcccttgacgctgcgctcgctgggcaaaatgcagctgttgctgctaaggctctgggattgggcatatgctatgtcgggggagcgcggaacaattcacgcgaactcggtaacttgctgaagttgccacagcgtgttatcgctgtgtttggtatggctatcggcaagcctgatccgtctaagcctgcggtaacgaagccgagattacctcagagtgagattctacatcgggagacgtggcatgtggctgaggagaatggcgatgacaacgctcaagatgaccgtttcagggaatttgatgagacgatgagaggtttcaacgcaaaagcgggacgaactgatatgccatcttggacgcagagaagtgctaagagagtcgagactgttcagtcacttagtggtcgtcatgttttgaaggactttcttcgggagaatgggtttcagcttcggtga

SEQ ID NO: 19547 - protein, 285 aa, Muscodor strobelii
  misc_feature: SGI Peptide ID NO. 566577
  misc_feature (35)..(191): Pfam Id: PF00881 Pfam Desc: Nitroreductase family
  misc_feature (1)..(285): NCBI GI: 282897808 Blast Desc: Nitroreductase [Raphidiopsis brookii D9] gi|281197292|gb|EFA72191.1| Nitroreductase [Raphidiopsis brookii D9]
  misc_feature (1)..(285): NCBI GI: 75910351 Blast Desc: nitroreductase [Anabaena variabilis ATCC 29413] gi|75704076|gb|ABA23752.1| Nitroreductase [Anabaena variabilis ATCC 29413]
  misc_feature (29)..(285): NCBI GI: 158424800 Blast Desc: nitroreductase [Azorhizobium caulinodans ORS 571] gi|158331689|dbj|BAF89174.1| nitroreductase [Azorhizobium caulinodans ORS 571]
  misc_feature (3)..(284): NCBI GI: 67902746 Blast Desc: AN8360.2 [Aspergillus nidulans FGSC A4] gi|40747766|gb|EAA66922.1| AN8360.2 [Aspergillus nidulans FGSC A4] gi|259484288|tpe|CBF80381.1| TPA: conserved [Aspergillus FGSC
  misc_feature (1)..(284): NCBI GI: 75910239 Blast Desc: nitroreductase [Anabaena variabilis ATCC 29413] gi|75703964|gb|ABA23640.1| Nitroreductase [Anabaena variabilis ATCC 29413]
  misc_feature (1)..(284): NCBI GI: 186681121 Blast Desc: nitroreductase [Nostoc punctiforme PCC 73102] gi|186463573|gb|ACC79374.1| nitroreductase [Nostoc punctiforme PCC 73102]
  misc_feature (7)..(285): NCBI GI: 163848710 Blast Desc: nitroreductase [Chloroflexus aurantiacus J-10-fl] gi|222526652|ref|YP_002571123.1| nitroreductase [Chloroflexus sp. Y-400-fl] gi|163669999|gb|ABY36365.1| nitroreductase aurantiacus
  misc_feature (3)..(285): NCBI GI: 182678819 Blast Desc: nitroreductase [Beijerinckia indica subsp. indica ATCC 9039] gi|182634702|gb|ACB95476.1| nitroreductase [Beijerinckia indica subsp. indica ATCC 9039]
  misc_feature (8)..(285): NCBI GI: 54024354 Blast Desc: nitroreductase [Nocardia farcinica IFM 10152] gi|54015862|dbj|BAD57232.1| nitroreductase [Nocardia farcinica IFM 10152]
  misc_feature (4)..(285): NCBI GI: 145234805 Blast Desc: An03g01490 [Aspergillus niger] gi|134057724|emb|CAK38122.1| protein product [Aspergillus niger]
  misc_feature (29)..(282): SWISSPROT Homolog: EC 1.5.1.29 FMN reductase
MANIGNLIKSRYGASEASSPKVRNVDSENPTLETLLQHKSIRHFLPEKLPEGNLEIIIAAAQSAATSSHLQTWSVLAIEDADRKDKVAGLCGDQDFIRQAPLFLIFCADLSRLTKVSVQYELRGEELEFTEMFLMASLDAALAGQNAAVAAKALGLGICYVGGARNNSRELGNLLKLPQRVIAVFGMAIGKPDPSKPAVTKPRLPQSEILHRETWHVAEENGDDNAQDDRFREFDETMRGFNAKAGRTDMPSWTQRSAKRVETVQSLSGRHVLKDFLRENGFQLR

SEQ ID NO: 19548 - DNA, 1230 bp, Muscodor strobelii
  misc_feature: SGI EST ID NO. CUFF.45622.0
  misc_feature: Variant of the nucleotide sequence at SEQ ID NO 19546
tccacatcacgcaatcaccttcatcacgtacattggcgcaacagctactcgcattattcagccactgataagggatcttttaacaaaaaattcccgtatgccgttcgttcactgctaccatcatcagttaaatgtcctccattcagagtgagcgaagcaagaaaatcaggttttcttgacgatcccagtcctatcctatagaacttcaaacccttgattgtcttcgagacagattcttgtttacctggaaatcactatggcgaacattggaaaccttattaagagccgttatggtgcctcagaggcctcatccccaaaggtccgcaatgttgactctgagaatccaaccttagagacgttgctacaacacaaatcgatacggcattttctaccggaaaaacttcccgaaggaaatctcgagatcatcattgcagcggcacaaagcgctgctacgtcttcccatctgcagacctggagtgtcctagccattgaggatgcagatcgcaaagacaaagttgcaggtttatgcggcgaccaagatttcatccgtcaggcacccctatttctgatcttctgtgccgatctgagtcgtttgactaaagtctctgtgcaatacgaattacgcggcgaggaattggagttcacggagatgtttctgatggcttcccttgacgctgcgctcgctgggcaaaatgcagctgttgctgctaaggctctgggattgggcatatgctatgtcgggggagcgcggaacaattcacgcgaactcggtaacttgctgaagttgccacagcgtgttatcgctgtgtttggtatggctatcggcaagcctgatccgtctaagcctgcggtaacgaagccgagattacctcagagtgagattctacatcgggagacgtggcatgtggctgaggagaatggcgatgacaacgctcaagatgaccgtttcagggaatttgatgagacgatgagaggtttcaacgcaaaagcgggacgaactgatatgccatcttggacgcagagaagtgctaagagagtcgagactgttcagtcacttagtggtcgtcatgttttgaaggactttcttcgggagaatgggtttcagcttcggtgatatgctaccttttgtgcaattgcttcagcgttttcattattatgccagataaaatattattagaagttgagcataaacattttcctcattccaaatcgcttttgtgattccaaagc

SEQ ID NO: 19549 - DNA, 1971 bp, Muscodor strobelii
  misc_feature: SGI cDNA ID NO. 566578
  misc_feature: Encodes the peptide sequence at SEQ ID NO 19550
atggcttcgactttccgtcctgtcaacacgccagcgaccatggaatccgagaaagacgtcgagatggcaacatcgccgacaaccccgaccccaaccaagaccacctttggacaacgcccccttccgaattcgccatttcctcaggccgtacaaattcctgagagcattgaagagcaaaagacgccgcaacgcaagaactcacaacattctcgtaaatcgcgtggtgattccgaagatgtagacatggacgaatctgacggtgatggccaaggagaggatggggccgggtcggacgacgagagcgtcaatgctgacggctcgaagtcgggcaagaagaagaagtcccaacggttctactgcacagattatcctccttgcagtctgagtttcacgcggagcgagcacctcgccaggcatatccggaaacatactggtgagcgaccgttccagtgccactgctcaagacggttttcccgcctggataatcttcggcagcatgcgcaaactgtacatgtgaacgaggacattccgatcgattcgcttgccgcaacaggaaccaggtttcagaggcagattcgaacagatagagtgaggcaacctggtcgggcccgagcttcaacggctggcagcatgggtgcgccagctcgaggccactcaaaatcgctttcgacttcaagcatcagttctgttgggtctaatttcagtacaagagaggatgtccgacgccggcccccgcccctggttatggcagatccaagatttccatacacacaggagaactattcataccgaccgccatcgcccagtgacttcagcactccgacctcggcaaccttttcgacggggcagaatagtccacgctgggggtccgtcattgcatctccgacctcatcacactcgcgcactcatagcttgtatgtgagttcgaggactcctgctcgccgtctcagtgtgccttctggtggggttcccttccagtcgcctcatggcaacaacataggtcgtccgatattgggacccggacctcccgggtccatcagcggctctactgctgccccatattcgcctatgggaagtgtactcgcatcccctacctcatccatcttttctcggcgggattcaacatcagctacggaggattggcggcggcgaacctggcatccagattcgaataattacggggtcggtaacccaggtagccgcctaagcaatgttataacaccttcgcagtacccaagtcctccgccaagccaggtctctctggctgtgccacaaccacagcctaacaacacactccggctacccggaattgagtccttcggacctctgcctcaccgcccagcctcaccctttgggcaaaattcatcaccattgatgagagatgctgaaaatccgcatcaaccactgcgtcctacactcaagaccacggaatctgatgagagaagaggaacaccgtcatgggacatgggtcttcatcgtggccttacacgccttgatataacttccaatcctgccccgcctgtagatacggcgagttcgtgggcacaggaggcaaatcaagccatggatgcacagatcgatagagtcaggcataaccctccaactgtgcggttcaacgagccaatcaggacggagaatgctccgaccactatccgcagtcctcctcgaccattccaccagcacaccatgtcagcgccatcaatagcgatgcgggatgcgaagcgaagaggctggtatcagggatctgtctcagtccacgctgatgcgccgccggagaaattggctcgtgttgagcgaatgattcaccccaatatacacgaattctctgggtttccggcgagagaaaacgccctttcaaatacggtcgctagtcagcgagaagaagattcggcagagaaagagaaaatgcttcgattgcaggctcttgtcgcagtggcaactagcgaaggcagtgcgaccacagcatattag

SEQ ID NO: 19550 - protein, 656 aa, Muscodor strobelii
  misc_feature: SGI Peptide ID NO. 566578
  misc_feature (1)..(656): NCBI GI: 171679301 Blast Desc: protein product [Podospora anserina] gi|170939276|emb|CAP64504.1| protein product [Podospora anserina]
  misc_feature (1)..(656): NCBI GI: 46127101 Blast Desc: FG07928.1 [Gibberella zeae PH-1]
  misc_feature (1)..(656): NCBI GI: 256721833 Blast Desc: NECHADRAFT_54524 [Nectria haematococca mpVI 77-13-4]
  misc_feature (1)..(615): NCBI GI: 85079864 Blast Desc: NCU05064 [Neurospora crassa OR74A] gi|28917502|gb|EAA27202.1| [Neurospora crassa OR74A]
  misc_feature (3)..(656): NCBI GI: 116178946 Blast Desc: CHGG_00101 [Chaetomium globosum CBS 148.51] gi|88184398|gb|EAQ91866.1| CHGG_00101 [Chaetomium globosum CBS 148.51]
  misc_feature (1)..(616): NCBI GI: 145616256 Blast Desc: MGG_03451 [Magnaporthe grisea 70-15] gi|145010000|gb|EDJ94656.1| MGG_03451 [Magnaporthe grisea 70-15]
  misc_feature (38)..(586): NCBI GI: 156042800 Blast Desc: SS1G_11199 [Sclerotinia sclerotiorum 1980] gi|154695584|gb|EDN95322.1| SS1G_11199 [Sclerotinia sclerotiorum 1980]
  misc_feature (23)..(440): NCBI GI: 189191530 Blast Desc: conserved [Pyrenophora tritici-repentis Pt-1C-BFP] gi|187973710|gb|EDU41209.1| conserved [Pyrenophora tritici-repentis Pt-1C-BFP]
  misc_feature (78)..(593): NCBI GI: 258566307 Blast Desc: [Uncinocarpus reesii 1704] gi|237907599|gb|EEP82000.1| [Uncinocarpus reesii 1704]
  misc_feature (78)..(583): NCBI GI: 261206116 Blast Desc: C2H2 transcription factor [Ajellomyces dermatitidis SLH14081] gi|239592854|gb|EEQ75435.1| C2H2 transcription factor [Ajellomyces dermatitidis SLH14081]
MASTFRPVNTPATMESEKDVEMATSPTTPTPTKTTFGQRPLPNSPFPQAVQIPESIEEQKTPQRKNSQHSRKSRGDSEDVDMDESDGDGQGEDGAGSDDESVNADGSKSGKKKKSQRFYCTDYPPCSLSFTRSEHLARHIRKHTGERPFQCHCSRRFSRLDNLRQHAQTVHVNEDIPIDSLAATGTRFQRQIRTDRVRQPGRARASTAGSMGAPARGHSKSLSTSSISSVGSNFSTREDVRRRPPPLVMADPRFPYTQENYSYRPPSPSDFSTPTSATFSTGQNSPRWGSVIASPTSSHSRTHSLYVSSRTPARRLSVPSGGVPFQSPHGNNIGRPILGPGPPGSISGSTAAPYSPMGSVLASPTSSIFSRRDSTSATEDWRRRTWHPDSNNYGVGNPGSRLSNVITPSQYPSPPPSQVSLAVPQPQPNNTLRLPGIESFGPLPHRPASPFGQNSSPLMRDAENPHQPLRPTLKTTESDERRGTPSWDMGLHRGLTRLDITSNPAPPVDTASSWAQEANQAMDAQIDRVRHNPPTVRFNEPIRTENAPTTIRSPPRPFHQHTMSAPSIAMRDAKRRGWYQGSVSVHADAPPEKLARVERMIHPNIHEFSGFPARENALSNTVASQREEDSAEKEKMLRLQALVAVATSEGSATTAY

SEQ ID NO: 19551 - DNA, 4029 bp, Muscodor strobelii
  misc_feature: SGI EST ID NO. CUFF.46173.1
  misc_feature: Variant of the nucleotide sequence at SEQ ID NO 19549
ctagcaccaagaagcactatcaaagagatatacagagatagggcccgactgtcaagttaatcgtaggcgtcatcacccgttcacgcagcctccccaccctcgcacattgcccctccgtctatcttgtcgtgccgcaactggcgtctgtcattgtctgcgaatggtatcccatgcgccaacctttcgcccgtctctagagacccggctatccactttaccaggcacacggcctcgtatggtgcagcgtattgtgcagtgcactgcatgactgaattacacatccgcctagctttgcatcctgaccggcatcctgactgctgctgcggattgtcgacagagttcggaccttgcggcctgtcaggactcgccctgaggctcctccctgctcccgttccagcccatgcttacagaatacccacgtcctgctccctttgactcctgttcccttgctaatagcccttatgtcttaacacctctcccctgtccctgtccctgtccctgttgcgtagtcggtcgcagtaagaattcagaacaccatcgacctcattattcatcatcatcacccctccacaggtcaccacaggtcaccacacccgctcccgccgccagtggttgtcgcctatcggctcgcgtctacatacgcacacgtacatgcttcttgccacattttgcggcagcatttcccacccacatcctctcgattgcacggccaggataacaaggcaccatcttccatcaatctatctcactctctattctcccctccacgtccgttccatattggggctccccgcttggcagccagaggcaaaacgatctattcgtcaccctccttccccattgacactggccttccccaaccaccgtttctgtgtacaggcggtccgatgtttggtctgtccccttgaacgtcgtcgtctttcacacgcagttgggatgagaacagattggacgtctgcaccctaagtggccagcatccagccctcagctgttgccgtctcgtgtcgtggctccgacggtcgcaagagctcgaggctgtcaacactgctgaacgtcactcaaggtggctcacagtcggcttcagccagccgcccgcagttaagcatcatctgtctatgaacctaaatcaagacaggtctactctcagacacattgagagcgccttacatggagtccgacacctccgctgagtatcgtggcttctaattaaggcgcttctcttttgactcaaccccttacgtctttcgcctcatctctgtcttcatctgtctgaaacaccaacctccgcaatatccgttgccgctggtcatcatttactggaagtaatatccacatctagggaataactagatctaacggggacaattcgccggaacaactgcgcgcacgctcagccgcttgagctttgtacaacatggcttcgactttccgtcctgtcaacacgccagcgaccatggaatccgagaaagacgtcgagatggcaacatcgccgacaaccccgaccccaaccaagaccacctttggacaacgcccccttccgaattcgccatttcctcaggccgtacaaattcctgagagcattgaagagcaaaagacgccgcaacgcaagaactcacaacattctcgtaaatcgcgtggtgattccgaagatgtagacatggacgaatctgacggtgatggccaaggagaggatggggccgggtcggacgacgagagcgtcaatgctgacggctcgaagtcgggcaagaagaagaagtcccaacggttctactgcacagattatcctccttgcagtctgagtttcacgcggagcgagcacctcgccaggcatatccggaaacatactggtgagcgaccgttccagtgccactgctcaagacggttttcccgcctggataatcttcggcagcatgcgcaaactgtacatgtgaacgaggacattccgatcgattcgcttgccgcaacaggaaccaggtttcagaggcagattcgaacagatagagtgaggcaacctggtcgggcccgagcttcaacggctggcagcatgggtgcgccagctcgaggccactcaaaatcgctttcgacttcaagcatcagttctgttgggtctaatttcagtacaagagaggatgtccgacgccggcccccgcccctggttatggcagatccaagatttccatacacacaggagaactattcataccgaccgccatcgcccagtgacttcagcactccgacctcggcaaccttttcgacggggcagaatagtccacgctgggggtccgtcattgcatctccgacctcatcacactcgcgcactcatagcttgtatgtgagttcgaggactcctgctcgccgtctcagtgtgccttctggtggggttcccttccagtcgcctcatggcaacaacataggtcgtccgatattgggacccggacctcccgggtccatcagcggctctactgctgccccatattcgcctatgggaagtgtactcgcatcccctacctcatccatcttttctcggcgggattcaacatcagctacggaggattggcggcggcgaacctggcatccagattcgaataattacggggtcggtaacccaggtagccgcctaagcaatgttataacaccttcgcagtacccaagtcctccgccaagccaggtctctctggctgtgccacaaccacagcctaacaacacactccggctacccggaattgagtccttcggacctctgcctcaccgcccagcctcaccctttgggcaaaattcatcaccattgatgagagatgctgaaaatccgcatcaaccactgcgtcctacactcaagaccacggaatctgatgagagaagaggaacaccgtcatgggacatgggtcttcatcgtggccttacacgccttgatataacttccaatcctgccccgcctgtagatacggcgagttcgtgggcacaggaggcaaatcaagccatggatgcacagatcgatagagtcaggcataaccctccaactgtgcggttcaacgagccaatcaggacggagaatgctccgaccactatccgcagtcctcctcgaccattccaccagcacaccatgtcagcgccatcaatagcgatgcgggatgcgaagcgaagaggctggtatcagggatctgtctcagtccacgctgatgcgccgccggagaaattggctcgtgttgagcgaatgattcaccccaatatacacgaattctctgggtttccggcgagagaaaacgccctttcaaatacggtcgctagtcagcgagaagaagattcggcagagaaagagaaaatgcttcgattgcaggctcttgtcgcagtggcaactagcgaaggcagtgcgaccacagcatattaggctggtttcatccagttaggcccggatttgatcgggattcaggatgcacattggcgcatctccacctcaccccccttacaaattccacgactctcatacatatattctcccctctttattactgtctatgatttatgacgacacattcagggtcattgacgacgaattgttccatattttgatatattgacaaatcacattcgctgcatagccggatacgattccattgtcaatcggttccttacctcagatcttcgcccgctgttcattgggacagcatcctcaacggttctcttggaggcacttgcgttcccgtttttcctatctaacgacttatgacatgataagatgataccctttcatttcaagatgggggtaatcgcaagatggaggctaatttacatcgcgatttcatgtttgtgctgctgtttattaaggatcatgcgtgtttggccctaatctccttggatgagctcgtcatcgtttagacatcgtggaaacttgggctgatttacgtcttgtggaattgataccccgagttgtctttacgtgtttccttcgttatcttcaagtatattgttagttacatcagaataaattcagaagagtctctaccctagatttctgctttcaaacgcagtctt

SEQ ID NO: 19552 - DNA, 618 bp, Muscodor strobelii
  misc_feature: SGI cDNA ID NO. 566579
  misc_feature: Elevated expression when VOC is produced
  misc_feature: Encodes the peptide sequence at SEQ ID NO 19553
atgctctctgaggctgcatttcttaagagagtggtcgaaggatcattggccattgccatcaaagttcaaagcgccgatactattgcatcattgcttcaagtgaagaacacggtggacaagacaatagcttataccaatggtggctccggaatcaagctagtgattatcggcggtgctgagtcgttcatactagctgacgagcttgcagcagctgcaaatgttggcgttgtgctcagccccttgctttcttaccgcagtagatgggacgaacgacgcgctttgacaggagcgcccttgacaaatggaacggcgatcgacatccttgtcaaggcaggcgtgaccgttgccattggtctcgaagaagactggcttgttcgggatatgggactgttagccggtatcgcgtataagaatggggatggcaagattggcgagggacaggctttagattttgtcggatcgaatatttacaagatgcttgggcttgagtctgaaaagagtggtgagtttgacgaatttgtcgttttcgaaggaaatcctttggaaattggctctcatgttcgtgccgtcggtgatgggcttggcaaggtcaacctgtatgagtatgagcagtcttga

SEQ ID NO: 19553 - protein, 205 aa, Muscodor strobelii
  misc_feature: SGI Peptide ID NO. 566579
  misc_feature (3)..(200): NCBI GI: 171678477 Blast Desc: protein product [Podospora anserina] gi|170937308|emb|CAP61965.1| protein product [Podospora anserina]
  misc_feature (1)..(200): NCBI GI: 85095435 Blast Desc: NCU05828 [Neurospora crassa OR74A] gi|28921547|gb|EAA30852.1| conserved [Neurospora crassa OR74A]
  misc_feature (2)..(201): NCBI GI: 39969795 Blast Desc: MGG_10507 [Magnaporthe grisea 70-15] gi|145022810|gb|EDK06583.1| MGG_10507 [Magnaporthe grisea 70-15]
  misc_feature (2)..(200): NCBI GI: 46111205 Blast Desc: FG02484.1 [Gibberella zeae PH-1]
  misc_feature (2)..(200): NCBI GI: 256725756 Blast Desc: NECHADRAFT_43475 [Nectria haematococca mpVI 77-13-4]
  misc_feature (7)..(178): NCBI GI: 170091640 Blast Desc: carbohydrate esterase family 9 protein [Laccaria bicolor S238N-H82] gi|164648535|gb|EDR12778.1| carbohydrate esterase family 9 protein [Laccaria bicolor S238N-H82]
  misc_feature (7)..(199): NCBI GI: 242219944 Blast Desc: candidate carbohydrate esterase protein from family CE9 [Postia placenta Mad-698-R] gi|220725056|gb|EED79062.1| candidate carbohydrate esterase protein from family CE9 [Postia
  misc_feature (9)..(190): NCBI GI: 71022529 Blast Desc: UM05347.1 [Ustilago maydis 521] gi|46101363|gb|EAK86596.1| UM05347.1 [Ustilago maydis 521]
  misc_feature (7)..(163): NCBI GI: 169846802 Blast Desc: CC1G_04548 [Coprinopsis cinerea okayama7#130] gi|116508885|gb|EAU91780.1| CC1G_04548 [Coprinopsis cinerea okayama7#130]
  misc_feature (7)..(178): NCBI GI: 169861640 Blast Desc: CC1G_01366 [Coprinopsis cinerea okayama7#130] gi|116501475|gb|EAU84370.1| CC1G_01366 [Coprinopsis cinerea okayama7#130]
  misc_feature: Useful for introducing or modulating the production of volatile compounds
MLSEAAFLKRVVEGSLAIAIKVQSADTIASLLQVKNTVDKTIAYTNGGSGIKLVIIGGAESFILADELAAAANVGVVLSPLLSYRSRWDERRALTGAPLTNGTAIDILVKAGVTVAIGLEEDWLVRDMGLLAGIAYKNGDGKIGEGQALDFVGSNIYKMLGLESEKSGEFDEFVVFEGNPLEIGSHVRAVGDGLGKVNLYEYEQS

SEQ ID NO: 19554 - DNA, 2776 bp, Muscodor strobelii
  misc_feature: SGI EST ID NO. CUFF.45636.0
  misc_feature: Variant of the nucleotide sequence at SEQ ID NO 19552
gcggaagtacctgaagatatgctctctgaggctgcatttcttaagagagtggtcgaaggatcattggccattgccatcaaagttcaaagcgccgatactattgcatcattgcttcaagtgaagaacacggtggacaagacaatagcttataccaatggtggctccggaatcaagctagtgattatcggcggtgctgagtcgttcatactagctgacgagcttgcagcagctgcaaatgttggcgttgtgctcagccccttgctttcttaccgcagtagatgggacgaacgacgcgctttgacaggagcgcccttgacaaatggaacggcgatcgacatccttgtcaaggcaggcgtgaccgttgccattggtctcgaagaagactggcttgttcgggatatgggactgttagccggtatcgcgtataagaatggggatggcaagattggcgagggacaggctttagattttgtcggatcgaatatttacaagatgcttgggcttgagtctgaaaagagtggtgagtttgacgaatttgtcgttttcgaaggaaatcctttggaaattggctctcatgttcgtgccgtcggtgatgggcttggcaaggtcaacctgtatgagtatgagcagtcttgagttcaagctccggggcacccagtcggcgcgctacgaagttgggattatatagttacaatctctgggtacatacatatatgccgatcgaggttctgttgctgacttcctttcctgtgacatgctaagcctcacttaatgcttctatagcagcttcataaagacgcaggtctaatgagcaaggtatctatatatatgtttccgtgtaactggtgtattaggacaatctttccagggctcttctgttgtaaataagccactgctttccaaaaactgacacttgccgagtttatctgttgtcttgctttttgggttggtgaaggctcgacttgcgatagtcatggagacaaacactcctttaagttacacttggcaacaatatgtcgcagggagccttttctgatagtgactgctatctatctgatatatctacataactaaattaagaggtcacggtcaacatacttataggatgactaatgaaaactgatctacacgacccccaccaggacggctccacggtgacgcaacgcacgagatcgatccccccgggacaatcctcttgctccccagacgtgtggggccatgccatgcatccaggcaagaggcttacgcctagcgcgtctcagaacgctggagggctgtcaaggggatgatctggaccttcaaccaaacaagagacttggtatgactcgcttgctttgtacacccgacatgcaggtttctcatctgactcttaaccgctgtcgaggctagctagacgggaaggagagcacatcgagcaccgcacgccctgttaaagtaaggcaatagtaaagcgcttacattttgtcaacggtagagctggacttgtgccaatacgaaagcgagcaagcaaggcgggcaaaagaaacccgtgatactaattttgcatatgtcgggcgatggcgatgctatcgaggcaacttccttgaaccatcgcattatattcggaatgccaaatgcaagggtctctcacgacaaagggaagggcgccttgcaggtggatgaatatatccagcaaggtcaacttagcatcggggatggtgccgtcgctgtgacgacaggctgtcgtgccaaactctgattgtcgcatgagtcggggctcggttctcggattgttctgaaagtagcggtcagactagcgaccgggaggggctgcgagtagaaaagcataatgagagacaaaaaggcttctttgggaagctagcagctgggcgaaagttctcgttaaacacggcaatgtgtatggatttccgcaatggaggggtggagccaggaacagcaggagagagtcggggagacgactgtttatatccagttcgggccggatagtctcgccgaggatagagaattggaatcgagggtgcagattgcggcctcattactagagtccaggcaagttgcagccgataataagcgacgaaggaaagggtcagatggtgacaagagttggttgacgtggtactgtgccttgcatcctcgtgcagcatcactcctttaggcggcgtaatagacaagcttcagatgatggcaagtgaccagttttagaactatttgagactaccagacccgagacttcggcacacatagagctctgagggcactaacaacctacttcataggtagtctttggctgtcttgtgtcttagataggcgataaatcctttgattggctacccagccgttggaaaggtaaacgtcacagccacatattcttagctttcgttccggtctcgtttccgagctgattgagatggctatgggcgtggccagcgcgggttcaccggctctctcagagagatacttcaaagtgatggcaggctagtggtaactggcagtgcagtgtctatctagaattgtcacaatatttgcccaagaagggccaaaatctgcgcggccgtttcactgcatttatcacttaccttatcatgagtagccagaggactatttgagatcatggttcctgatcgacgctgcttgcgactaaggatcaacacagttagtcttttattagtgtcggtgctaaccttgagatttgtgtcgttattgcatatgtagatgatggcattgaacgcatatcattgaccgtcttcatacaagtagaaatgttaggtgatttgac

SEQ ID NO: 19555 - DNA, 546 bp, Muscodor strobelii
  misc_feature: SGI cDNA ID NO. 566580
  misc_feature: Encodes the peptide sequence at SEQ ID NO 19556
atgaaatccgccgttttcactctcctcactgccctgacatgctatgtcgctgccagccccgtccccaaggtagatagccgggccgcgcccaaggtcatcaacatggcacgcgcggagttcgagtcttccggcctggctaagtacgaccagattgtcaaagactctctggccgtcaagcgttccagtcctatcaccgacagcgtcaactacatcttggtcctgcaaaagagcagttctgacggtgccgacgcttatcaggatgagatcgatgcggctaatcgcgcggacgtactcggcaagcgaagcagccctatcactgacagtgtcaactacattttggttctccagaaaagcagctccgatggtgcggacgcctaccaagatgagattgatgccgccgacccggctgaaattcttggcaagcgaagcagccccatcaccgacagcgtcaactatatcctagtcctccagaagagcagctctgacggcgcagacgcctaccaagacgaaattgacgctgcgaaccctgctgagatcctcggttaa

SEQ ID NO: 19556 - protein, 181 aa, Muscodor strobelii
  misc_feature: SGI Peptide ID NO. 566580
MKSAVFTLLTALTCYVAASPVPKVDSRAAPKVINMARAEFESSGLAKYDQIVKDSLAVKRSSPITDSVNYILVLQKSSSDGADAYQDEIDAANRADVLGKRSSPITDSVNYILVLQKSSSDGADAYQDEIDAADPAEILGKRSSPITDSVNYILVLQKSSSDGADAYQDEIDAANPAEILG

SEQ ID NO: 19557 - DNA, 792 bp, Muscodor strobelii
  misc_feature: SGI cDNA ID NO. 566581
  misc_feature: Encodes the peptide sequence at SEQ ID NO 19558
atggagcctgagaagcactcttaccaaccagtatcattgtctgacatcgattcgtactcgacgagcatcgatgagaatcggtttgatggttcttcaacatttacaacgttcagcaatggatcgaaatggtcaaaattgagattctggcctataatgggcatcgtcatcacgctgcttaacatcctagtggctatactcacaattgccgtactcgtacgacaaccaacagacaaccaatgcgctcagcaattatcagtgttttctcctgcgcttgaggcggttgagtacattgagtacgacttcgcagccgaattcaactctaccaataaatatcgtggaccacctacacctgaaagagaacaggtatggtttgatctaacatataaacatgccgtggagatacctgcagatcaaatcgctggtctcaaccgcacagagaccgacaatctcaagcacgtcccagaagaggttggaacgggatacgttgcaatcttggaggtattccatcagctccactgcctaaacatgatccggatgttcacgtggtaccaagcgggaaagtatccaggcataccagacggactaaccgacgatgaactcaagaaccgcatgcacgtcgatcactgcattgatgctttgaggatagctatccaatgcttcggtgatgttactcctctgtttgtacgtcttggtggccatgcaggttccaaggcggatttcaatagccatcataagtgtcgggattttgatgctattgaagggtggatcgatgagaactggtctgtcaattga

SEQ ID NO: 19558 - protein, 263 aa, Muscodor strobelii
  misc_feature: SGI Peptide ID NO. 566581
  misc_feature (1)..(261): NCBI GI: 149211095 Blast Desc: MGCH7_ch7g1010 [Magnaporthe grisea 70-15] gi|86196965|gb|EAQ71603.1| MGCH7_ch7g1010 [Magnaporthe grisea 70-15]
  misc_feature (88)..(255): NCBI GI: 242787546 Blast Desc: conserved [Talaromyces stipitatus ATCC 10500] gi|218721178|gb|EED20597.1| conserved [Talaromyces stipitatus ATCC 10500]
  misc_feature (61)..(258): NCBI GI: 242207340 Blast Desc: [Postia placenta Mad-698-R] gi|220731553|gb|EED85397.1| [Postia placenta Mad-698-R]
  misc_feature (61)..(258): NCBI GI: 242211074 Blast Desc: [Postia placenta Mad-698-R] gi|220729542|gb|EED83414.1| [Postia placenta Mad-698-R]
  misc_feature (49)..(259): NCBI GI: 145603890 Blast Desc: MGG_14184 [Magnaporthe grisea 70-15] gi|145012023|gb|EDJ96679.1| MGG_14184 [Magnaporthe grisea 70-15]
  misc_feature (75)..(259): NCBI GI: 156033121 Blast Desc: SS1G_13636 [Sclerotinia sclerotiorum 1980] gi|154699039|gb|EDN98777.1| SS1G_13636 [Sclerotinia sclerotiorum 1980]
  misc_feature (76)..(263): NCBI GI: 212534390 Blast Desc: conserved [Penicillium marneffei ATCC 18224] gi|210069750|gb|EEA23840.1| conserved [Penicillium marneffei ATCC 18224]
  misc_feature (51)..(263): NCBI GI: 212533739 Blast Desc: conserved [Penicillium marneffei ATCC 18224] gi|210072390|gb|EEA26479.1| conserved [Penicillium marneffei ATCC 18224]
  misc_feature (73)..(259): NCBI GI: 67902778 Blast Desc: AN8376.2 [Aspergillus nidulans FGSC A4] gi|40747740|gb|EAA66896.1| AN8376.2 [Aspergillus nidulans FGSC A4] gi|259484308|tpe|CBF80416.1| TPA: [Aspergillus nidulans FGSC
  misc_feature (56)..(258): NCBI GI: 238490180 Blast Desc: conserved [Aspergillus flavus NRRL3357] gi|220696740|gb|EED53081.1| conserved [Aspergillus flavus NRRL3357]
MEPEKHSYQPVSLSDIDSYSTSIDENRFDGSSTFTTFSNGSKWSKLRFWPIMGIVITLLNILVAILTIAVLVRQPTDNQCAQQLSVFSPALEAVEYIEYDFAAEFNSTNKYRGPPTPEREQVWFDLTYKHAVEIPADQIAGLNRTETDNLKHVPEEVGTGYVAILEVFHQLHCLNMIRMFTWYQAGKYPGIPDGLTDDELKNRMHVDHCIDALRIAIQCFGDVTPLFVRLGGHAGSKADFNSHHKCRDFDAIEGWIDENWSVN

SEQ ID NO: 19559 - DNA, 172 bp, Muscodor strobelii
  misc_feature: SGI EST ID NO. CUFF.45651.0
  misc_feature: Variant of the nucleotide sequence at SEQ ID NO 19557
ggaccacctacacctgaaagagaacaggtatggtttgatctaacatataaacatgccgtggagatacctgcagatcaaatcgctggtctcaaccgcacagagaccgacaatctcaagcacgtcccagaagaggttggaacgggatacgttgcaatcttggaggtattccatc

SEQ ID NO: 19560 - DNA, 876 bp, Muscodor strobelii
  misc_feature: SGI cDNA ID NO. 566582
  misc_feature: Encodes the peptide sequence at SEQ ID NO 19561
atgtccaagcctaaatcgaatctatccgagcgtcttcggttcttcaagaatgtagaaacatcttcagtaatagaagagactaagttgatgccagaagctgtcaagcgaatgtccgaggacgatgaggatagagtgtcgacaatagcgcaaaagagacggggcttgcgattcgatttgatactgcaccttatttccatactcatcttcactattggagcaactatgctggtcaccacattcaactataaacagtctgacaagtcttgcgccgcccagctgagcatttggtcgccgttactggaagcagtagaatttgaagaacgggactgggagagcattttcacgcaaaagcactcaatatggactggaaggcccacgcgagaattagaggataggtgggacaagctagtcaacgtcccagtagtaattataccggaggaacgtgtcccatcgctcaatcgcagtattgagcaaggatttgtcacgggcggctctcacgggaaagagggatacattgctggaatcgaagtctttcatcatcttcactgcctgaacgtccttagacaagctctttgggtcgacgactatccagagggaatggttcccaaattgttccagtacaactctccagaggtcgcaagagagcacgcggaccattgtatttcaacaatccaccaagcattgacgtgtaatgcagatcttacaccttaccttctctacgatagcacaggagacggggctggtactgcaagagaggattttcaagccacgcacaaatgcaagcggttcgatcctctcatggactgggttctacagaatggtgttgctgtaacaggagacagcctgaggagcatgacaggcgacgcgatatcatag

SEQ ID NO: 19561 - protein, 291 aa, Muscodor strobelii
  misc_feature: SGI Peptide ID NO. 566582
  misc_feature (85)..(277): NCBI GI: 145603890 Blast Desc: MGG_14184 [Magnaporthe grisea 70-15] gi|145012023|gb|EDJ96679.1| MGG_14184 [Magnaporthe grisea 70-15]
  misc_feature (85)..(277): NCBI GI: 149211095 Blast Desc: MGCH7_ch7g1010 [Magnaporthe grisea 70-15] gi|86196965|gb|EAQ71603.1| MGCH7_ch7g1010 [Magnaporthe grisea 70-15]
  misc_feature (52)..(273): NCBI GI: 39969269 Blast Desc: [Magnaporthe grisea 70-15] gi|145012024|gb|EDJ96680.1| [Magnaporthe grisea 70-15]
  misc_feature (52)..(273): NCBI GI: 149211095 Blast Desc: MGCH7_ch7g1010 [Magnaporthe grisea 70-15] gi|86196965|gb|EAQ71603.1| MGCH7_ch7g1010 [Magnaporthe grisea 70-15]
  misc_feature (10)..(276): NCBI GI: 156033121 Blast Desc: SS1G_13636 [Sclerotinia sclerotiorum 1980] gi|154699039|gb|EDN98777.1| SS1G_13636 [Sclerotinia sclerotiorum 1980]
  misc_feature (25)..(272): NCBI GI: 256730526 Blast Desc: NECHADRAFT_30482 [Nectria haematococca mpVI 77-13-4]
  misc_feature (31)..(275): NCBI GI: 238490180 Blast Desc: conserved [Aspergillus flavus NRRL3357] gi|220696740|gb|EED53081.1| conserved [Aspergillus flavus NRRL3357]
  misc_feature (85)..(282): NCBI GI: 67902778 Blast Desc: AN8376.2 [Aspergillus nidulans FGSC A4] gi|40747740|gb|EAA66896.1| AN8376.2 [Aspergillus nidulans FGSC A4] gi|259484308|tpe|CBF80416.1| TPA: [Aspergillus nidulans FGSC
  misc_feature (97)..(275): NCBI GI: 242787546 Blast Desc: conserved [Talaromyces stipitatus ATCC 10500] gi|218721178|gb|EED20597.1| conserved [Talaromyces stipitatus ATCC 10500]
  misc_feature (50)..(275): NCBI GI: 189198165 Blast Desc: conserved [Pyrenophora tritici-repentis Pt-1C-BFP] gi|187981368|gb|EDU47994.1| conserved [Pyrenophora tritici-repentis Pt-1C-BFP]
MSKPKSNLSERLRFFKNVETSSVIEETKLMPEAVKRMSEDDEDRVSTIAQKRRGLRFDLILHLISILIFTIGATMLVTTFNYKQSDKSCAAQLSIWSPLLEAVEFEERDWESIFTQKHSIWTGRPTRELEDRWDKLVNVPVVIIPEERVPSLNRSIEQGFVTGGSHGKEGYIAGIEVFHHLHCLNVLRQALWVDDYPEGMVPKLFQYNSPEVAREHADHCISTIHQALTCNADLTPYLLYDSTGDGAGTAREDFQATHKCKRFDPLMDWVLQNGVAVTGDSLRSMTGDAIS

SEQ ID NO: 19562 - DNA, 453 bp, Muscodor strobelii
  misc_feature: SGI EST ID NO. CUFF.45656.0
  misc_feature: Variant of the nucleotide sequence at SEQ ID NO 19560
cattgctggaatcgaagtctttcatcatcttcactgcctgaacgtccttagacaagctctttgggtcgacgactatccagagggaatggttcccaaattgttccagtacaactctccagaggtcgcaagagagcacgcggaccattgtatttcaacaatccaccaagcattgacgtgtaatgcagatcttacaccttaccttctctacgatagcacaggagacggggctggtactgcaagagaggattttcaagccacgcacaaatgcaagcggttcgatcctctcatggactgggttctacagaatggtgttgctgtaacaggagacagcctgaggagcatgacaggcgacgcgatatcataggtcttatgctacatatatagtccgactataatagcttcagctttcattgacgcaatgtattatatccaagtcccgatctttgactgtca

SEQ ID NO: 19563 - DNA, 774 bp, Muscodor strobelii
  misc_feature: SGI cDNA ID NO. 566583
  misc_feature: Encodes the peptide sequence at SEQ ID NO 19564
atgtctgcagataagaccatcatacttgtcaccggtggcaatagtggtataggatttgagatagtttctgctttggccgcaacgtcgtccgactatcacattatcctcgcgtctcgatctcttgaaaagggcgagaaagccaagactgacatcacttcaactctcggcgattcgctaaagggatcaatctcacatatcgcactcgatcttaccgatcaggccacaatcatagcttccaagacgcatgttcaagagcagtttggcaggttggacgtacttatcaacaacgcgggcatcatcttctatcaacaggcagatactttgacatcgctccgtacgacttttgagacaaatgtctttggcacggcgctagtgacggaagctttcgcggagcttctcaagaagtcaagcaacccatacttgatctacgtgtcgtcaggtcaagggtccatcactctccgctgtgattctacctacaagtactacaacgttccaggggatcactatcgcatgagcaagtccgcgttaaatatgttagctgcctgtcaccgctggaccttctcagatttcggctgcaaagtcgtcgctttctgcccagggtactgtgtcaccaatctcactggagacgaaggacgtgagatgcggatcaagaggggtggacgagatgcaaaggatcccgcgaacgccctcgttgatgtagtccgaggaaagagggacgacgatattaagaagagcggcatagtgtctgtggatggtggcgtgctgccgtggtga

SEQ ID NO: 19564 - protein, 257 aa, Muscodor strobelii
  misc_feature: SGI Peptide ID NO. 566583
  misc_feature (6)..(188): Pfam Id: PF00106 Pfam Desc: short chain dehydrogenase
  misc_feature (6)..(149): Pfam Id: PF00106 Pfam Desc: short chain dehydrogenase
  misc_feature (1)..(257): NCBI GI: 212536736 Blast Desc: short chain dehydrogenase/reductase, [Penicillium marneffei ATCC 18224] gi|210070923|gb|EEA25013.1| short chain dehydrogenase/reductase, [Penicillium marneffei ATCC 18224]
  misc_feature (11)..(255): NCBI GI: 171677718 Blast Desc: protein product [Podospora anserina] gi|170936927|emb|CAP61586.1| protein product [Podospora anserina]
  misc_feature (41)..(257): NCBI GI: 171684625 Blast Desc: protein product [Podospora anserina] gi|170942273|emb|CAP67925.1| protein product [Podospora anserina]
  misc_feature (1)..(257): NCBI GI: 256725156 Blast Desc: NECHADRAFT_73231 [Nectria haematococca mpVI 77-13-4]
  misc_feature (3)..(242): NCBI GI: 189209299 Blast Desc: PTRG_10651 [Pyrenophora tritici-repentis Pt-1C-BFP] gi|187977075|gb|EDU43701.1| PTRG_10651 [Pyrenophora tritici-repentis Pt-1C-BFP]
  misc_feature (5)..(239): NCBI GI: 154289341 Blast Desc: short chain dehydrogenase [Botryotinia fuckeliana B05.10] gi|150849882|gb|EDN25075.1| short chain dehydrogenase [Botryotinia fuckeliana B05.10]
  misc_feature (8)..(244): NCBI GI: 119488536 Blast Desc: short chain dehydrogenase/reductase, [Neosartorya fischeri NRRL 181] gi|119410876|gb|EAW20821.1| short chain dehydrogenase/reductase, [Neosartorya fischeri NRRL 181]
  misc_feature (1)..(257): NCBI GI: 261356994 Blast Desc: short chain dehydrogenase [Verticillium albo-atrum VaMs.102]
  misc_feature (5)..(242): NCBI GI: 115433010 Blast Desc: [Aspergillus terreus NIH2624] gi|114189494|gb|EAU31194.1| [Aspergillus terreus NIH2624]
  misc_feature (2)..(257): NCBI GI: 169598838 Blast Desc: SNOG_02225 [Phaeosphaeria nodorum SN15] gi|111069317|gb|EAT90437.1| SNOG_02225 [Phaeosphaeria nodorum SN15]
  misc_feature (5)..(207): SWISSPROT Homolog: EC 1.1.1.62 Estradiol 17-beta-dehydrogenase
  misc_feature (5)..(207): SWISSPROT Homolog: EC 1.1.1.270 3-keto-steroid reductase
MSADKTIILVTGGNSGIGFEIVSALAATSSDYHIILASRSLEKGEKAKTDITSTLGDSLKGSISHIALDLTDQATIIASKTHVQEQFGRLDVLINNAGIIFYQQADTLTSLRTTFETNVFGTALVTEAFAELLKKSSNPYLIYVSSGQGSITLRCDSTYKYYNVPGDHYRMSKSALNMLAACHRWTFSDFGCKVVAFCPGYCVTNLTGDEGREMRIKRGGRDAKDPANALVDVVRGKRDDDIKKSGIVSVDGGVLPW

SEQ ID NO: 19565 - DNA, 1365 bp, Muscodor strobelii
  misc_feature: SGI cDNA ID NO. 566584
  misc_feature: Encodes the peptide sequence at SEQ ID NO 19566
atgcagcagattatccacctatctgtcggccaatgtggcaaccaaatcggtgcttctttttgggaaacaatcagacgcgagcacaatctcgatgtcaccgggaggccagatgatgcaagcgatgttcagctttcacgtctaggggtctacttcaatgaaggcaactacggaaaacatgttccacgtaccgtacttgtcgacctcgaaccgggtgtcgtcgaagctgtgcgcgccggtcccagtggagacctatttcgaccggacaacatcgtgcacggaacggcgggtgcagggaacaactgggctaaagggtttcataccgaaggcgttgaaatactggatcaagtaatcgacgttgtgcgccgggaagccgagagttgcgactctcttcaagggttccagctttcgcattctctgggaggcggctctggatctggccttgggacgttactaatggcgaagatacgcgaagaataccccgatcgtatcatggcaacatactctgttgttccgtcgccaaaggtctcagatacagtaacagagccttataatgccacgctgtccatgcaccaacttgttgagaacgctgatgaaacgtttgttatcgacaatgaagcgctctacgatatttgcactcggtctctcaagatcgcgcatccttcacatggagatctgaacaagctcatctccaccgtaatgtccggagtctctacttcacttcgatttcccggccagctaaactcgaacctccgtaagctggcagtcaacatgattccatttccgcgtctacacttcttcatggtcggatttgcgccattgaccaatatctcgcgagaggcgagggccttcagatcgacaacagcacatagccttgcgcagcagatgttcgatccgaagaatatgatggcagcgtgtgacttcagaaatggtcgatatctgacttgttcagcaatctttcgtggcaaaatcgccatgagcgaagtggaaaaggaaatattctctctacaggacaggaatgcatcttacttcgtcgactggattcccaacaatgttcagacatctctatgtgaggtagctcctaaagggttcgacatgactggcacctttgttggtaactccaccgcgatgcaggagattatgaagcgtgttggcgatcatttcgcactgatgtttcgtcgtcgcgcatttctgcattggtatacggatgaaggcatggacgtgatggagttcacggaggccgagtcaaatatgaatgatctgatatcggagtaccagcaatatcaggaggcaactgcagataatggagattttgatgaggaggacgaggagctagttgaaggtactaatgaaggtggcgaatactag

SEQ ID NO: 19566 - protein, 454 aa, Muscodor strobelii
  misc_feature: SGI Peptide ID NO. 566584
  misc_feature (45)..(244): Pfam Id: PF00091 Pfam Desc: Tubulin/FtsZ family, GTPase domain
  misc_feature (246)..(385): Pfam Id: PF03953 Pfam Desc: Tubulin/FtsZ family, C-terminal domain
  misc_feature (1)..(431): NCBI GI: 1729851 Blast Desc: TBB_RHYSE RecName: Full=Tubulin beta chain; AltName: Full=Beta-tubulin gi|1263904|emb|CAA56936.1| beta-tubulin [Rhynchosporium secalis]
  misc_feature (1)..(433): NCBI GI: 168918 Blast Desc: beta-tubulin [Neurospora crassa]
  misc_feature (1)..(431): NCBI GI: 115502462 Blast Desc: TBB_PHANO RecName: Full=Tubulin beta chain; AltName: Full=Beta-tubulin gi|55583714|gb|AAV53374.1| beta-tubulin [Phaeosphaeria avenaria f. sp. avenaria] beta-tubulin avenaria f.
  misc_feature (1)..(431): NCBI GI: 121701811 Blast Desc: tubulin beta chain [Aspergillus clavatus NRRL 1] gi|119397313|gb|EAW07744.1| tubulin beta chain [Aspergillus clavatus NRRL 1]
  misc_feature (1)..(446): NCBI GI: 74654401 Blast Desc: TBB1_TRIVE RecName: Full=Tubulin beta-1 chain; AltName: Full=Beta-1-tubulin gi|28557457|gb|AAO17775.1| beta-tubulin 1 [Hypocrea virens]
  misc_feature (1)..(431): NCBI GI: 61678003 Blast Desc: beta-tubulin [Cercospora beticola]
  misc_feature (1)..(433): NCBI GI: 47524505 Blast Desc: beta-tubulin/green fluorescent protein S65T variant fusion protein [Expression vector pMF309]
  misc_feature (1)..(433): NCBI GI: 164426720 Blast Desc: tubulin beta chain [Neurospora crassa OR74A] gi|62296557|sp|P05220.2|TBB_NEUCR RecName: Full=Tubulin beta chain; AltName: Full=Beta-tubulin gi|39979246|emb|CAE85615.1|
  misc_feature (1)..(431): NCBI GI: 55583720 Blast Desc: beta-tubulin [Phaeosphaeria avenaria f. sp. triticae]
  misc_feature (1)..(431): NCBI GI: 1002511 Blast Desc: beta-tubulin [Botryotinia fuckeliana]
MQQIIHLSVGQCGNQIGASFWETIRREHNLDVTGRPDDASDVQLSRLGVYFNEGNYGKHVPRTVLVDLEPGVVEAVRAGPSGDLFRPDNIVHGTAGAGNNWAKGFHTEGVEILDQVIDVVRREAESCDSLQGFQLSHSLGGGSGSGLGTLLMAKIREEYPDRIMATYSVVPSPKVSDTVTEPYNATLSMHQLVENADETFVIDNEALYDICTRSLKIAHPSHGDLNKLISTVMSGVSTSLRFPGQLNSNLRKLAVNMIPFPRLHFFMVGFAPLTNISREARAFRSTTAHSLAQQMFDPKNMMAACDFRNGRYLTCSAIFRGKIAMSEVEKEIFSLQDRNASYFVDWIPNNVQTSLCEVAPKGFDMTGTFVGNSTAMQEIMKRVGDHFALMFRRRAFLHWYTDEGMDVMEFTEAESNMNDLISEYQQYQEATADNGDFDEEDEELVEGTNEGGEY

SEQ ID NO: 19567 - DNA, 2761 bp, Muscodor strobelii
  misc_feature: SGI EST ID NO. CUFF.45666.0
  misc_feature: Variant of the nucleotide sequence at SEQ ID NO 19565
tagcaaagctctgacaccgccttattgccgaggcatcgattttctcgcattcatcgcaagcactgtaatatgcatcgcgatgattgattcccgacaccaaaacgctcacttattatcccaccaacgcttgagtgaccgaggcttgatggagcacacgctcgggatcatggagcagatggcgcagtctgacaatgatcctattggggtaacggttgcgagtattctcaggccattgcttgctatggagagcgaagttgctaagggagcatcgtacaaatttgacttggtgtcaaatttatcagatggcatcgaggcgcttgaatgcggaggtcgcgttacagacgatggtgacctgcacatctacgttccgtatttcggcatcattgctatccagcgcgtccaatgcaatgctcctattcaagagaagcgcggtgcagatatcggatttgacgaacccatggttggattctcagaggaatatcttggcggccttgatgcacttacaacagatccacagaccttggacgctgatagctcgatacttcagggagtagatgtcgccttatttaatgacctgatatatgggataattgatcagggcgaggaattgtaggcagcttgcccgtgctgggagactccctaagcgcacttaatttgggggagtgttcccactataccgccccccacaaccgggattcacttggttgaggtcaatcccgggagttgtcacaaaaattcctaactgaatcacggattttataccgatcacaaaggtttaatttcgttgcctgttttgtggaaaactcttccaggccgtttcttgagattgtttagcaatgattctgctgatggtcccttttcttgctgcctgttgtccttggtgttgctcgacgacgggattaacgattgtttacattcgccgcctaggctgccgcgaaaacaaaagaaataccgaacacttagctcatatggagaaaacggtatctgatcaaggctacataaaaggtcgtgaatagtccttctaccgattacgcgtcctcgttgccaattgggttagaaactgcagttgtctattgccaagcagtgccacatcgctatatccaaccgaaataatagtctggtctgtctctcatcatgcagcagattatccacctatctgtcggccaatgtggcaaccaaatcggtgcttctttttgggaaacaatcagacgcgagcacaatctcgatgtcaccgggaggccagatgatgcaagcgatgttcagctttcacgtctaggggtctacttcaatgaaggcaactacggaaaacatgttccacgtaccgtacttgtcgacctcgaaccgggtgtcgtcgaagctgtgcgcgccggtcccagtggagacctatttcgaccggacaacatcgtgcacggaacggcgggtgcagggaacaactgggctaaagggtttcataccgaaggcgttgaaatactggatcaagtaatcgacgttgtgcgccgggaagccgagagttgcgactctcttcaagggttccagctttcgcattctctgggaggcggctctggatctggccttgggacgttactaatggcgaagatacgcgaagaataccccgatcgtatcatggcaacatactctgttgttccgtcgccaaaggtctcagatacagtaacagagccttataatgccacgctgtccatgcaccaacttgttgagaacgctgatgaaacgtttgttatcgacaatgaagcgctctacgatatttgcactcggtctctcaagatcgcgcatccttcacatggagatctgaacaagctcatctccaccgtaatgtccggagtctctacttcacttcgatttcccggccagctaaactcgaacctccgtaagctggcagtcaacatgattccatttccgcgtctacacttcttcatggtcggatttgcgccattgaccaatatctcgcgagaggcgagggccttcagatcgacaacagcacatagccttgcgcagcagatgttcgatccgaagaatatgatggcagcgtgtgacttcagaaatggtcgatatctgacttgttcagcaatctttcgtggcaaaatcgccatgagcgaagtggaaaaggaaatattctctctacaggacaggaatgcatcttacttcgtcgactggattcccaacaatgttcagacatctctatgtgaggtagctcctaaagggttcgacatgactggcacctttgttggtaactccaccgcgatgcaggagattatgaagcgtgttggcgatcatttcgcactgatgtttcgtcgtcgcgcatttctgcattggtatacggatgaaggcatggacgtgatggagttcacggaggccgagtcaaatatgaatgatctgatatcggagtaccagcaatatcaggaggcaactgcagataatggagattttgatgaggaggacgaggagctagttgaaggtactaatgaaggtggcgaatactagtataatctcaacccccgggatcagatattgttgaaggtgtcacgctgagctagattgctgaggatgtatgaaaatcagattgcaaggaagaccgagtactaggtaagacgggagccccctaaaacgaatattctatagtaggagatggtcacatacgcttgcaaagtacaggttatatgagcggttgaaagcatgaacccagttcctattatgcttgaaatgataactttccgtacactacatcattacagctcagttttcg

SEQ ID NO: 19568 - DNA, 468 bp, Muscodor strobelii
  misc_feature: SGI cDNA ID NO. 566585
  misc_feature: Encodes the peptide sequence at SEQ ID NO 19569
atggagcacacgctcgggatcatggagcagatggcgcagtctgacaatgatcctattggggtaacggttgcgagtattctcaggccattgcttgctatggagagcgaagttgctaagggagcatcgtacaaatttgacttggtgtcaaatttatcagatggcatcgaggcgcttgaatgcggaggtcgcgttacagacgatggtgacctgcacatctacgttccgtatttcggcatcattgctatccagcgcgtccaatgcaatgctcctattcaagagaagcgcggtgcagatatcggatttgacgaacccatggttggattctcagaggaatatcttggcggccttgatgcacttacaacagatccacagaccttggacgctgatagctcgatacttcagggagtagatgtcgccttatttaatgacctgatatatgggataattgatcagggcgaggaattgtag

SEQ ID NO: 19569 - protein, 155 aa, Muscodor strobelii
  misc_feature: SGI Peptide ID NO. 566585
  misc_feature (1)..(147): NCBI GI: 242779925 Blast Desc: conserved [Talaromyces stipitatus ATCC 10500] gi|218719635|gb|EED19054.1| conserved [Talaromyces stipitatus ATCC 10500]
  misc_feature (1)..(147): NCBI GI: 170940175 Blast Desc: protein product [Podospora anserina]
  misc_feature (1)..(83): NCBI GI: 225682403 Blast Desc: conserved [Paracoccidioides brasiliensis Pb03]
  misc_feature (1)..(83): NCBI GI: 226289800 Blast Desc: conserved [Paracoccidioides brasiliensis Pb18]
  misc_feature (1)..(83): NCBI GI: 256724973 Blast Desc: NECHADRAFT_34482 [Nectria haematococca mpVI 77-13-4]
  misc_feature (8)..(84): NCBI GI: 242797239 Blast Desc: conserved [Talaromyces stipitatus ATCC 10500] gi|218719558|gb|EED18978.1| conserved [Talaromyces stipitatus ATCC 10500]
  misc_feature (1)..(83): NCBI GI: 256725025 Blast Desc: NECHADRAFT_34715 [Nectria haematococca mpVI 77-13-4]
  misc_feature (1)..(148): NCBI GI: 259480251 Blast Desc: TPA: Zn(II)2Cys6 transcription factor (Eurofung) [Aspergillus nidulans FGSC A4]
  misc_feature (1)..(148): NCBI GI: 67540994 Blast Desc: AN6667.2 [Aspergillus nidulans FGSC A4] gi|40739006|gb|EAA58196.1| [Aspergillus nidulans FGSC A4]
MEHTLGIMEQMAQSDNDPIGVTVASILRPLLAMESEVAKGASYKFDLVSNLSDGIEALECGGRVTDDGDLHIYVPYFGIIAIQRVQCNAPIQEKRGADIGFDEPMVGFSEEYLGGLDALTTDPQTLDADSSILQGVDVALFNDLIYGIIDQGEEL

SEQ ID NO: 19570 - DNA, 2761 bp, Muscodor strobelii; identical to SEQ ID NO: 19567
  misc_feature: SGI EST ID NO. CUFF.45666.0
  misc_feature: Variant of the nucleotide sequence at SEQ ID NO 19568

SEQ ID NO: 19571 - DNA, 1017 bp, Muscodor strobelii
  misc_feature: SGI cDNA ID NO. 566586
  misc_feature: Encodes the peptide sequence at SEQ ID NO 19572
atggttaacattgccattgcaggcggatcaggccaagtggcacgagaggtcatagatgtacttgcggcaactggcaagcatgacataatgattttgagtcggggcgtgggtgtacctgttcagcttaacgtcaatcgtgcatccgagagcgagatcttagagaacaccgcacaagttacctggcggtctgtcaattatgacgacacaatggcacttgcacaggtgctgcaagacaggcatactgtgttgtcattcatccagcttctctccgaccacggcaataaagctcaaaaaggtctcatcgatgcttgtgtcatcgcaggcgtgaaacatttcgcaccaagtgaatgggcaagtgctggattggaggatctgccctggtggagaggaaagcaagagattcggaattatttgcttcatgttaatgaaaaacgaaaagtcagtgttcgaaacattcaatgcccgaaagaatacaccttgtttcaaccaggactattcctagaatacttggcatcgccccacaagacagcgaggcatctttctcccctagagacagttttcgactttcaaaactgcagggctgtcgtggtcgagggccgagaagatgctacttggacattcacgacagttcaggacgtcgctagcgtcgtagcgagagtagtcgactatgaaggggaatggccaatcaatggaggtatccaaggaaataatttgacagcttcagagatagtgcaaattggcgagcgagttagaggtagaccgttcgcaattgagcgactcaaaatggctgatctagccaatggtcagctcaattcgtcatggactatcggaaaacgtcacgccgctgtgaaggaggaggaagcatccgaaatgttcaagatggtgttcattggcatgctcctcagcagcgcaaagggaatgtggaacgtcccgagtggttttaacctcctctttccggagtatccattcactcaggctgaggactacctagctcaggtattcgctaaagcagaatga

SEQ ID NO: 19572 - protein, 338 aa, Muscodor strobelii
  misc_feature: SGI Peptide ID NO. 566586
  misc_feature (4)..(259): Pfam Id: PF05368 Pfam Desc: NmrA-like family
  misc_feature (1)..(334): NCBI GI: 242779920 Blast Desc: conserved [Talaromyces stipitatus ATCC 10500] gi|218719634|gb|EED19053.1| conserved [Talaromyces stipitatus ATCC 10500]
  misc_feature (1)..(334): NCBI GI: 145244052 Blast Desc: An11g05480 [Aspergillus niger] gi|134079222|emb|CAK40705.1| protein product [Aspergillus niger]
  misc_feature (1)..(302): NCBI GI: 225682402 Blast Desc: conserved [Paracoccidioides brasiliensis Pb03]
  misc_feature (1)..(338): NCBI GI: 256724860 Blast Desc: NECHADRAFT_76991 [Nectria haematococca mpVI 77-13-4]
  misc_feature (1)..(334): NCBI GI: 256722621 Blast Desc: NECHADRAFT_49787 [Nectria haematococca mpVI 77-13-4]
  misc_feature (13)..(334): NCBI GI: 170940176 Blast Desc: protein product [Podospora anserina]
  misc_feature (1)..(334): NCBI GI: 67540996 Blast Desc: AN6668.2 [Aspergillus nidulans FGSC A4] gi|40739007|gb|EAA58197.1| AN6668.2 [Aspergillus nidulans FGSC A4] gi|259480252|tpe|CBF71213.1| TPA: conserved [Aspergillus FGSC
  misc_feature (1)..(332): NCBI GI: 256724921 Blast Desc: NECHADRAFT_91503 [Nectria haematococca mpVI 77-13-4]
  misc_feature (1)..(335): NCBI GI: 46110665 Blast Desc: FG02214.1 [Gibberella zeae PH-1]
  misc_feature (1)..(335): NCBI GI: 46109782 Blast Desc: FG01773.1 [Gibberella zeae PH-1]
MVNIAIAGGSGQVAREVIDVLAATGKHDIMILSRGVGVPVQLNVNRASESEILENTAQVTWRSVNYDDTMALAQVLQDRHTVLSFIQLLSDHGNKAQKGLIDACVIAGVKHFAPSEWASAGLEDLPWWRGKQEIRNYLLHVNEKRKVSVRNIQCPKEYTLFQPGLFLEYLASPHKTARHLSPLETVFDFQNCRAVVVEGREDATWTFTTVQDVASVVARVVDYEGEWPINGGIQGNNLTASEIVQIGERVRGRPFAIERLKMADLANGQLNSSWTIGKRHAAVKEEEASEMFKMVFIGMLLSSAKGMWNVPSGFNLLFPEYPFTQAEDYLAQVFAKAE

SEQ ID NO: 19573 - DNA, 537 bp, Muscodor strobelii
  misc_feature: SGI EST ID NO. CUFF.45683.0
  misc_feature: Variant of the nucleotide sequence at SEQ ID NO 19571
gaatacttggcatcgccccacaagacagcgaggcatctttctcccctagagacagttttcgactttcaaaactgcagggctgtcgtggtcgagggccgagaagatgctacttggacattcacgacagttcaggacgtcgctagcgtcgtagcgagagtagtcgactatgaaggggaatggccaatcaatggaggtatccaaggaaataatttgacagcttcagagatagtgcaaattggcgagcgagttagaggtagaccgttcgcaattgagcgactcaaaatggctgatctagccaatggtcagctcaattcgtcatggactatcggaaaacgtcacgccgctgtgaaggaggaggaagcatccgaaatgttcaagatggtgttcattggcatgctcctcagcagcgcaaagggaatgtggaacgtcccgagtggttttaacctcctctttccggagtatccattcactcaggctgaggactacctagctcaggtattcgctaaagcagaatgaataactgaacgtgtcttctcg

SEQ ID NO: 19574 - DNA, 1059 bp, Muscodor strobelii
  misc_feature: SGI cDNA ID NO. 566587
  misc_feature: Encodes the peptide sequence at SEQ ID NO 19575
atggttaacattgccattgcaggcggatcaggccgtaagcgtcacaaacacgcatccctattttatcacggcacgtgtctaaccaagcttaaactcgcagaagtggcacgagaggtcatagatgtacttgcggcaactggcaagcatgacataatgattttgagtcggggcgtgggtgtacctgttcagcttaacgtcaatcgtgcatccgagagcgagatcttagagaacaccgcacaagttacctggcggtctgtcaattatgacgacacaatggcacttgcacaggtgctgcaagacaggcatactgtgttgtcattcatccagcttctctccgaccacggcaataaagctcaaaaaggtctcatcgatgcttgtgtcatcgcaggcgtgaaacatttcgcaccaagtgaatgggcaagtgctggattggaggatctgccctggtggagaggaaagcaagagattcggaattatttgcttcatgttaatgaaaaacgaaaagttctagaatacaccttgtttcaaccaggactattcctagaatacttggcatcgccccacaagacagcgaggcatctttctcccctagagacagttttcgactttcaaaactgcagggctgtcgtggtcgagggccgagaagatgctacttggacattcacgacagttcaggacgtcgctagcgtcgtagcgagagtagtcgactatgaaggggaatggccaatcaatggaggtatccaaggaaataatttgacagcttcagagatagtgcaaattggcgagcgagttagaggtagaccgttcgcaattgagcgactcaaaatggctgatctagccaatggtcagctcaattcgtcatggactatcggaaaacgtcacgccgctgtgaaggaggaggaagcatccgaaatgttcaagatggtgttcattggcatgctcctcagcagcgcaaagggaatgtggaacgtcccgagtggttttaacctcctctttccggagtatccattcactcaggctgaggactacctagctcaggtattcgctaaagcagaatga

SEQ ID NO: 19575 - protein, 352 aa, Muscodor strobelii
  misc_feature: SGI Peptide ID NO. 566587
  misc_feature (34)..(273): Pfam Id: PF05368 Pfam Desc: NmrA-like family
  misc_feature (1)..(348): NCBI GI: 242779920 Blast Desc: conserved [Talaromyces stipitatus ATCC 10500] gi|218719634|gb|EED19053.1| conserved [Talaromyces stipitatus ATCC 10500]
  misc_feature (1)..(316): NCBI GI: 225682402 Blast Desc: conserved [Paracoccidioides brasiliensis Pb03]
  misc_feature (1)..(348): NCBI GI: 145244052 Blast Desc: An11g05480 [Aspergillus niger] gi|134079222|emb|CAK40705.1| protein product [Aspergillus niger]
  misc_feature (34)..(348): NCBI GI: 170940176 Blast Desc: protein product [Podospora anserina]
  misc_feature (1)..(352): NCBI GI: 256724860 Blast Desc: NECHADRAFT_76991 [Nectria haematococca mpVI 77-13-4]
  misc_feature (1)..(348): NCBI GI: 256722621 Blast Desc: NECHADRAFT_49787 [Nectria haematococca mpVI 77-13-4]
  misc_feature (81)..(346): NCBI GI: 256724921 Blast Desc: NECHADRAFT_91503 [Nectria haematococca mpVI 77-13-4]
  misc_feature (1)..(348): NCBI GI: 67540996 Blast Desc: AN6668.2 [Aspergillus nidulans FGSC A4] gi|40739007|gb|EAA58197.1| AN6668.2 [Aspergillus nidulans FGSC A4] gi|259480252|tpe|CBF71213.1| TPA: conserved [Aspergillus FGSC
  misc_feature (1)..(349): NCBI GI: 46110665 Blast Desc: FG02214.1 [Gibberella zeae PH-1]
  misc_feature (1)..(349): NCBI GI: 46109782 Blast Desc: FG01773.1 [Gibberella zeae PH-1]
MVNIAIAGGSGRKRHKHASLFYHGTCLTKLKLAEVAREVIDVLAATGKHDIMILSRGVGVPVQLNVNRASESEILENTAQVTWRSVNYDDTMALAQVLQDRHTVLSFIQLLSDHGNKAQKGLIDACVIAGVKHFAPSEWASAGLEDLPWWRGKQEIRNYLLHVNEKRKVLEYTLFQPGLFLEYLASPHKTARHLSPLETVFDFQNCRAVVVEGREDATWTFTTVQDVASVVARVVDYEGEWPINGGIQGNNLTASEIVQIGERVRGRPFAIERLKMADLANGQLNSSWTIGKRHAAVKEEEASEMFKMVFIGMLLSSAKGMWNVPSGFNLLFPEYPFTQAEDYLAQVFAKAE

SEQ ID NO: 19576 - DNA, 537 bp, Muscodor strobelii; identical to SEQ ID NO: 19573
  misc_feature: SGI EST ID NO. CUFF.45683.0
  misc_feature: Variant of the nucleotide sequence at SEQ ID NO 19574

SEQ ID NO: 19577 - DNA, 1464 bp, Muscodor strobelii
  misc_feature: SGI cDNA ID NO. 566588
  misc_feature: Elevated expression when VOC is produced
  misc_feature: Encodes the peptide sequence at SEQ ID NO 19578
atgtcttcttcacttggaaatatgtcgtctctcgcagacactttgacggcgtctggaggaacggagtctgcagggtttctgaatgatatagtatctcatctttggcctaatatcaatgtagctggttgtagaatgatcaaggacatcgtcgaacctctgttgcagagcacgacgggtttctcatcgctccacttcacgcagcttgacctcggaacggctcccatacacttctctaaggtagatgtgcacaggacagaaaaagaaggcatcaagctagatatggatttggattgggatggtgaatgtggaattaagctggatggtggcggcgcgattccagaagtgggcatcaagcatataaaacttcatggcaggctctctgtcctaatgtgccccatcaccaacgtcatccccttgatcggagctttgcaaattgctttcatcaaccctccaagtatcagcttagattacacgggagctatcagtttcctcgagttcgacaaaatcgaaaatgcgcttaagaacgttattctcggggttatcggagggatggcagtcttgccgaaccgattcctggtgaacatggccgccgacaatgactacttcaagacatacgtccctcatgtgggtatgatacgtataactgtagaaagcgccaccaacattacaggccctaagaagtctggagttaagaaacttctagataagatcgccagggacgttcctgactgctactgtaaggtagccgttggcgccgagaagccatggtcgacaacagtgtgcaagaataagcattctcctaaatgggacgagtcgcatgatttcctcgtcatggaccacgaccagtgcatcttagtcgaggtggtggataaagatgtggatcaagacgatgatatcggaatcgccctcaccaccatccgccagcttctcctggatggcggttcacaggagcttgagctcaagcataaagaccagccaacgggtgccaccgttaaaatacgtgccgaattccataacttcctccctgactcggataatcttctcgctcaggcaaaagatgaaggcgagggcctatattgcggtgtcgcgaatgtgctcatcgaccgtgccagcggtctcagtgggcgaaaagaagatttgaaccctagcgtcaagatcacatgggggaaagccacagagctgccacttcaaacaccagtgaaaacctacgctccaggtactgacattttcgcaccagattttagcacaccattccggattccaattactcggagcatggtatcacaagcggagagtttttatatcgttttgatgaacaaagaagaggaaattgggagagtagaagtccccttccaggatgtggtacatgctccagatatgactttggaaaaagaatttgatgttgggtctggcatgacagtcagagcgagcttcagtctcagaggcacgcagctggcacagtga

SEQ ID NO: 19578 - protein, 487 aa, Muscodor strobelii
  misc_feature: SGI Peptide ID NO. 566588
  misc_feature (212)..(303): Pfam Id: PF00168 Pfam Desc: C2 domain
  misc_feature (8)..(487): NCBI GI: 46117330 Blast Desc: FG04507.1 [Gibberella zeae PH-1]
  misc_feature (8)..(487): NCBI GI: 256728242 Blast Desc: NECHADRAFT_73041 [Nectria haematococca mpVI 77-13-4]
  misc_feature (10)..(487): NCBI GI: 39959313 Blast Desc: MGG_09445 [Magnaporthe grisea 70-15] gi|145014416|gb|EDJ98984.1| MGG_09445 [Magnaporthe grisea 70-15]
  misc_feature (9)..(487): NCBI GI: 189198431 Blast Desc: conserved [Pyrenophora tritici-repentis Pt-1C-BFP] gi|187981501|gb|EDU48127.1| conserved [Pyrenophora tritici-repentis Pt-1C-BFP]
  misc_feature (9)..(487): NCBI GI: 169603804 Blast Desc: SNOG_04910 [Phaeosphaeria nodorum SN15] gi|111066181|gb|EAT87301.1| SNOG_04910 [Phaeosphaeria nodorum SN15]
  misc_feature (8)..(487): NCBI GI: 171693249 Blast Desc: protein product [Podospora anserina] gi|170946573|emb|CAP73374.1| protein product [Podospora anserina]
  misc_feature (40)..(487): NCBI GI: 116208698 Blast Desc: CHGG_03642 [Chaetomium globosum CBS 148.51] gi|88184239|gb|EAQ91707.1| CHGG_03642 [Chaetomium globosum CBS 148.51]
  misc_feature (136)..(486): NCBI GI: 154310077 Blast Desc: BC1G_06959 [Botryotinia fuckeliana B05.10] gi|150851747|gb|EDN26940.1| BC1G_06959 [Botryotinia fuckeliana B05.10]
  misc_feature (25)..(486): NCBI GI: 219130500 Blast Desc: [Phaeodactylum tricornutum CCAP 1055/1] gi|217403116|gb|EEC43071.1| [Phaeodactylum tricornutum CCAP 1055/1]
  misc_feature (21)..(487): NCBI GI: 119624996 Blast Desc: family with sequence similarity 62 (C2 domain containing) member B, isoform CRA_b [Homo sapiens]
  misc_feature: Useful for introducing or modulating the production of volatile compounds
MSSSLGNMSSLADTLTASGGTESAGFLNDIVSHLWPNINVAGCRMIKDIVEPLLQSTTGFSSLHFTQLDLGTAPIHFSKVDVHRTEKEGIKLDMDLDWDGECGIKLDGGGAIPEVGIKHIKLHGRLSVLMCPITNVIPLIGALQIAFINPPSISLDYTGAISFLEFDKIENALKNVILGVIGGMAVLPNRFLVNMAADNDYFKTYVPHVGMIRITVESATNITGPKKSGVKKLLDKIARDVPDCYCKVAVGAEKPWSTTVCKNKHSPKWDESHDFLVMDHDQCILVEVVDKDVDQDDDIGIALTTIRQLLLDGGSQELELKHKDQPTGATVKIRAEFHNFLPDSDNLLAQAKDEGEGLYCGVANVLIDRASGLSGRKEDLNPSVKITWGKATELPLQTPVKTYAPGTDIFAPDFSTPFRIPITRSMVSQAESFYIVLMNKEEEIGRVEVPFQDVVHAPDMTLEKEFDVGSGMTVRASFSLRGTQLAQ

SEQ ID NO: 19579 - DNA, 1783 bp, Muscodor strobelii
  misc_feature: SGI EST ID NO. CUFF.45696.0
  misc_feature: Variant of the nucleotide sequence at SEQ ID NO 19577
ccatgattcactgcatgtcataaaatcataacacagccacctacgtgtttctgtggataattagtttgatctatgctttttttccataatcgtccttctttgttatcgttcatttacctcccacatagcccccaactctgcaccagaattgcggtgctcccacaccacgatcacaatgtcttcttcacttggaaatatgtcgtctctcgcagacactttgacggcgtctggaggaacggagtctgcagggtttctgaatgatatagtatctcatctttggcctaatatcaatgtagctggttgtagaatgatcaaggacatcgtcgaacctctgttgcagagcacgacgggtttctcatcgctccacttcacgcagcttgacctcggaacggctcccatacacttctctaaggtagatgtgcacaggacagaaaaagaaggcatcaagctagatatggatttggattgggatggtgaatgtggaattaagctggatggtggcggcgcgattccagaagtgggcatcaagcatataaaacttcatggcaggctctctgtcctaatgtgccccatcaccaacgtcatccccttgatcggagctttgcaaattgctttcatcaaccctccaagtatcagcttagattacacgggagctatcagtttcctcgagttcgacaaaatcgaaaatgcgcttaagaacgttattctcggggttatcggagggatggcagtcttgccgaaccgattcctggtgaacatggccgccgacaatgactacttcaagacatacgtccctcatgtgggtatgatacgtataactgtagaaagcgccaccaacattacaggccctaagaagtctggagttaagaaacttctagataagatcgccagggacgttcctgactgctactgtaaggtagccgttggcgccgagaagccatggtcgacaacagtgtgcaagaataagcattctcctaaatgggacgagtcgcatgatttcctcgtcatggaccacgaccagtgcatcttagtcgaggtggtggataaagatgtggatcaagacgatgatatcggaatcgccctcaccaccatccgccagcttctcctggatggcggttcacaggagcttgagctcaagcataaagaccagccaacgggtgccaccgttaaaatacgtgccgaattccataacttcctccctgactcggataatcttctcgctcaggcaaaagatgaaggcgagggcctatattgcggtgtcgcgaatgtgctcatcgaccgtgccagcggtctcagtgggcgaaaagaagatttgaaccctagcgtcaagatcacatgggggaaagccacagagctgccacttcaaacaccagtgaaaacctacgctccaggtactgacattttcgcaccagattttagcacaccattccggattccaattactcggagcatggtatcacaagcggagagtttttatatcgttttgatgaacaaagaagaggaaattgggagagtagaagtccccttccaggatgtggtacatgctccagatatgactttggaaaaagaatttgatgttgggtctggcatgacagtcagagcgagcttcagtctcagaggcacgcagctggcacagtgatggatcatgctttggaatcaggatcacacgcaatgagaagcatgaaatattgcatacctggtcgatgagaccttgttcgactaaatttccgtgcttgtagctgtctaagtcgatatagctagctaatacagcgttagataattc

SEQ ID NO: 19580 - DNA, 1800 bp, Muscodor strobelii
  misc_feature: SGI cDNA ID NO. 566589
  misc_feature: Elevated expression when VOC is produced
  misc_feature: Encodes the peptide sequence at SEQ ID NO 19581
atggccgacactcagacccagatcgccacggtcgccgcccccgtgaccgacgtgcggccgtcggttgacgaaaaggcgctggcccgcaatgtccaggccggagacgagcctgtctatgatgaggacggtcacgagctgtggcagggcctagtactccccactgaggaggagaaagcgacgctgcgtcgcgtttctggtaagatgccctcgacaacatactggctctgtgccgtcgagttcgccgagcgcgcctcatactatggatgcaaccaagtatacaaaaatttcatccgcgctccgctccctactggagtcaatggtcccggcaccggtgccgtctacaaaggcagcgattttacggccggtgccctgggtaaggggtctgcagtcgcctcggccgtcaccgaatccttcaagttcctggcgtatgcgcttccagtctttttcggttggctggcagacaccaagtatggccgtttcaagatgatctgctggggtgtcggtatctgcggtgttgcccacgccgttggcgcagcccagttcaagcccaatatctcgcctacgctgatcgaccagagcccgcacaagaaggagcatgtcatcaccgacaagaacggcgagaaggtcattgtcgaccccgaggcgtcaatcaacagcgtcatgctttggttctacctcctaatcaacttcggcgctgtcttcggtatcccgacgacctaccttgcaaaattggttggctactgggcggcatacttgattcctaccattctctatttgatgttgccacctttactgtggtacctcaacccacgcctcatcaagcagcccccgggaggctctgacttaggcaatgtcttccgcgtcgtcggtgatgtcttcgcccacggcggtctgaccagaattggtcggcctggcttctgggatctcggaaagcccagcgtcagaatcgccgctggtagcaccaaacattacgagtacgacgattctttcgttaacgacgtccgtcgcacgttcaaagcctgtgccatcttcctgttcgcccctatttggcaaattaacgactacggtcttggtgctgccgccaacgccctgactgccggcatggataccaatggcctacccaacgatttatttgacaacctaaactccgtcagtatcgttgtcttggtccctattatgaaccacattgtctatccttggatgcagcgcaagggtatcaagtggggctccatcagccgcatcacgttcggtttcgccctaggtaccgtgggttcgatcggctacggtcttttgcagtactacgtctacaaaacgtcgccgtgtggtaaccatgcctcgacctgtaccgagattgtggccccgggcgaaccggctctgtcgcccgtgccgtacggcttgtacgccatccctgtcgtgctgggtgccatgtctgaggtgttcgtgaacgtgtcgctttatggcattgcttacgcaatggcgccgaagaacatgaagggtctcgtcgcgtctctgaatctgttcagcaacgccatatctgccgccatcggtcttgccgctgcgcctgctatcaaggatccaaacctcgtctgggtgttcttcggccccaccatcgctggtggcgttctcgctgttgttttctggttcctcttccacgatctcgatgaccaggagttcgttctcaacacggacatgcgcgatatgaagcgcgactcggatatcagcgatgaggagactgcttcagcacaggataagaaagtcttcagtgacgagaagaaagcaattagcgatgagaagatctag

SEQ ID NO: 19581 - protein, 599 aa, Muscodor strobelii
  misc_feature: SGI Peptide ID NO. 566589
  misc_feature (160)..(509): Pfam Id: PF00854 Pfam Desc: POT family
  misc_feature (372)..(509): Pfam Id: PF00854 Pfam Desc: POT family
  misc_feature (1)..(585): NCBI GI: 85077841 Blast Desc: NCU05079 [Neurospora crassa OR74A] gi|28917112|gb|EAA26832.1| NCU05079 [Neurospora crassa OR74A]
  misc_feature (13)..(562): NCBI GI: 171680386 Blast Desc: protein product [Podospora anserina] gi|170939820|emb|CAP65045.1| protein product [Podospora anserina]
  misc_feature (42)..(598): NCBI GI: 154312742 Blast Desc: BC1G_05072 [Botryotinia fuckeliana B05.10] gi|150849774|gb|EDN24967.1| BC1G_05072 [Botryotinia fuckeliana B05.10]
  misc_feature (43)..(598): NCBI GI: 156052226 Blast Desc: SS1G_07522 [Sclerotinia sclerotiorum 1980] gi|154705298|gb|EDO05037.1| SS1G_07522 [Sclerotinia sclerotiorum 1980]
  misc_feature (14)..(598): NCBI GI: 169772231 Blast Desc: [Aspergillus oryzae RIB40] gi|83768444|dbj|BAE58583.1| protein product [Aspergillus oryzae]
  misc_feature (35)..(584): NCBI GI: 116200253 Blast Desc: CHGG_08282 [Chaetomium globosum CBS 148.51] gi|88179561|gb|EAQ87029.1| CHGG_08282 [Chaetomium globosum CBS 148.51]
  misc_feature (1)..(592): NCBI GI: 227121712 Blast Desc: peptide transporter [Cadophora finlandica]
  misc_feature (53)..(592): NCBI GI: 85110721 Blast Desc: NCU08738 [Neurospora crassa OR74A] gi|28925284|gb|EAA34363.1| conserved [Neurospora crassa OR74A] gi|38524231|emb|CAE75697.1| PEPTIDE TRANSPORTER PTR2 [Neurospora
  misc_feature (53)..(599): NCBI GI: 67903856 Blast Desc: AN8915.2 [Aspergillus nidulans FGSC A4] gi|40744973|gb|EAA64129.1| AN8915.2 [Aspergillus nidulans FGSC A4] gi|259486650|tpe|CBF84674.1| TPA: peptide transporter FGSC
  misc_feature (53)..(563): NCBI GI: 171683742 Blast Desc: protein product [Podospora anserina] gi|170941831|emb|CAP67484.1| protein product [Podospora anserina]
  misc_feature: Useful for introducing or modulating the production of volatile compounds
MADTQTQIATVAAPVTDVRPSVDEKALARNVQAGDEPVYDEDGHELWQGLVLPTEEEKATLRRVSGKMPSTTYWLCAVEFAERASYYGCNQVYKNFIRAPLPTGVNGPGTGAVYKGSDFTAGALGKGSAVASAVTESFKFLAYALPVFFGWLADTKYGRFKMICWGVGICGVAHAVGAAQFKPNISPTLIDQSPHKKEHVITDKNGEKVIVDPEASINSVMLWFYLLINFGAVFGIPTTYLAKLVGYWAAYLIPTILYLMLPPLLWYLNPRLIKQPPGGSDLGNVFRVVGDVFAHGGLTRIGRPGFWDLGKPSVRIAAGSTKHYEYDDSFVNDVRRTFKACAIFLFAPIWQINDYGLGAAANALTAGMDTNGLPNDLFDNLNSVSIVVLVPIMNHIVYPWMQRKGIKWGSISRITFGFALGTVGSIGYGLLQYYVYKTSPCGNHASTCTEIVAPGEPALSPVPYGLYAIPVVLGAMSEVFVNVSLYGIAYAMAPKNMKGLVASLNLFSNAISAAIGLAAAPAIKDPNLVWVFFGPTIAGGVLAVVFWFLFHDLDDQEFVLNTDMRDMKRDSDISDEETASAQDKKVFSDEKKAISDEKI

SEQ ID NO: 19582 - DNA, 1738 bp, Muscodor strobelii
  misc_feature: SGI EST ID NO. CUFF.45699.0
  misc_feature: Variant of the nucleotide sequence at SEQ ID NO 19580
ctggctactagattatcatgatcatttcggcattgcccacggtcttacagtccggcaactcattcggtcctttcgctttctcgctctacctcttagccgttggcgcagcccagttcaagcccaatatctcgcctacgctgatcgaccagagcccgcacaagaaggagcatgtcatcaccgacaagaacggcgagaaggtcattgtcgaccccgaggcgtcaatcaacagcgtcatgctttggttctacctcctaatcaacttcggcgctgtcttcggtatcccgacgacctaccttgcaaaattggttggctactgggcggcatacttgattcctaccattctctatttgatgttgccacctttactgtggtacctcaacccacgcctcatcaagcagcccccgggaggctctgacttaggcaatgtcttccgcgtcgtcggtgatgtcttcgcccacggcggtctgaccagaattggtcggcctggcttctgggatctcggaaagcccagcgtcagaatcgccgctggtagcaccaaacattacgagtacgacgattctttcgttaacgacgtccgtcgcacgttcaaagcctgtgccatcttcctgttcgcccctatttggcaaattaacgactacggtcttggtgctgccgccaacgccctgactgccggcatggataccaatggcctacccaacgatttatttgacaacctaaactccgtcagtatcgttgtcttggtccctattatgaaccacattgtctatccttggatgcagcgcaagggtatcaagtggggctccatcagccgcatcacgttcggtttcgccctaggtaccgtgggttcgatcggctacggtcttttgcagtactacgtctacaaaacgtcgccgtgtggtaaccatgcctcgacctgtaccgagattgtggccccgggcgaaccggctctgtcgcccgtgccgtacggcttgtacgccatccctgtcgtgctgggtgccatgtctgaggtgttcgtgaacgtgtcgctttatggcattgcttacgcaatggcgccgaagaacatgaagggtctcgtcgcgtctctgaatctgttcagcaacgccatatctgccgccatcggtcttgccgctgcgcctgctatcaaggatccaaacctcgtctgggtgttcttcggccccaccatcgctggtggcgttctcgctgttgttttctggttcctcttccacgatctcgatgaccaggagttcgttctcaacacggacatgcgcgatatgaagcgcgactcggatatcagcgatgaggagactgcttcagcacaggataagaaagtcttcagtgacgagaagaaagcaattagcgatgagaagatctagatgacgatgctatgtcttcacttcatggctggtcgagggcttgacagagtgggtatatgccccttgggtacttagatgtgtctcaatgtgtaatatgtgaaatacagtaacactagctcagtgtttgaatggagcactcgcattgtgtaagggcgtgtgaagcaatgcatatcgtgaataaatcctgcaagccaccgcctcgtaacggcaacaaaacgacaaggcgttatacatctgaaccgttacaacgcttagaaatgttgttgtctattgcttgtcggccgttggattgcggtacttcgtccaactcgtaggaatcggttcaagaacttggaagggggcatgtcattatccgaccagaggca

SEQ ID NO: 19583 - DNA, 636 bp, Muscodor strobelii
  misc_feature: SGI cDNA ID NO. 566590
  misc_feature: Encodes the peptide sequence at SEQ ID NO 19584
atggatcaaatacaacatcaattaatcacttggtttgaaaagcttggtccgcaatgggaaacccttgcgaccgacttatccatctcggaatatctttgcattcaacgcgctactggcggcgtaagactcgatgcgactctcttctgtatgctgtttttgacatcacaacgtcgagttgtagatgctcatgattttgattcagctgcaccttcaggcgcaacagagatgatcgggctcaagcacgaattcgatgcttgggctttggtgctacgagaaagatgggacgccctggccatggatccagacatcctaggaaatctttactcccaaagcgctactactggaggtatacaactcaatttggaccttctccatatgctgtttgagaagtcacaacccatagttgatgaacctcaagaagcgagatccgaagattcttcgctagatgaattgccagcatcttcggatgccgggtcagatgcaaatttcgaagatgttagatctgacgaagcacaagcgtcttcagatgacgaatcggatgcatcttctgaaggtgctagatctgatgaagcacaagcatcttcagattctgcatcagaggacaaaagcagctatgctccatcagagacatcttga

SEQ ID NO: 19584 - protein, 211 aa, Muscodor strobelii
  misc_feature: SGI Peptide ID NO. 566590
MDQIQHQLITWFEKLGPQWETLATDLSISEYLCIQRATGGVRLDATLFCMLFLTSQRRVVDAHDFDSAAPSGATEMIGLKHEFDAWALVLRERWDALAMDPDILGNLYSQSATTGGIQLNLDLLHMLFEKSQPIVDEPQEARSEDSSLDELPASSDAGSDANFEDVRSDEAQASSDDESDASSEGARSDEAQASSDSASEDKSSYAPSETS

SEQ ID NO: 19585 - DNA, 264 bp, Muscodor strobelii
  misc_feature: SGI EST ID NO. CUFF.45707.0
  misc_feature: Variant of the nucleotide sequence at SEQ ID NO 19583
ttggtttgaaaagcttggtccgcaatgggaaacccttgcgaccgacttatccatctcggaatatctttgcattcaacgcgctactggcggcgtaagactcgatgcgactctcttctgtatgctgtttttgacatcacaacgtcgagttgtagatgctcatgattttgattcagctgcaccttcaggcgcaacagagatgatcgggctcaagcacgaattcgatgcttgggctttggtgctacgagaaagatgggacgccctggc

SEQ ID NO: 19586 - DNA, 1740 bp, Muscodor strobelii
  misc_feature: SGI cDNA ID NO. 566591
  misc_feature: Encodes the peptide sequence at SEQ ID NO 19587
atgttgtggcacattgtactagtcgcgccctctatggttttaatgatggtattgtttgctagctggacttggtcgatcttacggaactacttggccgcccgtgctattggagtccccttacgtgtcctccccgtcagccctttcaatccgttctggtcgctcgtagatcggagggtcgctttgttccttcgccgcttgccattcgtcggtaaacggagcaacattgttcgctacaactggcgtgggtgggacatagaagaccggtggcaatctcattacgaaatgggagatgctttcattctcgtgacgcctcgatataacatggttttgctgaacaaccctgaatccattaccaaccttttcaagaggcacatggatttcccgcgacctatttggattaacgatgttcttggagttttcggcccaaatatatcctgtgctgagggccagtcgtggagaacccagcggagagtcgcaactcgctgcttcaacgaggcaaataatgaaatcgtttggtccgaaactctggagcaagccaacgatatgcttcgttattggtcatctaaaagctctattcagtctagtgctggtgacatacgtacactcactctcaacgtactcgctcgagccggctttggtaagcccttcaagttcagaggctacgacgagaagctagttgaggggacatcgtcaatgagctatagggagtctttgggcctcatcctagaaaactgtatagtgatcttagccctaggtcccaagaccttagcgtctcttgcccggtactggctgccttccaagctgaagctagtggacgaggcagtcatttcatttcagacgcacatgaccagcatgtatgaggaacaaaagggcgctttggccgctgggcaagaaagctcagataacaatctgatgacactcctggtcggcgcctcgcaggaggctgctaatgacaggtctcagggactgactgagagcgagatatatggcaatatgtttacctttaacttcgcgggccacgataccacggcccatagttcgacattctccctatatttcctggcagcacatccagaagttcaagattgggtttccgaagagattcgaatgattctcggaacccgacaaccgcacgagatggattaccgtgcagactttccacgtttcaagcgatgcttagctgtcttgtatgaaacgctacgcctttacaccgtcgtccccgctatcaaatggaccggcgaccaagcaacaacacttgacgtcggtgataagactttgaatctcccgccaaagactatagtactgcctaattattgttctcttcataccgatccgagatactggggatccagatcgctcgaatggcgaccatctcggtggatcaaatctagctccaccatgtctcacatgcctggggatgaggaaattgacacgaaccttcgcagtgtctttctcggatggtctgacggtccgcgcgattgtccgggaaagaaattctctcaagttgagttcgtggctcttatggtagggttgtttcggcattggcgcgtcgacccggttaagaaagagcccgacgaaactatgcaatcggctcgtcgacgtatactagacctcatcagagatgacagtagttgggtccttctgcttcagatgctgcatcccgagcggatacctttggtttggcgaaaggcgcaggctggagtagaagctgaaggcagattaatcgccactgttagttga

SEQ ID NO: 19587 - protein, 579 aa, Muscodor strobelii
  misc_feature: SGI Peptide ID NO. 566591
  misc_feature (59)..(541): Pfam Id: PF00067 Pfam Desc: Cytochrome P450
  misc_feature (258)..(525): Pfam Id: PF00067 Pfam Desc: Cytochrome P450
  misc_feature (16)..(563): NCBI GI: 171685276 Blast Desc: protein product [Podospora anserina] gi|170942599|emb|CAP68251.1| protein product [Podospora anserina]
  misc_feature (15)..(563): NCBI GI: 156031110 Blast Desc: SS1G_14163 [Sclerotinia sclerotiorum 1980] gi|154700554|gb|EDO00293.1| SS1G_14163 [Sclerotinia sclerotiorum 1980]
  misc_feature (11)..(563): NCBI GI: 154305693 Blast Desc: BC1G_07661 [Botryotinia fuckeliana B05.10] gi|150853180|gb|EDN28372.1| BC1G_07661 [Botryotinia fuckeliana B05.10]
  misc_feature (19)..(561): NCBI GI: 154310459 Blast Desc: BC1G_07150 [Botryotinia fuckeliana B05.10] gi|150851481|gb|EDN26674.1| BC1G_07150 [Botryotinia fuckeliana B05.10]
  misc_feature (24)..(563): NCBI GI: 169785166 Blast Desc: [Aspergillus oryzae RIB40] gi|83775791|dbj|BAE65911.1| protein product [Aspergillus oryzae]
  misc_feature (24)..(563): NCBI GI: 238507582 Blast Desc: cytochrome P450, [Aspergillus flavus NRRL3357] gi|220688511|gb|EED44863.1| cytochrome P450, [Aspergillus flavus NRRL3357]
  misc_feature (12)..(565): NCBI GI: 238485360 Blast Desc: cytochrome P450, [Aspergillus flavus NRRL3357] gi|220698797|gb|EED55136.1| cytochrome P450, [Aspergillus flavus NRRL3357]
  misc_feature (24)..(560): NCBI GI: 145246712 Blast Desc: An12g05360 [Aspergillus niger] gi|134080326|emb|CAK46248.1| protein product [Aspergillus niger]
  misc_feature (23)..(559): NCBI GI: 46110463 Blast Desc: FG02113.1 [Gibberella zeae PH-1]
  misc_feature (134)..(564): NCBI GI: 156065225 Blast Desc: SS1G_00623 [Sclerotinia sclerotiorum 1980] gi|154691482|gb|EDN91220.1| SS1G_00623 [Sclerotinia sclerotiorum 1980]
  misc_feature (64)..(522): SWISSPROT Homolog: EC 1.14.14.1 Unspecific monooxygenase
MLWHIVLVAPSMVLMMVLFASWTWSILRNYLAARAIGVPLRVLPVSPFNPFWSLVDRRVALFLRRLPFVGKRSNIVRYNWRGWDIEDRWQSHYEMGDAFILVTPRYNMVLLNNPESITNLFKRHMDFPRPIWINDVLGVFGPNISCAEGQSWRTQRRVATRCFNEANNEIVWSETLEQANDMLRYWSSKSSIQSSAGDIRTLTLNVLARAGFGKPFKFRGYDEKLVEGTSSMSYRESLGLILENCIVILALGPKTLASLARYWLPSKLKLVDEAVISFQTHMTSMYEEQKGALAAGQESSDNNLMTLLVGASQEAANDRSQGLTESEIYGNMFTFNFAGHDTTAHSSTFSLYFLAAHPEVQDWVSEEIRMILGTRQPHEMDYRADFPRFKRCLAVLYETLRLYTVVPAIKWTGDQATTLDVGDKTLNLPPKTIVLPNYCSLHTDPRYWGSRSLEWRPSRWIKSSSTMSHMPGDEEIDTNLRSVFLGWSDGPRDCPGKKFSQVEFVALMVGLFRHWRVDPVKKEPDETMQSARRRILDLIRDDSSWVLLLQMLHPERIPLVWRKAQAGVEAEGRLIATVS

SEQ ID NO: 19588 - DNA, 669 bp, Muscodor strobelii
  misc_feature: SGI EST ID NO. CUFF.45719.0
  misc_feature: Variant of the nucleotide sequence at SEQ ID NO 19586
aaatcgtttggtccgaaactctggagcaagccaacgatatgcttcgttattggtcatctaaaagctctattcagtctagtgctggtgacatacgtacactcactctcaacgtactcgctcgagccggctttggtaagcccttcaagttcagaggctacgacgagaagctagttgaggggacatcgtcaatgagctatagggagtctttgggcctcatcctagaaaactgtatagtgatcttagccctaggtcccaagaccttagcgtctcttgcccggtactggctgccttccaagctgaagctagtggacgaggcagtcatttcatttcagacgcacatgaccagcatgtatgaggaacaaaagggcgctttggccgctgggcaagaaagctcagataacaatctgatgacactcctggtcggcgcctcgcaggaggctgctaatgacaggtctcagggactgactgagagcgagatatatggcaatatgtttacctttaacttcgcgggccacgataccacggcccatagttcgacattctccctatatttcctggcagcacatccagaagttcaagattgggtttccgaagagattcgaatgattctcggaacccgacaaccgcacgagatggattaccgtgcagactttccacgtttcaagcgat

SEQ ID NO: 19589 - DNA, 528 bp, Muscodor strobelii
  misc_feature: SGI cDNA ID NO. 566592
  misc_feature: Encodes the peptide sequence at SEQ ID NO 19590
atggagtctcctcctgactatgtgatgacgcgagattaccttgacaataatcgaatcaatctgcaacactttatctccagggaaatattcggatatcttgcgcaccccagtattcctctttcagcacctaatatgcggattgcggacatcggcactggcacagggttcgctggcacctcaagcatattatatgctatttcaaaacgattgtacttaccgtggtctaggatctggctaagcgatatttcgcagcgcctttctgacagtactcgtcttgatgggttagacgtgtcgtttgatgctgcaccgccgaaagcactacttccctccaatataagtttccattactggaacatcaaagaacctgcaccacaagagcttataggcgtatatgacctggttcacgtgcgccacttctctcttgtcttgcaagatgacgaaatagaaggcgtcattgcgaatctctatggattattgaagcctgggggctatctgcagtggactgatgtcgatataggatccttttga

SEQ ID NO: 19590 - protein, 175 aa, Muscodor strobelii
  misc_feature: SGI Peptide ID NO. 566592
  misc_feature (1)..(175): NCBI GI: 121701965 Blast Desc: conserved [Aspergillus clavatus NRRL 1] gi|119397390|gb|EAW07821.1| conserved [Aspergillus clavatus NRRL 1]
  misc_feature (1)..(175): NCBI GI: 119495959 Blast Desc: NFIA_015500 [Neosartorya fischeri NRRL 181] gi|119412916|gb|EAW22857.1| conserved [Neosartorya fischeri NRRL 181]
  misc_feature (1)..(175): NCBI GI: 189206205 Blast Desc: conserved [Pyrenophora tritici-repentis Pt-1C-BFP] gi|187975530|gb|EDU42156.1| conserved [Pyrenophora tritici-repentis Pt-1C-BFP]
  misc_feature (40)..(174): NCBI GI: 145246352 Blast Desc: An12g03500 [Aspergillus niger] gi|134080140|emb|CAK46121.1| protein product [Aspergillus niger]
  misc_feature (7)..(171): NCBI GI: 238839097 Blast Desc: conserved [Microsporum canis CBS 113480]
  misc_feature (7)..(172): NCBI GI: 226286195 Blast Desc: conserved [Paracoccidioides brasiliensis Pb01]
  misc_feature (7)..(172): NCBI GI: 226291659 Blast Desc: conserved [Paracoccidioides brasiliensis Pb18]
  misc_feature (69)..(175): NCBI GI: 238503001 Blast Desc: conserved [Aspergillus flavus NRRL3357] gi|220691544|gb|EED47892.1| conserved [Aspergillus flavus NRRL3357]
  misc_feature (7)..(171): NCBI GI: 121712493 Blast Desc: conserved [Aspergillus clavatus NRRL 1] gi|119402010|gb|EAW12432.1| conserved [Aspergillus clavatus NRRL 1]
  misc_feature (7)..(171): NCBI GI: 154301246 Blast Desc: [Botryotinia fuckeliana B05.10] gi|150856194|gb|EDN31386.1| [Botryotinia fuckeliana B05.10]
MESPPDYVMTRDYLDNNRINLQHFISREIFGYLAHPSIPLSAPNMRIADIGTGTGFAGTSSILYAISKRLYLPWSRIWLSDISQRLSDSTRLDGLDVSFDAAPPKALLPSNISFHYWNIKEPAPQELIGVYDLVHVRHFSLVLQDDEIEGVIANLYGLLKPGGYLQWTDVDIGSF

SEQ ID NO: 19591 - DNA, 1590 bp, Muscodor strobelii
  misc_feature: SGI cDNA ID NO. 566593
  misc_feature: Encodes the peptide sequence at SEQ ID NO 19592
atgatgtcctcctcgaagctgtctgtctcttctgatgaggctgaagcccgcaagcacgaagcggcaatcgacaatgtcaaggagcggcaaatgaagctgttgggcctggctaagtcgaaccacgtacatcaggatgcccatactgcgccacttttcagcgctgcagtcatgaaccacgccctcgaaggctcgagcttatctaatatgccatactcacaatacggtctcctcgcaggtgatgccgaaagccttccaaagggatcaagccaagatccaaggatcttctacaatgtttcagcgccatcgagtatcttcatttgcggaagtcagggctcaggcaagagtcacaccctctcttgtatcctggagaattgtctgattcaatcagacacacttggatctctaccgaagccgctcacggccgtcgtgttccactatgacgattatgcttccgattcacgagtcgctccatgcgaagctgcctacctaggcagtaacccctcagtcacactaagagtcttatgcgctccgacaaacgtagctctcatcaaggagtcatacagcgtctttccgaaggcgaccgtcgagcctttaaagctcgacgaagcgaacctcaatacgaaacgcatgctagaactcatggccttcgacaagacccaaccgctttatatgcatgtgcttcagcgaatacttcgtgacttgcgtcttgaacagcaagtcactcgaggcgggtttcgctatgccgagttcaagcggagactggatagcgcggatctgctgccgaatcagaagcaaacccttcaacaacgcttggacacgttggaaagcttcatggtaaagggtcagacattgggttccatttccaacaccaagaaaaagcaaaaggcagcgcgcggtacgacctggaaacctaaagctggagagttgatcatcgtcgatctatcttgtccttgtgtgaccgctacaatggcatgcgccctcttcaatatatgtctttcaatattcttggaacaggattcaagtatcggtcgagtcgttgcgttagatgaggctcatagatatatgggcgagtcttcagaatgcgagacgctgacgaacagtctgttgtttgccatcagactccagcgtcatcttggtgtccgcaccattatctctacacaagaaccaactatctcacccaagctgcttgatctatgcagcatcaccgtcgtgcaccaattcagctcgccagactggttgagtgtactaacgaagcatctcgcgggtgtctccacggccacgaagatcacagaccgactgagcaacgtggagagtactagcgaagggaaagggatgatgaccctgattggaccgcagggtgttgctatgtcggccgaagatcctgtcgttgacctattcgcgaagattgtcgggttgccccagggccatgcttttgtgttcgcgccgagagcaatcgtgactctcgagcagagagtcctgacgggaggtgaatgtgtcattacgccaaaaagactgggatccaatatcctacgggttgtcatcagggatcgcatcacaactgatagcggacagagcatcatggcttcttaa

SEQ ID NO: 19592 - protein, 529 aa, Muscodor strobelii
  misc_feature: SGI Peptide ID NO. 566593
  misc_feature (48)..(529): NCBI GI: 116193859 Blast Desc: CHGG_06647 [Chaetomium globosum CBS 148.51] gi|88182560|gb|EAQ90028.1| CHGG_06647 [Chaetomium globosum CBS 148.51]
  misc_feature (2)..(528): NCBI GI: 149210351 Blast Desc: MGCH7_ch7g653 [Magnaporthe grisea 70-15] gi|86196608|gb|EAQ71246.1| MGCH7_ch7g653 [Magnaporthe grisea 70-15]
  misc_feature (2)..(528): NCBI GI: 145609898 Blast Desc: MGG_02890 [Magnaporthe grisea 70-15] gi|145017286|gb|EDK01649.1| MGG_02890 [Magnaporthe grisea 70-15]
  misc_feature (59)..(492): NCBI GI: 85118866 Blast Desc: NCU01896 [Neurospora crassa OR74A] gi|28927337|gb|EAA36291.1| conserved [Neurospora crassa OR74A]
  misc_feature (44)..(529): NCBI GI: 156045245 Blast Desc: SS1G_09811 [Sclerotinia sclerotiorum 1980] gi|154694206|gb|EDN93944.1| SS1G_09811 [Sclerotinia sclerotiorum 1980]
  misc_feature (30)..(529): NCBI GI: 212545466 Blast Desc: conserved [Penicillium marneffei ATCC 18224] gi|210065856|gb|EEA19950.1| conserved [Penicillium marneffei ATCC 18224]
  misc_feature (23)..(528): NCBI GI: 261354696 Blast Desc: conserved [Verticillium albo-atrum VaMs.102]
  misc_feature (48)..(529): NCBI GI: 46138263 Blast Desc: FG10646.1 [Gibberella zeae PH-1]
  misc_feature (44)..(528): NCBI GI: 258572258 Blast Desc: conserved [Uncinocarpus reesii 1704] gi|237905161|gb|EEP79562.1| conserved [Uncinocarpus reesii 1704]
  misc_feature (30)..(529): NCBI GI: 259484707 Blast Desc: TPA: conserved [Aspergillus nidulans FGSC A4]
MMSSSKLSVSSDEAEARKHEAAIDNVKERQMKLLGLAKSNHVHQDAHTAPLFSAAVMNHALEGSSLSNMPYSQYGLLAGDAESLPKGSSQDPRIFYNVSAPSSIFICGSQGSGKSHTLSCILENCLIQSDTLGSLPKPLTAVVFHYDDYASDSRVAPCEAAYLGSNPSVTLRVLCAPTNVALIKESYSVFPKATVEPLKLDEANLNTKRMLELMAFDKTQPLYMHVLQRILRDLRLEQQVTRGGFRYAEFKRRLDSADLLPNQKQTLQQRLDTLESFMVKGQTLGSISNTKKKQKAARGTTWKPKAGELIIVDLSCPCVTATMACALFNICLSIFLEQDSSIGRVVALDEAHRYMGESSECETLTNSLLFAIRLQRHLGVRTIISTQEPTISPKLLDLCSITVVHQFSSPDWLSVLTKHLAGVSTATKITDRLSNVESTSEGKGMMTLIGPQGVAMSAEDPVVDLFAKIVGLPQGHAFVFAPRAIVTLEQRVLTGGECVITPKRLGSNILRVVIRDRITTDSGQSIMAS

SEQ ID NO: 19593 - DNA, 2283 bp, Muscodor strobelii
  misc_feature: SGI cDNA ID NO. 566594
  misc_feature: Encodes the peptide sequence at SEQ ID NO 19594
atggatggaacccaagaacacagccttctaaagcgcgaatgcgatcagaccgaaatcgagatgttatgtacacattgttgcaagatcaatttcgatacgctccgacccccatctggcttggttattcaggaactaatcgagagcaaggattccggagagaggcgatggctcctatctcctacccaagagggcgcaacgatagacaaagtagttctggggtctttcaagagtattcaagaacgcgcttccgcgtgccgactatgtgcactatttatgggcgtggttttgcgccagaaccggagcctggcggacagccactggcttgacgacgagaatatcgtcttcagagcggatccagacatgtgttatgcttttcacattcatggccaaaagagccaagacacttcttttcttttcaagcggttatgcatcacggcgcatgaagccgatgccattgaccaagtacttgcatattttgatcatgcggtccagatatgcagacccggagcgatccaaaatgacatctctgacgtcggtatgccatttggcggtcgcagagtacccgaaaaggtcagcttggatctcttgatacgatggatgaccatttgtgaggaagagcatggcactttatgctctatgggcaccgaaaagctgatgggcacatttcgtttgatcgatgtcagcaaaggttgcttgcgtgtctttcattctgtcgacatcggtgacttgcgatacgcagcactcagttatgtttggggcggtctacagcctttaatgctcacgaccaagacttctacagctctacaagagtgtaatctctaccatgataaacgactaccgcacaccatcagagacaccatggaacttgtccatatgctagatattccttatatatgggtagatgccctctgtattgaacaggataacgacaacgataaaatcgaacagatcaccagcatggccgacatatttatgtcagcatatctcaccatagtcgcagcgtcaggtagcgacacaggttctaatctccccggcgtaggttcctctcgcttaacacatatccagcaagaagttttagttatcccaccatcgggagacgatcatggactttcagctgtcaatacgctgaaaaattatcctcaagcctacgatgagtggtatagtcgcggcaaagaatcagcagatctaagtaaatggagtagtcgcggatggtgtctacaagaaaccgcactggcgagccgcaagttgacttttaccgaccaacaggttttctggacctgcacatgtggctactattgcgaagagtcatgcttcgaagtccctggaactcaggtcaagcacttctatccatctgttcacagaatcagcttgcataatgccatcaacgagaatgcggatccttggaaggtgctctcggagctcgtcgacaattacactcggcgtgacctgactatggatggcgatatctcgagcgcatttgacgctgtgttcaaaacttttgaacgacgcgtgggaacttcatttctctggggcctgccaagacccctttttgagcttggtctgatgtgggagacgcatcatggcgttgtcagaagaaactcactttccactctgccgacagggtccatgggacagaggactggctttccaagttggagttggctaggttggaaaggccagtgcatttgtaacttgacccgcacgcgccaagaaactgaacagtcaacagtaacatgcttcgttcgacaaggaggcggcgatttcttgagacgtgtcacgagtgtaactaaagagtcatatgagttggaggagcaagaagttgggcaagatgaattgctgcctctggaagaagtctatcgccgccacccaaacctcggttcagaatatctcgataaatttatcgacgaatatctgatattcctttgggcctatgccgctcggttttctatctcagtctcctcgcgcggtgtgtcagcaagctttgccgactacgcttccaagcctttgccaaagatacaaaatggaaatggtgaggtcatcggaagtctctgtagagtcagagaggaggatagtcaacaccaagacactcacgatgccgaattcattgcacttgggataaggcgagactcagacataccggaagagttgtttccaccgaagatacttgtgctgcagatcgaacgagatgactatggaatcgcgagccgagtcaattatggcgagatcaagaaagttgcctgggactccgcccagcctgaacggtctttgattgttcttgcctga

SEQ ID NO: 19594 - protein, 760 aa, Muscodor strobelii
  misc_feature: SGI Peptide ID NO. 566594
  misc_feature (245)..(408): Pfam Id: PF06985 Pfam Desc: Heterokaryon incompatibility protein (HET)
  misc_feature (245)..(348): Pfam Id: PF06985 Pfam Desc: Heterokaryon incompatibility protein (HET)
  misc_feature (22)..(760): NCBI GI: 85090211 Blast Desc: NCU09910 [Neurospora crassa OR74A] gi|28919658|gb|EAA29073.1| [Neurospora crassa OR74A]
  misc_feature (222)..(760): NCBI GI: 154296357 Blast Desc: BC1G_13005 [Botryotinia fuckeliana B05.10] gi|150843463|gb|EDN18656.1| BC1G_13005 [Botryotinia fuckeliana B05.10]
  misc_feature (18)..(559): NCBI GI: 39979184 Blast Desc: related to tol protein [Neurospora crassa]
  misc_feature (82)..(760): NCBI GI: 168042178 Blast Desc: [Physcomitrella patens subsp. patens] gi|162675105|gb|EDQ61604.1| [Physcomitrella patens subsp. patens]
  misc_feature (131)..(597): NCBI GI: 261187594 Blast Desc: conserved [Ajellomyces dermatitidis SLH14081] gi|239594107|gb|EEQ76688.1| conserved [Ajellomyces dermatitidis SLH14081]
  misc_feature (131)..(597): NCBI GI: 239608913 Blast Desc: conserved [Ajellomyces dermatitidis ER-3]
  misc_feature (158)..(557): NCBI GI: 169768534 Blast Desc: [Aspergillus oryzae RIB40] gi|83766595|dbj|BAE56735.1| protein product [Aspergillus oryzae]
  misc_feature (181)..(573): NCBI GI: 226285776 Blast Desc: conserved [Paracoccidioides brasiliensis Pb01]
  misc_feature (177)..(557): NCBI GI: 225678584 Blast Desc: conserved [Paracoccidioides brasiliensis Pb03]
  misc_feature (279)..(521): NCBI GI: 169599533 Blast Desc: SNOG_02587 [Phaeosphaeria nodorum SN15] gi|160705262|gb|EAT89318.2| SNOG_02587 [Phaeosphaeria nodorum SN15]
MDGTQEHSLLKRECDQTEIEMLCTHCCKINFDTLRPPSGLVIQELIESKDSGERRWLLSPTQEGATIDKVVLGSFKSIQERASACRLCALFMGVVLRQNRSLADSHWLDDENIVFRADPDMCYAFHIHGQKSQDTSFLFKRLCITAHEADAIDQVLAYFDHAVQICRPGAIQNDISDVGMPFGGRRVPEKVSLDLLIRWMTICEEEHGTLCSMGTEKLMGTFRLIDVSKGCLRVFHSVDIGDLRYAALSYVWGGLQPLMLTTKTSTALQECNLYHDKRLPHTIRDTMELVHMLDIPYIWVDALCIEQDNDNDKIEQITSMADIFMSAYLTIVAASGSDTGSNLPGVGSSRLTHIQQEVLVIPPSGDDHGLSAVNTLKNYPQAYDEWYSRGKESADLSKWSSRGWCLQETALASRKLTFTDQQVFWTCTCGYYCEESCFEVPGTQVKHFYPSVHRISLHNAINENADPWKVLSELVDNYTRRDLTMDGDISSAFDAVFKTFERRVGTSFLWGLPRPLFELGLMWETHHGVVRRNSLSTLPTGSMGQRTGFPSWSWLGWKGQCICNLTRTRQETEQSTVTCFVRQGGGDFLRRVTSVTKESYELEEQEVGQDELLPLEEVYRRHPNLGSEYLDKFIDEYLIFLWAYAARFSISVSSRGVSASFADYASKPLPKIQNGNGEVIGSLCRVREEDSQHQDTHDAEFIALGIRRDSDIPEELFPPKILVLQIERDDYGIASRVNYGEIKKVAWDSAQPERSLIVLA

SEQ ID NO: 19595 - DNA, 2178 bp, Muscodor strobelii
  misc_feature: SGI cDNA ID NO. 566595
  misc_feature: Encodes the peptide sequence at SEQ ID NO 19596
atgcctgatgtcatcaatctattatcttctagcccagagcccctcgaaaagtcaagttccaagatttcgaggtcgaagccctcgcttgcatcgcgtactgcgctcgataacggacctgggccgtcaaaggcgcctccaaccaatgcgacaagcagcgggcatgcctcgaaacggggctttgacgaccattcccgacgcgatactaacgacttcttattcctgtccgatgatttcgacacgacgggcgatctggacgtcattgttcataagaagagacctcgcacttcgcccagtccgtcgcaaaggacaaagaaacccggctcgccttctttcaagagaaccaagtctgccactgccacggccaatacccgagaacctctgagagccgcccaaccaaagcgatggaactcccttgtcgacgacatcgagtggagcagctcgcctgtcgagacagcgcctgccaatgttcactccaaagattcatctaaagcgaaagaggcaccgcccatagcgtcagatccatttgcaagctcgccaagtcgcgaggcctctgctcccgccccccaaaaggcacatacgaaacatatcggaggctctggcaattggagctggcctactgaactttccaaggcttcggggtcaacagagaaggataatactgacacccaagttttgcctaagtcgatgaacttggaaatctggagtgatcctttcaattcgtcgccccgagaaaggtctccgccgaaaccatcaaatcctcgtcaaaaggctgtatgggatcccatctcgagctcagcgcccgagcctcgtgacactcgggatccgccttcccacttgccgactgtgcgtaaagagaaaacaactgccgaggtcgttgacttggaaatgagtgacgcttccgactccgacgagtttccggatcttgcggatatggatgtcgcaaagattcggtctctcagccgatcgcaaagctacgccacaacttcaaaacagcaagcatgcaaaccgaacactaagaaattagccaaaactacaaccaagatagtcaaatccgccgaggagaaggatcgcgagaagaagcagcgagaatccaatcgtgaggtggaaaaggaacgcaagcgactcgaaaaagagcgcgccaaggaagaacgcgctttgcaaaaggagaaagacaaagctatggccgaagtgaacaaactccggaccgacaagaaggtttccactcccgagatgattgtcgatatcccagcgagcctcgatgcaggtatcaaggtacaaatcgaagcactcctaagcgatctagatgttcagtacaacacctgggacagcacagtcgacaatgtcgtcaaatggcgaagaaaggtcacctcgaaattcaacgatgaaatggggctatgggaacccgtacccctgcgtatagagaacgtgaatcatactatggtcgtcgtacaggctgccgaattcgttcagatggttcttgcggatgaaggcagtgatctagaggctcacgtcctaaagatgaagactaagtttcctaacacgaaactcatctatcttcttgatggcctcatattatggatgcggaaaaatagaaatctcctgaataggcaatttgcttccgccgtcaggggagtgaacaacgataataatgtatcggctccttcgtctagtcaacctcggcgccgcaataagaatcagcaccaggagtacatcgacgaagataagatcgaagatgctctactatcacttcaagtaatacacgggacactagtccatcatactaacgctcctgttgagactgctcagtgggtagcagttttcacacaacacattagcaccattccctatcgtcacgctcgtgacgctgcgagtgacgcggggttctgcatggagtcgggacaggtacgcactggtgatgggcccaaagatacgtatatacatatgctacaagagattacacgagtcacagcacccatcgcctacggtatcgcaatgaaatacgaatcagtagcagatctggtgcgagggcttgaagaggatggccctttagcattggagaattgcagaaaaagcgcaaataaagatggtgcgctcacggatcgttgtgttggaccgtcgattagtaagaggattcataagatcttcttgggtcgtgatccaacgagtactgatgtgtag

SEQ ID NO: 19596 - protein, 725 aa, Muscodor strobelii
  misc_feature: SGI Peptide ID NO. 566595
  misc_feature (404)..(722): Pfam Id: PF09434 Pfam Desc: Crossover junction endonuclease EME1
  misc_feature (170)..(725): NCBI GI: 116204613 Blast Desc: CHGG_10190 [Chaetomium globosum CBS 148.51] gi|88176318|gb|EAQ83786.1| CHGG_10190 [Chaetomium globosum CBS 148.51]
  misc_feature (72)..(707): NCBI GI: 46109618 Blast Desc: FG01691.1 [Gibberella zeae PH-1]
  misc_feature (45)..(725): NCBI GI: 39968671 Blast Desc: MGG_02428 [Magnaporthe grisea 70-15] gi|145013971|gb|EDJ98612.1| MGG_02428 [Magnaporthe grisea 70-15]
  misc_feature (368)..(725): NCBI GI: 256730495 Blast Desc: NECHADRAFT_29897 [Nectria haematococca mpVI 77-13-4]
  misc_feature (257)..(725): NCBI GI: 171689206 Blast Desc: protein product [Podospora anserina] gi|170944565|emb|CAP70676.1| protein product [Podospora anserina]
  misc_feature (339)..(725): NCBI GI: 115399556 Blast Desc: [Aspergillus terreus NIH2624] gi|114192250|gb|EAU33950.1| [Aspergillus terreus NIH2624]
  misc_feature (338)..(725): NCBI GI: 119478411 Blast Desc: NFIA_073810 [Neosartorya fischeri NRRL 181] gi|119407516|gb|EAW17465.1| conserved [Neosartorya fischeri NRRL 181]
  misc_feature (338)..(725): NCBI GI: 121713976 Blast Desc: conserved [Aspergillus clavatus NRRL 1] gi|119402752|gb|EAW13173.1| conserved [Aspergillus clavatus NRRL 1]
  misc_feature (343)..(725): NCBI GI: 70997155 Blast Desc: conserved [Aspergillus fumigatus Af293] gi|66850968|gb|EAL91294.1| conserved [Aspergillus fumigatus Af293]
  misc_feature (343)..(725): NCBI GI: 159126943 Blast Desc: conserved [Aspergillus fumigatus A1163]
MPDVINLLSSSPEPLEKSSSKISRSKPSLASRTALDNGPGPSKAPPTNATSSGHASKRGFDDHSRRDTNDFLFLSDDFDTTGDLDVIVHKKRPRTSPSPSQRTKKPGSPSFKRTKSATATANTREPLRAAQPKRWNSLVDDIEWSSSPVETAPANVHSKDSSKAKEAPPIASDPFASSPSREASAPAPQKAHTKHIGGSGNWSWPTELSKASGSTEKDNTDTQVLPKSMNLEIWSDPFNSSPRERSPPKPSNPRQKAVWDPISSSAPEPRDTRDPPSHLPTVRKEKTTAEVVDLEMSDASDSDEFPDLADMDVAKIRSLSRSQSYATTSKQQACKPNTKKLAKTTTKIVKSAEEKDREKKQRESNREVEKERKRLEKERAKEERALQKEKDKAMAEVNKLRTDKKVSTPEMIVDIPASLDAGIKVQIEALLSDLDVQYNTWDSTVDNVVKWRRKVTSKFNDEMGLWEPVPLRIENVNHTMVVVQAAEFVQMVLADEGSDLEAHVLKMKTKFPNTKLIYLLDGLILWMRKNRNLLNRQFASAVRGVNNDNNVSAPSSSQPRRRNKNQHQEYIDEDKIEDALLSLQVIHGTLVHHTNAPVETAQWVAVFTQHISTIPYRHARDAASDAGFCMESGQVRTGDGPKDTYIHMLQEITRVTAPIAYGIAMKYESVADLVRGLEEDGPLALENCRKSANKDGALTDRCVGPSISKRIHKIFLGRDPTSTDV

SEQ ID NO: 19597 - DNA, 2605 bp, Muscodor strobelii
  misc_feature: SGI EST ID NO. CUFF.45761.0
  misc_feature: Variant of the nucleotide sequence at SEQ ID NO 19595
gcatccgtatgtcagagcccaccaacatcgaatttggccgtcaccgttgatagtgcagtggagcggatgacgcaattgctctatgtcagtcctttttcttgatcgttccaatgacaacattccaatatcggtgttcgcaagactgagtacgacacgttgaaagactactgtcccattaatccaacaacaactcgaaatgcctgatgtcatcaatctattatcttctagcccagagcccctcgaaaagtcaagttccaagatttcgaggtcgaagccctcgcttgcatcgcgtactgcgctcgataacggacctgggccgtcaaaggcgcctccaaccaatgcgacaagcagcgggcatgcctcgaaacggggctttgacgaccattcccgacgcgatactaacgacttcttattcctgtccgatgatttcgacacgacgggcgatctggacgtcattgttcataagaagagacctcgcacttcgcccagtccgtcgcaaaggacaaagaaacccggctcgccttctttcaagagaaccaagtctgccactgccacggccaatacccgagaacctctgagagccgcccaaccaaagcgatggaactcccttgtcgacgacatcgagtggagcagctcgcctgtcgagacagcgcctgccaatgttcactccaaagattcatctaaagcgaaagaggcaccgcccatagcgtcagatccatttgcaagctcgccaagtcgcgaggcctctgctcccgccccccaaaaggcacatacgaaacatatcggaggctctggcaattggagctggcctactgaactttccaaggcttcggggtcaacagagaaggataatactgacacccaagttttgcctaagtcgatgaacttggaaatctggagtgatcctttcaattcgtcgccccgagaaaggtctccgccgaaaccatcaaatcctcgtcaaaaggctgtatgggatcccatctcgagctcagcgcccgagcctcgtgacactcgggatccgccttcccacttgccgactgtgcgtaaagagaaaacaactgccgaggtcgttgacttggaaatgagtgacgcttccgactccgacgagtttccggatcttgcggatatggatgtcgcaaagattcggtctctcagccgatcgcaaagctacgccacaacttcaaaacagcaagcatgcaaaccgaacactaagaaattagccaaaactacaaccaagatagtcaaatccgccgaggagaaggatcgcgagaagaagcagcgagaatccaatcgtgaggtggaaaaggaacgcaagcgactcgaaaaagagcgcgccaaggaagaacgcgctttgcaaaaggagaaagacaaagctatggccgaagtgaacaaactccggaccgacaagaaggtttccactcccgagatgattgtcgatatcccagcgagcctcgatgcaggtatcaaggtacaaatcgaagcactcctaagcgatctagatgttcagtacaacacctgggacagcacagtcgacaatgtcgtcaaatggcgaagaaaggtcacctcgaaattcaacgatgaaatggggctatgggaacccgtacccctgcgtatagagaacgtgaatcatactatggtcgtcgtacaggctgccgaattcgttcagatggttcttgcggatgaaggcagtgatctagaggctcacgtcctaaagatgaagactaagtttcctaacacgaaactcatctatcttcttgatggcctcatattatggatgcggaaaaatagaaatctcctgaataggcaatttgcttccgccgtcaggggagtgaacaacgataataatgtatcggctccttcgtctagtcaacctcggcgccgcaataagaatcagcaccaggagtacatcgacgaagataagatcgaagatgctctactatcacttcaagtaatacacgggacactagtccatcatactaacgctcctgttgagactgctcagtgggtagcagttttcacacaacacattagcaccattccctatcgtcacgctcgtgacgctgcgagtgacgcggggttctgcatggagtcgggacaggtacgcactggtgatgggcccaaagatacgtatatacatatgctacaagagattacacgagtcacagcacccatcgcctacggtatcgcaatgaaatacgaatcagtagcagatctggtgcgagggcttgaagaggatggccctttagcattggagaattgcagaaaaagcgcaaataaagatggtgcgctcacggatcgttgtgttggaccgtcgattagtaagaggattcataagatcttcttgggtcgtgatccaacgagtactgatgtgtagatacgccgttgttatgagtacttcactgagcgtcggcatggaatacgatttgatgacaataatgtgcgtatccaattcttctggtctgaagtatgtatatacaaaaaaagaagatatccaatgccctccgcaaccaaaaatgcacatctctatgcgaaaaatgtgcccttgaaagtaccagcagcgatggccttggcaacaagctcatggactgtgcacactattagctca

SEQ ID NO: 19598 - DNA, 1131 bp, Muscodor strobelii
  misc_feature: SGI cDNA ID NO. 566596
  misc_feature: Encodes the peptide sequence at SEQ ID NO 19599
atgttcagaaattgcttgtcactcgttgggctgctgagcgcaactgcgttcgcagatcaggtgctatggggccagtgtggtggtattggatacacaggggaaacggtctgcaccacaggagcgacttgtacatctgcaaatgcttattattatcaatgtgtgccagcaacagcgggagctacgacaactaccactctgaaacctacaacgacgacatcgattaagacaaccactacgacaaaagccaccacgtctaaaagtacatcgctaccatcgagcacaactaccgctgttggagctgctgcgacacagtacttcctgacctttggagactcatactcacaaaccggcttcaacgtaaccactggtccgctagcaagttcatccaaccccctaggaaacccaacattcccaggctggaccacatccggcggcaagaactggataggcgatctcataacagagtacaacaagaccctcctactaaattacaacttcgcctacggcggcgcaaccaccgacgcctctctcgtaaagccctacgaccccagtgtcctcagcttgatcgaccaagtcaaagaattcagcaacagcatcgcgaaacatccctcgaccacaccatggacatcagccaatacacttgtgggtgtatggatcggcgttaacgatgtggggaactcatggtacgcaagtaatgtgacagatatcatgaatgcgatcatggacgtatacatggaccaactccaaattctctacaacgccggagcgcggaacttcttacttctctccgttccaccaatccaagaaacccccatgatgatcgcccaaggcgcctcaacagacgcagccgaagcagccataatcacacaatacaacgaccttctgtccaagagcctcgcgagtttcacttcgtccaacagcggcgtagtatcccaactagtgaacaccactacacccttccagaccgctattgataaccctaaggcgtatggtgctacggatgctacttgctacaatgctgatgggaagacttgcttgtggtttaatgattaccatcctggcatggctatccatgagcttgttgccaaggccatcgctgctggtactttcaagggcacatttttcgcatag

SEQ ID NO: 19599 - protein, 376 aa, Muscodor strobelii
  misc_feature: SGI Peptide ID NO. 566596
  misc_feature (22)..(50): Pfam Id: PF00734 Pfam Desc: Fungal cellulose binding domain
  misc_feature (106)..(365): Pfam Id: PF00657 Pfam Desc: GDSL-like Lipase/Acylhydrolase
  misc_feature (22)..(375): NCBI GI: 116204507 Blast Desc: CHGG_10137 [Chaetomium globosum CBS 148.51] gi|88176265|gb|EAQ83733.1| CHGG_10137 [Chaetomium globosum CBS 148.51]
  misc_feature (7)..(375): NCBI GI: 70988657 Blast Desc: cellulose-binding GDSL lipase/acylhydrolase [Aspergillus fumigatus Af293] gi|66846818|gb|EAL87149.1| cellulose-binding GDSL lipase/acylhydrolase, [Aspergillus Af293]
  misc_feature (7)..(375): NCBI GI: 159128601 Blast Desc: cellulose-binding GDSL lipase/acylhydrolase, [Aspergillus fumigatus A1163]
  misc_feature (19)..(375): NCBI GI: 85089887 Blast Desc: NCU09416 [Neurospora crassa OR74A] gi|28919487|gb|EAA28920.1| [Neurospora crassa OR74A]
  misc_feature (116)..(375): NCBI GI: 119497689 Blast Desc: NFIA_032700 [Neosartorya fischeri NRRL 181] gi|119413766|gb|EAW23705.1| conserved [Neosartorya fischeri NRRL 181]
  misc_feature (10)..(375): NCBI GI: 171681493 Blast Desc: protein product [Podospora anserina] gi|170940705|emb|CAP65933.1| protein product [Podospora anserina]
  misc_feature (91)..(375): NCBI GI: 154313577 Blast Desc: BC1G_05638 [Botryotinia fuckeliana B05.10] gi|150849220|gb|EDN24413.1| BC1G_05638 [Botryotinia fuckeliana B05.10]
  misc_feature (96)..(366): NCBI GI: 46110949 Blast Desc: FG02356.1 [Gibberella zeae PH-1]
  misc_feature (91)..(375): NCBI GI: 156061131 Blast Desc: SS1G_02708 [Sclerotinia sclerotiorum 1980] gi|154700112|gb|EDN99850.1| SS1G_02708 [Sclerotinia sclerotiorum 1980]
  misc_feature (85)..(366): NCBI GI: 261354308 Blast Desc: fungal cellulose binding domain-containing protein [Verticillium albo-atrum VaMs.102]
MFRNCLSLVGLLSATAFADQVLWGQCGGIGYTGETVCTTGATCTSANAYYYQCVPATAGATTTTTLKPTTTTSIKTTTTTKATTSKSTSLPSSTTTAVGAAATQYFLTFGDSYSQTGFNVTTGPLASSSNPLGNPTFPGWTTSGGKNWIGDLITEYNKTLLLNYNFAYGGATTDASLVKPYDPSVLSLIDQVKEFSNSIAKHPSTTPWTSANTLVGVWIGVNDVGNSWYASNVTDIMNAIMDVYMDQLQILYNAGARNFLLLSVPPIQETPMMIAQGASTDAAEAAIITQYNDLLSKSLASFTSSNSGVVSQLVNTTTPFQTAIDNPKAYGATDATCYNADGKTCLWFNDYHPGMAIHELVAKAIAAGTFKGTFFA

SEQ ID NO: 19600 - DNA, 546 bp, Muscodor strobelii
  misc_feature: SGI EST ID NO. CUFF.45768.0
  misc_feature: Variant of the nucleotide sequence at SEQ ID NO 19598
tccgcgtcggctaaaccgccccactaataaccaaatagatcacgggtcgagtcgcgccgtgtcaggacatcatcacctccgttcgaccaggcgatgtattcattatagaaaaagggcaagatttcaaagattacccgccaatcgttaacacaatagaatgagatacctctgtatttctaacctgagagtgcatgatgatgggcttagatcgcggagccgcgcgctccatcagcgttaggtgcattcgtgatcttttatatagtcacaatggcagtatctactttagaaggggaaaacctgctgttttggtctctctaagggaaagattttgcttcaatagtgtaactcaaaatgttcagaaattgcttgtcactcgttgggctgctgagcgcaactgcgttcgcagatcaggtgctatggggccagtgtggtggtattggatacacaggggaaacggtctgcaccacaggagcgacttgtacatctgcaaatgcttattattatcaatgtgtgccagcaacagcgggagctacgacaactaccact

SEQ ID NO: 19601 - DNA, 1821 bp, Muscodor strobelii
  misc_feature: SGI cDNA ID NO. 566597
  misc_feature: Encodes the peptide sequence at SEQ ID NO 19602
atgtcggcattcgtcgcagagcagcctccagatcacgcgaagaaggacggtaatatgaaagacgagccaggccgcctgagattacccggctttggtatgcctctcaacgaactgcctcacgatgacaaaagagcctgtttcatgcatgcactttggaatggggtcaaatttgaaagtgagggcatcaagcttagagaaatccggatgatggagttcatgaaccagataaccgacaaggccggctgggagcagaagatttttgatgagcagatcatcagtcgctggcgagaagaggccatgggctcacacgcagaggctccgggcgcaaatctagacggagacgtgtatatgacgcagaagatgtttgataattgcatcgcggaacttcgaggcaaagtcccagagtacaaagagacgggtctcatgagtatccttgacgccgaggtcgaagtggtaaaatcagactctgccattagcgaccctcttttggaggctttgaaggatgcagtgaagcctcttgaagatgtcccggatcgtctaaaagattggcacccaggctctgaaggcaaagttccaattgagggatgcgaggtcttcatcggacggggagagacttggaaagatgagcaaaatattgggccggcagattcatcaagtctcagcggaccatctctctggggaagcacgcagtggctgcctagcgattttatttggacgaaggctggagagccacacatttcgagctatatcaacaaccttcacccaattgatcatcggccgctgtaccaggccctcgaaaaatttgttgctgctgccacgccgttgtgggagagatgtctgtaccgcaaaaaagaagccagcaagagattctcccacggagataactttatgaaacctcgaatcagcgtctggccggaggacgacgaaaatcaatattacttgccggacggagtcgcttatgatcgacctgaactagaggagggcgaagatgaagacgactacctatggacggacgaataccaagactggctccgagatcatcgtcttttgaaatggccggagcctgacgactataatccatcacgaagacgttccgctgacaaacgtcctaatctacgtcacgattttcccgatggtctccaagtgatcttcaaactagcaaatactcacctcacgccatcggaccctgagtacgggggaggctcacttcatatcgaaggcgcactgaatgatcgcatcgtagcaaccgcgctctattattatgattgcgaaaacattacagatagctttctagctatgcatcatcccgttgacgccgaggaactacgtttaataccagggcagaatgagttcgaatcattggaacgatggcttgggatatcgactgacgatctcccgctgcagcgactaggaaaagttgctactcgacaaggccggttacttgcattcccgaacgtgttggcccaccaagtcctgcctttcaagctagcagatcccgcccgacctggtcaccgaaagatcctcgccatgttcctcgtcgatccgaatatacgtgtattgtccacttccgttgtcccaccacagcgaaaggactggtgggctcgtgaagtacgaaagattcgtcccttaagtaaactaccattggagattttcgacctcatcatcgaatgtgtagagggacagccgatgagctgggatgatgcggtcgtagtccgtgagaaattgatgcaagagcgcagctgggccaagatgaagtttgaacaggagctggaagatgtgagtcgtcaccggatccctcttgttggcatacagtaccgttga

SEQ ID NO: 19602 - protein, 606 aa, Muscodor strobelii
  misc_feature: SGI Peptide ID NO. 566597
  misc_feature (22)..(579): NCBI GI: 238490886 Blast Desc: conserved [Aspergillus flavus NRRL3357] gi|220697093|gb|EED53434.1| conserved [Aspergillus flavus NRRL3357]
  misc_feature (22)..(579): NCBI GI: 169772953 Blast Desc: [Aspergillus oryzae RIB40] gi|83768806|dbj|BAE58943.1| protein product [Aspergillus oryzae]
  misc_feature (62)..(579): NCBI GI: 170096048 Blast Desc: [Laccaria bicolor S238N-H82] gi|164645612|gb|EDR09859.1| [Laccaria bicolor S238N-H82]
  misc_feature (19)..(580): NCBI GI: 119486939 Blast Desc: NFIA_029240 [Neosartorya fischeri NRRL 181] gi|119410546|gb|EAW20492.1| conserved [Neosartorya fischeri NRRL 181]
  misc_feature (25)..(580): NCBI GI: 242802452 Blast Desc: conserved [Talaromyces stipitatus ATCC 10500] gi|218717319|gb|EED16740.1| conserved [Talaromyces stipitatus ATCC 10500]
  misc_feature (19)..(580): NCBI GI: 70982143 Blast Desc: conserved [Aspergillus fumigatus Af293] gi|66844223|gb|EAL84562.1| conserved [Aspergillus fumigatus Af293]
  misc_feature (19)..(580): NCBI GI: 159122165 Blast Desc: conserved [Aspergillus fumigatus A1163]
  misc_feature (26)..(580): NCBI GI: 121717250 Blast Desc: conserved [Aspergillus clavatus NRRL 1] gi|119404210|gb|EAW14627.1| conserved [Aspergillus clavatus NRRL 1]
  misc_feature (28)..(590): NCBI GI: 259480858 Blast Desc: TPA: conserved [Aspergillus nidulans FGSC A4]
  misc_feature (73)..(579): NCBI GI: 170096050 Blast Desc: [Laccaria bicolor S238N-H82] gi|164645613|gb|EDR09860.1| [Laccaria bicolor S238N-H82]
MSAFVAEQPPDHAKKDGNMKDEPGRLRLPGFGMPLNELPHDDKRACFMHALWNGVKFESEGIKLREIRMMEFMNQITDKAGWEQKIFDEQIISRWREEAMGSHAEAPGANLDGDVYMTQKMFDNCIAELRGKVPEYKETGLMSILDAEVEVVKSDSAISDPLLEALKDAVKPLEDVPDRLKDWHPGSEGKVPIEGCEVFIGRGETWKDEQNIGPADSSSLSGPSLWGSTQWLPSDFIWTKAGEPHISSYINNLHPIDHRPLYQALEKFVAAATPLWERCLYRKKEASKRFSHGDNFMKPRISVWPEDDENQYYLPDGVAYDRPELEEGEDEDDYLWTDEYQDWLRDHRLLKWPEPDDYNPSRRRSADKRPNLRHDFPDGLQVIFKLANTHLTPSDPEYGGGSLHIEGALNDRIVATALYYYDCENITDSFLAMHHPVDAEELRLIPGQNEFESLERWLGISTDDLPLQRLGKVATRQGRLLAFPNVLAHQVLPFKLADPARPGHRKILAMFLVDPNIRVLSTSVVPPQRKDWWAREVRKIRPLSKLPLEIFDLIIECVEGQPMSWDDAVVVREKLMQERSWAKMKFEQELEDVSRHRIPLVGIQYR

SEQ ID NO: 19603 - DNA, 464 bp, Muscodor strobelii
  misc_feature: SGI EST ID NO. CUFF.45773.0
  misc_feature: Variant of the nucleotide sequence at SEQ ID NO 19601
tcgcagagcagcctccagatcacgcgaagaaggacggtaatatgaaagacgagccaggccgcctgagattacccggctttggtatgcctctcaacgaactgcctcacgatgacaaaagagcctgtttcatgcatgcactttggaatggggtcaaatttgaaagtgagggcatcaagcttagagaaatccggatgatggagttcatgaaccagataaccgacaaggccggctgggagcagaagatttttgatgagcagatcatcagtcgctggcgagaagaggccatgggctcacacgcagaggctccgggcgcaaatctagacggagacgtgtatatgacgcagaagatgtttgataattgcatcgcggaacttcgaggcaaagtcccagagtacaaagagacgggtctcatgagtatccttgacgccgaggtcgaagtggtaaaatcagactctgccattagc

SEQ ID NO: 19604 - DNA, 291 bp, Muscodor strobelii
  misc_feature: SGI cDNA ID NO. 566598
  misc_feature: Reduced expression when VOC is produced
  misc_feature: Encodes the peptide sequence at SEQ ID NO 19605
atggccaacatccagaataacgattctgcgcgtgctgttcagtatctgtatttgaaccaagacgacccggcatccgaagtcccagtgcatcgtcccgttcttaacgtgccgattgatctggggtacagcttacagcgattcgtcaattcgcagggacacgcccaagaccgcaccctacgatctctacatcacttcaccaccgtcgcaccgttgaccgaggaccaatcccgcgctcgcatggctgaaattttggccatggcaattaaggccgcagcacccgctcgcgactga

SEQ ID NO: 19605 - protein, 96 aa, Muscodor strobelii
  misc_feature: SGI Peptide ID NO. 566598
  misc_feature: Useful for introducing or modulating the production of volatile compounds
MANIQNNDSARAVQYLYLNQDDPASEVPVHRPVLNVPIDLGYSLQRFVNSQGHAQDRTLRSLHHFTTVAPLTEDQSRARMAEILAMAIKAAAPARD

SEQ ID NO: 19606 - DNA, 856 bp, Muscodor strobelii
  misc_feature: SGI EST ID NO. CUFF.45783.0
  misc_feature: Variant of the nucleotide sequence at SEQ ID NO 19604
cgcagtagcaaatttacattgacctggcttcattcccatactaccttgtccacgttcagaagagaaactctatccctagattctatctcataattaggtaccactcgttgaagccgctctggaactcccatcgtacggcttgatttacaactggcactacttcctcgctacctaagtttccattgcatcgggatccgtagctttcgcctcgcgccgcgtgcttgtgcggatgcagccgaacctactcactggaaccgctaaaagtttccgatccatagccactgacccacctacctgaaagggcaatatctcgaattggataatggccaacatccagaataacgattctgcgcgtgctgttcagtatctgtatttgaaccaagacgacccggcatccgaagtcccagtgcatcgtcccgttcttaacgtgccgattgatctggggtacagcttacagcgattcgtcaattcgcagggacacgcccaagaccgcaccctacgatctctacatcacttcaccaccgtcgcaccgttgaccgaggaccaatcccgcgctcgcatggctgaaattttggccatggcaattaaggccgcagcacccgctcgcgactgactattcggacgattcgttatggagatacttatagccgggcaaaaaagcgcggccgcatcgtatatttttgagaaagctagtcgattgaaagtgcagagatatgtcttcggcgaagaaatagggcaatgtcgcagtgaacatggttattttcatcttatagtcattcaattgtatctctattacttgttgcatttgaagggtctgtttgtggtcacatatcttgatagttccaagcagtgtttt

SEQ ID NO: 19607 - DNA, 1410 bp, Muscodor strobelii
  misc_feature: SGI cDNA ID NO. 566599
  misc_feature: Encodes the peptide sequence at SEQ ID NO 19608
atgctgggcgggtcatcttcttccgtattatttgccccgttggaacatcaacagttcagcaaagcactttttgactttgttcgaggcgtaaaggcgggaacgtgcggagtagaagacgtcgaatttcgccgagtagatataagctatatagtctccatcaaatcaaagaagacagttagaatcgcaagctttggtgccattgatatcgtcctcgagttccaacagctcgaattccaacggctcgagttccaacagctcgaattccaacagctcgaatcccaaaagccggagctgacggcaaatacacgatcagttcatctagtatcaaagcacaagtacgtcgcctgtttcgcgtcgcattctatcgaaactgattgccgaaagttcatcccttacggggcgacactcaccaatctcttcgtgaaaggacaagatggcaaggacgtcgacattgttttgggatatgacaatacctcgtactacgctgttgacccaggccaccccgtctacaacagtgttccgggacgctacgtcaatcgtatcggcaatggtacttactcaatcgacaacaccacatatctgacagaacagaacgatggcaacaacacactgcactcgggcacgaataattggtcctatcgcacgtggaacgtgtcggctttcaccaatgagtcgatcacgtttactgtacgcgacgagccgtattcttctaaggggatgccgggcctggtgttaggcaatgtcacttatagcgtgagcgggaacacgtggagtataaagatgaacgccgtctcgcccaacgtcaagtcgcctctgatgttgactcatcacacctacttcaacctcgatgcatataagaacccagacgctgtgaaaatatggaaccatactctgtacatgccgtattcaaaacgatatctggttgcagatgacggagcagtcccaacaggcgagattgcgaccgcggctccggatagcatcaatgattttgcgagcaaacccgacatgttcttcggtcacgctcagaatttgcctggcttctctagcaattgcggcggcggcggcgcatgcgaaggatataatggatacttcctaatcgaagacgccccagccgatgccgttgttgtcactcttgcaagtcctttttcgggaataaaagcggaactgcgatcagatcaaccaggagttgttatctactcctgcaactggtttgacggcactgctgacctcaaaagcacacaaggaacggcgcagaataggaaagtgacccgtagttcatgtgtcgcaatcgaagcgcaggactatgtggacgggattgatcatccggaatgggggcgccgaaatgcccaaatcacagggccaggaaaacaatactcatggacaagttcatggacattcagcagtctgtga

SEQ ID NO: 19608 - protein, 469 aa, Muscodor strobelii
  misc_feature: SGI Peptide ID NO. 566599
  misc_feature (118)..(465): Pfam Id: PF01263 Pfam Desc: Aldose 1-epimerase
  misc_feature (128)..(465): Pfam Id: PF01263 Pfam Desc: Aldose 1-epimerase
  misc_feature (128)..(466): NCBI GI: 116204445 Blast Desc: CHGG_10106 [Chaetomium globosum CBS 148.51] gi|88176234|gb|EAQ83702.1| CHGG_10106 [Chaetomium globosum CBS 148.51]
  misc_feature (128)..(466): NCBI GI: 164423972 Blast Desc: NCU08398 [Neurospora crassa OR74A] gi|157070312|gb|EAA34001.2| conserved [Neurospora crassa OR74A]
  misc_feature (120)..(469): NCBI GI: 145606703 Blast Desc: MGG_12025 [Magnaporthe grisea 70-15] gi|145014375|gb|EDJ98943.1| MGG_12025 [Magnaporthe grisea 70-15]
  misc_feature (128)..(466): NCBI GI: 171678401 Blast Desc: protein product [Podospora anserina] gi|170937270|emb|CAP61927.1| protein product [Podospora anserina]
  misc_feature (128)..(469): NCBI GI: 189204758 Blast Desc: aldose 1-epimerase [Pyrenophora tritici-repentis Pt-1C-BFP] gi|187985813|gb|EDU51301.1| aldose 1-epimerase [Pyrenophora tritici-repentis Pt-1C-BFP]
  misc_feature (128)..(469): NCBI GI: 169610097 Blast Desc: SNOG_08142 [Phaeosphaeria nodorum SN15] gi|111063298|gb|EAT84418.1| SNOG_08142 [Phaeosphaeria nodorum SN15]
  misc_feature (128)..(440): NCBI GI: 261360992 Blast Desc: aldose 1-epimerase [Verticillium albo-atrum VaMs.102]
  misc_feature (129)..(455): NCBI GI: 171689234 Blast Desc: protein product [Podospora anserina] gi|170944579|emb|CAP70690.1| protein product [Podospora anserina]
  misc_feature (129)..(454): NCBI GI: 261356747 Blast Desc: aldose 1-epimerase [Verticillium albo-atrum VaMs.102]
  misc_feature (129)..(467): NCBI GI: 46109894 Blast Desc: FG01829.1 [Gibberella zeae PH-1]
  misc_feature (130)..(467): SWISSPROT Homolog: EC 5.1.3.3 Aldose 1-epimerase
MLGGSSSSVLFAPLEHQQFSKALFDFVRGVKAGTCGVEDVEFRRVDISYIVSIKSKKTVRIASFGAIDIVLEFQQLEFQRLEFQQLEFQQLESQKPELTANTRSVHLVSKHKYVACFASHSIETDCRKFIPYGATLTNLFVKGQDGKDVDIVLGYDNTSYYAVDPGHPVYNSVPGRYVNRIGNGTYSIDNTTYLTEQNDGNNTLHSGTNNWSYRTWNVSAFTNESITFTVRDEPYSSKGMPGLVLGNVTYSVSGNTWSIKMNAVSPNVKSPLMLTHHTYFNLDAYKNPDAVKIWNHTLYMPYSKRYLVADDGAVPTGEIATAAPDSINDFASKPDMFFGHAQNLPGFSSNCGGGGACEGYNGYFLIEDAPADAVVVTLASPFSGIKAELRSDQPGVVIYSCNWFDGTADLKSTQGTAQNRKVTRSSCVAIEAQDYVDGIDHPEWGRRNAQITGPGKQYSWTSSWTFSSL

SEQ ID NO: 19609 - DNA, 2078 bp, Muscodor strobelii
  misc_feature: SGI EST ID NO. CUFF.45792.0
  misc_feature: Variant of the nucleotide sequence at SEQ ID NO 19607
ctggtgttaggcaatgtcacttatagcgtgagcgggaacacgtggagtataaagatgaacgccgtctcgcccaacgtcaagtcgcgtccgtatgaccgttattcaatacgtagcacgatgctgacaaaacctcgtagctctgatgttgactcatcacacctacttcaacctcgatgcatataagaacccagacgctgtgaaaatatggaaccatactctgtacatgccgtattcaaaacgatatctggttgcagatgacggagcagtcccaacaggcgagattgcgaccgcggctccggatagcatcaatgattttgcgagcaaacccgacatgttcttcggtcacgctcagaatttgcctggcttctctagcaattgcggcggcggcggcgcatgcgaaggatataatgggtaagagagcattacagctaaaagtgactgccgagttgccatgactaatgtgaagcagatacttcctaatcgaagacgccccagccgatgccgttgttgtcactcttgcaagtcctttttcgggaataaaagcggaactgcgatcagatcaaccaggagttgttatctactcctgcaactggtttgacggcactgctgacctcaaaagcacacaaggaacggcgcagaataggaaagtgacccgtagttcatgtgtcgcaatcgaagcgcaggactatgtggacgggattgatcatccggaatgggggcgccgaaatgcccaaatcacagggccaggaaaacaatactcatggacaagttcatggacattcagcagtctgtgataatcttgcacgaacattttcccgagggaacctttgtacataatagcagtctgatcctgaaactgagaagctcgtatgaactgaaacaagcgtggccgttgaaacaacgtcataccaagactatgataaagtaaatgcatgactgagtgtatgcattctctctctagctgattacgtttcctgtaactacgtagcattcgcagggatgctcaccattctgcctcgagttcttcagctctttcaacacgtgggtgaagcatgagcactctaaaccacgtcttgtctaggtagttgcactggactatatgttattgtcattccgtgtttttgaacatcgaccgcatacgacaacgacgtcattctgattcgacgagcaattagtcgtttggggcgtctccgagttcatccggtgaagcgtggctgtggtgcattactgtttactgttgggtggtaaagagcgggaaaatcgtggtggctttttgtttccccttgagtcgccaagaccaaccgcccgggtctagacttgacggctgaaccagggactgacaagcgaggagccgtcaattgggatggtggtggcctcaggacgcccgcgacccatcaaacaacacaaacttgccttcgtgctaattcttggggaaattaggtaggaaatagccggaatacttctgtcgtcacttttcggttttcgtcgttcgatcacatctctgctgctgcaagtcttcttctcaattggaatatgatgcacgggctctatgttggcataggataggtatggctgagaataaccgatacgagatgaggatgtgcctgtgcagggactcggagcaaagatccctttcttgttttcccagtctcgttgcgatcgaggtttttgagaagcccattcgctgtgggtggcattttcgtccattttccactccgcccgcccagcccagtcaagcaagggtgtgagtcgctacccaccccactagacctggaccctgatgtcgcgtggatttctgtcaaacagtgattcagggtccaatggcgcaaacacacaattctcctcagcctatgacgtacggccatacaaaactatggctttccgatttcgactctcactttattcgcttctacatctaggggctgacttgggctacgcatgctctacatatgtcacggtctagaatcactacttagccggctgtaggctagaccggagccgcgagaacaaaagagcaccaggccctttccgggtcacgctgaactcgaccgatctcggtctcttattagccatcaccg

SEQ ID NO: 19610 - DNA, 723 bp, Muscodor strobelii
  misc_feature: SGI cDNA ID NO. 566600
  misc_feature: Encodes the peptide sequence at SEQ ID NO 19611
atgcggtcaaccatcgctcttgcagcccttgctgcctcgctgactcaggtctcggcccacggttttgtccgtggagtcacagtaaatggggtttggacagccggtgccgatccggtctggtactattatccaactgcgcctgcaactgctgggtggaactcacttaaccaagacaatggatttgttgatcctccactatttgggacctctgacattgcctgccacaagtctgcaacagtaggccaaaactttgtgaatgtcaaagcgggtgacaccattacgttctactggaatacctggccagattctcacaagggccccatcatcaactatattgcgccttatggaacttctgccggaagcttgcaatggagcaaggtcagtcaatccagtatcgtcagcggcacgacttgggtaactgatacgctcatcgcgaacaacttcacgtcatcaacaacaatcccgaagaatctgaaagcaggtaattacgtgatccgacacgagatcatcgctctccatggggctcaaaatgttaatggcgctcaaaattaccctcagtgcttgaatttgaaagtatctggcagtggcacagtttctccaagctccgggacagttggcagcagcctgtataagagtaccgataatggtatagtcttcaacctttacacgtcatacagcagctatccatatcctggtccagcactttggacagcagcaaattaa

SEQ ID NO: 19611 - protein, 240 aa, Muscodor strobelii
  misc_feature: SGI Peptide ID NO. 566600
  misc_feature (1)..(230): Pfam Id: PF03443 Pfam Desc: Glycosyl hydrolase family 61
  misc_feature (1)..(224): Pfam Id: PF03443 Pfam Desc: Glycosyl hydrolase family 61
  misc_feature (1)..(240): NCBI GI: 261353056 Blast Desc: endoglucanase-4 [Verticillium albo-atrum VaMs.102]
  misc_feature (1)..(240): NCBI GI: 169613875 Blast Desc: SNOG_10071 [Phaeosphaeria nodorum SN15] gi|111061286|gb|EAT82406.1| SNOG_10071 [Phaeosphaeria nodorum SN15]
  misc_feature (18)..(240): NCBI GI: 189199012 Blast Desc: endoglucanase IV [Pyrenophora tritici-repentis Pt-1C-BFP] gi|187982942|gb|EDU48430.1| endoglucanase IV [Pyrenophora tritici-repentis Pt-1C-BFP]
  misc_feature (20)..(237): NCBI GI: 116208766 Blast Desc: CHGG_03676 [Chaetomium globosum CBS 148.51] gi|88184273|gb|EAQ91741.1| CHGG_03676 [Chaetomium globosum CBS 148.51]
  misc_feature (1)..(235): NCBI GI: 169598246 Blast Desc: SNOG_01922 [Phaeosphaeria nodorum SN15] gi|111069014|gb|EAT90134.1| SNOG_01922 [Phaeosphaeria nodorum SN15]
  misc_feature (46)..(237): NCBI GI: 256724020 Blast Desc: NECHADRAFT_106448 [Nectria haematococca mpVI 77-13-4]
  misc_feature (3)..(239): NCBI GI: 154305687 Blast Desc: BC1G_07658 [Botryotinia fuckeliana B05.10] gi|150853177|gb|EDN28369.1| BC1G_07658 [Botryotinia fuckeliana B05.10]
  misc_feature (1)..(237): NCBI GI: 67526805 Blast Desc: AN3860.2 [Aspergillus nidulans FGSC A4] gi|40739935|gb|EAA59125.1| AN3860.2 [Aspergillus nidulans FGSC A4] gi|259481576|tpe|CBF75223.1| TPA: conserved [Aspergillus FGSC
  misc_feature (2)..(239): NCBI GI: 85090783 Blast Desc: NCU05969 [Neurospora crassa OR74A] gi|28919956|gb|EAA29347.1| NCU05969 [Neurospora crassa OR74A]
  misc_feature (18)..(235): NCBI GI: 46115706 Blast Desc: FG03695.1 [Gibberella zeae PH-1]
  misc_feature (15)..(223): SWISSPROT Homolog: EC 3.2.1.4 Cellulase
MRSTIALAALAASLTQVSAHGFVRGVTVNGVWTAGADPVWYYYPTAPATAGWNSLNQDNGFVDPPLFGTSDIACHKSATVGQNFVNVKAGDTITFYWNTWPDSHKGPIINYIAPYGTSAGSLQWSKVSQSSIVSGTTWVTDTLIANNFTSSTTIPKNLKAGNYVIRHEIIALHGAQNVNGAQNYPQCLNLKVSGSGTVSPSSGTVGSSLYKSTDNGIVFNLYTSYSSYPYPGPALWTAAN

SEQ ID NO: 19612 - DNA, 9363 bp, Muscodor strobelii
  misc_feature: SGI cDNA ID NO. 566601
  misc_feature: Encodes the peptide sequence at SEQ ID NO 19613
atggcgatcctccgtttggtcttcaatcatcttgtcctgccgccacatctcccgggcgggcaagatgaagatcttgatggggtgacaagggaggtaatactgcgcatcatccgtgcatgccagatagcgcgagacatggctgcttcccacagcatttcctgggttcaaccgtatgaggatctacttgcgtcactttcagcatgtcgcaccctcaacacggggcacctggaaaagcgccaccttctcgagcatttcgccgctcttgcggagaaccagattctgcctctatatgtggctgagcagaataccggtttgcttattcgcaagcatacactcaatggagaagactggatcgtgttcgagtcattcgaggcatctgcaacctctgaacacatcctggctgctcaccattgtgtacgatgggagtttcctgggcgctgcgcgcagatccccgtatgcgagttctcagatgcctcgtttcaggacagcttgagtacattcttggagaaagcaagcatggagtctctatacactcttcaagcatccactcgcaaagccggtgtagatgtcactgagatacgggatacaacagatcctgggctaatctcgcaaatgctaatgtcggtcttggaggctgttggagcatcatatcagccatcggttcttcgcaaaaatgtcagagatgatgtgaacttcggattcggcgatatgccctggcgccgccttcccatctggcttgtgctccgtgttgccgctcaacgattcctgtgcctagcgctcggcaatgaacaagggcaagtggcgtacaagacaatgatggcgattctgttcgttcacatgctacaagattcagcaaagaatctcaatccagaattgatcaacgtactgcgttcaaagttggcacgtcgaatggctaaaattgaggcgtactccgaaacattgagcaccgctgacgccgtggagttcaagccatacctagaagatgtttcatcaacggccaaagaagctctcaaaacttcaagagagtcactgaatattttctggcatagtttcaaacaagatacaattcgccgcgtcgaaccacttccccgaagagccgtcgcaagcgatctagagctcacattgcccaacagtggtaaatatctcgcgggccttcttaccagtggaaccattgctgagaagcccctcggtccagtttctctcccaaatccgcttgaagaaggcataagaagaacacaagagttcacaacccaagtttatcacctcgcaggcaccgaagagacaattgacaaagcctcttcagccacatcaactaattatcaagccgattgtatgaccttcgcctataggatcagagatcttctgcgagaactaagtccagtttgtgcttcgttccccgaacacatgctaacatgtcctgattatgtagtgagctcggctatcctcgcattattcaatttgtgggtgaaactggatgaatgtgctattgcggcatgtccactgctcagcaagcactccccagcattcccacccgagctcctagacgccctgcaacttccgacaaagagatccatgcagtcgctacacagtattcagaaatacctgactgaaaggtttgcgaatagccaatatgagaacatattggcatcaccccatcaactagccaaacgatattgtgaccattcgagcagcatgagacttttggagcataagattcaaacagagtccgacttggctcagacctcagccgcaactagactcgaagctctgcatgaggaatatgatgagcttactgaagacatcgcttcccgagaatgttgctgtacttgggtagatggtgagcgtattgttaaaggatgcacgaaatgcttcttgtggcggaagcgaaaaaagttgcaaatcgaggtacaggaggcatttttgcctcgagacgagcttcacagaagtctgatcgtgttcgaacttgccatacccgatttcatctccgcctatcgagacgcgacctggtggctgttcagtcaactcgctcatccaagtcggcccacgtcctcgagaaatgctgaggttcggctcaaagattgtggtactttacgttcgttcatgtcggctaacgttcgtacggtatcgttggcgtcaaccattaaatgcttcgagcaaactcattacaaattcagtgcaggaaaggtgccctcacatcgtgtgattctgccttttgcagcagatttccgactattcgatcatgaatcccaagtgtggattggagatcttgaccaacctctcacattacaacactgttgtggaatatcagtaccacgggaacttatgcaagtgcttccgtcgatgaagcacccccctacaacgattgaaggcccttcttcgtacgatgtccaagctaaccagactttatgtcccgcaaacatgtccattcatgagttttcggcgttgcaaaaattgttgtcagggaaacgtcgacgatggcccaaccttctgatcgaattgtcgtcatcaaacatcaatttaagtaatgcagatacaatgcttttactttgtcagctgagcatgcaggcaggtcccagtctaccaaatgaatccctgagagctattcatgaggttttcaagtatacagcattcacagacaatctgttagcatcactagcagcactttttcaaagtgtgatcacgaactggcgggagcataactgtctggagttagtgatcacgcttactttacgactgatcaatctttcgcctacatgccaggcattcactttacttcaaagagcgcgaagggcctcattggattggctgtgtcaaattcgtgaagagatccggaattgtgttgaatcagaagcagccaagagacttgcaaattatggactacacgcagcactattatgtcgtcgcactttcacgatctatctcgattcagatgacaaaatgagcgtcgacgaccttgaagattggatacactgctccatttcactacaagagaacactttggataacatccaggatctctctcccgctgtacgctgctcatttatccgtgatgcaaaaatgacctatcatctccgcatatatatcaaggctgccatgcgggcacatcgagctgccgtgggaacaggcgtttcaaagggtttgttcgggacatcgggctgtccagatatgaccttcttgtcgtggaccttccttgaaggaatcaatgagcggtggattgtggctacttcatcggactcgcacccgcaacgaatccatttcaacttcatcgaaggccatttcctagtaaacgggaagccacgaggcaagttgccgattgccattagcagtgatcacaacgtgaaacggatcttccaagaccagcatttactcgcatacccatcatccctccctggcatgactcatcgtctatcacagaccaagcatggtctccaggtgcactttggaatccgtgatgaccgtgcagtcattcgaacaagagattctcgtacgtatgagactctcgagtttgtccccggatattatttcaagccctcaataaaaggtattgacataccgaatgagcttgtcggaaactgcgcccattggttgaatctcactagaggccaactggagatccgcagaggtttaccaggctccaaacagttttgggtaactcgtcggagggattggataatcgatttgaagactcggaaagccttcagaggtatcgggggtagtcagctggtggacccccaatcccagacgtttcgccggattgcaaagacactcgaatacttcgaatcgcccgagagactcacggtataccaaccgcccggcctagggggcaatctactggtggcattgactcacatggacctgacatttagagtcaatcaaaacctgcgacttgaatgtcgtcaattgaatgccgaaattgatccaaaccaagatgctggatcatggtacgggttgcgtagcaagattgtgctccgcgagctgcacactggcaagcgtagtgtaattgtaccgctaggcgagttaaaagtcaatcgccgaggcatccacgttgatgtccacacaatgggtgcaaatgattatgggaagtacgtcatcgacgatgttctgggacgtttcagttgccctccagagcccctaatggtatacacgaaagcactctatcatgcgacaacttcttctagctttcctgatcccctcacaaatcaaactggttccaatgaggcattttcgattcttcggtccggcgcagctcagccttggaccccgttgtcccgtcatgtcatagaggtattagaccgctttgacaacttagtaccaattcgaacgtactatccccttgaggtgaagcgattgcaaagggtcatttggagttccgatgttacccctagtatgcaacatgattggtaccgagtcgtcatagattcaatcaagagaagatctcatgatttgaacacatttcatgaggggatttccagaaagataccagaagttgaccacctttgtcagcgtggtgtgtcccaaagggcattgtatgagacacttggttatggtgacattggagacaaatccactgccatcatctatatctctcgtgatcgagacgtggccgccgcatcggaccgggttttcaaagttactaagtcggtcaggtcgaaatgctcaaatttccaaatgagtcgatcgctcatgagcattcttgaggataacgacgtcattggtggcttcgcgtcagacacagacctcgaaggcccttctattcattcgacaaggcctttgatcactcagatagagggaagcataattgataagtggggagaactggtcaacatctgccggcgaccacagagcgaattcgaactaatctttctaatgggattgttgtcattcggcgattcagctgatgtcgacatgatacaatcttttgctgccattgggacattaaagaagctgagacagttgaaaccgcctcaatatccgaccttcgtaaacttccaaaatcgtggctcgccgggcctggaccaacttgaaaagttgatatctgttggttaccctaaatttgaacctgtcctcagggatcgacacaaggccgactgtgatgcgttcggtcgtaccgagaagacacacaagagccactgtgaagagatcggaaaacaggtcgccgagctgatcagttctatgtggccagaaccatcataccaagtatctgctagaattaccgaatctctctttgataaccccgactcggacatgttctccgacatgattccatttgatatatcgtcaatactggaaaacatcaagccagagtgggacagacgccttgccgcttgtgcacttgagcgctacgtcaatcgggtacaagaagttctgggctctctatgctattctcatgaaaccgtcccagttcgaataagtcacaaagacccaagtttcaaacccatagtctcttcagatcgtttacttgccgctgccagaaatctttcaaactttgccggttgccagatctacgtaccaaaaccattgacgcttggttgtattgtgggatccgaggcaattgagaaatcatcgatcgaagcacagagaccagagatcaaggaactcggtctcgttctcgccagattcgcgaaaaccaaggacgcaatacgcgaaaagtatgcccaaggtctgcaacaaagcttggccgctttgaaagtgacacaccagccagccaacgtggcggtaggagaacttagccagtaccgtcgattgctccagattgaacaaattgagctgaaagaacgcgctcgaagggatttcgagcaaattttgagtgagttctgctcacaaaacggacgatacacctggctgagaaatggaggcgtccatccttactctacgcccgtggacgtccttgcattgctcagatcggccaccagacacgcgattagcttggacttgaaaaaggcaattgtctcatatggcctgattattacaacactacaacgtgtttcacgcatcacacatgccgtcttgcgcaatgatcagcgtgcatttgttgacgagcttagtaaccctggacatgaaatttgggatcccattgataacccagactggcttttgatggaggtggacagcaacatcttgatacgaacggaacaaatacaagttgcaagagagatcattaatcctcaaacaggagagaactctgtgttgcaaatgaacatggggaaagggaaaacctcttgtattgtacccatggccatgtgcactcttgccaatgggaaaactttggcgcgattgatagctccaaaggcgttacgtatgcagacagcacagatgctgcaaacgcgacttggaggtctagtcggccgtgaggtgtttcacgttcctttctctaggaagacgcaaacaagttcgagcgctctttctctatacgagaggattcacaatgatgctcattgcctaaaaggccttgttttgacttgccatgaacacttactctcattcaaactcggtggctggcagaagctagctgatagcgaaggaactacggcttccaagatgctcaacttccaaaaatggctcgacaaacattgcagagacttattggatgaatgtgactttactctatccgtaaagacgcagcttaattatccgagcggacttgagatgccagtggatggtcacccataccgatggcatgtagcagaggaactgcttgagttggtcgcgaattcggtctcagatgtgcaacttcagtatccgagaagcatcgaagtcagaaaaagtccacaactttcggtagcacaagcttatcccatcattcatttcttgaaagccgacgtggaggctgcacttcataaacgtatcatcaatgacatttgcgccgggaaagcaacttgtctgcaaccgaaagactcaaatttccagcagaaaaataccatgcgcgagttgctttgtgggtcacaactagacgaaaccaaacttgccatagtgtccagccaattcccacattcagctgcggcagaaaacatgcttcttcttgtacgcgggttggtccgaaacaggatactagtatcttgtcttggaaagcgttggaatgtgcaatatggcctgcaccctggccgtcatcctgtcgctgtcccgttcgaggcgaaaggtaaaccttccgaacaagccgaatatggacatccagacgtggccatcttgttcacttgtctttctttctactacggtggtttgagacttgaacagttaacccagggagttcaacacgtgctacaatcggatgatccagctgctcagtatgagagatggatatccggctgcgctagactaccagaggaacttcgacactggaacgccatcaatgtagacgacaagggccaaatggaagagctgtggaaaaatctcagattctatcgaatcgttatcaatcactacttgaaccattttgtgtttcccgcccacgcgcgccagttcgaaactaagcttcaggcgtgttcatgggatataccattagtgtcaaggactgatcataatgctgcccgctcaaccgggtttagtggcacaaacgacaaccggttgatgttaccattgaccatcaagcagaacgatcttcgagctctagaacacactagtgcagaagtgctttcatatctcctccagaaacgaaatagcacttttcgggtaacaatgggcccagatcgacagaggtggtctgaacatgacttactggtggcccttaaaggccacggaattcgagtactcatcgatgctggtgcatacatactcgagatggataatctaactttagtaacagaatggctccgagaagatcccgaagcaaaagcagcagtctactttcaaaatgataacagggcatgggtccacttccgaggcgacacgaaagctgacgttcctttattagccacaccatttgctgatgatctttcagaatgtctcgtttatcttgacgaggcacacacgagaggagtcgatctgaagcttccccaatgggctcaaggcgccgtcacccttgcgcttaatcagacaaaagattctaccatacaagcggcaatgagacttcgtcaactaagaacaagtcaaagtgtcaccttctttggaccaccagaggtcgaacagagtatcaaagatctgtgtcatctcactgacatacgacctgtgaactcatcgcatgtcgtatactggcttctagaacaaacatgtcgctctattagagaccttcaaacgctttacattgcacaaggtgtcgatttctgtaaacgaaccgatgcagtctggcataatcaagatttcatatccaacaaaattcaacaacgcaatatcctccgcgttttgaagcaacccgagcgccagacgttgaagcgtctatacggcccgcctctagcgaaacagcttcatcccactcagcggcccctgcagttcccaaagctgcagagctttcgcacgaccctcgctcgatctgccaatagccaatatgagcgcctgccaactaatatgcttcaggaagtggagcaagaacgtgaagtagagttgcaagttgagcaagtacgagagaccgaacaccgagttcattaccgtgcactggagtttcccgggatacatcctgatgtattgcacttcgtgcgaactgggaaattagcaacaactcaagtcacaacaggacataaggtcggatttgaacacgccttcgcctggttgtccaaaacaagtattggacgaaagtttagtgtgaaggtaacaggctcgaggttattcgtctcagccgaatttggtagcacgattaaggacgcgcctaatggagaggagaaggataacttcttgcgcccagtcgagtggatactatggtcaccgtcgaccgaaactgccctagtcgtgattcctgaggaagctgagtggtttcttgaacgtattcaagatcccaaacttgaatctcccgtgcacatcattggctatgcggctccagtcacgaaattgatgttgcgttttgagactttcactctatttgttcggccacaactaccatcgcgccacgagtttcctacctggcttgctcgagacaccggaattcttgctgggagattatatgttccatccggagaaagggaggaactttcgcgatatatccaaagtgctggaccaggcgctggtgaccattgtcttacatatcgtccatcagcatttcttttggaatggttgacactccgtcggaaggcaattgacatctcgcatacacatctcggatatttgtgtatcggccgtgagattgttgacgaggatggcataggagacattgttggcgagaaccacacccagattgaaggcgagtgtgatgagagtgatggctcctacgagatgatttga

SEQ ID NO: 19613 - protein, 3120 aa, Muscodor strobelii
  misc_feature: SGI Peptide ID NO. 566601
  misc_feature (1)..(3089): NCBI GI: 169625364 Blast Desc: SNOG_15955 [Phaeosphaeria nodorum SN15] gi|111055673|gb|EAT76793.1| SNOG_15955 [Phaeosphaeria nodorum SN15]
  misc_feature (1)..(3120): NCBI GI: 85108369 Blast Desc: NCU06294 [Neurospora crassa OR74A] gi|28924165|gb|EAA33320.1| [Neurospora crassa OR74A]
  misc_feature (3)..(2908): NCBI GI: 116179342 Blast Desc: CHGG_00299 [Chaetomium globosum CBS 148.51] gi|88184596|gb|EAQ92064.1| CHGG_00299 [Chaetomium globosum CBS 148.51]
  misc_feature (7)..(3089): NCBI GI: 145240581 Blast Desc: An08g08230 [Aspergillus niger] gi|134077460|emb|CAK40025.1| protein product [Aspergillus niger]
  misc_feature (4)..(3084): NCBI GI: 67901300 Blast Desc: AN7637.2 [Aspergillus nidulans FGSC A4] gi|40742633|gb|EAA61823.1| AN7637.2 [Aspergillus nidulans FGSC A4] gi|259483969|tpe|CBF79793.1| TPA: conserved [Aspergillus FGSC
  misc_feature (7)..(3089): NCBI GI: 240104818 Blast Desc: CPC735_020410 [Coccidioides posadasii C735 delta SOWgp]
  misc_feature (2)..(3092): NCBI GI: 121708802 Blast Desc: conserved [Aspergillus clavatus NRRL 1] gi|119400400|gb|EAW10826.1| conserved [Aspergillus clavatus NRRL 1]
  misc_feature (2)..(3089): NCBI GI: 46139507 Blast Desc: FG11268.1 [Gibberella zeae PH-1]
  misc_feature (3)..(3091): NCBI GI: 256730306 Blast Desc: NECHADRAFT_94975 [Nectria haematococca mpVI 77-13-4]
  misc_feature (3)..(3089): NCBI GI: 121700418 Blast Desc: conserved [Aspergillus clavatus NRRL 1] gi|119396616|gb|EAW07048.1| conserved [Aspergillus clavatus NRRL 1]
MAILRLVFNHLVLPPHLPGGQDEDLDGVTREVILRIIRACQIARDMAASHSISWVQPYEDLLASLSACRTLNTGHLEKRHLLEHFAALAENQILPLYVAEQNTGLLIRKHTLNGEDWIVFESFEASATSEHILAAHHCVRWEFPGRCAQIPVCEFSDASFQDSLSTFLEKASMESLYTLQASTRKAGVDVTEIRDTTDPGLISQMLMSVLEAVGASYQPSVLRKNVRDDVNFGFGDMPWRRLPIWLVLRVAAQRFLCLALGNEQGQVAYKTMMAILFVHMLQDSAKNLNPELINVLRSKLARRMAKIEAYSETLSTADAVEFKPYLEDVSSTAKEALKTSRESLNIFWHSFKQDTIRRVEPLPRRAVASDLELTLPNSGKYLAGLLTSGTIAEKPLGPVSLPNPLEEGIRRTQEFTTQVYHLAGTEETIDKASSATSTNYQADCMTFAYRIRDLLRELSPVCASFPEHMLTCPDYVVSSAILALFNLWVKLDECAIAACPLLSKHSPAFPPELLDALQLPTKRSMQSLHSIQKYLTERFANSQYENILASPHQLAKRYCDHSSSMRLLEHKIQTESDLAQTSAATRLEALHEEYDELTEDIASRECCCTWVDGERIVKGCTKCFLWRKRKKLQIEVQEAFLPRDELHRSLIVFELAIPDFISAYRDATWWLFSQLAHPSRPTSSRNAEVRLKDCGTLRSFMSANVRTVSLASTIKCFEQTHYKFSAGKVPSHRVILPFAADFRLFDHESQVWIGDLDQPLTLQHCCGISVPRELMQVLPSMKHPPTTIEGPSSYDVQANQTLCPANMSIHEFSALQKLLSGKRRRWPNLLIELSSSNINLSNADTMLLLCQLSMQAGPSLPNESLRAIHEVFKYTAFTDNLLASLAALFQSVITNWREHNCLELVITLTLRLINLSPTCQAFTLLQRARRASLDWLCQIREEIRNCVESEAAKRLANYGLHAALLCRRTFTIYLDSDDKMSVDDLEDWIHCSISLQENTLDNIQDLSPAVRCSFIRDAKMTYHLRIYIKAAMRAHRAAVGTGVSKGLFGTSGCPDMTFLSWTFLEGINERWIVATSSDSHPQRIHFNFIEGHFLVNGKPRGKLPIAISSDHNVKRIFQDQHLLAYPSSLPGMTHRLSQTKHGLQVHFGIRDDRAVIRTRDSRTYETLEFVPGYYFKPSIKGIDIPNELVGNCAHWLNLTRGQLEIRRGLPGSKQFWVTRRRDWIIDLKTRKAFRGIGGSQLVDPQSQTFRRIAKTLEYFESPERLTVYQPPGLGGNLLVALTHMDLTFRVNQNLRLECRQLNAEIDPNQDAGSWYGLRSKIVLRELHTGKRSVIVPLGELKVNRRGIHVDVHTMGANDYGKYVIDDVLGRFSCPPEPLMVYTKALYHATTSSSFPDPLTNQTGSNEAFSILRSGAAQPWTPLSRHVIEVLDRFDNLVPIRTYYPLEVKRLQRVIWSSDVTPSMQHDWYRVVIDSIKRRSHDLNTFHEGISRKIPEVDHLCQRGVSQRALYETLGYGDIGDKSTAIIYISRDRDVAAASDRVFKVTKSVRSKCSNFQMSRSLMSILEDNDVIGGFASDTDLEGPSIHSTRPLITQIEGSIIDKWGELVNICRRPQSEFELIFLMGLLSFGDSADVDMIQSFAAIGTLKKLRQLKPPQYPTFVNFQNRGSPGLDQLEKLISVGYPKFEPVLRDRHKADCDAFGRTEKTHKSHCEEIGKQVAELISSMWPEPSYQVSARITESLFDNPDSDMFSDMIPFDISSILENIKPEWDRRLAACALERYVNRVQEVLGSLCYSHETVPVRISHKDPSFKPIVSSDRLLAAARNLSNFAGCQIYVPKPLTLGCIVGSEAIEKSSIEAQRPEIKELGLVLARFAKTKDAIREKYAQGLQQSLAALKVTHQPANVAVGELSQYRRLLQIEQIELKERARRDFEQILSEFCSQNGRYTWLRNGGVHPYSTPVDVLALLRSATRHAISLDLKKAIVSYGLIITTLQRVSRITHAVLRNDQRAFVDELSNPGHEIWDPIDNPDWLLMEVDSNILIRTEQIQVAREIINPQTGENSVLQMNMGKGKTSCIVPMAMCTLANGKTLARLIAPKALRMQTAQMLQTRLGGLVGREVFHVPFSRKTQTSSSALSLYERIHNDAHCLKGLVLTCHEHLLSFKLGGWQKLADSEGTTASKMLNFQKWLDKHCRDLLDECDFTLSVKTQLNYPSGLEMPVDGHPYRWHVAEELLELVANSVSDVQLQYPRSIEVRKSPQLSVAQAYPIIHFLKADVEAALHKRIINDICAGKATCLQPKDSNFQQKNTMRELLCGSQLDETKLAIVSSQFPHSAAAENMLLLVRGLVRNRILVSCLGKRWNVQYGLHPGRHPVAVPFEAKGKPSEQAEYGHPDVAILFTCLSFYYGGLRLEQLTQGVQHVLQSDDPAAQYERWISGCARLPEELRHWNAINVDDKGQMEELWKNLRFYRIVINHYLNHFVFPAHARQFETKLQACSWDIPLVSRTDHNAARSTGFSGTNDNRLMLPLTIKQNDLRALEHTSAEVLSYLLQKRNSTFRVTMGPDRQRWSEHDLLVALKGHGIRVLIDAGAYILEMDNLTLVTEWLREDPEAKAAVYFQNDNRAWVHFRGDTKADVPLLATPFADDLSECLVYLDEAHTRGVDLKLPQWAQGAVTLALNQTKDSTIQAAMRLRQLRTSQSVTFFGPPEVEQSIKDLCHLTDIRPVNSSHVVYWLLEQTCRSIRDLQTLYIAQGVDFCKRTDAVWHNQDFISNKIQQRNILRVLKQPERQTLKRLYGPPLAKQLHPTQRPLQFPKLQSFRTTLARSANSQYERLPTNMLQEVEQEREVELQVEQVRETEHRVHYRALEFPGIHPDVLHFVRTGKLATTQVTTGHKVGFEHAFAWLSKTSIGRKFSVKVTGSRLFVSAEFGSTIKDAPNGEEKDNFLRPVEWILWSPSTETALVVIPEEAEWFLERIQDPKLESPVHIIGYAAPVTKLMLRFETFTLFVRPQLPSRHEFPTWLARDTGILAGRLYVPSGEREELSRYIQSAGPGAGDHCLTYRPSAFLLEWLTLRRKAIDISHTHLGYLCIGREIVDEDGIGDIVGENHTQIEGECDESDGSYEMI

SEQ ID NO: 19614 - DNA, 744 bp, Muscodor strobelii
  misc_feature: SGI cDNA ID NO. 566602
  misc_feature: Encodes the peptide sequence at SEQ ID NO 19615
atggcagccacaagaagaggcccccctggcatggcttctaacaacagtattccgaacggatatacatccgcgcagggtcagtccctatctgacgcttcgctttccgctaagaatccacaactcatgtgcgcgctggaagtggtgctaagctgcttccaagcaagtcaaattagctgtgccatcatgggcggctttgctttagtacttaggggaaatagtagagtcacgcacgatgttgatatcactactacatgtgatatgcgtacccttcgccaagctttcattggacatccacgtgtcaaggtaccgctcgggccaggatctggtgtcatgagaatttttgttgccgtcggtcaggagtacggagataatgtttcctccctttgggtgcaagttgacatgatcttgcgagggtcccttggcgccccgggtagtctcgatggaacaactgagacaataagaattcaaaggacacctagagaccctcccaaaagtttcgttgtattgaatatagtcgcccatatgcagagcaagcttggggcattctttgctcgctcgtccgacagcgactacaccgatatcgttttcatgtgtaataaatttccacaacaggttgctggtcgtcgcgcagaactcaacttcgagcagcgccaatatttcattcatgcctaccagtcggagaacaaggggcctgatgtggccaatgcagtgcgtcagatgaagatgctgcttggagtgccttga

SEQ ID NO: 19615 - protein, 247 aa, Muscodor strobelii
  misc_feature: SGI Peptide ID NO. 566602
  misc_feature (40)..(221): NCBI GI: 240105356 Blast Desc: CPC735_049190 [Coccidioides posadasii C735 delta SOWgp]
  misc_feature (23)..(226): NCBI GI: 85104459 Blast Desc: NCU06571 [Neurospora crassa OR74A] gi|28923304|gb|EAA32505.1| [Neurospora crassa OR74A]
  misc_feature (36)..(242): NCBI GI: 119180563 Blast Desc: [Coccidioides immitis RS]
  misc_feature (36)..(242): NCBI GI: 240110381 Blast Desc: CPC735_064130 [Coccidioides posadasii C735 delta SOWgp]
  misc_feature (69)..(207): NCBI GI: 225684230 Blast Desc: [Paracoccidioides brasiliensis Pb03]
  misc_feature (40)..(237): NCBI GI: 261360953 Blast Desc: [Verticillium albo-atrum VaMs.102]
MAATRRGPPGMASNNSIPNGYTSAQGQSLSDASLSAKNPQLMCALEVVLSCFQASQISCAIMGGFALVLRGNSRVTHDVDITTTCDMRTLRQAFIGHPRVKVPLGPGSGVMRIFVAVGQEYGDNVSSLWVQVDMILRGSLGAPGSLDGTTETIRIQRTPRDPPKSFVVLNIVAHMQSKLGAFFARSSDSDYTDIVFMCNKFPQQVAGRRAELNFEQRQYFIHAYQSENKGPDVANAVRQMKMLLGVP

SEQ ID NO: 19616 - DNA, 891 bp, Muscodor strobelii
  misc_feature: SGI cDNA ID NO. 566603
  misc_feature: Elevated expression when VOC is produced
  misc_feature: Encodes the peptide sequence at SEQ ID NO 19617
atgacccaattacaaccgcttgaggcgagggagcctgaagcggtgtccatctcggtggccccagacactgataacatgctgttgagcaactgcggaccacataaacacgatcagactgcagacataatcaataattacgggcactacgatgaccaacccgcgagccacggcaatagtggcacagccgagatgctggacgtcatccgcctgttgcaagaggctgggatcgcttgttgtgttgttgggacacaccctttgatctactatggcgcttggcgtgttgcaatcaactgggaggtctgtgtgaatcatcgagatctttaccaggcatcccagctgtttgagactaatcctctgtacgaggcttggccagtcaattttcctctcccagcatctttacttcatatttaccccagatttcatctcaaaggggtcgattttatgttttatcttgtatcatcaaacgactggctgatcgatattcgtgagactgctttcgagaaaagtaagatgggcattatttatccctcactacctgttctagctcaatctctgctagatacgtcgcggtgggctgatctgacagatctgatcgacggtatgaacttaagtgaagaatggggtgagcagaatctggaactcggccgacaaagtcatgttgatcattccagatggaaaaacggtctgatacgggagtctctagtcgagtcggagtggtcgtgcttgatggaaaaggggggagctgggattgatctacgaaccaagtggtgcgacatcattcggaataaagagaagcgcataggacccgagttgcctgaaggtcactacctgactaggttctttgcagaaggaagtcaggatccacggactagagacctggatagtgtttag

SEQ ID NO: 19617 - protein, 296 aa, Muscodor strobelii
  misc_feature: SGI Peptide ID NO. 566603
  misc_feature (50)..(291): NCBI GI: 169597973 Blast Desc: SNOG_01782 [Phaeosphaeria nodorum SN15] gi|111070311|gb|EAT91431.1| SNOG_01782 [Phaeosphaeria nodorum SN15]
  misc_feature (29)..(290): NCBI GI: 255941846 Blast Desc: Pc16g13940 [Penicillium chrysogenum Wisconsin 54-1255] gi|211586315|emb|CAP94064.1| Pc16g13940 [Penicillium chrysogenum Wisconsin 54-1255]
  misc_feature (54)..(291): NCBI GI: 39957235 Blast Desc: [Magnaporthe grisea 70-15] gi|149210985|ref|XP_001522867.1| MGCH7_ch7g955 [Magnaporthe grisea 70-15] gi|86196910|gb|EAQ71548.1| MGCH7_ch7g955 grisea
  misc_feature (33)..(290): NCBI GI: 145246746 Blast Desc: An12g05550 [Aspergillus niger] gi|134080343|emb|CAK46265.1| [Aspergillus niger]
  misc_feature (60)..(292): NCBI GI: 116205559 Blast Desc: CHGG_10663 [Chaetomium globosum CBS 148.51] gi|88176791|gb|EAQ84259.1| CHGG_10663 [Chaetomium globosum CBS 148.51]
  misc_feature (47)..(291): NCBI GI: 258571067 Blast Desc: [Uncinocarpus reesii 1704] gi|237904607|gb|EEP79008.1| [Uncinocarpus reesii 1704]
  misc_feature (165)..(291): NCBI GI: 258569349 Blast Desc: [Uncinocarpus reesii 1704] gi|237903748|gb|EEP78149.1| [Uncinocarpus reesii 1704]
  misc_feature (132)..(232): NCBI GI: 225684231 Blast Desc: [Paracoccidioides brasiliensis Pb03]
  misc_feature (132)..(227): NCBI GI: 226293850 Blast Desc: conserved [Paracoccidioides brasiliensis Pb18]
  misc_feature (201)..(289): NCBI GI: 171676820 Blast Desc: protein product [Podospora anserina] gi|170936477|emb|CAP61134.1| protein product [Podospora anserina]
  misc_feature: Useful for introducing or modulating the production of volatile compounds
MTQLQPLEAREPEAVSISVAPDTDNMLLSNCGPHKHDQTADIINNYGHYDDQPASHGNSGTAEMLDVIRLLQEAGIACCVVGTHPLIYYGAWRVAINWEVCVNHRDLYQASQLFETNPLYEAWPVNFPLPASLLHIYPRFHLKGVDFMFYLVSSNDWLIDIRETAFEKSKMGIIYPSLPVLAQSLLDTSRWADLTDLIDGMNLSEEWGEQNLELGRQSHVDHSRWKNGLIRESLVESEWSCLMEKGGAGIDLRTKWCDIIRNKEKRIGPELPEGHYLTRFFAEGSQDPRTRDLDSV

SEQ ID NO: 19618 - DNA, 1174 bp, Muscodor strobelii
  misc_feature: SGI EST ID NO. CUFF.45821.0
  misc_feature: Variant of the nucleotide sequence at SEQ ID NO 19616
aaaacccaacagacggtgaaatccagttgttttcactctcctttccaccaaatgagcgaacaacatccgctccataccgtcttgaaactttagcgtcccactatgacccaattacaaccgcttgaggcgagggagcctgaagcggtgtccatctcggtggccccagacactgataacatgctgttgagcaactgcggaccacataaacacgatcagactgcagacataatcaataattacgggcactacgatgaccaacccgcgagccacggcaatagtggcacagccgagatgctggacgtcatccgcctgttgcaagaggctgggatcgcttgttgtgttgttgggacacaccctttgatctactatggcgcttggcgtgttgcaatcaactgggaggtctgtgtgaatcatcgagatctttaccaggcatcccagctgtttgagactaatcctctgtacgaggcttggccagtcaattttcctctcccagcatctttacttcatatttaccccagatttcatctcaaaggggtcgattttatgttttatcttgtatcatcaaacgactggctgatcgatattcgtgagactgctttcgagaaaagtaagatgggcattatttatccctcactacctgttctagctcaatctctgctagatacgtcgcggtgggctgatctgacagatctgatcgacggtatgaacttaagtgaagaatggggtgagcagaatctggaactcggccgacaaagtcatgttgatcattccagatggaaaaacggtctgatacgggagtctctagtcgagtcggagtggtcgtgcttgatggaaaaggggggagctgggattgatctacgaaccaagtggtgcgacatcattcggaataaagagaagcgcataggacccgagttgcctgaaggtcactacctgactaggttctttgcagaaggaagtcaggatccacggactagagacctggatagtgtttagcatcggaatctcaaaattgtgttatttagttttgtaccgcctatcatctttacatgcgcctaacactctactagatagcttctgtcttctccggagtctattaagaccactcgcttaagcctgactggcattgaaactcatcgttagtcttgagtatacgtgccggttcaatatatcatgc

SEQ ID NO: 19619 - DNA, 765 bp, Muscodor strobelii
  misc_feature: SGI cDNA ID NO. 566604
  misc_feature: Encodes the peptide sequence at SEQ ID NO 19620
atgtcgccaatcaccatacaacagacagggaagaaccccaaattattcgagatactcaacacttgcatacaatcagattccgcatcgtcaagaataaaagcagcgaagtccttttcgaattcagtagacgcagaaagcgaagacttcttctgggatttctggaacgacattttcaatgttgcgggacagattccgcacgaccattccgcgcaggataagctcgtggcgttcttgcgtgagctgactttacagcccaagaacggcaaggtatgggatgcccgtgtatggacagacctacctcttctcggcgcagcaatcagacagcgcctcgataaaccctaccaatctacgcaagaatgtttatccttccactcctttgtggcccgactgctacacgccggtatctcgccaggatctgagacaacagcgatatggatgcttcgcgctgcgttggaacaagagaatccgagtgatcactcggaccgcgatttgatggtggctgcgatgtacattgagtacggcggtgcaactctagtacagtcgctgtaccttagccccaagccgcaacttgacgagtcgcagcagagaatgctaaagggcggcgacctatggaaaggcgagagcgggcttacggtagataggtggacgttttggggtcaacggttcacgaaacaaggcaacgagatgactggggaggtgaaagatgcagcgcttcatgcggcgagtttgattgatatgtggaacagcactagattgaagccgtga

SEQ ID NO: 19620 - protein, 254 aa, Muscodor strobelii
  misc_feature: SGI Peptide ID NO. 566604
  misc_feature (1)..(234): NCBI GI: 121713380 Blast Desc: conserved [Aspergillus clavatus NRRL 1] gi|119402454|gb|EAW12875.1| conserved [Aspergillus clavatus NRRL 1]
  misc_feature (6)..(229): NCBI GI: 119479339 Blast Desc: NFIA_077350 [Neosartorya fischeri NRRL 181] gi|119407852|gb|EAW17801.1| conserved [Neosartorya fischeri NRRL 181]
  misc_feature (34)..(245): NCBI GI: 169786111 Blast Desc: [Aspergillus oryzae RIB40] gi|238507055|ref|XP_002384729.1| conserved [Aspergillus flavus NRRL3357] gi|83776264|dbj|BAE66383.1| protein product oryzae]
  misc_feature (15)..(222): NCBI GI: 70997830 Blast Desc: conserved [Aspergillus fumigatus Af293] gi|66851283|gb|EAL91609.1| conserved [Aspergillus fumigatus Af293] gi|159126620|gb|EDP51736.1| conserved [Aspergillus A1163]
  misc_feature (1)..(222): NCBI GI: 115401202 Blast Desc: [Aspergillus terreus NIH2624] gi|114190130|gb|EAU31830.1| [Aspergillus terreus NIH2624]
  misc_feature (31)..(240): NCBI GI: 238497730 Blast Desc: conserved [Aspergillus flavus NRRL3357] gi|220693374|gb|EED49719.1| conserved [Aspergillus flavus NRRL3357]
  misc_feature (31)..(241): NCBI GI: 169768424 Blast Desc: [Aspergillus oryzae RIB40] gi|83766540|dbj|BAE56680.1| protein product [Aspergillus oryzae]
  misc_feature (1)..(241): NCBI GI: 115388807 Blast Desc: [Aspergillus terreus NIH2624] gi|114195993|gb|EAU37693.1| [Aspergillus terreus NIH2624]
  misc_feature (4)..(223): NCBI GI: 46139349 Blast Desc: FG11189.1 [Gibberella zeae PH-1]
  misc_feature (16)..(244): NCBI GI: 261352839 Blast Desc: [Verticillium albo-atrum VaMs.102]
MSPITIQQTGKNPKLFEILNTCIQSDSASSRIKAAKSFSNSVDAESEDFFWDFWNDIFNVAGQIPHDHSAQDKLVAFLRELTLQPKNGKVWDARVWTDLPLLGAAIRQRLDKPYQSTQECLSFHSFVARLLHAGISPGSETTAIWMLRAALEQENPSDHSDRDLMVAAMYIEYGGATLVQSLYLSPKPQLDESQQRMLKGGDLWKGESGLTVDRWTFWGQRFTKQGNEMTGEVKDAALHAASLIDMWNSTRLKP

SEQ ID NO: 19621 - DNA, 1379 bp, Muscodor strobelii
  misc_feature: SGI EST ID NO. CUFF.45881.0
  misc_feature: Variant of the nucleotide sequence at SEQ ID NO 19619
cagcgtcgggtgatagcattgcagtgcgattaatcgtcccccttattccgtagttgtagacacgatggtaattcaacgcttttaattcattgtaactcgccatgccttcttggcggcgcgggccagtgacgtatatcaggaaggaggagggaggaggggtccttgaatgagcgacaacttgaagatgcgacacaaattcatccagcttgcttcgaccttttcaccaagaactactacaagaagactgtcacctgattacatctacgataatcaacaccggactactacagctcctgtgaccattgctagacatcaactcagcattgcacgccacaaatcgcgaccggacatcatgtcgccaatcaccatacaacagacagggaagaaccccaaattattcgagatactcaacacttgcatacaatcagattccgcatcgtcaagaataaaagcagcgaagtccttttcgaattcagtagacgcagaaagcgaagacttcttctgggatttctggaacgacattttcaatgttgcgggacagattccgcacgaccattccgcgcaggataagctcgtggcgttcttgcgtgagctgactttacagcccaagaacggcaaggtatgggatgcccgtgtatggacagacctacctcttctcggcgcagcaatcagacagcgcctcgataaaccctaccaatctacgcaagaatgtttatccttccactcctttgtggcccgactgctacacgccggtatctcgccaggatctgagacaacagcgatatggatgcttcgcgctgcgttggaacaagagaatccgagtgatcactcggaccgcgatttgatggtggctgcgatgtacattgagtacggcggtgcaactctagtacagtcgctgtaccttagccccaagccgcaacttgacgagtcgcagcagagaatgctaaagggcggcgacctatggaaaggcgagagcgggcttacggtagataggtggacgttttggggtcaacggttcacgaaacaaggcaacgagatgactggggaggtgaaagatgcagcgcttcatgcggcgagtttgattgatatgtggaacagcactagattgaagccgtgatgtcagtgcgaaagtcttgattgttgtctaggcatagtgtcttcgcaaatgggacattgtgtcaattcgttctcgggtccagaaaggcttggatatagtgacgaattgcgcttaacaagttcgtggaacaaactcaatcaaggcgtaatcggcatctagcgtatcgtatagcgatactaaatagctctttacaatgcggatcaaacctgagtctatctacaacgaatgggaaccattaaccttagacataagccgacagtaa

SEQ ID NO: 19622 - DNA, 1860 bp, Muscodor strobelii
  misc_feature: SGI cDNA ID NO. 566605
  misc_feature: Encodes the peptide sequence at SEQ ID NO 19623
atgaagttgacatcagctgtggcaaacgccattctgcttgctgttcctatctctgctgctcctagaagcaggactggcagcaggcgtgatgttgatacgacatatccgtacaccgggcccgacacgcccgttggagattggatcgacaatacgatcaatggcaatggcaaaggatttcctcgacttgtagaacctccagctgtgcgaccagcgcgtaaaaatccgacaaacaacatcaacgtcgtctccatatcatacctgaaagacggcgtcaacatccacttccaaacgccgttcggtctgaccgagaaacctacagttcgctacggcacgactcagcatttgggcaagcttgccactggctcgagcaagacatatgcccgcacgccttcgtgctcagaagtgacattaatcactcagtgctccgaattctaccacaatgttgaactgactgggttgaagtctggcacgacctacttctaccaaattgccgcctccaatggtacaaccgagtctagagttctcagcttcaagactgcccttggagctggcgaacatggctctttcaccgttggtgttctcaacgacatgggatacaccaatgctaagggcacacacaagcaactttcctctgctgccaagtccggaaagcttgcctttgcgtggcatggtggtgatatcagctatgccgacgactggtatgaaggtattttgccctgcgctgacgattggcctgtatgtgtcaatggtagccacaccagcgtaccgcctggagacgcagaccctgactacaggaatgagctcccagagggcgagatacccaatcaaggtagtccccaaggcggggacatcagtgtcatatatgagagtaattgggacttgtggcagcaatggctcaactcagtcactcaatacatcccttatcaagttctgcctggtaatcatgaggcagcatgtgctgagtttgattcggacggctggcttgcgtcctacctgaacaataataagacaaataccacttcaaccactgagaagctcacttattattcctgtccagtctcgcagcgcaacttcactgcctaccaaaatcgtttcgaaatgaacggtgatagcctcaacggcggacgcagcaacttctggtactcattcgactacggtctagcgcactttgtctctctgaatggcgagaccgattatgctctgtcacccgagtggccattcatccgtgacaccaagggtagccctggcgttcctctagaaaccgatacttatccaacggattctggtccttttggctatatcaaggataacaagtacctcgacaatgcagcttatgagcaggtgaactggcttaagaaggatctcgctgctgtcgatcgaaagaaaacaccctgggtctttgtcatgagccatcgaccgatgtactcgactgagacgtcgtcttaccaggcttacatgcgtgcggcgtttgaaaatatcttgatcgatgctggtgtggatgcttacatttcgggacatattcattggtatgagcgcctcttccccgtcggacccggtcaacaagtcgacaatacttcaatcgttaacaacaatacgtatctgacgaatcccggcaaatcgatgactcatattatcaacggtgcagccggaaatctagagtcccattccgttattgaaggtcctatatcgaacgtcacaaatgtccttgataaccttcactatgggtacactgagttgagcgtaatcaattctactgcagtgaagtggcagtacattcatggtgaagatggcaaagtcattgatgagctttaccttcttaagagagagcctacttgcccctccaagaagcgtgagctttag

SEQ ID NO: 19623 - protein, 619 aa, Muscodor strobelii
  misc_feature: SGI Peptide ID NO. 566605
  misc_feature (189)..(510): Pfam Id: PF00149 Pfam Desc: Calcineurin-like phosphoesterase
  misc_feature (3)..(609): NCBI GI: 70985406 Blast Desc: acid phosphatase AphA [Aspergillus fumigatus Af293] gi|66845837|gb|EAL86171.1| acid phosphatase AphA [Aspergillus fumigatus Af293]
  misc_feature (3)..(609): NCBI GI: 159125866 Blast Desc: acid phosphatase AphA [Aspergillus fumigatus A1163]
  misc_feature (27)..(612): NCBI GI: 119499281 Blast Desc: acid phosphatase AphA [Neosartorya fischeri NRRL 181] gi|119414562|gb|EAW24501.1| acid phosphatase AphA [Neosartorya fischeri NRRL 181]
  misc_feature (3)..(616): NCBI GI: 145248129 Blast Desc: acid phosphatase AphA [Neosartorya fischeri NRRL 181] gi|119414562|gb|EAW24501.1| acid phosphatase AphA [Neosartorya fischeri NRRL 181]
  misc_feature (28)..(616): NCBI GI: 121719406 Blast Desc: acid phosphatase AphA [Aspergillus clavatus NRRL 1] gi|119404600|gb|EAW14976.1| acid phosphatase AphA [Aspergillus clavatus NRRL 1]
  misc_feature (30)..(609): NCBI GI: 212531203 Blast Desc: acid phosphatase AphA [Penicillium marneffei ATCC 18224] gi|210071122|gb|EEA25211.1| acid phosphatase AphA [Penicillium marneffei ATCC 18224]
  misc_feature (3)..(616): NCBI GI: 25090936 Blast Desc: PPA_ASPFI RecName: Full=Acid phosphatase; AltName: Full=pH 6-optimum acid phosphatase; AltName: Full=APase6; Flags: Precursor gi|755244|gb|AAA91632.1| acid phosphatase [Aspergillus
  misc_feature (7)..(612): NCBI GI: 256730442 Blast Desc: NECHADRAFT_70723 [Nectria haematococca mpVI 77-13-4]
  misc_feature (1)..(609): NCBI GI: 169784900 Blast Desc: [Aspergillus oryzae RIB40] gi|83775658|dbj|BAE65778.1| protein product [Aspergillus oryzae]
  misc_feature (31)..(609): NCBI GI: 242772258 Blast Desc: acid phosphatase AphA [Talaromyces stipitatus ATCC 10500] gi|218721623|gb|EED21041.1| acid phosphatase AphA [Talaromyces stipitatus ATCC 10500]
  misc_feature (46)..(616): SWISSPROT Homolog: EC 3.1.3.2 Acid phosphatase
MKLTSAVANAILLAVPISAAPRSRTGSRRDVDTTYPYTGPDTPVGDWIDNTINGNGKGFPRLVEPPAVRPARKNPTNNINVVSISYLKDGVNIHFQTPFGLTEKPTVRYGTTQHLGKLATGSSKTYARTPSCSEVTLITQCSEFYHNVELTGLKSGTTYFYQIAASNGTTESRVLSFKTALGAGEHGSFTVGVLNDMGYTNAKGTHKQLSSAAKSGKLAFAWHGGDISYADDWYEGILPCADDWPVCVNGSHTSVPPGDADPDYRNELPEGEIPNQGSPQGGDISVIYESNWDLWQQWLNSVTQYIPYQVLPGNHEAACAEFDSDGWLASYLNNNKTNTTSTTEKLTYYSCPVSQRNFTAYQNRFEMNGDSLNGGRSNFWYSFDYGLAHFVSLNGETDYALSPEWPFIRDTKGSPGVPLETDTYPTDSGPFGYIKDNKYLDNAAYEQVNWLKKDLAAVDRKKTPWVFVMSHRPMYSTETSSYQAYMRAAFENILIDAGVDAYISGHIHWYERLFPVGPGQQVDNTSIVNNNTYLTNPGKSMTHIINGAAGNLESHSVIEGPISNVTNVLDNLHYGYTELSVINSTAVKWQYIHGEDGKVIDELYLLKREPTCPSKKREL

SEQ ID NO: 19624 - DNA, 2210 bp, Muscodor strobelii
  misc_feature: SGI EST ID NO. CUFF.45842.0
  misc_feature: Variant of the nucleotide sequence at SEQ ID NO 19622
ccaggcgactgggatttaccgttgtaatggagtcctaacaagatgaaattttacctggaaatgcaaaacaaaccaatgtataaaaggtagcctacatcttcgggctgctgtttcgacgttgtcgtctgcgctttactgggcagtgcttcagttgcagtgaccactcaatagcagttgttaattgacgttcgttaccataatgaagttgacatcagctgtggcaaacgccattctgcttgctgttcctatctctgctgctcctagaagcaggactggcagcaggcgtgatgttgatacgacatatccgtacaccgggcccgacacgcccgttggagattggatcgacaatacgatcaatggcaatggcaaaggatttcctcgacttgtagaacctccagctgtgcgaccagcgcgtaaaaatccgacaaacaacatcaacgtcgtctccatatcatacctgaaagacggcgtcaacatccacttccaaacgccgttcggtctgaccgagaaacctacagttcgctacggcacgactcagcatttgggcaagcttgccactggctcgagcaagacatatgcccgcacgccttcgtgctcagaagtgacattaatcactcagtgctccgaattctaccacaatgttgaactgactgggttgaagtctggcacgacctacttctaccaaattgccgcctccaatggtacaaccgagtctagagttctcagcttcaagactgcccttggagctggcgaacatggctctttcaccgttggtgttctcaacgacatgggatacaccaatgctaagggcacacacaagcaactttcctctgctgccaagtccggaaagcttgcctttgcgtggcatggtggtgatatcagctatgccgacgactggtatgaaggtattttgccctgcgctgacgattggcctgtatgtgtcaatggtagccacaccagcgtaccgcctggagacgcagaccctgactacaggaatgagctcccagagggcgagatacccaatcaaggtagtccccaaggcggggacatcagtgtcatatatgagagtaattgggacttgtggcagcaatggctcaactcagtcactcaatacatcccttatcaagttctgcctggtaatcatgaggcagcatgtgctgagtttgattcggacggctggcttgcgtcctacctgaacaataataagacaaataccacttcaaccactgagaagctcacttattattcctgtccagtctcgcagcgcaacttcactgcctaccaaaatcgtttcgaaatgaacggtgatagcctcaacggcggacgcagcaacttctggtactcattcgactacggtctagcgcactttgtctctctgaatggcgagaccgattatgctctgtcacccgagtggccattcatccgtgacaccaagggtagccctggcgttcctctagaaaccgatacttatccaacggattctggtccttttggctatatcaaggataacaagtacctcgacaatgcagcttatgagcaggtgaactggcttaagaaggatctcgctgctgtcgatcgaaagaaaacaccctgggtctttgtcatgagccatcgaccgatgtactcgactgagacgtcgtcttaccaggcttacatgcgtgcggcgtttgaaaatatcttgatcgatgctggtgtggatgcttacatttcgggacatattcattggtatgagcgcctcttccccgtcggacccggtcaacaagtcgacaatacttcaatcgttaacaacaatacgtatctgacgaatcccggcaaatcgatgactcatattatcaacggtgcagccggaaatctagagtcccattccgttattgaaggtcctatatcgaacgtcacaaatgtccttgataaccttcactatgggtacactgagttgagcgtaatcaattctactgcagtgaagtggcagtacattcatggtgaagatggcaaagtcattgatgagctttaccttcttaagagagagcctacttgcccctccaagaagcgtgagctttagaaccaagatgcataactagagcggtgatcattggctttgtgtatatagtcagttagcgttattgtgaacaactaatgtttatcgtggcggtgactagcgcatttaaagtgacagtagtatggtcgtggggaaacaagaaatctgtaacgac

SEQ ID NO: 19625 - DNA, 2205 bp, Muscodor strobelii
  misc_feature: SGI cDNA ID NO. 566606
  misc_feature: Encodes the peptide sequence at SEQ ID NO 19626
atgtggtctgggaatcgggctaccagtcgggtggagtcatccgcttcaccaaccacaaccacatccaccggaaacaaaggtggccgaccgagagattggaccgagactcgcaaaaggaaactcatccgactatacatatacacagggctccctttcccaaagattctcaatctccttgaagaagatggcttcacgccgggaaaagatgcggccaataaggtgaagaatggcgcgctcggtaacgatccgcgatggatgcgaccaaaagacgaggaagaggaaaagagtcgagttcgaggattgcgacatagtcttcgtggtagacatggccgtaaatgcacaccccatcaggacgccgtcaagatggagcccgatgcatcgtcgacacattaccacgaagacggttctctaggaggtacgacaattgcacattcatttcgatcttctattgaagaattgggtcatgcagatgctccgctattcggttacccgtcaaatggcaattggttcggcgccagcgcaaatgtgattccagcaaatcatcatgacgatgctatggatttcactttcaaccgcctcagtcgtcgagacacatcacgtcaaggcacgggtctcacaacgtcgaccgatatcagcgtcagcagtgttatcaaagaaaaactggccgatttcaccgaggctcgacagaagctcgtcgccaaagttttcaagcgatacacgtttccaaaaaacgccgaatcatcgcccgtcacaccaaatctgggtccgccgatggacgacgacgatagcaatgaccaaacagatgccggacatgctattccaggtgacttcctaagatattcattgcaacatcgccagcgagattgtgctcgttacaatatccatcatgcagacggcgtttgctggtgccgcattgctgatgaagtgttgccgacacaggaagtatggaatgcgcacaccttccctcacgatcttggcgtcaaggatacgttcggtaatactgcatttcatcacatggcagctctcgacacttatcacgactctcttctccacaatgtttatcaggctctgcaagaccccgactcgaccgttcacgacagaaatacagcagggcaaacgtttcttcatgtacttcacagctcatggtttcgacctggctcgagactggacgatctagtcaaaactttacaagcgacgaacttcgacattctagccactgacgtctatggccgtagtttctaccacttactgcggctccatcaatcaggctctgcccgattcccgtccagtcagatactcgaccacagacgcatgaaccgtcgtgacgcatttggtatgcggcctatggacacgagagcttccaggaacatcgatcccactgcaggcttctctccaaagatggagaggactgataccacaagcacattgggctccatgcgtggaatcaagaggatgccaacgattcacactcaattccagacgccccaagaaaaagaatggaggacaaacgccgacttgttacgcatagtcaatagctcgatcaatgtcgatgctgacagtctcaagaattccccacaagaaacttctctcggacagaatgggtttcactgccttgcagaagcgagaatgaatctgtctctgactgaaaacagcgcaacggcttcaccagatactcctacgtcaaaatcaaaggatcaaactaaacgaaagcaccgagagtcagaggaagttgacacgcctcagacgcgcaaacgggatgggtatctacgcagtcttatcaattctggcgtcgacgtgaatcagtatgacgcgaatggcaatacccctcttatggctttcgtcgtcaacagttccgatgctactaagtgggaaaaggaggacggtgaaaacgtcatcaagatcctcgtccgagaggcacatgcgaatatggagctgcgaaatcgacatggtgagacagctcttcacctcgccgccaaggccggaaagcccattgcactacggaccttgcttgatcttggtgccaatccgcataccagaaacagccagggtctcggggttctggaggttgttgatcggctatatctgacttccgagcgtgatgacaagagcaatgccaggtttgaagcttgccgtgcggtcctcactcgcaacgaccagtgcgcgaaacagaaccctacgattctcgacgaatggtcactcagatga

SEQ ID NO: 19626 - protein, 734 aa, Muscodor strobelii
  misc_feature: SGI Peptide ID NO. 566606
  misc_feature (649)..(681): Pfam Id: PF00023 Pfam Desc: Ankyrin repeat
  misc_feature (605)..(648): Pfam Id: PF00023 Pfam Desc: Ankyrin repeat
  misc_feature (13)..(733): NCBI GI: 46109410 Blast Desc: FG01587.1 [Gibberella zeae PH-1]
  misc_feature (13)..(731): NCBI GI: 256730550 Blast Desc: NECHADRAFT_29800 [Nectria haematococca mpVI 77-13-4]
  misc_feature (268)..(731): NCBI GI: 171689674 Blast Desc: protein product [Podospora anserina] gi|170944799|emb|CAP70911.1| protein product [Podospora anserina]
  misc_feature (15)..(715): NCBI GI: 116205201 Blast Desc: CHGG_10484 [Chaetomium globosum CBS 148.51] gi|88176612|gb|EAQ84080.1| CHGG_10484 [Chaetomium globosum CBS 148.51]
  misc_feature (217)..(734): NCBI GI: 39942424 Blast Desc: MGG_03292 [Magnaporthe grisea 70-15] gi|145015702|gb|EDK00192.1| MGG_03292 [Magnaporthe grisea 70-15]
  misc_feature (585)..(734): NCBI GI: 261356919 Blast Desc: conserved [Verticillium albo-atrum VaMs.102]
  misc_feature (270)..(554): NCBI GI: 38524263 Blast Desc: [Neurospora crassa]
  misc_feature (270)..(554): NCBI GI: 85110053 Blast Desc: NCU09490 [Neurospora crassa OR74A] gi|28924883|gb|EAA33978.1| [Neurospora crassa OR74A]
  misc_feature (262)..(733): NCBI GI: 154296232 Blast Desc: BC1G_12943 [Botryotinia fuckeliana B05.10] gi|150843507|gb|EDN18700.1| BC1G_12943 [Botryotinia fuckeliana B05.10]
  misc_feature (33)..(375): NCBI GI: 261356919 Blast Desc: conserved [Verticillium albo-atrum VaMs.102]
MWSGNRATSRVESSASPTTTTSTGNKGGRPRDWTETRKRKLIRLYIYTGLPFPKILNLLEEDGFTPGKDAANKVKNGALGNDPRWMRPKDEEEEKSRVRGLRHSLRGRHGRKCTPHQDAVKMEPDASSTHYHEDGSLGGTTIAHSFRSSIEELGHADAPLFGYPSNGNWFGASANVIPANHHDDAMDFTFNRLSRRDTSRQGTGLTTSTDISVSSVIKEKLADFTEARQKLVAKVFKRYTFPKNAESSPVTPNLGPPMDDDDSNDQTDAGHAIPGDFLRYSLQHRQRDCARYNIHHADGVCWCRIADEVLPTQEVWNAHTFPHDLGVKDTFGNTAFHHMAALDTYHDSLLHNVYQALQDPDSTVHDRNTAGQTFLHVLHSSWFRPGSRLDDLVKTLQATNFDILATDVYGRSFYHLLRLHQSGSARFPSSQILDHRRMNRRDAFGMRPMDTRASRNIDPTAGFSPKMERTDTTSTLGSMRGIKRMPTIHTQFQTPQEKEWRTNADLLRIVNSSINVDADSLKNSPQETSLGQNGFHCLAEARMNLSLTENSATASPDTPTSKSKDQTKRKHRESEEVDTPQTRKRDGYLRSLINSGVDVNQYDANGNTPLMAFVVNSSDATKWEKEDGENVIKILVREAHANMELRNRHGETALHLAAKAGKPIALRTLLDLGANPHTRNSQGLGVLEVVDRLYLTSERDDKSNARFEACRAVLTRNDQCAKQNPTILDEWSLR

SEQ ID NO: 19627 - DNA, 2813 bp, Muscodor strobelii
  misc_feature: SGI EST ID NO. CUFF.45931.1
  misc_feature: Variant of the nucleotide sequence at SEQ ID NO 19625
ccggggcatagttgtcgcttgtcagtggtatcatctgcaagtgctgtgccgcaagctgactgtcgctggtctggttgtcggtctgctgtaccttgtgcttgattatgtcgtgcacctcaatatgggggctccctcaatcgatccatcttaccgtcacaagtgctgtatctacaaaaccctttcgcccccgtagcccgcgagcctcacccagaatgtttcgatttcatctccaattctcccgaacacctgggtttcacttggtgttcgttctatacggtgacagtccacgtccttgctcaattgatacattgtaatagcatcatgtggtctgggaatcgggctaccagtcgggtggagtcatccgcttcaccaaccacaaccacatccaccggaaacaaaggtggccgaccgagagattggaccgagactcgcaaaaggaaactcatccgactatacatatacacagggctccctttcccaaagattctcaatctccttgaagaagatggcttcacgccgggaaaagatgcggccaataaggtgaagaatggcgcgctcggtaacgatccgcgatggatgcgaccaaaagacgaggaagaggaaaagagtcgagttcgaggattgcgacatagtcttcgtggtagacatggccgtaaatgcacaccccatcaggacgccgtcaagatggagcccgatgcatcgtcgacacattaccacgaagacggttctctaggagatgctccgctattcggttacccgtcaaatggcaattggttcggcgccagcgcaaatgtgattccagcaaatcatcatgacgatgctatggatttcactttcaaccgcctcagtcgtcgagacacatcacgtcaaggcacgggtctcacaacgtcgaccgatatcagcgtcagcagtgttatcaaagaaaaactggccgatttcaccgaggctcgacagaagctcgtcgccaaagttttcaagcgatacacgtttccaaaaaacgccgaatcatcgcccgtcacaccaaatctgggtccgccgatggacgacgacgatagcaatgaccaaacagatgccggacatgctattccaggtgacttcctaagatattcattgcaacatcgccagcgagattgtgctcgttacaatatccatcatgcagacggcgtttgctggtgccgcattgctgatgaagtgttgccgacacaggaagtatggaatgcgcacaccttccctcacgatcttggcgtcaaggatacgttcggtaatactgcatttcatcacatggcagctctcgacacttatcacgactctcttctccacaatgtttatcaggctctgcaagaccccgactcgaccgttcacgacagaaatacagcagggcaaacgtttcttcatgtacttcacagctcatggtttcgacctggctcgagactggacgatctagtcaaaactttacaagcgacgaacttcgacattctagccactgacgtctatggccgtagtttctaccacttactgcggctccatcaatcaggctctgcccgattcccgtccagtcagatactcgaccacagacgcatgaaccgtcgtgacgcatttggtatgcggcctatggacacgagagcttccaggaacatcgatcccactgcaggcttctctccaaagatggagaggactgataccacaagcacattgggctccatgcgtggaatcaagaggatgccaacgattcacactcaattccagacgccccaagaaaaagaatggaggacaaacgccgacttgttacgcatagtcaatagctcgatcaatgtcgatgctgacagtctcaagaattccccacaagaaacttctctcggacagaatgggtttcactgccttgcagaagcgagaatgaatctgtctctgactgaaaacagcgcaacggcttcaccagatactcctacgtcaaaatcaaaggatcaaactaaacgaaagcaccgagagtcagaggaagttgacacgcctcagacgcgcaaacgggatgggtatctacgcagtcttatcaattctggcgtcgacgtgaatcagtatgacgcgaatggcaatacccctcttatggctttcgtcgtcaacagttccgatgctactaagtgggaaaaggaggacggtgaaaacgtcatcaagatcctcgtccgagaggcacatgcgaatatggagctgcgaaatcgacatggtgagacagctcttcacctcgccgccaaggccggaaagcccattgcactacggaccttgcttgatcttggtgccaatccgcataccagaaacagccagggtctcggggttctggaggttgttgatcggctatatctgacttccgagcgtgatgacaagagcaatgccaggtttgaagcttgccgtgcggtcctcactcgcaacgaccagtgcgcgaaacagaaccctacgattctcgacgaatggtcactcagatgacgaacatgttcgtcgggacccatgtcgttactgccacgttttgtcttcgtttctctttcttcctatgctggtgcatttggatcttaccgcgcactagtattatttacgttgatgatattatgatatccacattgaagcgttgtcgtattatgaggatacccagggcatatgatttggcgtttgggcatgcggagttacttctacgtttatgacttgagattgctttgacaaggctttggttacaatactatttccaacccaatttagcaaacatcttcacgcgaagaatcaggctcatgtacgtgaacagtgattctatcccgtatcaaaagtagttgtag

SEQ ID NO: 19628 - DNA, 2151 bp, Muscodor strobelii
  misc_feature: SGI cDNA ID NO. 566607
  misc_feature: Encodes the peptide sequence at SEQ ID NO 19629
atgtggtctgggaatcgggctaccagtcgggtggagtcatccgcttcaccaaccacaaccacatccaccggaaacaaaggtggccgaccgagagattggaccgagactcgcaaaaggaaactcatccgactatacatatacacagggctccctttcccaaagattctcaatctccttgaagaagatggcttcacgccgggaaaagatgcggccaataaggtgaagaatggcgcgctcggtaacgatccgcgatggatgcgaccaaaagacgaggaagaggaaaagagtcgagttcgaggattgcgacatagtcttcgtggtagacatggccgtaaatgcacaccccatcaggacgccgtcaagatggagcccgatgcatcgtcgacacattaccacgaagacggttctctaggagatgctccgctattcggttacccgtcaaatggcaattggttcggcgccagcgcaaatgtgattccagcaaatcatcatgacgatgctatggatttcactttcaaccgcctcagtcgtcgagacacatcacgtcaaggcacgggtctcacaacgtcgaccgatatcagcgtcagcagtgttatcaaagaaaaactggccgatttcaccgaggctcgacagaagctcgtcgccaaagttttcaagcgatacacgtttccaaaaaacgccgaatcatcgcccgtcacaccaaatctgggtccgccgatggacgacgacgatagcaatgaccaaacagatgccggacatgctattccaggtgacttcctaagatattcattgcaacatcgccagcgagattgtgctcgttacaatatccatcatgcagacggcgtttgctggtgccgcattgctgatgaagtgttgccgacacaggaagtatggaatgcgcacaccttccctcacgatcttggcgtcaaggatacgttcggtaatactgcatttcatcacatggcagctctcgacacttatcacgactctcttctccacaatgtttatcaggctctgcaagaccccgactcgaccgttcacgacagaaatacagcagggcaaacgtttcttcatgtacttcacagctcatggtttcgacctggctcgagactggacgatctagtcaaaactttacaagcgacgaacttcgacattctagccactgacgtctatggccgtagtttctaccacttactgcggctccatcaatcaggctctgcccgattcccgtccagtcagatactcgaccacagacgcatgaaccgtcgtgacgcatttggtatgcggcctatggacacgagagcttccaggaacatcgatcccactgcaggcttctctccaaagatggagaggactgataccacaagcacattgggctccatgcgtggaatcaagaggatgccaacgattcacactcaattccagacgccccaagaaaaagaatggaggacaaacgccgacttgttacgcatagtcaatagctcgatcaatgtcgatgctgacagtctcaagaattccccacaagaaacttctctcggacagaatgggtttcactgccttgcagaagcgagaatgaatctgtctctgactgaaaacagcgcaacggcttcaccagatactcctacgtcaaaatcaaaggatcaaactaaacgaaagcaccgagagtcagaggaagttgacacgcctcagacgcgcaaacgggatgggtatctacgcagtcttatcaattctggcgtcgacgtgaatcagtatgacgcgaatggcaatacccctcttatggctttcgtcgtcaacagttccgatgctactaagtgggaaaaggaggacggtgaaaacgtcatcaagatcctcgtccgagaggcacatgcgaatatggagctgcgaaatcgacatggtgagacagctcttcacctcgccgccaaggccggaaagcccattgcactacggaccttgcttgatcttggtgccaatccgcataccagaaacagccagggtctcggggttctggaggttgttgatcggctatatctgacttccgagcgtgatgacaagagcaatgccaggtttgaagcttgccgtgcggtcctcactcgcaacgaccagtgcgcgaaacagaaccctacgattctcgacgaatggtcactcagatga

SEQ ID NO: 19629 - protein, 716 aa, Muscodor strobelii
  misc_feature: SGI Peptide ID NO. 566607
  misc_feature (631)..(663): Pfam Id: PF00023 Pfam Desc: Ankyrin repeat
  misc_feature (587)..(630): Pfam Id: PF00023 Pfam Desc: Ankyrin repeat
  misc_feature (13)..(715): NCBI GI: 46109410 Blast Desc: FG01587.1 [Gibberella zeae PH-1]
  misc_feature (13)..(713): NCBI GI: 256730550 Blast Desc: NECHADRAFT_29800 [Nectria haematococca mpVI 77-13-4]
  misc_feature (250)..(713): NCBI GI: 171689674 Blast Desc: protein product [Podospora anserina] gi|170944799|emb|CAP70911.1| protein product [Podospora anserina]
  misc_feature (15)..(697): NCBI GI: 116205201 Blast Desc: CHGG_10484 [Chaetomium globosum CBS 148.51] gi|88176612|gb|EAQ84080.1| CHGG_10484 [Chaetomium globosum CBS 148.51]
  misc_feature (199)..(716): NCBI GI: 39942424 Blast Desc: MGG_03292 [Magnaporthe grisea 70-15] gi|145015702|gb|EDK00192.1| MGG_03292 [Magnaporthe grisea 70-15]
  misc_feature (567)..(716): NCBI GI: 261356919 Blast Desc: conserved [Verticillium albo-atrum VaMs.102]
  misc_feature (252)..(536): NCBI GI: 85110053 Blast Desc: NCU09490 [Neurospora crassa OR74A] gi|28924883|gb|EAA33978.1| [Neurospora crassa OR74A]
  misc_feature (252)..(536): NCBI GI: 38524263 Blast Desc: [Neurospora crassa]
  misc_feature (244)..(715): NCBI GI: 154296232 Blast Desc: BC1G_12943 [Botryotinia fuckeliana B05.10] gi|150843507|gb|EDN18700.1| BC1G_12943 [Botryotinia fuckeliana B05.10]
  misc_feature (26)..(103): NCBI GI: 39942424 Blast Desc: MGG_03292 [Magnaporthe grisea 70-15] gi|145015702|gb|EDK00192.1| MGG_03292 [Magnaporthe grisea 70-15]
MWSGNRATSRVESSASPTTTTSTGNKGGRPRDWTETRKRKLIRLYIYTGLPFPKILNLLEEDGFTPGKDAANKVKNGALGNDPRWMRPKDEEEEKSRVRGLRHSLRGRHGRKCTPHQDAVKMEPDASSTHYHEDGSLGDAPLFGYPSNGNWFGASANVIPANHHDDAMDFTFNRLSRRDTSRQGTGLTTSTDISVSSVIKEKLADFTEARQKLVAKVFKRYTFPKNAESSPVTPNLGPPMDDDDSNDQTDAGHAIPGDFLRYSLQHRQRDCARYNIHHADGVCWCRIADEVLPTQEVWNAHTFPHDLGVKDTFGNTAFHHMAALDTYHDSLLHNVYQALQDPDSTVHDRNTAGQTFLHVLHSSWFRPGSRLDDLVKTLQATNFDILATDVYGRSFYHLLRLHQSGSARFPSSQILDHRRMNRRDAFGMRPMDTRASRNIDPTAGFSPKMERTDTTSTLGSMRGIKRMPTIHTQFQTPQEKEWRTNADLLRIVNSSINVDADSLKNSPQETSLGQNGFHCLAEARMNLSLTENSATASPDTPTSKSKDQTKRKHRESEEVDTPQTRKRDGYLRSLINSGVDVNQYDANGNTPLMAFVVNSSDATKWEKEDGENVIKILVREAHANMELRNRHGETALHLAAKAGKPIALRTLLDLGANPHTRNSQGLGVLEVVDRLYLTSERDDKSNARFEACRAVLTRNDQCAKQNPTILDEWSLR

SEQ ID NO: 19630 - DNA, 2813 bp, Muscodor strobelii; identical to SEQ ID NO: 19627
  misc_feature: SGI EST ID NO. CUFF.45931.1
  misc_feature: Variant of the nucleotide sequence at SEQ ID NO 19628

SEQ ID NO: 19631 - DNA, 573 bp, Muscodor strobelii
  misc_feature: SGI cDNA ID NO. 566608
  misc_feature: Encodes the peptide sequence at SEQ ID NO 19632
atgcatcgcctcaacatcacgagaatgggccgattggccatgcgcagtcttgcgacgcgccccgccaccgttgttgggtcgaggagtatctcatccgcaagaatcggagcttcgcagcgtcaacttcgaagcaccttctcaacaagctcatatctagccaagccgctgtctgccgccgatctgaagacagcccagccggctaatatgaccgacaacgagtatcatgagctagccgactattatctagagcaactcttcagccgtttcgagcgaaaatcggaggagagcattgcttatgaagtcgactacagctccggtgtcatgaatattaccatcgataagaagggcacatacgtcatcaataaacagcccccgaacaagcaaatttggctctcatcaccgatctcaggcccgaagcgctacgactgggtggtcattagtgagggccaggaccagaagcaagacacggctaccggtgactgggtctatatgcgcgatggatcaacactgaatgacttactgagggaggagacggatgtggatatggactcgttcccggccggcacgatctag
